United States Patent Application Publication US 2026/0242817 A1 - sequence listing, part 5

SEQ ID NO: 16429 - protein, 334 aa, Zea mays
  VARIANT 246: note = Ancestral polymorphism is R, Derived polymorphism is M
  VARIANT 204: note = Ancestral polymorphism is P, Derived polymorphism is T
  VARIANT 74: note = Ancestral polymorphism is V, Derived polymorphism is I
  VARIANT 71: note = Ancestral polymorphism is R, Derived polymorphism is C
  VARIANT 59: note = Ancestral polymorphism is W, Derived polymorphism is R
  VARIANT 50: note = Ancestral polymorphism is R, Derived polymorphism is W
  VARIANT 40: note = Ancestral polymorphism is S, Derived polymorphism is C
  VARIANT 33: note = Ancestral polymorphism is A, Derived polymorphism is V
  VARIANT 20: note = Ancestral polymorphism is L, Derived polymorphism is R
  VARIANT 14: note = Ancestral polymorphism is R, Derived polymorphism is C
  VARIANT 8: note = Ancestral polymorphism is P, Derived polymorphism is L
  VARIANT 4..334: note = Derived polymorphism lacks residues 4 to 334
MASWLSLPADLVNRIADLLLATDDLDCYMDLRAVCRGWRSSTADPKNMPRDPRFRPRQWAMLDEVHQSDARLFVNVATGRFVRRDLPLFRRYDVVAGAAGDLVVLAERTAPYTARILNPFTGAMISFDAPMPCLYDPAAHVIGSLPTLVFISKDDSRTIYWANPDSKSFVDTSLIFWSGCLSNVGSTLLHRRVDRWIRTSLLRTSFSISKATCLHGVDVFKIDTGSGLLDRVKNLGSRAIFVGERRCLAVDADKFASVEANCIYYVMDEPWYDVCVYRLKDETGVRAGGAIDSFNSSFLCDDPPFSDVQLLCYYTFEVWKMFPQLQLNCFFSQT

SEQ ID NO: 16430 - protein, 305 aa, Zea mays
  VARIANT 280..305: note = Derived polymorphism lacks residues 280 to 305
  VARIANT 208..305: note = Derived polymorphism lacks residues 208 to 305
  VARIANT 193: note = Ancestral polymorphism is D, Derived polymorphism is N
  VARIANT 166: note = Ancestral polymorphism is C, Derived polymorphism is Y
  VARIANT 91: note = Ancestral polymorphism is I, Derived polymorphism is T
  VARIANT 70: note = Ancestral polymorphism is P, Derived polymorphism is L
  VARIANT 62: note = Ancestral polymorphism is G, Derived polymorphism is S
  VARIANT 52: note = Ancestral polymorphism is H, Derived polymorphism is P
  VARIANT 7..305: note = Derived polymorphism lacks residues 7 to 305
MLDEVHQSDARLFVNAGTGRFVRRDLPLLRRYNVVASAAGGLVVLAERSAPHAARVLNPFTGAMISFVAPVPCLYDPAAHLIGSLPTLVFISKDDSPTIYWADPDSKSFVEDNEGHFTHLLVRLPFERRVYPTTLQGWLFDPSFVIDFFNHHFDGNAECPLVNKRCFQVESAGEMLAVYLCLHGHGVDVFKIDTGSDLLDRVNNLGSRAIFVGERRCLAVDADKFASVEANCIYYVRKETSWYDVSLYRLKDETGVRAVGAIYSFGSSFLSDDPPFSDVQLLCYYTFEVRKMFPQLQQDCFFSES

SEQ ID NO: 16431 - protein, 145 aa, Zea mays
  VARIANT 25: note = Ancestral polymorphism is F, Derived polymorphism is I
  VARIANT 27: note = Ancestral polymorphism is Y, Derived polymorphism is N
  VARIANT 30: note = Ancestral polymorphism is R, Derived polymorphism is Q
  VARIANT 31: note = Ancestral polymorphism is C, Derived polymorphism is R
  VARIANT 35: note = Ancestral polymorphism is W, Derived polymorphism is C
  VARIANT 40..145: note = Derived polymorphism lacks residues 40 to 145
  VARIANT 51: note = Ancestral polymorphism is G, Derived polymorphism is R
  VARIANT 63: note = Ancestral polymorphism is R, Derived polymorphism is H
  VARIANT 75: note = Ancestral polymorphism is S, Derived polymorphism is P
  VARIANT 84..145: note = Derived polymorphism lacks residues 84 to 145
  VARIANT 95: note = Ancestral polymorphism is P, Derived polymorphism is L
  VARIANT 118..145: note = Derived polymorphism lacks residues 118 to 145
  VARIANT 130: note = Ancestral polymorphism is S, Derived polymorphism is R
MTSSFLATTLPILISPFYGVSMQKFQYLLRCLKLWARKRGLDCHLLGFFAGIHLAILAAYVCRRHPNASINTLLSLFFDIFVHWLWPLPVSLLDPPVLCGGPDGCSLMPIMLPCIPPEFCSSSTTESTFSKIKEELRRGYALSKV

SEQ ID NO: 16432 - protein, 220 aa, Zea mays
  VARIANT 29: note = Ancestral polymorphism is A, Derived polymorphism is D
MDLSVVPSLSLSPRRALPLPARRAARRPAFVCRCSCSLDASPVATRRLFASLLATAAAVGVGVAGGGGEAGAVSTSRRALRASKIPESEFTTLPNGLKYYDIKVGSGAEAVKGSRVAVHYVAKWKGITFMTSRQGLGVGGGTPYGFDVGNSERGNVLKGLDLGVEGMKVGGQRLIIVPPELAYGKKGVQEIPPNATIELDVELLSIKQSPFGTPVKIVEG

SEQ ID NO: 16433 - protein, 302 aa, Zea mays
  VARIANT 130: note = Ancestral polymorphism is P, Derived polymorphism is L
  VARIANT 128: note = Ancestral polymorphism is V, Derived polymorphism is L
  VARIANT 111: note = Ancestral polymorphism is P, Derived polymorphism is Q
  VARIANT 100: note = Ancestral polymorphism is G, Derived polymorphism is A
  VARIANT 96: note = Ancestral polymorphism is A, Derived polymorphism is V
  VARIANT 74: note = Ancestral polymorphism is V, Derived polymorphism is I
  VARIANT 59: note = Ancestral polymorphism is W, Derived polymorphism is R
  VARIANT 58: note = Ancestral polymorphism is Q, Derived polymorphism is H
  VARIANT 55: note = Ancestral polymorphism is R, Derived polymorphism is W
  VARIANT 50: note = Ancestral polymorphism is R, Derived polymorphism is W
  VARIANT 46: note = Ancestral polymorphism is K, Derived polymorphism is N
  VARIANT 33: note = Ancestral polymorphism is A, Derived polymorphism is V
  VARIANT 20: note = Ancestral polymorphism is L, Derived polymorphism is R
MASWSSLPADLVNRIADLLLATDDLDCYMDLRAVCRGWRCSTADPKNMPRDPRFRPRQWAMLDEVHQSDARLFVNVATGRFVRRDLPLLRRYDVVAGAAGGLVVLAERTAPYTARILNPFTGAMISFVAPVPCLYDPAAHVIGSLPTLVFISKDDSPTIYWADPDSKMESAEEMLVVVFERLHGVDVFKINTRSCLLERVKNLGSRAIFVGEHRCLAVDADKFASVEANCIYYVMDEPWYDVCVYRLKDETGVRAGGAIDSFSSSFLCDDTPFSDVQLLCYYTFEVRKMFPHLQLNCFFSQT

SEQ ID NO: 16434 - protein, 537 aa, Zea mays
  VARIANT 202: note = Ancestral polymorphism is I, Derived polymorphism is V
MLRSALFRSAPGLRRSPATAHLSTAAAAAAAWLSNGPASAPSRVRLLIGGEFVESRADEHVDVTNPATQEVVSRIPLTTADEFKAAVDAARTAFPGWRNTPVTTRQRVMFKFQELIRANMDKLAENITTEQGKTLKDAWGDVFRGLEVVEHACGMGTLQMGEYVSNVSNGIDTFSIREPLGVCAGICPFNFPAMIPLWMFPIAVTCGNTFVLKPSEKDPGAAMMLAELAMEAGLPKGVLNIVHGTNDVVNNICDDEDIKAVSFVGSNTAGMHIYSRASAAGKRVQCNMGAKNHAIILPDADRDATLNALIAAGFGAAGQRCMALSTAVFVGGSESWEDELVKRASGLVVSSGMVNDADLGPVISRQAKDRICKLVQSGVDSGARILLDGRKIVVPRYEDGNFVGPTILADVKSDMECYKEEIFGPVLLLMKAESLEDAIQIINRNKYGNGASIFTTSGVSARKFQTDIEAGQVGINVPIPVPLPFFSFTGSKASFAGDLNFYGKAGVQFFTQIKTITQQWKESPVQRVSLSMPTSQK

SEQ ID NO: 16435 - protein, 334 aa, Zea mays
  VARIANT 197: note = Ancestral polymorphism is G, Derived polymorphism is V
  VARIANT 146: note = Ancestral polymorphism is S, Derived polymorphism is L
  VARIANT 79: note = Ancestral polymorphism is G, Derived polymorphism is R
  VARIANT 74: note = Ancestral polymorphism is V, Derived polymorphism is I
  VARIANT 59: note = Ancestral polymorphism is W, Derived polymorphism is G
  VARIANT 56: note = Ancestral polymorphism is P, Derived polymorphism is L
  VARIANT 40: note = Ancestral polymorphism is S, Derived polymorphism is C
  VARIANT 35: note = Ancestral polymorphism is C, Derived polymorphism is W
  VARIANT 33: note = Ancestral polymorphism is A, Derived polymorphism is T
  VARIANT 13: note = Ancestral polymorphism is N, Derived polymorphism is K
MADWSLLPSYLVNRIADRILATDDLDYYMDLRAVCRRWRSSTADPKSRPLDTRFRPCQWAMLDEVHQSDARLFVNAGTGRFVRRDLPLLRRYNVVASAAGGLVVLAERSFPHAARVLNPFTGAMISFGAPVPCLCDAAAHVIGDSLPTLILLPNDSRTVYWANSGSKRFRHYKRPHAARMQRPLARLANECSVLWPGEMLVVFKLPRRVDVFKIDTGRGLLERVNNLGSRALFLGDCKCLSVDADKFASVEANCIYYVVEELSYGFDVFVYSLKDRTEVRAGPAIDSIYPNTLSAGPPFSEVQLLCCYTYENGLTPGFFGELAWLASEVFELGH

SEQ ID NO: 16436 - protein, 176 aa, Zea mays
  VARIANT 3: note = Ancestral polymorphism is V, Derived polymorphism is A
  VARIANT 20: note = Ancestral polymorphism is D, Derived polymorphism is G
  VARIANT 39: note = Ancestral polymorphism is G, Derived polymorphism is R
  VARIANT 40: note = Ancestral polymorphism is D, Derived polymorphism is G
  VARIANT 44: note = Ancestral polymorphism is H, Derived polymorphism is R
  VARIANT 45: note = Ancestral polymorphism is E, Derived polymorphism is K
  VARIANT 64: note = Ancestral polymorphism is S, Derived polymorphism is L
  VARIANT 83: note = Ancestral polymorphism is R, Derived polymorphism is H
  VARIANT 96: note = Ancestral polymorphism is V, Derived polymorphism is I
  VARIANT 116: note = Ancestral polymorphism is P, Derived polymorphism is L
  VARIANT 130: note = Ancestral polymorphism is P, Derived polymorphism is H
  VARIANT 151: note = Ancestral polymorphism is T, Derived polymorphism is S
  VARIANT 156: note = Ancestral polymorphism is E, Derived polymorphism is D
MFVVFGNQQVTGLFEKYADGPLGFDTSKSADKYGVDYSGGLPGHKSNNASLTHECGESLNPSGSVRDGGDSSTRSGARRKRGRMILEDEDPLIYTVTQAFKTLLDAIKQSALQPHPVILPNLWTVMKQIPAFQREHIAHYYDYLCENPALSYAFLDMGLDDQMVCVSRYIKAHLFD

SEQ ID NO: 16437 - protein, 424 aa, Zea mays
  VARIANT 132: note = Ancestral polymorphism is P, Derived polymorphism is L
  VARIANT 242: note = Ancestral polymorphism is L, Derived polymorphism is S
  VARIANT 336: note = Ancestral polymorphism is S, Derived polymorphism is C
  VARIANT 343: note = Ancestral polymorphism is R, Derived polymorphism is W
MAKGRAHPSKRPTHQLLAAVLSVFVLLPLLVPAAATVAVAVAVAEGGGKQLAVGKDEGKLVSEGDAGGGGLVEENEFAGGFGSLDSMLQWAIGNSDPEKLKEGAADVQKLSADELLERRQEIKELMEKLKMPSDADLMKIAIDDLNNSSISLEDRQRALQELLVLVEPIDNANDLEKLGGLLPVIQELNNANEEIRTTSAWVLGTASQNNELVQNQILGYGALVRLVKMGYSTSTEEAAKALYAISSLIRNNVNGQEAFHSENGSAMLQHILVSNNIDVRLQKKAVFLVTDLADFQLNSGIAQLPFLSDRLFLKSIVDMLSRFDLDLHEKVVIIFSFINLCLRHSFISEAQIGKVLLAIKSLLKLSSTDVEDFEFYDLDSVLLRLGVQLEDLTPEDQKEFAVEVDALRREVQTLFQQKLKQAHS

SEQ ID NO: 16438 - protein, 185 aa, Zea mays
  VARIANT 115: note = Ancestral polymorphism is G, Derived polymorphism is E
  VARIANT 125: note = Ancestral polymorphism is L, Derived polymorphism is I
MEAAAATALPFAAAVPTAWRVRASPRTRRRSVAAKLERGLGKGVPTTNYVVPLDKATGMTRPLVEILRDLNKRVPDKIIDPDTNTVNWYHANRMLSFYAPGWCGEVRDVIYSENGTVTVVYRVILKGTDGEAYRDATGTAQLHEGRREDAVAAAEEAAFCKACARFGFGLYLYHQDDSHYDDHFH

SEQ ID NO: 16439 - protein, 205 aa, Zea mays
  VARIANT 39: note = Ancestral polymorphism is P, Derived polymorphism is L
  VARIANT 41: note = Ancestral polymorphism is G, Derived polymorphism is D
  VARIANT 50: note = Ancestral polymorphism is Y, Derived polymorphism is C
  VARIANT 52: note = Ancestral polymorphism is S, Derived polymorphism is P
  VARIANT 57: note = Ancestral polymorphism is V, Derived polymorphism is M
  VARIANT 60: note = Ancestral polymorphism is A, Derived polymorphism is V
  VARIANT 65: note = Ancestral polymorphism is G, Derived polymorphism is S
  VARIANT 70: note = Ancestral polymorphism is F, Derived polymorphism is S
  VARIANT 73: note = Ancestral polymorphism is P, Derived polymorphism is L
MAENPQLFGNGMPVPFYGEMFVLVRDGVEFHVDKIPSAPGGHVKTKGTIYLSNIRMVFVASKPVGNFFAFDMPLLFVHGEKFNQPIFHCNNISGFVEPVVPDNQNRALYSTHTFKILFKEGGCGTFVPLFLNLTASVRRYNEFEAQSAANMAPRVDPLQAVQTPVDDMMRHAYVDPNDPTKIYLQQPAPESQLRRRNYHGPADAN

SEQ ID NO: 16440 - protein, 381 aa, Zea mays
  VARIANT 333..381: note = Derived polymorphism lacks residues 333 to 381
  VARIANT 328..381: note = Derived polymorphism lacks residues 328 to 381
  VARIANT 305..381: note = Derived polymorphism lacks residues 305 to 381
  VARIANT 281: note = Ancestral polymorphism is F, Derived polymorphism is L
  VARIANT 261: note = Ancestral polymorphism is C, Derived polymorphism is R
  VARIANT 235: note = Ancestral polymorphism is A, Derived polymorphism is T
  VARIANT 152: note = Ancestral polymorphism is T, Derived polymorphism is M
MRGRVRPREGGGSAEGDAGAERDGRTVRHWELWTPTTSTPSMFCLRHPPVRAPSITQSLPPHHCSPPNPDLLPIIDASSPARDPPSSLYASASDETLAAVLDHLKPHTVGTFLPPRETTTSEILRPHLERRQLPLSVPPSSSPSPHAHVPTTLEFFGSRDRDCDPFTSLLEAIVAWNATIGCPRIRTKLAAAGLEPGLPLPAASTNGNGSAEDPPGASITGGAVWRGATKCEDLAVCHVRVLIKGWIWIPNAVVDVYTCHCGVSCVGSKFPAARAVANFFFYMINLLDGPSGGSEATSSAVKDLQSKLDVVTAECLTEKEMEYFSLSSVTSQLKEMVLALLDESDLDIASDAVEMIVDRDITMVFPSFVMHSEISETDMVV

SEQ ID NO: 16441 - protein, 35 aa, Zea mays
  VARIANT 9: note = Ancestral polymorphism is L, Derived polymorphism is H
MGTYYYNVLKVLGDPQKRAAYDQYGKEGLKAFADI

SEQ ID NO: 16442 - protein, 469 aa, Zea mays
  VARIANT 5: note = Ancestral polymorphism is A, Derived polymorphism is E
  VARIANT 17: note = Ancestral polymorphism is R, Derived polymorphism is C
  VARIANT 73: note = Ancestral polymorphism is R, Derived polymorphism is C
MLGAALRLRVRVLRRRRSHRGRRRGRRSLGRVGDDDDDEGGREPVLLVSGMGGSVLHARRRSNSKFDLRVWVRILFANLDFKKYLWSLYNADTGYVEPLDDDVEIVVPEDDHGLFAIDILDPSWFVELLHLSMVYHFHGMIDMLINCGYEKGTTLFGYGYDFRQSNRIDKAMAGLRAKLETAYKTSGGKKVNLISHSMGGLLVRCFMSMNHDVFTKYVNKWICIACPFQGAPGCINDSLLTGLQFVYGFESFFFVSRWAMHQLLVECPSIYEMLPNPEFKWKEKPIIQVWRKNPEKDGTVELVQYEATDCVSLFEEALRNNELTYNGKKVALPFNMSVFKWATKTRQILDNAELPDTVSFYNIYGTSYETPYDVCYGSESSPIGDLSEVCHTVPSYTYVDGDCTVPIESARADGFSAKERVGVKADHRGLLSDENVFKLLKKWLGVSEKKSEWRCVSKSYSKVGNWVAL

SEQ ID NO: 16443 - protein, 404 aa, Zea mays
  VARIANT 156: note = Ancestral polymorphism is D, Derived polymorphism is G
  VARIANT 45: note = Ancestral polymorphism is M, Derived polymorphism is K
MTSMSPPSAAGDDSDQILVEVNGFTRTLILNRPKQLNALSSTMIMGLLRCFTAYEKDDGVKLLIMKGKGRAFCAGGDVAAVVRSIHKDSWKYGADFFRNEFLLNYIIATYTKPQVSLLSGIVMGGGAGVSLHGRFRVATDNTVFAMPETALGLFPDIGASYFLSRLPGFYGEYVGLAGARLDGGEMLACGLATHFVQSNVGCVCASLITPSKYSVPQSLLSLEESLKKVDTSNAFAVCGIIDQFAQQPSLKESSSLNRLEIINKCFSKRTVEEIISALEVEASNSADEWVATTIQSLKKASPTSLKISLRSIREGRTQTVGECLQREYRMVCHVMRGDFSRDFFEGCRAILLDKDRNPKWMPPRLEQVHDEAVEQYFSRIDDPQWEDLNLPARRSHGRNIESKL

SEQ ID NO: 16444 - protein, 547 aa, Zea mays
  VARIANT 20: note = Ancestral polymorphism is R, Derived polymorphism is M
  VARIANT 58..547: note = Derived polymorphism lacks residues 58 to 547
  VARIANT 68..547: note = Derived polymorphism lacks residues 68 to 547
  VARIANT 150..547: note = Derived polymorphism lacks residues 150 to 547
  VARIANT 269..547: note = Derived polymorphism lacks residues 269 to 547
  VARIANT 375..547: note = Derived polymorphism lacks residues 375 to 547
MCTKLPIVLQSDTLTCFCLRILLGKLPDGNCKMSRDSILAAELPSAYSRFSWKGLSPRDLLCSFCRLQRLPEPHFDVSRVSCDTLMSALSSEERGAPAGSAENQYTNDVRINKEKPDLFKCEVNIRSRKQEILLEYSAADTWSKESNAIQNSSLKVLIWFNNYFKKLTSKTGKLYLSESTAGVKVHSNIFLQEFAMCLPVYGKNGGSYSAMCSAVGSFSMDTQKKHLESTAKLTRIEGPDSGVFPSHGSLTCISYTASLVTKDKAKTYLLESHNEFEFEIGTGAVSNQLESCVTQLSVNQTARFVAELPPRDLIMAASCEFSHDLSNVSSESCFLEFSVKVLQVTEPLEDRMEKALFSPPLSKQRVEFVVRHINELHVTTLVDFGCGSGSLLDSLLEHPTTLEKLVGVDISRKGLTRAAKSLHQKLSKKSTTQTNVPTDVLYDRSITDYDSRLYGFDIGTCLEVIEHVEEDQATLFGNVVLSSFRPTMLIVSTPTTNTILSSRGLLCPTRTTRQTKALVPASSAITTTSSSGPGYSPVLGYWPRGEA

SEQ ID NO: 16445 - protein, 65 aa, Zea mays
  VARIANT 38: note = Ancestral polymorphism is V, Derived polymorphism is I
MAAKFQHQRLLSNLQSWTTSCCIILQLPKGKRCWWQKVLGIKLKNRYRETSTSRQYHSQFSNQST

SEQ ID NO: 16446 - protein, 159 aa, Zea mays
  VARIANT 87: note = Ancestral polymorphism is R, Derived polymorphism is W
  VARIANT 71: note = Ancestral polymorphism is A, Derived polymorphism is V
  VARIANT 70: note = Ancestral polymorphism is A, Derived polymorphism is S
  VARIANT 66: note = Ancestral polymorphism is G, Derived polymorphism is R
  VARIANT 38: note = Ancestral polymorphism is A, Derived polymorphism is T
  VARIANT 23: note = Ancestral polymorphism is C, Derived polymorphism is Y
  VARIANT 12..159: note = Derived polymorphism lacks residues 12 to 159
  VARIANT 10..159: note = Derived polymorphism lacks residues 10 to 159
MFEQSQISAKEQVKLLVYTLESCTAGSENGQESVVWITDFRGWTLSSTPLAQSRQSMNIIQKHYPGLIAAAILFDPPKIFESFWKVRCSRMHYYTPTVSKFNNTFYSSGIGCLSNILNFNHELCLNQYNLDPVEIVTYHFINFRIVPLVARKVQKGARR

SEQ ID NO: 16447 - protein, 200 aa, Zea mays
  VARIANT 158: note = Ancestral polymorphism is K, Derived polymorphism is N
  VARIANT 142: note = Ancestral polymorphism is A, Derived polymorphism is V
  VARIANT 134: note = Ancestral polymorphism is I, Derived polymorphism is L
MNEDFLIIILRDLLPRRPDLRLVLMSATINAELFSKYFGDAPVMHILGFTFPVAELFLEDVLEKTCYRINSERDNFAGSSRRKRFSSVKSDPLSDVFEDIDITKEYGNYSSSTRQSLEAWSAAELDLSLVESTIEYICHYEAEGAILAFLIGWDEILKLLDKIKGNNFLGSPNRFLVLPLHGSMPTVNQREIFDRPPANM

SEQ ID NO: 16448 - protein, 242 aa, Zea mays
  VARIANT 147: note = Ancestral polymorphism is W, Derived polymorphism is C
  VARIANT 148: note = Ancestral polymorphism is S, Derived polymorphism is Y
  VARIANT 204: note = Ancestral polymorphism is W, Derived polymorphism is R
MSPLVLLLLAHLLATATAAGAARTRDDGPPAPSSSSPRVPATTPPWPDQFHAVVVTNLSARGGGLQLIDLYYDWPRGRDLNIVRDQLSGERRWSWNVEWSNGTAFLFDSASCRTFQFAVGLLPPDWKARGAAYLGRDRVDGFDCHVWSNFVFARYYEDVATGRPVSWNFNGMAAAACAELRGGGSAAGLLQVAGAGLLLHQHQWQQCRRRRFVFLRSRRWASGVRAPPAAGRCMSFGSRLSS

SEQ ID NO: 16449 - protein, 165 aa, Zea mays
  VARIANT 62: note = Ancestral polymorphism is A, Derived polymorphism is G
MAIAARVLRRLPLHLYPSLARSFCAVSPAAASAAPASASAAPASAKVADRIVRVLAIDLEGARREVVGLSGQTLLRALANAELIEPASHRLEDIDACSAECEVHIAQEWLDKLPPPSYEERYVLTRASRNRELNKHARLGCQVVLTPELHGMVVAVPEPKPWDIP

SEQ ID NO: 16450 - protein, 238 aa, Zea mays
  VARIANT 4: note = Ancestral polymorphism is P, Derived polymorphism is R
  VARIANT 49: note = Ancestral polymorphism is V, Derived polymorphism is L
MSPPPSSLVVLPLLLPLLLAAVSHATANAAGAGAPPPVPTPWPEQFHAVVFTNLTESGGRLQLIDLYYDWPRGRNLNLIRDQLSSDPLYDVEWTNGTSYFFDSGSCRTMRFPVGILPPDWLAAGAVYLGREHVDGFDCHLWTKVDFVWYYEEVATGRPVRWNFFNGMQQHVMSFEVGGVLEDSKWQAPPRCFSGGNADTANAAADGVHGEEAGSVDVMDSMIRFAVAPAAAVAASFDQ

SEQ ID NO: 16451 - protein, 595 aa, Zea mays
  VARIANT 46: note = Ancestral polymorphism is R, Derived polymorphism is S
MKMKWAHVLMSFFCFKLLIANPMGYEESKKHLLSLSYPELQCLCKRYNLPAKKTHSQLASSLASLLEASPSPAPPPVQLANMKEASTCNHANNKRGPYNGRDDGKPLVHAKHQKGDQTPVDETSKKGIDTGTSIPPVSMNHGRPEYHGHLSSDLRTAHNLQSQCDVGIATNTTNLEFVGKHDCSPANVIDQICPPIIQKYPSNGNGQASTKFGRMNDNTEKGCRLSDKISANAAAVQFSVMSDEGIDLLVDLNSSSATWAKNFMAEMHITPPSEHGNFSSFISSLSTKDDHSTASPSGNIIVDIQNKGAENIVPSTDSSLASDVGESSRSVLYPVDTTTVNSVSSTSTVAGTPVELSGYQEGAPVVCSSCLTADVQNNVTSDMPGASDNEVLPPEPADVFLQSERITAPAVCGSVQPIGNKCTMSSGDEVRSGSNEDSCPKSSGKQTGDETLMENEPVKAVAVEENIGRDDSLSISYQLACKTVAELPVTDAQSPASSSGHFIAGNFDNTHPTSSATSDNAINSLTSKFGAELAQSHDSTDKKGQNDAEEVEELESMTPAAYSEPPRNIQLSLRSASAKVKPSTLPRRSARLLPK

SEQ ID NO: 16452 - protein, 178 aa, Zea mays
  VARIANT 4: note = Ancestral polymorphism is S, Derived polymorphism is F
  VARIANT 14: note = Ancestral polymorphism is S, Derived polymorphism is F
  VARIANT 64: note = Ancestral polymorphism is A, Derived polymorphism is V
MTISLITTPKRTISLMNQGQATNTYILDQQIHYSGSTMMQTMMQKFYTKLKEKRKALEEEKLQAEAKKWCFKIPRTQDCVTIYESWRTTVGEWRDPWTQTQRRKGESLLNVVDVSYGGENLFNQAIELSAEILANVKFIQVKKLIGKNFEEISQDTGKYVFGVDDTLKALEMGAVETW

SEQ ID NO: 16453 - protein, 433 aa, Zea mays
  VARIANT 138: note = Ancestral polymorphism is V, Derived polymorphism is A
  VARIANT 71: note = Ancestral polymorphism is A, Derived polymorphism is V
  VARIANT 47: note = Ancestral polymorphism is P, Derived polymorphism is L
  VARIANT 46: note = Ancestral polymorphism is R, Derived polymorphism is W
  VARIANT 36: note = Ancestral polymorphism is N, Derived polymorphism is D
MAAAAGPYKEMLEVVNACAARIRWRLRPASKRRLLNDILFLCTGLRPVVLVDYGGTMPQLQENLCGLLYHARQLLTTIEENDTVLELVSIQDQFTAKFPLDLSDVRPGITKQMSGNPQSTVVAECTDNHVEDRTLLVVDLSSFLENTQIALPSLNGWLLGYPVTYLFRNASSEAAIQNLSRQSLHIYRVYVCGSYRSAGERREEELMRYPYVTGNSVIALKYKDGVIMACDTGASYGSTLRYKSVERIKAVGKHSIIGASGEFSDFQEILRYLDELTLSDHMWDDGNSLGPKEIHSYLTRVMYNRRNKFDPLWNSLVLGGVKKGPKGDEKYLGMVNMIGTHFEENHVATGFGNHMAIPILRAEWRDDMTFEEAVKLVEKCLVVLLYRDRSSINKFQIAKITSEGSTIYPPYSLKTYWGFTHFENPAQGAVGSW

SEQ ID NO: 16454 - protein, 135 aa, Zea mays
  VARIANT 25..135: note = Derived polymorphism lacks residues 25 to 135
  VARIANT 32: note = Ancestral polymorphism is M, Derived polymorphism is I
  VARIANT 55..135: note = Derived polymorphism lacks residues 55 to 135
  VARIANT 76: note = Ancestral polymorphism is P, Derived polymorphism is S
  VARIANT 78: note = Ancestral polymorphism is K, Derived polymorphism is N
  VARIANT 110..135: note = Derived polymorphism lacks residues 110 to 135
MQSLVSFSDFSVSVCTEENSLIKLQVHVSGTITDSIFKKVFTKNVAAAQPLPGFRRMKGGKTPDIPKEVALHLIGPSKVKKETIMKIINSTVVEYVRKEGLTASKNLSVQHSYEELEAAFEPGKELCFGATVRLD

SEQ ID NO: 16455 - protein, 165 aa, Zea mays
  VARIANT 139: note = Ancestral polymorphism is T, Derived polymorphism is I
  VARIANT 117: note = Ancestral polymorphism is T, Derived polymorphism is I
  VARIANT 100: note = Ancestral polymorphism is R, Derived polymorphism is S
  VARIANT 91: note = Ancestral polymorphism is T, Derived polymorphism is I
  VARIANT 81: note = Ancestral polymorphism is I, Derived polymorphism is V
  VARIANT 73: note = Ancestral polymorphism is G, Derived polymorphism is R
  VARIANT 58: note = Ancestral polymorphism is S, Derived polymorphism is Y
  VARIANT 43..165: note = Ancestral polymorphism lacks residues 43 to 165
  VARIANT 35: note = Ancestral polymorphism is P, Derived polymorphism is H
MESSVVGAIQRGELREVPDCSRHSAVETEVEGNVPVGGYAVRYNTFFLARLETSHIISVALYYYRIYTGDKRGDSGSDHTIFVGDLAHGVTDSMLEDVFRAKYPSVRGANVVVDRMTGWPKGYGFVRFGDLNEQARAMTEMNGMLLSTRQMRIGAAVNKKNRDAQ

SEQ ID NO: 16456 - protein, 60 aa, Zea mays
  VARIANT 33..60: note = Derived polymorphism lacks residues 33 to 60
  VARIANT 29: note = Ancestral polymorphism is H, Derived polymorphism is N
  VARIANT 26: note = Ancestral polymorphism is L, Derived polymorphism is S
  VARIANT 20: note = Ancestral polymorphism is Q, Derived polymorphism is K
  VARIANT 10: note = Ancestral polymorphism is N, Derived polymorphism is H
  VARIANT 6: note = Ancestral polymorphism is A, Derived polymorphism is T
  VARIANT 1: note = Ancestral polymorphism is M, Derived polymorphism is I
MRRGTTMVGNDGPTNLEKEQVSWRTLLLHFLFQFMYLLYIVFYNSGGSPIDVVVVGGCRM

SEQ ID NO: 16457 - protein, 336 aa, Zea mays
  VARIANT 45: note = Ancestral polymorphism is S, Derived polymorphism is L
  VARIANT 176: note = Ancestral polymorphism is L, Derived polymorphism is R
  VARIANT 201: note = Ancestral polymorphism is G, Derived polymorphism is R
  VARIANT 248: note = Ancestral polymorphism is R, Derived polymorphism is C
  VARIANT 254: note = Ancestral polymorphism is P, Derived polymorphism is L
  VARIANT 273: note = Ancestral polymorphism is L, Derived polymorphism is P
  VARIANT 274: note = Ancestral polymorphism is S, Derived polymorphism is L
MGGVGDDDHHGGSTDLGIASSNTRGKNLAVSRDQGAVQMPTIIVSVDLECSCCRAKIEKVLNRIQESQPLSRYKPGDWIEGVGGAKAGHFVLPEVTTLLLVGPRGSGKSTLVNRITRVFDKDDDPFAPDRAQVSCNSKSNGTMFLREYPIPRNSSVVCIYDTRGWSNNLEKNFKMLHQWMTKGISHGETTMWDDDEGNKIGNMKPLGRQYSFLRYKIRKVNFVIFVVDGVAVLESMDDSNKGYTEILRQTFMYPFLSIGDDKPVVVVTHGDRLLIQQRVHVQAELAELLDIPAQQIYDIPGSNDDQTDMVVLDMLHYCVQHAEQNLPVKLNYHLEV

SEQ ID NO: 16458 - protein, 130 aa, Zea mays
  VARIANT 42: note = Ancestral polymorphism is P, Derived polymorphism is A
MGRSRADHDRGCGCSAETRARGGARLREGAGRLAPGCVDALPRWLAAAQAREHAAGEAQSCASSGEAEARRAARVAGAGRCAKLQWHVREKHATLPQHCAGQTSVHRERKGWASSGTTTTTTALQIWASV

SEQ ID NO: 16459 - protein, 84 aa, Zea mays
  VARIANT 4: note = Ancestral polymorphism is S, Derived polymorphism is L
MALSSRQLAAALVAVLVALAFLTACASAARPAPAASGGGGGEEEEATATTTPAYLRQVYPAVVETVEMLLARLPAGPSPKGPGH

SEQ ID NO: 16460 - protein, 246 aa, Zea mays
  VARIANT 20..246: note = Derived polymorphism lacks residues 20 to 246
  VARIANT 60..246: note = Derived polymorphism lacks residues 60 to 246
MQFHLFFVLFLTIYLFNLWQYLRKIKLFGYKVFLIYAVPLGLGITWVVAFVLTATGVYSYKGCDANIPASNNVSAFCQKHWGTPVFSWKMGLVMCVVSVIASVDSVGSYHASSLFVATRPPTSGVVSRGIGVEGVSTVLAGLWGTGVGSATITENVHTIVVTKMGSRRAVGFSAILLVLLSIVGKVDAFIASIHDVMVAALLCFMWAMLCALGLSNLRYRATGSSRNSIIVGLALFLSLSVPSYFQ

SEQ ID NO: 16461 - protein, 290 aa, Zea mays
  VARIANT 266: note = Ancestral polymorphism is V, Derived polymorphism is I
MDDLLSPCSSFSPPSPPSFFSHAVHPVIEFASCEVPEQWLLDDLVVAKNEGYDDVDDLWPVRSSLSPDSEVSEQPLPPQPPPPSQQELTSVRAAPAQQQQRLGKRRGRKPGPRPDGPAVSHVESERQRREKLNRRFCDLRAAVPTVSRMDKASLLADAASYIAELRGRVARLEADSRRAAASRWDPAVAAAASASTATIGLAGAGGGADEAVEVRMLGPDAAAVRATSAGPHAPARLMGALRSLELHVQHACVTRVNGVTVLDVVVDVATPLQDDDGGLRATLLQMMQDS

SEQ ID NO: 16462 - protein, 341 aa, Zea mays
  VARIANT 31: note = Ancestral polymorphism is S, Derived polymorphism is W
  VARIANT 124..341: note = Derived polymorphism lacks residues 124 to 341
  VARIANT 149: note = Ancestral polymorphism is D, Derived polymorphism is V
  VARIANT 266: note = Ancestral polymorphism is S, Derived polymorphism is P
  VARIANT 295: note = Ancestral polymorphism is Y, Derived polymorphism is S
  VARIANT 305: note = Ancestral polymorphism is F, Derived polymorphism is S
MKQLMWSNDGNHADEESCTLFLCSISLREYSRSRTSALEHLKKKSAKDLPAKSSDVVETKRVEALVPSSVGTVVTAELEDNGHRASGEWHGDNVQVIGQQQKIYIIKVPKFAGDDLWNKIQAAQAHLDHLTQERDAINRRRQKQKDVCDQYREKLEAARREKWEARTALGDKKNDLNNVRSVLGKLHQANSVEELDELVLKKDYDVLLTNLKFLEENTRKIQKYLEDERTALRKLKRNTEQLMKYVKRPTLNGLSLDQSPPRRYRPLVVAVLVHLVQVEKIPGYMERKNEYFFRYRDDRNAAEIFRANGDINGLKSHCNSQLKVIGDGGDPNGHYDKDDHQ

SEQ ID NO: 16463 - protein, 472 aa, Zea mays
  VARIANT 98: note = Ancestral polymorphism is L, Derived polymorphism is V
MARPSDQSVHVLLLPFPTQGHINPLLQFGKRLAGRAGVRCTLAATRFVVSSTKPTPSSVHVAVISDGCDEGGPAEVGGMGARYFERLESAGSETLDELLRSESALGRPVHVVVYDAFAPWAQRVARRRGAACAAFLTQTCAVDIVYAHAWAGRVPVPPLPLRPEEARGLALAGLSTQLEVDDMPTFLGDTRFPPCFRELLMNQFLGLDTADHVLVNSFYDLEPQEADYLASTWRAKMVGPTVPSAFLDNRLPDDVSYGIHLHAPMAAESKAWLDAQQAGSVLYVSFGSMASLSPEQMGEIAEGLYGSGKPFLWVVRATEAAKVPKGFADRAQATRGLLVSWCPQLEVLAHPAVGCFFTHCGWNSTVEALSAGVPMVAMPDWSDQTTNAKYIQDVWRVGVRVRPDGRGVVRSEEVERCVRDVMEGEMGEEFRARASHWSSKARKAMGEGGSSDVAISNFLSCFGHSAHVTAAN

SEQ ID NO: 16464 - protein, 502 aa, Zea mays
  VARIANT 440: note = Ancestral polymorphism is G, Derived polymorphism is E
  VARIANT 201: note = Ancestral polymorphism is L, Derived polymorphism is I
  VARIANT 48: note = Ancestral polymorphism is V, Derived polymorphism is M
  VARIANT 39: note = Ancestral polymorphism is R, Derived polymorphism is W
MATGRPVRLVLDASLLLDPSSTREAAAVALRPGVEELLRRLRYSNLSVAICYAEGMPTNESDFLEKVASSHLFGSIVLLAKSGNLSPIELMIEWSRTSFCFYATSRVDKGLISELQNQNWRVLSVANECSIEVPGVLNVQRLQELLLTLATLMKKELCGSSVLVIGYIMKKSREEDFAKRGAFPIYPSKGSLIFVPLSFEIPLSLQLQEVDMVLHKITDEIVKIDPNCSIDFPKGISFSAGMSEIIRFVEEHPDFCIMDPFKNIYPLLDRLQIQKILVRLQELGTEGKPKLRAPYSCKVDSFHNGELDKHLVEANLSFPLIVKPQVACGVADAHNMALVFQIEEFSNLSVPLPAVLQEYVDHGSKIFKFYVIGDKVFYAVRDSMPNARFLKPSSGGEALTFNSLKTLPVATNEQRPQTGAEDGKLLDADLVEEAAKFLKGLLGLTVFGFDVVVQEGTGDHVIVDLNYLPSFKEVPDSEAVPAFWDAVRQAYESTRGNANAQG

SEQ ID NO: 16465 - protein, 110 aa, Zea mays
  VARIANT 27: note = Ancestral polymorphism is E, Derived polymorphism is K
MSMEGLIPFVCGAISKRRAAKRAVDYERLSSAGAPPTRGWGHERLPGGAYDHPRSQSCRFAARSSPDERGFSRDEGVRDEPSPPGGDGWRGLSKSRRFSSMRLFGCVSGA

SEQ ID NO: 16466 - protein, 308 aa, Zea mays
  VARIANT 82..308: note = Derived polymorphism lacks residues 82 to 308
  VARIANT 121..308: note = Derived polymorphism lacks residues 121 to 308
  VARIANT 133..308: note = Ancestral polymorphism lacks residues 133 to 308
  VARIANT 197..308: note = Derived polymorphism lacks residues 197 to 308
  VARIANT 205..308: note = Derived polymorphism lacks residues 205 to 308
  VARIANT 207..308: note = Derived polymorphism lacks residues 207 to 308
  VARIANT 210..308: note = Derived polymorphism lacks residues 210 to 308
  VARIANT 238..308: note = Derived polymorphism lacks residues 238 to 308
  VARIANT 240: note = Ancestral polymorphism is S, Derived polymorphism is F
MGFLDVVKPKVASAALVDDAAGLEACKVEPDLEESGVAFGAGAAPPPALASKKKRVVGMSSKNLMAERRRRKRLNGRLSMLQSVVPKINKMDWTSILGDTIDYMKELLERIKLLQEEIGQQQQEASGMLSVFYELNPNEMVARNTPRREMSYGGNLMLWNSKKSLDFHSRIIWLGGLSYLMALSYCSAKALVKMHNWKQLLEKDQLQIEQRCECVFQGWKEGMIYFPPTYKYSFNSDCYSGVRPKENRRTRAITFCGLLQSSYICEESRFSDHRPVYNLFMAKVESARHRRSNLTLIMISGAEGIVID

SEQ ID NO: 16467 - protein, 947 aa, Zea mays
  VARIANT 72..947: note = Derived polymorphism lacks residues 72 to 947
MEATAVSLARSVLDGVLSSAGSSLADEVARLIGVPKEVDFIRNELEMMQAFLKVASTVYPEATVRNDIVKTWVKQVRYLACDVEDCLLDFALYADRRSSSRLGAWLPSAIAERRRIAGRIRDLKASVEALNQRNQRYQIAAGPGAGAHHHQSPALHEHYEHSAELAFQVSDIIGRDDDINAVAKMLLSRNNGALRVLSVWGMGGMGKSSLARMVHNDSDVLAEFDCRAWITVPHPLDNPDVFKRRLKEELAVPNGLKIEDHLGDKRYLVVVDDLLSQDEWENVWQAFQFSNKMDSRIIVTTRLKLKDVARHCAGPRNVAEELIYDYELKPLDSKESKRLLCQKVFKTTDYNLPSDMEDQARHILRRCCGLPLAISTIGGLLANRPRTSIEWRNLHEHLGAELETDLNNITKVIMSSYDGLPYHLKPIFLYLSIFPENHEIRRTRLLRRWMAEGYIAKKRDMPVEVVGEHFYNDLINRSMIQGSMASYAVRADRCSVHSMVRKIILSKFIEENQLLLIEKHSNEIPQSKIRHLVVSRWKGRDEELRRINLSYVRSLTIFGDYPASLVSPKLRLLRVLDLEDTINLKNSDLKHIGELRHLRYICLRGTNISKLPSSLQNLRYLETLDIQDTQVTQLPRGISKLEKLCYLLVGVNFSKDLLGKMELVKNHKASLLTCLCCNKGECCKVFNSSVRAPEGIEKLQNLHMLGVVNVGNGNGVAGRLKKLTNLTNLRRLGVEGLTEKEGKDLCQSIGELRRLQRLEVRSDSLTFLAKMGESQVPAHLVSLRLCGNLSSLPDWIGSLNDLGKVKLLGTQLKHKDIVHLQNLRNLTLLGLWENSYIGDSLHFCTGTFLKLKFLDIDGLEKIEKVSVEKGAMPELKKLWVNKCPKLQDNSSGLFAVPHLPILNELLLKKCGDKENLTKILQRQISDHHKRPRFLIDKSIMPTSPYAQ

SEQ ID NO: 16468 - protein, 123 aa, Zea mays
  VARIANT 38: note = Ancestral polymorphism is F, Derived polymorphism is L
MAHPMPPLSASQSTITTVLKILPKPPAAPESRSNNCAFGAKFDSRRALLCGLVAAAAAAGTMLGADIAGAASKRRPPPPAPAEAKKDPNVSGVQAKVLASRKRKEAMKEAVAKLREKGKPVDK

SEQ ID NO: 16469 - protein, 88 aa, Zea mays
  VARIANT 53..88: note = Derived polymorphism lacks residues 53 to 88
MEELGSRSYKAHKNNIKKPTRGCQTSTKGEQEQEGFRAKLKNYLAHNQSYKAQKNDIKKPSTTARPPPRGVRASFSLLFKYARSEFEN

SEQ ID NO: 16470 - protein, 128 aa, Zea mays
  VARIANT 16: note = Ancestral polymorphism is G, Derived polymorphism is D
  VARIANT 61: note = Ancestral polymorphism is G, Derived polymorphism is R
  VARIANT 97: note = Ancestral polymorphism is L, Derived polymorphism is P
MSLSPVVLRATTANDGNCAPPPPPAAVLPAPHMVRCAVAAAHEQLPPARKDGSGDNEVGVGLVLNFSSTHAVPSARHLATVFSRFGPVKESGQTTLPLWWSSTVQCATNGWKAERNNQTSGQSSKFVW

SEQ ID NO: 16471 - protein, 630 aa, Zea mays
  VARIANT 343..630: note = Derived polymorphism lacks residues 343 to 630
  VARIANT 429..630: note = Derived polymorphism lacks residues 429 to 630
  VARIANT 466: note = Ancestral polymorphism is E, Derived polymorphism is V
MASQVAGSTPAVAALGFLLPTFWEIEVTCAAAMILVALYVAYELLNPRSSQAAAAGDADELLVRGLDGADKFKGGVSGPSAYVVKLELLAAKNLMAANLNGTSDPYALITCGAEKRFSSMVPGSRNPMWGEEFNFFVDSLPVKINVTIYDWDIVWKSTILGSFTVTVESEVPSGPIWHTLDSTSGQVCLHIKVIKVHESSSRAINSSAEAGARRRISLDKQGPTVVHQKPGPLQTIFELPPDEVGNYYNFSHSCIYLIPIAPTCKSCCSLVLFFFQVVDHSYSCALERSFLYHGRMYVSSWHICFHSNVFSKQIKVVIPLRDIDEIRRSQHAVINPAITIFLRMGAGGFGVPPLGCPDGRVRYKFASFWNRNHTFRALHRAMKNFVMMIDAEKQERAQSALRAHSSSRKNSKKEINVPEDCAALTGKLQPFVKEEVLVPVFNGTFPCTAEQFFSILLSDDSNYITEYRTDRKDKDINLGQWHVADEYDGQVRELNCKSICHSPMCPPYSAMTEWQHIVLSADKMDLVFETVQQVHDVPFGSFFEVHCRWCVKTISSNSCSLNISAGAHFKKWCIMQSKIKSGAVDELKKEVKVMLDFAQGYMLKVSSPDQENSNLAQQDNTAPDAPSDTG

SEQ ID NO: 16472 - protein, 78 aa, Zea mays
  VARIANT 2: note = Ancestral polymorphism is E, Derived polymorphism is G
  VARIANT 27..78: note = Derived polymorphism lacks residues 27 to 78
  VARIANT 33: note = Ancestral polymorphism is G, Derived polymorphism is C
  VARIANT 49: note = Ancestral polymorphism is L, Derived polymorphism is I
MEKTVDINEGSHFLKDLEMLGSVTGEQIPNLVGETSPGFQMGSNTLEKLGLYMKNDEDDEDGDFTDEPVSDVEEGEID

SEQ ID NO: 16473 - protein, 160 aa, Zea mays
  VARIANT 81..160: note = Derived polymorphism lacks residues 81 to 160
  VARIANT 25..160: note = Derived polymorphism lacks residues 25 to 160
MWKGVIVAYVVIAACYLPVALVGYWAFGNDVDENILITLNRSRWLIAAANMMVVVHVVGSYQVYAMSVFDMIETMLVRKYWFTPGFSSVSLPGLSTLLPCIMWLIIYKPRRFSLSWLTNWICIVIGVLLMVLSPIGGLRQMILKIKTYKFYQDYSGLSHN

SEQ ID NO: 16474 - protein, 337 aa, Zea mays
  VARIANT 94: note = Ancestral polymorphism is D, Derived polymorphism is Y
MRMLSKACSIVASSLPRCSSSAAAPTMRGQPSLLPSVRKQWPGKPLLYGIGTLLVMPLRTLYGVGRVFGAGRFLCNMTNVSSSLQIELVPCLRDNYAYILHDVDTGTVGVVDPSEAMPIINALEKRNQNLTYILNTHHHYDHTGGNLELKAKYGAKVIGSEKDKDRIPGIDITLKEGDTWMFAGHQVLVLETPGHTTGHVCYYFAGSGAIFTGDTLFNLSCGKLFEGTPQQMYASLQKITALPDDTKVYCGHEYTLSNAKFALSVEPGNKALQEYAANAAELRNKNIPTVPTTIGREKECNPFLRTSNPEIKRTLSVPDHFDEDRVLGVVRRAKDNF

SEQ ID NO: 16475 - protein, 947 aa, Zea mays
  VARIANT 307: note = Ancestral polymorphism is F, Derived polymorphism is C
MSSEPLPAESPEAPASASGSPSKDAVGTEVGAAAGSPETNTLWVGNLPSHVTEGDLLALFGPHGALDCALARAGSRSYAFVLFRSPAEAREAVEATRGEKVKGAAMRTEFARPVFVVADENATRTVLVEDTGRMPCLSIVNLADQARAVRNLWVGGISPSISKEELEGEFLKFGKVEGVAFSQDQTSAYIDFEKLEDAISAHRSLNGKMLGGKELCVDFQRSKGRAEWSEASSFNGRVPGPVGDKRGSGPLKSSAGVRMREAQPTNVLWVGFPGSYRVIDEEALKHAMSVFGVVTKIKVFQTRQYAFVEFANVAEACNAKMNLDGHLFNDPRIQILFSNSGLAPNKLDNPTSVAGFPSSEIYSSDGRLGPGIGSGTLQGYDPPRGGRTRYYDYAGMPTPGGILSQPEPFDPREAKRMRLAAGADPYDVRAGSTGLYSAGYRHQGSSVHAEGSSSPVIRVRGTVHRTSYIEHCWRGSIAKGGSPVCRARCLPITKGSDIPLPDVMNCSARTGLDMLAKHYADATGFDIVFFLPDSEDDFVSYTEFLRYLGSKSRAGVVKVDAGTTLFLVPPSDFLTNVLQVDGPERLYGVVLHIPQISAAAALRPQLTGTEQQPYYDERGTLPTSQRKYSIISPNDSGHLDADYRTSLHEDSMHRLGHIPGRPRVDEGQAVQPALAGFPANQAAGLQVQSSLKPDIMATLAKLLPSVQSSPLVSGQMNAIDRTSQIQDPSMLSKVWNPENQVTASNSSFGQMANVQHPGQQFSGQASAAHLTNYGNMVSAQERSIQHTAYNPEVTLNLPPPPPLPTIPHSSATLQSQGGHSLPSQTNQQLYQPEQYYVPQNNYGPLVPVSHSNLQISNTNNPTLTIPQVNPGPPTNNQIGNLAQPQHSMPLHVDRASQDFSSQGQQQNRGPGAAQAPEEDKSKKYQATLQLAQNLLLQLQQRGSGNQS

SEQ ID NO: 16476 - protein, 370 aa, Zea mays
  VARIANT 207: note = Ancestral polymorphism is A, Derived polymorphism is S
  VARIANT 228: note = Ancestral polymorphism is A, Derived polymorphism is T
MNKDKAPMPGDGDPSDGLPPQSTRRAGAPPSSSTPPREYDISRMPDFPTRSTGHRRAHSEILGLPDDLDLSAPGGGDGPSLSDENDEELFSMFLDVDKLNSSCGASSEAEAESSSVADGVGEGAELGHAPRPRHQHSQSMDESMSIKAEQLVGAPGMEGMSSAEAKKAVSAAKLAELALVDPKRAKRIWANRQSAARSKERKMRYISELERKVQTLQTEATTLSAQLTLLQRDTTGLTTENSELKIRLQTMEQQVHLQDALNDTLKAEVQRLKVATGQGPANGGGGMMMNFGAVPRAFGGGNQQTFHSSQSQAMQSMLATHQLQQLQLHSQPQQQLQAQHLQQVARDLKMKGHLGAQGQWGGGKSGSSGS

SEQ ID NO: 16477 - protein, 114 aa, Zea mays
  VARIANT 43: note = Ancestral polymorphism is R, Derived polymorphism is S
  VARIANT 25: note = Ancestral polymorphism is Q, Derived polymorphism is R
MCSGSWSWSSSKKRPSLVVVNLKRQQLQKTPPPTPPRASVAIRRKRLRLRRLRAGAEAMEMVNLKLYLENRCIIAENERLRERASALRRENLALLQDLSKTPAVPEAGAGAGAA

SEQ ID NO: 16478 - protein, 228 aa, Zea mays
  VARIANT 219: note = Ancestral polymorphism is R, Derived polymorphism is L
  VARIANT 89..228: note = Derived polymorphism lacks residues 89 to 228
  VARIANT 79: note = Ancestral polymorphism is T, Derived polymorphism is R
MPLMRTQQQFGALNVSTMTPSLHHCKTLSPQVHPFMAIKPILPKKGIKVPAALHLEVPLACGLMMLNPELNMDVAVCRTRIARVRAGGQCQWRKLQQRWMMVLVCSVNVCVQQGEVKRRNETSTRRRYGSNEWTRDLGRVSVGATRVPHRGSVWGWHRTLQIQSTGAVDLILRCQTQILLCTSLACLVSLCVCVMSATFGQSWGGVAQSVFPAPKFFRREILVSMMVL

SEQ ID NO: 16479 - protein, 707 aa, Zea mays
  VARIANT 409..707: note = Derived polymorphism lacks residues 409 to 707
MSPALAAGVEPMAVDDSASKKAKRKQLKAAAAAAEAEAEAASVKKKEKKEKKRKVKEPSPPLPSAASSDEEEKSSTSSEETAPAAKKAKEKTKKNVDVSSSASDDDGEITASSDEDPADPNALTNFRISESLRQSLRSKGIKSLFPIQATTFDLVLDGSDLVGRARTGQGKTLAFVLPILESLVNGANKASRRTEHGRTPSVLVLLPTRELANQVHADFEFYGATFGLSACCVYGGSPYRPQEMALRRGVDIVVGTPGRVKDFIVKGTLNLKCLKFRVLDEADEMLNMGFVDDVELILGKVEDATKVQTLLFSATLPEWVNKLSMRFLKVDRKTVDLVGNEKLKASASVKHLALPCNKAARAQVIPDIIRCYSHGGRTIIFTETKDSASELSGLIHGSRALHGDVAQAQREVILAGFRSGKFQVLVATNVAARGLDINDVQLIIQCEPPRDVEAYIHRSGRTGRAGNTGVAVMLYEPRYKHSVSRLERESGVKFEHISAPQPTDVAQSAGSEAADAIASVSDSVIPIFRQQAEQLLSSSSLSAADLLAKALAKAVGYTDIKKRSLLSSLEDYSTLHLQTGRPMWSPGFAFTILKRFMPEDKLADVKGATLTADGTGVVFDVPAADVEDYIQASESAAQVTIDEVKQLPPLQEKDQSRGNSGGGRFGHGGGRRFSGGGGGGRGFSGRGGGGRGFSGRGGGGSRFNRRN

SEQ ID NO: 16480 - protein, 244 aa, Zea mays
  VARIANT 212: note = Ancestral polymorphism is R, Derived polymorphism is W
  VARIANT 145..244: note = Derived polymorphism lacks residues 145 to 244
  VARIANT 112: note = Ancestral polymorphism is Q, Derived polymorphism is L
  VARIANT 63..244: note = Derived polymorphism lacks residues 63 to 244
  VARIANT 5..244: note = Derived polymorphism lacks residues 5 to 244
  VARIANT 4: note = Ancestral polymorphism is A, Derived polymorphism is S
MSEAQRLVQQELELEEWGTEAQVKLGSRLIELLLDSAFVQPPADQTPDSSPDIRPAFKHVLRQPIIENGLGMLIYPTSLCWYLRRNEKGIYDKGGHLFLPSYIMRTHGVKDQKDAINSVPRKQLQKVFEIPLPERLESEDPDEMQKWKWSLKKAKKTNRELHAERCDTELKLSVARKVREEDRFYYPHNLDFRGCAYLMHPHLSHLGSDLCRGVLEYAEGRPLGKYGLCWLKIHLANKYGGGIE

SEQ ID NO: 16481 - protein, 477 aa, Zea mays
  VARIANT 227: note = Ancestral polymorphism is S, Derived polymorphism is N
  VARIANT 248: note = Ancestral polymorphism is C, Derived polymorphism is Y
  VARIANT 321: note = Ancestral polymorphism is A, Derived polymorphism is T
  VARIANT 420: note = Ancestral polymorphism is A, Derived polymorphism is G
MDIAHRDYLLVKLHTCLGVAILLLCVLAELFIFAFRCRAALYLVPVAALLLFNRFRRRAAAADIGLVDFSCLKPPRRLRIPVAGLLEHFSLIGCFDDGSVEFMTKVIEASGMGNETYFPPSLHYIPPAATHADAIQEAHMLFFPTLDDLFAKTGVPPSAVGALVVNCSGFCPAPSLAAIIASRYRLRADAKTFNLSGMGCASGVIGVDVARRLLLTHAAISYAVVVSAEIVTVGWYSGKDQGKLLLNCYFRTGCSAALVTNSRGPAATVPVKYRLASLTRTNQIANDRSYRSGYRDEDGEGITGFTLGQGVGRMVSELLRAHLVTLSLSILPLREKLRYVLALLLSSRRRLGGNKLSRPAVPLPDFCKAADHFCLPSSGRPMIWRLGQGLGLGEREMEAALMTFHRFGNQSAASLWYQLAYLEAKGRVHAGDTVWQLGIGSGLKANSMVWERVAGHEEERELGPWKDCIHKYPVTDT

SEQ ID NO: 16482 - protein, 456 aa, Zea mays
  VARIANT 38: note = Ancestral polymorphism is R, Derived polymorphism is H
  VARIANT 25..456: note = Derived polymorphism lacks residues 25 to 456
MAATHDFSTSHIVVAGSSRAGTAYRAVLRDGSALTVKRLHSCPLSEKAFRAEMGRMGQLRHPNIVPLLGFCVVEDERLLVYKHMESGALSSVMKKPGEAPLDWATRLRTPVGAARGLAWLHHWFQVPQIHQNLSSSAVLLDEDYDARITDVGLTRLVRMAPGEGGDTSPFLNGDFGEFGYVAPEYASNPVGTMKGDAYAFGVILFELVSGQEAAAVVTDVTGEGFKGTLVDWVNQLKASGRISDAIDKPLRGKGHEAEIQEFLKIAFACTQPQVILLENVELTLEAFDYMQLPFTLKDVQREMKNVEKDIRVATKRNDMLSAKKPCLHAELMLLGVISLLLSQTTLFISEICVPSSLFTSRFYICSESDYQDLLRNTDANQTALDKNMFGGQRLHVCGEGHEPFVSYEGLEQLHRFLFILGITHVLYNFVTVVLSMIKVRAHCLIAALTFFPLIFF

SEQ ID NO: 16483 - protein, 363 aa, Zea mays
  VARIANT 231: note = Ancestral polymorphism is P, Derived polymorphism is L
MASAAAVDAGDAPEPTVRNLLDQESLKWVFVGGKGGVGKTTCSSILSVLLAGVRQSVLVISTDPAHNLSDAFQQRFTKFPTLVRGFTNLYAMEIDPKVENDDLANEGMEGFLSELTNAIPGVDEAMSFAEMLKLVQTMDYSVVVFDTAPTGHTLRLLQFPATLEKGLEKMMELKNRFGGLLNQASRLFGLGDELNEDAMLGRLEGMKDVIEQVNRQFKDPDLTTFVCVCIPEFLSLYETERLVQELAKFEIDSHNIIINQVIFDEEVVESKLLKARIKMQQKYIDQFHMLYDDFNITKLPLLSEEVCGVQALQNFSHRFLTPYKSARKRGTIEELEERITILKSALQEAEAELDRIRKGKQSA

SEQ ID NO: 16484 - protein, 246 aa, Zea mays
  VARIANT 187: note = Ancestral polymorphism is T, Derived polymorphism is K
  VARIANT 61: note = Ancestral polymorphism is G, Derived polymorphism is C
MDMGRHQLQLQHAASSSSTSASSSSEQDKPLCCSGPKKRPAGRTKFRETRHPVFRGVRRRGAAGRWVCEVRVPGRRGARLWLGTYLGAEAAARAHDAAMLALGRGAACLNFPDSAWLLAVPPPPALSGGLDGARRAALEAVAEFQRRRFGAAAADEATSGTSPPSSSSSATKPAPAIERVPVEASETVALDGAVFEPDWFGDMDLDLYYASLAEGLLVEPPPPPPPAAWDHGDCCDSGADVALWSY

SEQ ID NO: 16485 - protein, 238 aa, Zea mays
  VARIANT 138: note = Ancestral polymorphism is A, Derived polymorphism is S
  VARIANT 137: note = Ancestral polymorphism is R, Derived polymorphism is C
MCPTKKEMSAESSGSASSWTSASASASTSTSPEHQTVWTSPPKRPAGRTKFRETRHPVFRGVRRRGSAGRWVCEVRVPGRRGCRLWLGTFDAAEAAARAHDAAMLAIAGASACLNFADSAWLLAVPASYASLADVRRAVAEAVEDFQRREAAAGDDARSATSPTPSTSGTDDDAATDGEESSPATEVSSFQLDVFDNMSWDLYYASMAQGMLMELPSAVPAFGDDGYTNVADVPLWSY

SEQ ID NO: 16486 - protein, 231 aa, Zea mays
  VARIANT 162: note = Ancestral polymorphism is S, Derived polymorphism is R
MCPTKKGMTGEPSSPCRSASASTLPEHHQTVWTSPPKRPAGRTKFRETRHPVFRGVRRRGSAGRWVCEVRVPGRRGCRLWLGTFDTAEAAARAHDAAMLALAGAAACCLNFADSAWLLAVPASCASLAEVRHAVADAVEDFLRHQVVPEDDALAATPSSPSSEDGNTSDGGESSSDSSPPTGASPFEFDVFNDMSWDLHYASLAQGLLVEPPSAVTAFMDEGFADVPLWSY

SEQ ID NO: 16487 - protein, 195 aa, Zea mays
  VARIANT 15: note = Ancestral polymorphism is A, Derived polymorphism is T
  VARIANT 153: note = Ancestral polymorphism is S, Derived polymorphism is Y
MAATSRLALALLLAALVAAWQLPAAAVAANYTVGDEKGWNPDVDYTAWVKKHKPFYKGDWLIFEYQNGRSDVVQVDEVGYDNCDKANALSSYSKGHTYAFQLKDAKDYYFICSYGYCYNGMKLHVTAKSSSSSSSSSSGSDSSSSSSDDDSSSPSPPAKKSKAKTSAAPPPSLLAATPMAAAAAAAAALLLNRML

SEQ ID NO: 16488 - protein, 218 aa, Zea mays
  VARIANT 128: note = Ancestral polymorphism is A, Derived polymorphism is V
  VARIANT 173..218: note = Derived polymorphism lacks residues 173 to 218
MATTQDSGRTASATALTTSRGRRFVGVRQRPSGRWVAEIKDSAQRVRLWLGTFDTADEAARAYDEAARALRGENTRTNFADRARHGGPAGAGSGAARARLSKNLQHVMARAAAAGRATACAGVGDQFALAAVFRHPVAAQQQVKHAVQPSFVVPRRTEAPPLSSVPAGGGEVWRVDDVDTADESLCAAEERSFKVSSSVIVPPSFSASSSESFGLDDL

SEQ ID NO: 16489 - protein, 322 aa, Zea mays
  VARIANT 244..322: note = Derived polymorphism lacks residues 244 to 322
  VARIANT 193: note = Ancestral polymorphism is T, Derived polymorphism is I
  VARIANT 183: note = Ancestral polymorphism is A, Derived polymorphism is V
  VARIANT 166..322: note = Derived polymorphism lacks residues 166 to 322
  VARIANT 89: note = Ancestral polymorphism is I, Derived polymorphism is M
  VARIANT 77: note = Ancestral polymorphism is E, Derived polymorphism is K
MGNFLACLRLCLQVVNCLRLRAAGGMGAESIPPSPTSPGPTPSFSSLTPRPRRPRLRLLPLTGALLAEATSALFHTKAEKRRKGVWIEINNDGDDNQSARSSTVSTAPPRTPPLPGLPHPTPARHDLHNPTPARHLARAPPPPRAVSPAPALPAIPPALPVVSPPQRPPRQYDSGLGVWLLFAVAIGGEQEDTVEALSRAVQRSGSRGGIKGHRWRQHAIAACGGETEVRPGKQDREGDVISMQENMSARTLTLSSSTQQTIVRFVKLPLVDKITAWIFLEKLLVFLCSYVLQSADHGHYFVIFMAILRRLNFMHHGSCKYT

SEQ ID NO: 16490 - protein, 79 aa, Zea mays
  VARIANT 12: note = Ancestral polymorphism is G, Derived polymorphism is V
  VARIANT 14..79: note = Derived polymorphism lacks residues 14 to 79
  VARIANT 50: note = Ancestral polymorphism is D, Derived polymorphism is Y
MAHGGCGEIISGLQNFDRSSVASVVAAADKGGATHVDIACDKDLVKLAMDVTNLPIYVSSVDPSAFHSAVQAGAKMVRH

SEQ ID NO: 16491 - protein, 478 aa, Zea mays
  VARIANT 196: note = Ancestral polymorphism is V, Derived polymorphism is L
  VARIANT 100..478: note = Derived polymorphism lacks residues 100 to 478
MDSTEPEVAAATVEMMPPHVVCVPYPAQGHVTPMLKLAKLLHARGFHVTMVNTEFNHRRLLQSRGPEAIDGITRFRYAAIPDGLPPSDANATQDVPALCYSTMTACLPHLLSLLRKLNSDDPSSSGAPPVTCLVVDGVMSFAYDAAKEIGVPCAALWTASACGLVGYRHYQQLVQWGLVPFRDEAQLADDAYLDTVVRGTRGMCDGMRLRDFPSFIRTTDRGDIMLNFFIHEAGRLSLPDAIMINTFDDLEGSTLDAVRATLPPVYTVGPLLLHTRRAVTVGSELDGLGSNLWKEQDGLLEWLDGQATGSVVYVNYGSITVMSNEQLLEFAWGLAGSGYPFMWNIRPDLVKGDTAVLPPEFLSSVKDRAMLTTWCPQEAVLAHDAVGLFLTHSGWNSTLESICAGVPMLSWPFFAEQQTNCRYKRTEWGVGMEIGGEVRRAELTETIREAMDGEKGREMHRRAAEWKEKAIRATMSGL

SEQ ID NO: 16492 - protein, 222 aa, Zea mays
  VARIANT 107: note = Ancestral polymorphism is T, Derived polymorphism is I
  VARIANT 118: note = Ancestral polymorphism is G, Derived polymorphism is D
  VARIANT 141: note = Ancestral polymorphism is R, Derived polymorphism is H
MATMASSKLTSDKDNPKKLQDRLKHLDWIFFAPLDMSTMEVFYCSWSVLMTDALSQDPHVVRLLDLKQGVNKEGQTILYLIFEYMDTDLKKFIRGYHASHEKIPAQTVKILMYQLCKGVSFVHGRGVLHRDLKPHNLLMDRKTMALKIADLGLSRAITVPVKKYTHEILTLWYRAPEVLLGATHYSTPVDIWSVGCIFAELVTNQPLFPGDSELQQLLHIFK

SEQ ID NO: 16493 - protein, 112 aa, Zea mays
  VARIANT 21: note = Ancestral polymorphism is I, Derived polymorphism is T
MIKKSKDPNTIEEMKSHVAWTFTSDLCLGSDCSCSLSSLFFILINIYHTFPKKKVESEILREHIKKEREAASEGRKMTILSEEIQLSFAKRKLLNKYNELKVKFTRFSGSSF

SEQ ID NO: 16494 - protein, 296 aa, Zea mays
  VARIANT 284..296: note = Derived polymorphism lacks residues 284 to 296
  VARIANT 93: note = Ancestral polymorphism is P, Derived polymorphism is L
  VARIANT 72: note = Ancestral polymorphism is A, Derived polymorphism is D
  VARIANT 64: note = Ancestral polymorphism is P, Derived polymorphism is L
  VARIANT 55: note = Ancestral polymorphism is G, Derived polymorphism is R
  VARIANT 51: note = Ancestral polymorphism is G, Derived polymorphism is D
  VARIANT 50: note = Ancestral polymorphism is R, Derived polymorphism is C
  VARIANT 47: note = Ancestral polymorphism is R, Derived polymorphism is L
  VARIANT 44: note = Ancestral polymorphism is R, Derived polymorphism is W
  VARIANT 41: note = Ancestral polymorphism is R, Derived polymorphism is W
  VARIANT 36: note = Ancestral polymorphism is P, Derived polymorphism is L
  VARIANT 28: note = Ancestral polymorphism is A, Derived polymorphism is V
  VARIANT 26: note = Ancestral polymorphism is C, Derived polymorphism is Y
MGAVASSAGGARGGDGTVLGDLPENCVAEVLLRLDPLEICRMARLSRTFRGAASGDGVWESKLPRNYARLLAVAAAGDGEGGQAAASAPGAELLPKKELYARLCRRNRFDGGKKEFWLDKGGGGLCMSISSRALSITGIDDRRYWNFIPSDESRFRTVAYLSQIWWFEVRGEVEFFFPEGTYSLFYRIHLGRPFKRLGRRVYSSEHVHGWDMKPVRFQMSTSDGQHVQSKCYLSDPGIWINHHVGDFVVKDSSRPVNIRFAMIQIDCTHTKGGLCVDSVVVKPQHLSQKKAPWTYV

SEQ ID NO: 16495 - protein, 109 aa, Zea mays
  VARIANT 21: note = Ancestral polymorphism is A, Derived polymorphism is V
MTATTTTAAGGGKVQPRGLPAALSLLLLLVLAAGLGGGAEAQQTCAGQLRGLAPCLRYSVPPLPGQVPPAPGPECCSALGAVSRDCACGTFSIINSLPAKCGLPPVSCQ

SEQ ID NO: 16496 - protein, 275 aa, Zea mays
  VARIANT 258: note = Ancestral polymorphism is S, Derived polymorphism is W
  VARIANT 198: note = Ancestral polymorphism is R, Derived polymorphism is C
MLAASQSFIDINYGEAADNLPLPSSTARLVKSTIITKVRLYGTDPTIISAFFEMGVAGHLPASSPTVSIVSVGHEVLFANASLASWLIPAMQNLHDALPPNSSVKVSTVNAMDALASSDPPSSGAFKPELAATLDPLLAFQRPTRRSSSTRTPTSRTSATRGQIRWPSACSSPTTVAPDAWSGLTYTNMFDAQVDAVCAALDAKGYKDVDIVVAETGWPHKGNPDEADATVENARAFVSGLVSHLRSLSSMPRAPDKSVVTYIFAMYDEDLKPGK

SEQ ID NO: 16497 - protein, 324 aa, Zea mays
  VARIANT 255..324: note = Derived polymorphism lacks residues 255 to 324
MASDGDGKGRVATAPGAGYGYAAYGGYQGAEERKWWPWLVPTVIVACIAVFVVEMYENNCPKHGSQLGDCVAGFLRRFSFQPLRENPLLGPSSSTLEKMGALDWNKIVHQNQGWRLISCIWLHAGLIHLVVNMLSLLFIGIRLEQQFGFVRIGAIYLLSGFGGSVLSALFLRNSYISVGASGALFGLLGSMLSELLMNWTIYSNKAAAIITLLFIIALNLAIGILPHVDNFAHIGGFATGFLLGFVLLARPQFSWMESHELPHTNQPPKYKAYQYILWVVALVLLLVGFVISLVMLFKGKNGNDGCHWCHYLNCVPTSKWKCNT

SEQ ID NO: 16498 - protein, 455 aa, Zea mays
  VARIANT 330: note = Ancestral polymorphism is G, Derived polymorphism is R
MLRRIAALRPPSRAAAPLGAIAAPYSSKSTSIPQKQQRVRDHAFDGVMEVQKRVRRFHALHALILYAAAPTAPSRAGGSGAVSVPFTRLGALARRQLRLAPLDAGRFLLRHAHAFHLFLHPVHRMLHIRLTPRAAAVLDAEADAVAAALPGISVLRLRKLLLLAPPHRRLRLEHIHLLRRDLGFPDDFAQSIIQSNPSLFRLTPDGFVEFLPSPTDPPDLTVAAVERARERHYREHRAPGSAEEDARFAFPIRFPPGFKIGKYFRIAVWKWQRLPYASPYADVTGHDLRSLEAQRRMEKRAVAAVHEFLSLTVEKRTTLERLALFRDALGVPKKIKEFLLKYQGIFYISTRGNQGKLHTVFLREAYYKGELVDPNAIHDARRKLEELLMINPQRANLDRMFTSMGRGWDELGGSRRGGSELRDEFLGDGGGRKRNADADGAESGEDSGVESLYID

SEQ ID NO: 16499 - protein, 340 aa, Zea mays
  VARIANT 154..340: note = Ancestral polymorphism lacks residues 154 to 340
  VARIANT 55: note = Ancestral polymorphism is R, Derived polymorphism is C
  VARIANT 40..340: note = Derived polymorphism lacks residues 40 to 340
MTSPPRVSMEITDEVVKSMKIGLVFQGYNGRICSMDFHSKATNYLVTASDDESIRLYDTQDAVCLNTINSKKYGVGLVCFTDNPSIVLYSSNNGWDGLSASHFALEKKTFSHVRLIVPFSYGTIGLKNRRLSTQGRCYWICNGNLLTSFHSIFKSKGLLRAQRRPTVSYDAQGMVFAVAYGGRIKMFDIRKFGMGPFATFSVGTDDSEAHVVQFSGDGRRILLTTKAGRVHVLDSFEGNSIASFRAKPILTNSTLEASFCPEGNHIVSGSGDGSVYAWNVESGKVACWESTDVKPPRVRWSPGSLMFVTGTSELSCWVPDLSKLESFTISHTNTRSSSSL

SEQ ID NO: 16500 - protein, 284 aa, Zea mays
  VARIANT 41: note = Ancestral polymorphism is R, Derived polymorphism is C
  VARIANT 93..284: note = Derived polymorphism lacks residues 93 to 284
  VARIANT 95..284: note = Derived polymorphism lacks residues 95 to 284
  VARIANT 102: note = Ancestral polymorphism is P, Derived polymorphism is Q
MRLPSDVPRDHFAVYVGEWWRRFVVPIALLDRPEFRSLLRCAEEEFGFAGAGGALVLPYEEVAFHSLTFALACARPDDDLVELLWHNGSVVAQPQAHHRPAQPSDRDRPGTSGLTAEETAAWFLNTLDDPLEKDLYTQLWYNTIADAALQHEGTFPGPTSHPSSPPPPVGSSGVESSWVGDFCSTFCDSNQVPRTPTGIRGKDAALQSEVPSDAGAHDGTSSSGGSGSNYGGSGLPSDSVHGHKRKGMCRDESDSRSERRRDRIKEKMRALQELIPHCNKVQVP

SEQ ID NO: 16501 - protein, 568 aa, Zea mays
  VARIANT 391: note = Ancestral polymorphism is S, Derived polymorphism is P
  VARIANT 334: note = Ancestral polymorphism is E, Derived polymorphism is K
  VARIANT 332..568: note = Derived polymorphism lacks residues 332 to 568
  VARIANT 312: note = Ancestral polymorphism is R, Derived polymorphism is S
  VARIANT 310: note = Ancestral polymorphism is W, Derived polymorphism is R
  VARIANT 305..568: note = Derived polymorphism lacks residues 305 to 568
  VARIANT 296: note = Ancestral polymorphism is D, Derived polymorphism is N
  VARIANT 258..568: note = Derived polymorphism lacks residues 258 to 568
  VARIANT 225..568: note = Derived polymorphism lacks residues 225 to 568
MKALRRSSTSSSPTAASSPPSSSWIHIRSLLAAAASSSSSSSFAAAAAGSAVAVVSAAVAASSSSSPASSSPHSERGGLKSPWSRRKRKRALSREQWESLFSANGKLRDGGRKFLKKVRSGGIEASIRAEVWPFLLGVYDLNSSEEERNSIKIKKRKQYEKLRRQCQQILNGYKGNGLKAITELNSDECSSLDGIAEGSESPCFEDANAIRAPVSLEEVKPEQNEADQPDNILCDVVECMEEDADELAYAYPCKAESESSDSESSDEDDPGGISVSGDENCDPDTKFTMSNSFKADFFRSSRTSEDFATWQRIIRLDAIRSNSEWILFSRNQSEVPKERALQSAASVGLKDYEHLEPSMIYHAARLVGLLEAYAVYDPEIGYCQGMSDLLSPIIAVMEDDDEAFWCFVGFMRKARHNFRLDEVGIRRQLKIVSQIIKRKDSHLYRHLQKLQAEDCFFVYRMVVVLFRRELTFEQTVCLWEVMWADQAAIRAGIGRSTWGRIRLRAPPTDDLLLYAIAACVLQRRKLIIEKYSSMDEILRECNSMAGQLDVWRLLDDAHDLVVNLHDKI

SEQ ID NO: 16502 - protein, 371 aa, Zea mays
  VARIANT 212: note = Ancestral polymorphism is G, Derived polymorphism is D
  VARIANT 182: note = Ancestral polymorphism is N, Derived polymorphism is I
  VARIANT 109: note = Ancestral polymorphism is P, Derived polymorphism is L
  VARIANT 67: note = Ancestral polymorphism is A, Derived polymorphism is S
MATEKRSRRRSPSAATPSASLTSSSNPEAAILHSPSPSLDLIPDITSRLISLEDFFALRASCRAYRAILPPSSEALACQSPLLLVSLFPSFSEALFHLSLRRLHRFRLPWGHHLPPSRRTLHYAHGYLVTATTASSHYPPRLMLLHLFSGEQLRLPKVPAPFTRVVISDDLAAVLFLPGRSNVQHCHPGDALWRVATADAPHVVEDMLFVDGTLYALVNGLRLATVELSDGLLELSFLGEEVDDDSKPAGGQFKLGECGGDVLLISEDHTGVMLYRVYRWVFEAGKWVSITSLGRRTLFLGFFGFAACIGPDYPGIRTDCLYAAGPRLGEWHEYSLADGTCDVRYADYPGAPPLNNNSPTRPPVWVFPSLC

SEQ ID NO: 16503 - protein, 229 aa, Zea mays
  VARIANT 170: note = Ancestral polymorphism is V, Derived polymorphism is A
  VARIANT 184: note = Ancestral polymorphism is F, Derived polymorphism is L
  VARIANT 218: note = Ancestral polymorphism is F, Derived polymorphism is Y
MVTMLAASSLVNSNLACSSRISSCSDFTYSHSWRPIHAMKLHQMRAVSSIRISCAATKPAKTPAEEEWKVKRQLLSEKRVRSVDVKEALRLQKENNFVILDVRPEAEFKEAHPPGAINVQIYRLIKEWTAWDIARRAAFAFFGIFAGTEENPEFIQSVDTKVGKDAKIIVACSTGGTLKPTQNFPDGKQSRSLIAAYLLVLNGYSNVYHLEGGLYTWFKEGLPAVAGEE

SEQ ID NO: 16504 - protein, 152 aa, Zea mays
  VARIANT 123: note = Ancestral polymorphism is G, Derived polymorphism is S
  VARIANT 121..152: note = Derived polymorphism lacks residues 121 to 152
  VARIANT 64: note = Ancestral polymorphism is L, Derived polymorphism is V
  VARIANT 58..152: note = Derived polymorphism lacks residues 58 to 152
  VARIANT 41: note = Ancestral polymorphism is R, Derived polymorphism is H
  VARIANT 31: note = Ancestral polymorphism is A, Derived polymorphism is T
MTECSIPSSDGATHLPPLSSAAAAVEAHFQAHWSALDAAARQDPARVIAVGDWRSPLELPFLWLGDVPWCRLRQVCPSLFHPMAESSISQSIDALRPSLSPQRPRLHQGSPEVSVRLQVHQFGLICDNLDAVNKFEPNYRLIRRLVYYMLEW

SEQ ID NO: 16505 - protein, 268 aa, Zea mays
  VARIANT 66..268: note = Derived polymorphism lacks residues 66 to 268
MGLLSNRVERSEIRPGDHIYTWRAVYAYSHHGIYVGGSKVVHFTRKKETETSDSSDSTSSLISEISSECQTFPDCGFQLSNSGVVLTCLDCFLRNGSLYCFEYGVPSAVFLAKIRGGTCTIAESDPPEVVVHRAMYLLQNGFGNYDMFEKNCEDFALYCKTGLLPVEEPGIGTSGQASSAIGVPLAALLSTPFKLLAAGPLGMATVTAGMYCAGRYITDIGVRKDVAKVEVEKLSSHPGFHLVEDEESVNKRSEKPKTLLPMKRKRER

SEQ ID NO: 16506 - protein, 363 aa, Zea mays
  VARIANT 135: note = Ancestral polymorphism is G, Derived polymorphism is D
  VARIANT 306: note = Ancestral polymorphism is P, Derived polymorphism is L
MAIGGSEAGGGGAGSMRSVLVTGGAGFIGTHTVLRLLEQGYIVTVVDNFHNSVPEALDRVRLIAGPALSTRLDFIRGDLRNTDDLEKVFAARRYDAVIHFAGLKAVGESVAHPEMYYENNLIGTINLYKSMKEHGCKKLVFSSSATVYGWPEVIPCVEDSKLQAANPYGRTKLILEDMARDYHRADTEWSIVLLRYFNPIGAHSSGEIGEDPKGIPNNLLPYIQQVAVGRLPELNVYGHDYPTRDGTAIRDYIHVVDLADGHIAALKKLFDSPDIGCVAYNLGTGRGTSVLEMVAAFKKASGKEIPTKLCPRRPGDATEVYASTEKAERELAWRAQYGIEEMCRDQWNWAKKNPYGYCGGAKK

SEQ ID NO: 16507 - protein, 329 aa, Zea mays
  VARIANT 281: note = Ancestral polymorphism is A, Derived polymorphism is D
  VARIANT 196: note = Ancestral polymorphism is R, Derived polymorphism is W
  VARIANT 176..329: note = Ancestral polymorphism lacks residues 176 to 329
  VARIANT 105: note = Ancestral polymorphism is G, Derived polymorphism is S
  VARIANT 96: note = Ancestral polymorphism is G, Derived polymorphism is S
MTVDRLSHQSPVKNPHQISSSQPPIFGHVVVSVAFPALIAAPLLRHPLLQEASVLAPRLHLDRQGSVAAAAAVSAARVRPSAAEVARTVVELAPSGTLSVVGPDGWPLGIGARFVADAVGAPALCLATTGVSAPDAPCSFHVEFWKSGARTPQCTMLGTLTKPTDESVLKKLSTRQERKFGEEINQDLLYLISVQRVLHMEDFNEDGMWVVPSEYTSAEPDPLRNFAENIVEEFNSKHAEDVHRIYNIYVESDLQVADVKMIWVDRLGFDLHVHSGDGVFDVRVPFSREVSDEKGVKSSFNMMSHHSWEVERSYAGPEFEKVQFLKKVR

SEQ ID NO: 16508 - protein, 61 aa, Zea mays
  VARIANT 36: note = Ancestral polymorphism is S, Derived polymorphism is I
  VARIANT 22: note = Ancestral polymorphism is Y, Derived polymorphism is C
MAQLIVSMVLFSVVQKPELKKYNWICESYKFDEVFSESASQKTVYEEVAKPMVDVSSSRML

SEQ ID NO: 16509 - protein, 352 aa, Zea mays
  VARIANT 19..352: note = Derived polymorphism lacks residues 19 to 352
  VARIANT 22..352: note = Derived polymorphism lacks residues 22 to 352
  VARIANT 23..352: note = Derived polymorphism lacks residues 23 to 352
  VARIANT 45: note = Ancestral polymorphism is T, Derived polymorphism is I
  VARIANT 151..352: note = Derived polymorphism lacks residues 151 to 352
  VARIANT 199..352: note = Derived polymorphism lacks residues 199 to 352
  VARIANT 210..352: note = Derived polymorphism lacks residues 210 to 352
  VARIANT 285..352: note = Derived polymorphism lacks residues 285 to 352
MMHKGINLSNKVQTTLSTQKREERRDKACEYICQFFYEASIAHNTVTLPSFALMLEAIGQFGKAVNFFEPLANVLRRLDSDVPAMEFFHGLMLEAKKEISERFDNDESRYKVAWDIIDKRSGVINCITKMIGDEETQDKIIEELYMYQDQQGTFGHEIAIRQRRNKNFNPAKWWLNHGTNTPNLRILASKILNLTCSSSACERNWSVFEQVHTKRRNRLLHDRMRDLVFVKFNSKLRGKKERIDKHPLEREVDDVVGDDDNEFITGIVPLPNDVVEPAQDGRSQGEQTSQAQVQVQAKRKRSMKPRKKLRSLQSLMRDVQVQVQQSSSDSEDGDIAMESSESDKSPHAFDSD

SEQ ID NO: 16510 - protein, 214 aa, Zea mays
  VARIANT 43: note = Ancestral polymorphism is E, Derived polymorphism is D
  VARIANT 49: note = Ancestral polymorphism is A, Derived polymorphism is V
  VARIANT 66..214: note = Derived polymorphism lacks residues 66 to 214
  VARIANT 118: note = Ancestral polymorphism is A, Derived polymorphism is D
  VARIANT 133: note = Ancestral polymorphism is R, Derived polymorphism is H
MEAGRPSVRKSAMEDHNRQTTNIQGYKEVVTQQDKHEEIAFVDEIARTAPIKYLHRYLVQKGAVPQDYEDFKRMLTSLWFDLYGRGGNSSFSSAFEHVFVGEIKGRGQGESEFYLEEDKENVDYQGYIFPRRRGESPDSEIQLLTVQFEWHGVLKSVSSTLIGVSPEFEVALYTLCFFVGGEDNRVDIGPYSVNVKCYRLGNNKIGSAFPIAEN

SEQ ID NO: 16511 - protein, 407 aa, Zea mays
  VARIANT 349..407: note = Derived polymorphism lacks residues 349 to 407
  VARIANT 328..407: note = Derived polymorphism lacks residues 328 to 407
  VARIANT 308: note = Ancestral polymorphism is G, Derived polymorphism is D
  VARIANT 300: note = Ancestral polymorphism is S, Derived polymorphism is Y
  VARIANT 291: note = Ancestral polymorphism is R, Derived polymorphism is Q
  VARIANT 217..407: note = Derived polymorphism lacks residues 217 to 407
  VARIANT 184..407: note = Derived polymorphism lacks residues 184 to 407
  VARIANT 147..407: note = Derived polymorphism lacks residues 147 to 407
  VARIANT 127..407: note = Derived polymorphism lacks residues 127 to 407
  VARIANT 72: note = Ancestral polymorphism is S, Derived polymorphism is F
MSQREEEGTDHTPQSKAVRPRQELFHSVKHQKESLAAAARKGTVVKSLFMSTTPKKEPVQTPAADKSKGAVSEVCSKLRKLNLACREVPSRYMSQPQPKNTKTTKKSEETTVAKSEKRGLESKTNAKKKILGRSVKRANAGPDGENRNGCSTAADENSLAETAGSHQERKVVLQELRIEVDVSRCGNSDDNKENVSSAPSEEALDNSSHYGSENRLLENNDNVPLKENVALKVAKLQKKVHQEQAGKLKKTTNPRVLRDGWSLLKQLKPNTHSKNYHIHDIVRNFASGVMRTGASPIHLSVVSNGSYGLMESWARVLHFFANVGLQSQPKEACAMNYRGTPFFHVKLMSRFTEAAAVLRAMGSAVAFAKLDGERYPKATAAVGVKGFPTVLLFVNGIEHAYHGLHTK

SEQ ID NO: 16512 - protein, 122 aa, Zea mays
  VARIANT 75: note = Ancestral polymorphism is A, Derived polymorphism is V
  VARIANT 72: note = Ancestral polymorphism is R, Derived polymorphism is H
  VARIANT 58: note = Ancestral polymorphism is V, Derived polymorphism is G
  VARIANT 51: note = Ancestral polymorphism is G, Derived polymorphism is A
  VARIANT 45: note = Ancestral polymorphism is L, Derived polymorphism is F
  VARIANT 44: note = Ancestral polymorphism is S, Derived polymorphism is N
  VARIANT 28: note = Ancestral polymorphism is C, Derived polymorphism is Y
  VARIANT 13: note = Ancestral polymorphism is E, Derived polymorphism is K
MQAFLSNLSKCEEGHDDQTEDWMKQILCEAAYDIEDCIDDFAHSLRPDLRASGWVTAVRKILYLIRTWYPRRNIATQIVDLKNRAQHIGERRTRYAPATRSLGRRRATWGVLRGISLLRIRT

SEQ ID NO: 16513 - protein, 239 aa, Zea mays
  VARIANT 135: note = Ancestral polymorphism is S, Derived polymorphism is I
  VARIANT 132: note = Ancestral polymorphism is G, Derived polymorphism is A
MEGDDDGPEWMMEVGGAGATGKGKGGALDKNKKRFSEEQIKSLESMFATQTKLEPRQKLQLARELGLQPRQVAIWFQNKRARWKSKQLERDYSALRDDYDALLCSYESLKKEKHTLLKQLEKLAEMLHEPRGKYSGNADAAGAGDDVRSGVGGMKDEFADAGAAPYSSEGGGGGKFAHFTDDDVGALFRPSSPQPSAAGFTSSGPPEHQPFQFHSGCWPSSTEQTCSSSQWWEFESLSE

SEQ ID NO: 16514 - protein, 79 aa, Zea mays
  VARIANT 69: note = Ancestral polymorphism is E, Derived polymorphism is K
  VARIANT 63: note = Ancestral polymorphism is F, Derived polymorphism is C
  VARIANT 56: note = Ancestral polymorphism is D, Derived polymorphism is H
  VARIANT 49: note = Ancestral polymorphism is A, Derived polymorphism is T
  VARIANT 46: note = Ancestral polymorphism is T, Derived polymorphism is M
  VARIANT 30: note = Ancestral polymorphism is V, Derived polymorphism is I
  VARIANT 11..79: note = Derived polymorphism lacks residues 11 to 79
MSALTPIETSQGPNTQVQLAESCNKDVPIVHVDMHNYSLDEKIRMTLEAHIVEKADKVHEVTCVGILAKDFFRSSNFVY

SEQ ID NO: 16515 - protein, 473 aa, Zea mays
  VARIANT 27: note = Ancestral polymorphism is R, Derived polymorphism is M
  VARIANT 10..473: note = Derived polymorphism lacks residues 10 to 473
MEFAYFNDAQRQATNDAGRIEGLVVMRIINEPTAAALSYGMNSKEGLVGEVCSCRRAWSARPHDAKQVRSARACHPSRLFNYIFYVYFEASMADVRTQNALKGLEILAVDHASDEGAIVPIGSQHDAHLTKLMNMENDQPLLPAPPVNLESAILEQNANMVALKEGCSVGSELPPGLQGNFGGNKANTCTSALHSIDEGEEITCGFIKHERSYDLQNLTMDKSIQVSNETKYKFLAHKPRVGCETAIQNCELASALPDTEFHGPVATISTTGQSEGSDTEINVPNYSDLEALILDLDLIPWDQESDFIQPEVSRFQYPESRKDLIRLEKGVCSYMNRSIMSKGAFAILYGQRTKYYIREPEVSLGRETEEVHVDIDLSKEGKANKISRRQAVIKMDDGGSFYINNTGKFSIFVNSKEVPCSKRINLMSDSLIEIRNLKFIFHVNHEAARQYIVRKRRGSSQGGITAFDWSQNP

SEQ ID NO: 16516 - protein, 206 aa, Zea mays
  VARIANT 158..206: note = Derived polymorphism lacks residues 158 to 206
MRTICDVCESAPAVLFCAADEAALCRPCDEKVHMCNKLASRHVRVGLADPNKLVRCDICENSPAFFYCEIDGTSLCLSCDMTVHVGGKRTHGRYLLLRQRVEFPGDKPGHMDDVPMEIQDPENQRDQKKPPKEQTANHHNGDDPATDGNCDDQGNIDSKMIDLNMRPVRTHGQESNSQTQGVGLSVNNHDSPGVVPTSNSERDTSK

SEQ ID NO: 16517 - protein, 550 aa, Zea mays
  VARIANT 81: note = Ancestral polymorphism is S, Derived polymorphism is L
MGEMAHACSAPRPSPAHHLCVRILLAYLLAARWLVPSCSAASFFRFPWPAERHDYRDALAKSILFFEGQRSGRLPPGQRASWRGDSGVSDGAAAGVDLEGGYYDAGDNVKFGFPMAFTTTMLAWSVIEFGDSMPRDERRHAAAAVRWATDYLLKTLAHPGVIFLQASARHCCARTATFVHVALAAEQGVGDPWKDHDCWERPEDMDTDRTVYNVSAGRPGSDIAGETAAALAAASMVFRDDDPEYAETLLTSARKAFEFADTYKGAYSDDPDLRAGGCPFYCDFNGYQDELLWGAAWLRRASKDDTFLQYIQNNGKTLGAEDSSNEFGWDNKHAGLNVLVSKEFIEGAALPLQSYKEFADSFVCTLIPESSSSPHITYTPGGMIYKPGGSNMQHVTSISFLLLTYAKYLSKSSHTVDCGDVSVGPETLQLQAKRQVDYLLGDNPMKMSYMIGYGDRYPQRIHHRASSLPSIRDHPQPMACKEGTPYFNSSGANPNPLVGAVVGGPGEDDAYEDDRADFRKSEPTTYINAPLVGVLAYFVGNPNPGHNTRH

SEQ ID NO: 16518 - protein, 793 aa, Zea mays
  VARIANT 142: note = Ancestral polymorphism is G, Derived polymorphism is R
MAAPLGFFCMLLLLLLQLGHSSCNNVYIVYMGARNPELHPALVRDAHHGMLAGLLGSEQAAKDAILYSYRHGFSGFAAVLTDSQAARLAGSPGVVRVVRNRVLDLHTTRSWDFMRVDPSHSAGILPESRFGEDSIIGVLDTGIWPESASFRDDGMSEAPRRWKGQCVAGDRFNVSNCNRLASRFGFFHLVVLPAKDFITCLKDRKIIGAKWYIKGYEAEYGKMNTTDIYEFMSARDAVGHGTHTASTAAGALVAGASFRGLAGGVARGGAPRARLAVYKVCWATGDCTSADILAAFDDAIHDGVDVLSVSLGQAPPLPAYVDDVLSIGSFHAVARGIVVVCSAGNSGPYSETVINSAPWLVTVAAGTIDRTFLAKIILGNNSTYVGQTLYSGKHPGNSMRIFYAEDVASNNADDTDARSCTAGSLNSTLVKGTVVLCFQTRAQRSAAVAVETVKKARGVGVIFAQFLTKDIASSFDIPCFQVDYQVGTAILAYTTSTRNPTVQFGSAKTILGELMGPEVAYFSSRGPSSLSPAVLKPDIAAPGVNILAAWTPAAAISSAIGSVKFKIDSGTSMSCPHISGVVALLKSMHPNWSPAAVKSALVTTASVHDTYGFEIVSEAAPYNQANPFDYGGGHVDPNSAAHPGLVYDMGTSDYVRFLCSMGYNVSAISSLAQQHETCQHTPKTQLNLNLPSISIPELRGRLTVSRTVTNVGSALTKYRARVEAPPGVDVTVSPSLLTFNSTVRKLTFKVTFQAKLKVQGRYYFGSLTWEDGVHAVRIPLVVRTMISKFYANS

SEQ ID NO: 16519 - protein, 290 aa, Zea mays
  VARIANT 259: note = Ancestral polymorphism is C, Derived polymorphism is Y
  VARIANT 245: note = Ancestral polymorphism is A, Derived polymorphism is V
  VARIANT 183: note = Ancestral polymorphism is D, Derived polymorphism is A
  VARIANT 180: note = Ancestral polymorphism is V, Derived polymorphism is E
MAAATAAASTMSLLPISQLRQQHGAGAMRRRPWVARRRRYVVPAGLVGSWLFRFVSQTARLFGPAIFEASKLKVLFLGVDDEAGSKQHGPLPRTYTLTHSDVTARLTLAVSHTINRAQLQGWYNRLQRDEVVAEWKKVRGRMSLHVHCHISGGHFLLDLIAGLRYVIFRKELPVVLKAFVHGDGDLFSRHPELEEATVWVYFHSNLARFNRVECWGPLRDAAAPAEDDSAAPADSSNSKDGQMMAMCEWPHRCPQQCDCCFPPHSLIPWPNEHDMATAAAADASGSAQQQ

SEQ ID NO: 16520 - protein, 219 aa, Zea mays
  VARIANT 117: note = Ancestral polymorphism is G, Derived polymorphism is W
  VARIANT 115: note = Ancestral polymorphism is L, Derived polymorphism is R
MGKQLCDMHRSRRRARIVAAALLSAFAAAAAALTVYLVFRPLKPQASVVRVAVYRMATAAGNSSEGRAPPPYTLAASARFTALLHNPSDRAVVFYDGLFAYVTYRGEMVAPPAPLPGVAQGRGADVALSPHFGLGGAVPVPVSADAAQALEGDCAAGRVELRLVVMGRVKYMSGPFRTGWRGLYLRCDVTVGLWVDATAGDDGAGDVPLLEYPKCSVDA

SEQ ID NO: 16521 - protein, 679 aa, Zea mays
  VARIANT 210..679: note = Derived polymorphism lacks residues 210 to 679
MYIGRGASALSFSHKLRFLPTASFQVATARVREEGEKRLSESTPARGAEVGMGGGLDEAVKVVDLEDGEGEEEAEAAAAEGSSMEMGMLPRMPVRVLLAEGDDSTRHVISALLRKCGYRVAAASDGVKAWDLLKEKSFNVDLVLTEVELPLMSGFLLLSTIMEHDASKNIPVIMMSSHDSVSMVFKCMLKGAADFLVKPIRKNELRNLWQHVWRKQLANGGPNVQHIQREENLAERIQQKTGVTKSDNLDRDVPCKNRECSEQESDAQSSCTRSELEAESKQTDNILEYKQSTQRHLSIPSHKNVELNGQTKIQTEGNNLIPAREDDLSPKKRTCLNENNSERASRDMELVHIMENQQKYNTQWEVDTMRTTSRGNDEKGSIPAHQLELSLRRTDYGKLENHEKNDRRTLNHSTSSAFSLYNCRAVPTLGNAGDGQLCSTSETLVDVENKNGDSADPSQDMTETNRPPIRVVPVPVQGLTFDGQPFWNGTPVASLFYSQSTPPIWNSKTSMWQESTPQATSLPQKSPQNEPNEMGAKPVINAGEQFAMGPPSASGKQLHVEILNDDPRHISPMTGESGISTVLDSTRNTLSSSGCDSISNQITAPTESSNVYKDVPETPSAEGSRHLSQREAALNKFRLKRKDRCFEKKVRYQSRKLLAEQRPRVKGQFVRQDHSIQGS

SEQ ID NO: 16522 - protein, 736 aa, Zea mays
  VARIANT 232..736: note = Derived polymorphism lacks residues 232 to 736
MESCHGEENIWYKCKNSVSTCWVDFEKQLNGHHFSQLCSVKGDSRKSLEADAYASYMKGALFSEQDKNIDATIINFKNTRAIYEEPGKYGSIENELLCYQCIEEVEPMIDLCSHKLGGSYLQAHELLDTANDLLNEDGCGLEGCVLLGFDIRDVQSPEDIVAAERLVFPGVGAFGSAMDVLNRTGMADALREYIQRDRPFLGICLGLQLLFDSSEENDPVSGLGVIPGVVRRFDSSNGLIVPHIGWNALQITKDTPLLQGADGQHVYFVHSYHVLPSDVNRDWISSICNYGDSFISSISMGNIQAVQFHPEKSGATELSILKEFLRPNSLGTKNEGDEMASKVAFDHPERFSEKFEFSADNIKPLVQTCMTTLSSKMGHQLLGAIKVSIYQTQFCFICCHLTYGEKEGDELKRNADVQEIHRRTIFNPVSRVNMPKTIYDHDSACFRRNVWLGDLNYRINLPYEKTHELISKQDWNELFGKDQLKVELKKGIYLKDGPKGSSTFLQRVHVHNLVIEQSLVSQSTEFEAAIQNDDKSSLRALCEKNTKNLCRSDEERETWGFLRVMFEDGDFARTKLLAHLGFEPPQAPPASSTNELSQILADTLNIDHAAVTDNADAQFLIDNGDDFFNNPQPSEASLAEESVSTNGQQIEQEVPGDAVPSDPSIDKSIQHALVVGDYKGAVNQCLASNRMADALVIAHAGGSALWESTRNHYLKNSISPYLKVVSAMVGNDLMSF

SEQ ID NO: 16523 - protein, 401 aa, Zea mays
  VARIANT 337..401: note = Derived polymorphism lacks residues 337 to 401
MLPSPPATSPARLHKLVTSQQDPLLALELVNVTSPTTTPHPATLHSLLLRLARRRDHLPHALALLRRLPSPPSPRLLLPLLLAALRLRRPPQLFLSTFNSLFVSGPSPLPLHPHLLLRLLGVLSSTPSHFPSALHLLRLVSSRLPLPAPLVLASHNLLIDAAARSGHVAVSLSLFHRLRSLHVSPDADTYRILTQSLCRKAQVRTAATLLDEMLHRGIPADPLAYTTVLNALCRKKQLREAYRLLCLMRGRGVSPDIVHYNTVIVGMCREGRPLDACKVVVDMMDNGCTPNAVTYGTVVNGLCVSGLYDKAEAYLVDMVGKGLVPHFSVFHSVIRGCCTVGKVEEAAQIMSRMLDLGVVPHVESWSSVIRCVCKDEDCIEAELLQIVGRQRGSNMISDRVP

SEQ ID NO: 16524 - protein, 348 aa, Zea mays
  VARIANT 119: note = Ancestral polymorphism is R, Derived polymorphism is W
MATRIALCLLGHVLLAVASMAVAAAAGDAGKIGICHGRVGSNLPPPSAAAALLKRNGITKARLFLPDPAVLPAFAAAGIDLMVGVPNENLTFLAAAGPEGAAQWLRSAVLAHAPAERVRCLAVGNEVLYNNQFYAPHLVPAMRNLHAALATLGLDGRVKVSSAHASSVLAASYPPSAGAFDAASLPVLRPMLRFLADTGAPFMVNAYPFISHVNDPANVQLAYALFGAGAAPVQDGALVYTNLFDATVDALVAALEKEGFDGVPVAVTETGWPTAGHPAATPQNAAAYNAKIVERAARGVGTPKRPGVPVEVFLFDLYDEDGKPGPEFERHFGIFRADGSKAYDINFA

SEQ ID NO: 16525 - protein, 164 aa, Zea mays
  VARIANT 116: note = Ancestral polymorphism is H, Derived polymorphism is Y
  VARIANT 98: note = Ancestral polymorphism is A, Derived polymorphism is V
  VARIANT 89: note = Ancestral polymorphism is R, Derived polymorphism is C
  VARIANT 74: note = Ancestral polymorphism is V, Derived polymorphism is L
  VARIANT 71: note = Ancestral polymorphism is A, Derived polymorphism is V
  VARIANT 69: note = Ancestral polymorphism is Y, Derived polymorphism is H
  VARIANT 58: note = Ancestral polymorphism is G, Derived polymorphism is D
  VARIANT 57: note = Ancestral polymorphism is T, Derived polymorphism is I
  VARIANT 53..164: note = Derived polymorphism lacks residues 53 to 164
  VARIANT 30: note = Ancestral polymorphism is S, Derived polymorphism is F
MDASGAGSKAKKGAAGRKAGGPRKKSVSRSVKAGLQFPVGRIGRYLKKGRYAQRVGTGAPVYLAAVLEYLAAEVLELAGNAAKDNKKTRIVPRHVLLAIRNDVELGKLLAGVTIAHGGVLPNINPVLLPKKVAEKASSGGSKESKSPKKAAKSPKKAAKSPKKA

SEQ ID NO: 16526 - protein, 967 aa, Zea mays
  VARIANT 602..967: note = Ancestral polymorphism lacks residues 602 to 967
MSDSPVELPSRLAVLPFRNKVLLPGAIVRIRCTNPSSVKLVEQELWQKEEKGLIGVLPVRDSEATAVGSLLSPVVTALVGVGSDSGEGGSKVGGSAVESSKQDTKNGKEPIHWHSKGVAARALHLSRGVEKPSGRVTYIVVLEGLCRFSVQELSARGPYHVARVSRLDMTKTELEQAEQDPDLIALSRQFKATAMELISVLEQKQKTVGRTKVLLDTVPVYRLADIFVASFEISFEEQLSMLDSVHLKVRLSKATELVDRHLQSILVAEKITQKVEGQLSKSQKEFLLRQQMRAIKEELGDNDDDEDDVAALERKMQNAGMPANIWKHAQREMRRLRKMQPQQPGYSSSRAYLELLADLPWQKVSEERELDLRVAKESLDQDHYGLTKVKQRIIEYLAVRKLKPDARGPVLCFVGPPGVGKTSLASSIAKALNRKFIRISLGGVKDEADIRGHRRTYIGSMPGRLIDGLKRVSVSNPVMLLDEIDKTGSDVRGDPASALLEVLDPEQNKAFNDHYLNVPFDLSKVIFVATANRMQPIPPPLLDRMEIIELPGYTPEEKLKIAMKHLIPRVLEQHGLSTTNLQIPEVLHSWSFCCYLSLASSYSSSSCLTALFYFLSCVQMMHTCWSFVQAMVKLVIERYTREAGVRNLERNLAALARAAAVKVAEQVKTLRLGKEIQPITTTLLDSRLADGGEVEMEVIPMEHDISNTYENPSPMIVDEAMLEKVLGPPRFDDREAADRVASPGVSVGLVWTSVGGEVQFVEATAMVGKGDLHLTGQLGDVIKESAQLALTWGYMYIVRRKSWVHRNITKQDLPIPIHKLLYLPVRARAADLNLSPTSDINLLESRDIHIHFPAGAVPKDGPSAGVTLVTALVSLFSNRKVRADTAMTGEMTLRGLVLPVGGVKDKVLAAHRYGIKRVILPERNLKDLSEVPLPILSDMEILLVKRIEEVLDHAFEGRCPLRSRSKL

SEQ ID NO: 16527 - protein, 462 aa, Zea mays
  VARIANT 351..462: note = Derived polymorphism lacks residues 351 to 462
  VARIANT 330..462: note = Derived polymorphism lacks residues 330 to 462
MDADDPSAATASSSDETFFDALDSLPSPSPSPSPSPSPSPSPSHISSSTLHRRPRRAKSVKQPDSILSSPPSASAATSTVTAVEDEHLKPDSSEATSATSRTDPAPKEEEEQEEEEEEDIKATDVDAVVEVEAPAPTATPSPAPSILEYLAVLVVKAVVFQVSALVSCLAFPVRLLQWWFLFVTDPLGLARRARAWVLGMAGDAAGTLIARLGGGDGMGKVARRIVWGSLWAAYVCAVLCALLIMAFLGGGLLVGRIVEEPVQVTETLNFDYTKPSPMAFVPVPRLVPPNQRMQLEVLLTLPESDYNRRLGVFQVRAEFLSADGKVISTSSQPCMLKFKSVHMHFIETFLQSVSLLSGYSSESQVIRLKMRGITQGLEPTTAVRIILEQRAEFGRGAGIPEIYVASLKLEGELPLVRRLLWNWRWTFFVWSSTGLFAIELLFGLVCCRSCIFPRSGHNVAAP

SEQ ID NO: 16528 - protein, 272 aa, Zea mays
  VARIANT 143..272: note = Derived polymorphism lacks residues 143 to 272
MRGTKRPLGVVTSWVRRQPPKVKAFLAVVTGMAALVFIRFIVHDHDNLFVAAEAAHALGIGVLIYKLTKEKTCAGLSLKSQDLTALFLAVRLYCSFVMEYDIHTILDTATLVATLFVIYMIRFKLRSTYMVDKDNFALYYVVLPCAGLALLIHPSTSHNIVNRISWGFCVYLEAVSVLPQLHLMQNTKIVEPFTAHYVFALGVARFLSCAHWVLQVLDTRGRLLTALGYGLWPSMVLLSEIVQTFILADFCYYYVKSLVGGQLVLRLPSGVV

SEQ ID NO: 16529 - protein, 232 aa, Zea mays
  VARIANT 208: note = Ancestral polymorphism is Q, Derived polymorphism is R
  VARIANT 206: note = Ancestral polymorphism is A, Derived polymorphism is V
  VARIANT 199: note = Ancestral polymorphism is S, Derived polymorphism is Y
  VARIANT 188: note = Ancestral polymorphism is P, Derived polymorphism is T
  VARIANT 75..232: note = Derived polymorphism lacks residues 75 to 232
  VARIANT 37..232: note = Derived polymorphism lacks residues 37 to 232
  VARIANT 30: note = Ancestral polymorphism is S, Derived polymorphism is L
  VARIANT 27: note = Ancestral polymorphism is Q, Derived polymorphism is H
  VARIANT 19..232: note = Derived polymorphism lacks residues 19 to 232
MSFANPAIINDVTFHPCVRFRPWESNQILSFVPPNGQFKLTSYRVQKLKKTPIYVKPQLTSDSRNCHVSVMVGIRNDPGKPIDSITRQFQLPPLIVSADLTANYGTVDILADKVSLLPTISSTVTPLIPDLVTGQGKGPGMHLVSDEVYASTALADPGFVSVLEVAAAAAREDANAGSLAERVHVVEPGWFRVCFANVSAKTLDVALQRLADFAEAKATRGPARRLLAAAGV

SEQ ID NO: 16530 - protein, 130 aa, Zea mays
  VARIANT 104: note = Ancestral polymorphism is D, Derived polymorphism is Y
  VARIANT 108..130: note = Derived polymorphism lacks residues 108 to 130
MNHKNRLELNVSKVLCKLRRLEQGGPCELEVLGNKGMVQLNGRSISLGTKVPLTGEDEVIFNSCGKHAYIFQHPLSDKVPKTVPSCAVSLIEPPVASVKRIRTDKRTGDTSAIALAVHFSTCCRGLARVG

SEQ ID NO: 16531 - protein, 276 aa, Zea mays
  VARIANT 260: note = Ancestral polymorphism is R, Derived polymorphism is P
  VARIANT 25: note = Ancestral polymorphism is P, Derived polymorphism is L
MRVKKRSKHRKAVKFYATCFGFREPYKVLIDGTFVHHLLTQRLLPADEALRDLLSASRTPALFTSKCILAELRRLGKSHAESFDAAQLLTTTKCEHDKVVGAVNCVQSLIGDKNPEHFFVATQDPGLRENLREIPGVPVIYGLKNSLCIERPSMQQRKFAQLDEEKRLNMDISEYKKLLKAASEGKTIASENGSGEEQHEMPISSLVKNALHVTDKTKFKRNKAKGPNPLSCKKKKPKLPTAIQKQAGTADGEAKRKRVRKRKRGQKDNKQLEAAN

SEQ ID NO: 16532 - protein, 322 aa, Zea mays
  VARIANT 79: note = Ancestral polymorphism is Y, Derived polymorphism is S
MDGSKGSVGGGDGTGPEKPSADSNPSLDPPQPTAAAVEATDDGAAAAAAEAARRPFTALSQEEADLALARVLQEQERAYMLLRMNGGGGEGSDYGSSDEGSYEYDEEGEEDYEEELEHRLRVHHHEHPSGDGEGEGGGEGEGAEGSDYDEEFEEDEEGEPEVDPAEFEDDEAYARALQDAEEREVAARLMALAGLSDWRTVEVEHEEDHANDPQEAWQEVDPDEYSYEELVALGEVVGTENRGLSADTLGSLPSVTYKLQHVQDGNTEQCVICRVELEEGESLIALPCKHLYHPECINQWLQINKYIFQHFCWRIMPCQPLP

SEQ ID NO: 16533 - protein, 447 aa, Zea mays
  VARIANT 62: note = Ancestral polymorphism is Y, Derived polymorphism is H
MAFLTILLLARISSSIAISSNYISRSAEQQVIATVAPAIVPDIDGQGAQPFLTSPSGSYAAYLRRAVDGAGGLGGDACYVQVQQDGASGSVWESDCTPVGGADACDLSFSPVGLELFAGGHSLWDTGVDADPGTLSLDDGGDMKIVSKEGVTVWTASGEPWTGQQCGAPLPVSTTAPSMEALPPPSTATATASTKLVTPPAATLAGAGSADSPYGDQPAPPPVDTLPDFPGQPPVDTAPEQPLPPPPADASPALPDLSLPPPPAYTPPDSPDQPLLAPPPADMLPDEPLYSSPPPAPATFGPQTPLLPPFGVPLAAPPTGDTVPDTATPSGEPGSPGRVPFSGPSPVGMPHQHGHPHQQPLVGSPPLPDALAPGVHGAGAGQPGAPFGHGQQQAGQGVFGQQPQLLNGEGQPLEDSAAGGWSRTRSESGRVAACVALFGLMTLGFAF

SEQ ID NO: 16534 - protein, 191 aa, Zea mays
  VARIANT 99: note = Ancestral polymorphism is V, Derived polymorphism is E
  VARIANT 33: note = Ancestral polymorphism is I, Derived polymorphism is N
  VARIANT 28..191: note = Derived polymorphism lacks residues 28 to 191
MRGARVLLAGAPQPLASDPSLDAPQRAQLERAIGATTTVLFVATVSYVALSAIFSCLCSGGGSSRRRQQPDGGDTRPQLPSAAAEETKRALEEIPVVVVVAQDPAGSGGGAGAEDGSEEPGECAVCLAEYAGGEEVRVLPACRHGFHRACVDRWLLTRAPTCPVCRAPVAAHAEPPDAKDRSTGDVDAAFP

SEQ ID NO: 16535 - protein, 152 aa, Zea mays
  VARIANT 43..152: note = Derived polymorphism lacks residues 43 to 152
  VARIANT 53: note = Ancestral polymorphism is K, Derived polymorphism is N
  VARIANT 75: note = Ancestral polymorphism is R, Derived polymorphism is M
  VARIANT 77..152: note = Derived polymorphism lacks residues 77 to 152
  VARIANT 81: note = Ancestral polymorphism is R, Derived polymorphism is M
  VARIANT 84: note = Ancestral polymorphism is G, Derived polymorphism is V
  VARIANT 85..152: note = Derived polymorphism lacks residues 85 to 152
  VARIANT 89: note = Ancestral polymorphism is A, Derived polymorphism is V
  VARIANT 125..152: note = Derived polymorphism lacks residues 125 to 152
MTHDEAIATQKTRNTASPSKAGQKVREESERLRVCDSRNYNAQFKIFEPLEYKYDVCETILLWEQYRNMTTVLTREYLDVRPDGWLDYAAKRTAQLGVDKCYNRTLCDELLSIVLPAKPPFHPRQFATCAVVDQQLHGFLPADSNSDFLEEL

SEQ ID NO: 16536 - protein, 410 aa, Zea mays
  VARIANT 153: note = Ancestral polymorphism is A, Derived polymorphism is T
MVGSSPLQAVLVAPGVKDRKVLAFKRDALKDKDAVSGLIHSILASSPAQRSAFYVFDLAKVVDLFRAWRRALPDARPCYAVKCNPDPALLGALAALGAGFDCASRAEIEAVLALGVRPGDIVYANPCKPEAHLEYAAEVGVNLTTYDSEEEVAKVRRCHPGCELLLRLKGPDGGDVRVDLGTKYGAHPDEVVPLLRAAQRAGVGVAGVSFHVGSGASNLHVYRGAIQAARAAFDAAAALGMPPMRVLDIGGGFVSGPTFDDAAAVINDALAHHFGDLPCVEVIAEPGRYFAETAFTLAARVIGKRTRGEVREYWIDDGLYGSLNCIIMDHYVPTPRPLASPRPGDKTYTSTVFGPTCDSLDTVLTGYLLPEMSVGDWLVFDDMGAYTTGAGSNFNGYATSDIKIYVAYSS

SEQ ID NO: 16537 - protein, 888 aa, Zea mays
  VARIANT 528: note = Ancestral polymorphism is D, Derived polymorphism is G
MWNPLSWVMEAAAIMAIALANGGNKPPDWQDFVGIITLLIINSTISFIEENNAGNAAAALMARLAPKAKVLRNGRWTEEESAILVPGDIISVKLGDIIPADARLLEGDPLKIDQSALTGESLPVTKGPGDGVYSGSTCKQGEIEAVVIATGVHTFFGKAAHLVDSTNQVGHFQKVLTAIGNFCICSIAVGMLVELVVMYAIQHRAYRPGIDNLLVLLIGGIPIAMPTVLSVTMAIGAHRLAQQGAITKRMTAIEEMAGMDVLCSDKTGTLTLNKLTVDKSLVEVFQRGVDQDTVILMAARASRTENQDAIDATIVGMLADPKEARAGVQEIHFLPFNPTDKRTALTYLDGEGRMHRVSKGAPEQILHLAHNKSDIERRVRAVIDKFAERGLRALGVAYQEVPDGRKESPGGPWQFIGLLPLFDPPRHDSAETIRRALNLGVNVKMITGDQLAIGKETARRLGMGTNMYPSSALLGQNKDESIASLPIDDLIEKADGFAGVFPEHKYEIVKRLQARKHICGMTGDGVNDAPALKKADIGIAVADSTDAARSASDIVLTEPGLSVIISAVLTSRAIFQRMKNYTIYAVSITIRIVLGFMLLALIWKFDFPPFMVLIIAILNDGTIMTISKDRVKPSPQPDSWKLAEIFATGVVLGGYLAMMTVIFFWAAYKTDFFPRLFHVESLEKTAQDDFQKLASAVYLQVSTISQALIFVTRSRSWSFVERPGFLLVFAFLVAQLIATLIAVYANWAFAAIKGIGWGWAGVIWLYNIVFYFPLDIIKFLIRYALSGRAWNLVLEQRIAFTSKKNFGTEERERKWAHAQRTLHGLQPPEASIFENKTTFNELNQLAEEARRRAEMARLREVSTLKGRMESVVKQKGLDIETIQQSYTV

SEQ ID NO: 16538 - protein, 444 aa, Zea mays
  VARIANT 73: note = Ancestral polymorphism is R, Derived polymorphism is P
  VARIANT 85: note = Ancestral polymorphism is G, Derived polymorphism is D
  VARIANT 268: note = Ancestral polymorphism is A, Derived polymorphism is G
MEVKVLSSKLVKPAYNAGAGPAPAVSADEYTPLTIFDVVTYKMQMAIIYAFPPPAPSTAAIENGLAAVLAEYRAFAGQLGVAPDGTPAVLLNDRGARLVEAAVDADLVDMAPAKPTPELLRLHPDLEEEELQEVVLLQLTRFRCGSLAVGFTSNHVVADGHATSNFLVAWGRATRGLPTGLPPVPRQAGLFKPRPSPRVDFDHRSREWYLPSPAETEKQHGHGREGAAAAESIVIQKAHFTKDFIARLRAKASEGRGRPFSRFETVLAHLWRAMTRARGLSPDETSQIRLSVDGRHRLGLPAEYFGNLVLWAFPTATVADLLGRPLKHAAQVIHDEVASVDGSYFRSFIDFATSGAAEREGLAPSAVCKDVLCPNVEVDSWLTFPFYELDFGTGSPTYFMPSYFPTEGMLFLVPSYIGDGSVDAFVPVFQQNLEAFKECCYAMD

SEQ ID NO: 16539 - protein, 90 aa, Zea mays
  VARIANT 75: note = Ancestral polymorphism is P, Derived polymorphism is L
  VARIANT 63: note = Ancestral polymorphism is T, Derived polymorphism is I
  VARIANT 62: note = Ancestral polymorphism is A, Derived polymorphism is G
MPYKINPIDFENSDGNLGQVNSILSGISMKLPISRLQLDLTDLTVLRNLGMGLGHSLLAYKGTMRGISKVQVGDPELVLCLVTDDIVGYR

SEQ ID NO: 16540 - protein, 99 aa, Zea mays
  VARIANT 92: note = Ancestral polymorphism is R, Derived polymorphism is H
MTRSTKEAHAVISNVVLPWLQGHPISRICTYMHFVIASEDKKKCIEIPAACELLNLVLGLQLRPQVDKLNNYLMYQNDYKVITMDQWMGFIRFCNDLTF

SEQ ID NO: 16541 - protein, 449 aa, Zea mays
  VARIANT 276: note = Ancestral polymorphism is M, Derived polymorphism is V
  VARIANT 307: note = Ancestral polymorphism is G, Derived polymorphism is A
MDVKVLSSKLVKPSYPAGAPRPDTTEHVPSSVFDRATYNMQMAIIYAFSPPGPSPGAIERGLAAVLGAYRLFAGQVRAGPDDGGAPGVLLNDHGARLVEASVDARLADIAPTKPSPAVLRLHPDLDGDIQEVVQVQLTRFACGSLAVGFTANHAVADGHATSDFLVAWGRAARGLGPSSSPVPVHRPGLFPPRHPPRAEFEHRGVEYCYYRPAPPSPAHAHHPAAAHGGDTRHSVVIHKAHFTKDFVAGLRARASQGRGRPFSRFETILAHVWRAMTRARGLGVDPLQTSTVRISVDGRPRLAAPAGYFGNLVLWAFPRATVGDLLSRPLKHAAQAIHDAVARVDGAYFQSFVDWASSGAVDKEVLQTTAVLKDVLCPDLEVDSWLTFPFYELDFGTGSPTYFMPSYFPTEGMLFLVPSYLGDGSVDAFVPLFEHNLEAFKQCCYSMEE

SEQ ID NO: 16542 - protein, 169 aa, Zea mays
  VARIANT 51: note = Ancestral polymorphism is S, Derived polymorphism is N
  VARIANT 63: note = Ancestral polymorphism is G, Derived polymorphism is R
  VARIANT 95: note = Ancestral polymorphism is L, Derived polymorphism is S
  VARIANT 103: note = Ancestral polymorphism is D, Derived polymorphism is H
  VARIANT 112: note = Ancestral polymorphism is E, Derived polymorphism is G
  VARIANT 127..169: note = Derived polymorphism lacks residues 127 to 169
MKKIFELHAATIESGQGIDWAVAEALAFATLIVEGNHVRLSGQDVERGTFSHRHAVLHDHETGAKYCPLDHVAMNQNEELFTVSNRIKTLAGASLLIFANKQDMQGALKPTGIAKIWLPLYCSLLEQSLSDSSSPPGSPAGTQGLRSTPQTSTVAPPISSMASGARRCP

SEQ ID NO: 16543 - protein, 300 aa, Zea mays
  VARIANT 189..300: note = Derived polymorphism lacks residues 189 to 300
  VARIANT 190: note = Ancestral polymorphism is R, Derived polymorphism is P
  VARIANT 204: note = Ancestral polymorphism is K, Derived polymorphism is N
  VARIANT 205: note = Ancestral polymorphism is G, Derived polymorphism is S
  VARIANT 257: note = Ancestral polymorphism is D, Derived polymorphism is A
  VARIANT 269: note = Ancestral polymorphism is I, Derived polymorphism is T
MASTSTFLSTLASRSAAADSLRSAVPSFAKIVRFLPAQAQISRRRRAAVLPTPRAAVSGTEKAPSSKHERVVRVHSTQEFDDALKAAKNRLVVVEFAASDSEDSSQIYPTMVQLSRTCGDVDFLLVLRDDESEATEELFRREGVTKVPHFNFYKGAEKVHEEEAIGPERLAGDVLYYGDSHSAVVQLHSREDVEALIDEHRGDKGKLVVLDVGLKHCGPCVKVYPTVLKLSRSMVDNTVFARMNGDENDSCMEFLRAMKIVEVPTFVFIRDGQIVGRYVGSGKGELVGEILRYNGVRVTY

SEQ ID NO: 16544 - protein, 202 aa, Zea mays
  VARIANT 185: note = Ancestral polymorphism is A, Derived polymorphism is V
  VARIANT 81: note = Ancestral polymorphism is N, Derived polymorphism is K
  VARIANT 32: note = Ancestral polymorphism is R, Derived polymorphism is K
MFSLSQIEHDLPMPPHLLSRPLPDAIKAELERLFLDKVITKLGLCVSVYDIRSIEGGSIHPGEGCSTYKVSFRLLMFKPFNGEILVGRITGYDDKGLQVSLEFFSDICIPGHLMQFGTVRGPDGRWMLKTELGDELYLDLDDEIRFLVSSTKYPPIPIDQNEDDPPFAPMQIVGSIKGDGLGLLVWWAADEEEGEEAAEEEQ

SEQ ID NO: 16545 - protein, 183 aa, Zea mays
  VARIANT 44: note = Ancestral polymorphism is R, Derived polymorphism is Q
MRIGGVGKPIKLTRPGVGEFQAENDTGSFGAEMWLDTVLQYKGRSHPTFMPPRVVATADLTNGPDRSTPSLSARRGAGDARPVPRLLLLWLPDAMGLAIFRTVCYAFSNVGEVCGVDLTDKVVDIIFHVFDANCDGNMSSEEFLRSLQRRENDIRQPATSDFLGVIACWLNCTKCSLQKMLPQ

SEQ ID NO: 16546 - protein, 114 aa, Zea mays
  VARIANT 15..114: note = Derived polymorphism lacks residues 15 to 114
MMSSLKLTEVVSKRWGGGGSSSKVTSPSAAACPRGHFAAYTREGRRFFVPIAYLASDTFRELLSMAEEEFGEPGARPIVLPCSASHLEQILDAFRSGGGAKKKKESAGRISKIW

SEQ ID NO: 16547 - protein, 225 aa, Zea mays
  VARIANT 103: note = Ancestral polymorphism is G, Derived polymorphism is R
  VARIANT 112..225: note = Derived polymorphism lacks residues 112 to 225
  VARIANT 137: note = Ancestral polymorphism is A, Derived polymorphism is T
  VARIANT 154: note = Ancestral polymorphism is V, Derived polymorphism is I
MAMEVPVLCHPPMQAKLPAVVLINNSLTKSGQLGIAFFGAISKYRNISRFISPISQTSTKNIGPCCSFSSSSDGNGYMARNSSESDKDYVNSTVLEAVEVRSGSEGYVIKMRDGKNLCCVHSNFQGRNIPESAPQPTIVLRIEDGSRTLLLIIVLEMPSVLLMAAIRNVHNARATIYQVVKEMIDKMGYEVIFLLVSICSRYAYLVKEKLIHLIAPSIMMVVLGS

SEQ ID NO: 16548 - protein, 235 aa, Zea mays
  VARIANT 43: note = Ancestral polymorphism is R, Derived polymorphism is C
  VARIANT 70: note = Ancestral polymorphism is Y, Derived polymorphism is H
  VARIANT 103: note = Ancestral polymorphism is Y, Derived polymorphism is D
MAPAARWSTSPVLFLLLLLAAATATTTTTAKDGHPSPTPWPERFHAVLFTNLTNYTEASTGPPLRVTDLYYDWPRRRNLNLVRHQLSADPLYDVEWNNGTGFYFDSKACRVEQFPVGVLPPWWLSGGGAEYVGRRVAGGIDCHVWGKAGFIFYYEEARTGRPVRWDFVDVTGIQQFVMSFEPGAALEDDAQWQAPAYCFPDDDDAARSSGEEEAGVGLEAASRLLRKLAGAAATY

SEQ ID NO: 16549 - protein, 730 aa, Zea mays
  VARIANT 288: note = Ancestral polymorphism is A, Derived polymorphism is T
MSRVASLSPSLSGDEVEVEEEEEDEGVDGYRKGGYHAVRPGDQFAAGRYVAQRKLGWGNFSTVWLAFDVQSQRYVALKIQKSAPEFAQAALHEIEFLSEITKKDPLNCKCIIQLIDHFKHTGPNGQHICLVFELLGDSLLKLVQYNRYKGIGLDRVRQICKSILVGLDYLHNELGIIHSDLKLENLLLLSTIDPSKDPIRSGLKPCLERPEGNPNGEAGINAIENKLKMRARRVLAKLAEKRKSAVESSRSERSLGGIDLTCKIVDFGNACWADKQFTDFIQTRQYRAPEVILGAGYSFSVDMWSFACIAFELATGEMLFTPKEGHGYSEDEQDHLALMMELLGKVPKKIATTGTRSKEYFDRHGDLKRIRRLKLSSIERVLVDKYKISESDAREFANFLCPLLDFAPEKRPTALGCLKHPWLHYNEDKTCQSLNNNDAKNIDLAQSPGSITSGYCTNIDLTSKKGGPTGTCDKTADAKYNTRSITSNATMNTDVQPNIGSIANGLAKNVDVNPNIGSITNRDAKSSDMKPHIGSITISNAKSSNVKLDTGNITDRNAKTVDIKPNSDISSRDDKSSNVDTTTSSVINKDAKRSIRSVVNSYIKNFDAKCNTGSTANSDARDPSDTKSSTKIVSSADNAKCVDIKPISGSDKSNDTSDKSNDTVDANVKSNSGIVANSDASNTDVQTNTGSVDSSDDYSIDSKPNIGRVAASIQRLESSMGKYRADLSQD

SEQ ID NO: 16550 - protein, 798 aa, Zea mays
  VARIANT 35: note = Ancestral polymorphism is N, Derived polymorphism is S
MSPREQTSLLSRQRCWRRARDLFNRLRALPGYAPNPVHDAVLLRHLARARRWAELHRAWIGMPFPPSNPAYAALADALAKAGLARGALLLLRHMRTRGVAPDEVSMNTFVRILKDEGRHDDALALFHSWCDGRFEVDFLDLDCITVDLDGPMQFLLADMYDDKIAAPAAGVAPERPRKPKLVVTYNVLIDLYGKAGKLKNALDMFLDMPAHGVMPDTYTFNTLINIFGFSGNSAQAEVLFASMVIRGVKPDTKTYNVMMTVFASIGDLEGVLKYYCQIRNAGLHPDAVTYRILLQVLCERKMVHKAEDVIEGILKAGSFVHEQSLPVVMKMYVDLGLLDEAIAFFEKHCRGKGVSSKNFSAIMDVFAGRGLWEEAEHIFCSERGDGNEKDIVEYNVMIKAYGQAKQYDRVSSLFESMEESGVPSDECTYNSLIQMFSFGGFPHRAKKLLGKMKDAGFEPKCETYSAIIRSYSRHCLVPEAIDLFNEMKASGVEPNVIVYGILIDMFAETGNVKEALHYSNLLEQSGISPNHIVLTSLIKAYSKFNSWKEAQDLYSRMNDMDGGPDIIASNAMLNLYAKLEMVTEAKEIFDSLRRNNHADAVSYTTMAYLYKSIGLLSESIRITHKLQKSGLLSDCASCNAVMACYGAKGNLRDCAELVHQMVVANIPPDASTFEMIFSLLKNGHVSTKEILQLESAYDDGKKSAKQAIIAFLFSVAGMHDAALEICGKMLMPQSTLDACAYNVCFKVYASSRKVEKAFSLFMWMRDLGLKPDTSTCNHLATCYGRLGALEGTISYFWA

SEQ ID NO: 16551 - protein, 736 aa, Zea mays
  VARIANT 108..736: note = Derived polymorphism lacks residues 108 to 736
MPRLLLLLLVTAIAAKDLSASETVGDGDQVRSDGSIVRSSNIDLGNNFIKYILCCLIVRVISMQVYIVYLGHLPSSADASEHTEGFSAVELAHHDMLDQVLDGGSSASDRILRSYKRSLNGFAAKLSKEEAHKLSGMNGVVSVFPSRTLDLLTTRSWDFLGFPQTPIQELPLEGDVIVGMLDTGVWPDSPSFSDEGFGPPPSSKIIGARAYNGGSSSSGQSPLDDDGHGSHTASTAAGRAVGNVSMYGLAGGTARGGVPGARLAIYKVCCGEADILAGFDDAIADGVDVISISIGSPFPFDYFGDVIAIGSFHAMRRGVVTSAAAGNSGLDLGNVCNVAPWMLSVAASSIDRRFVDRIVLGNGKTIVGASINTFPTLSNATLAFPVNGSCDPENLAGGSYKGKIVLCQNAAANDGSGPLLAGAAGVVIVSRIPDVAFALPLPGLTVSQDQFDQTMAYVNSTSHPVGTIDRTETTVDPHSTSSGSRLLLFSRPQPDHPSSLEGIPNDTRKVQYNIISGTSMACPHASGAAAYVRSFHRDWSPAMIMSALITTATPMDTAANSNASALKYGAGQLNPVSAHDPGLVYDASESDYVAMLCAQGYNATQLALVTGSNATAACSNGSTTPGSPGDLNYPTMAAPVEPGKNFTAVFPRTVTNVGAATAVYDVRVGVPAEAASVVSVQVSPARLVFSEQNQKVSFTVTVSGAALEEGTVYSFTVVWYNDEHTVRSPVVVYAMQ

SEQ ID NO: 16552 - protein, 489 aa, Zea mays
  VARIANT 397: note = Ancestral polymorphism is S, Derived polymorphism is N
  VARIANT 286..489: note = Derived polymorphism lacks residues 286 to 489
  VARIANT 185..489: note = Derived polymorphism lacks residues 185 to 489
  VARIANT 147: note = Ancestral polymorphism is G, Derived polymorphism is R
  VARIANT 145..489: note = Ancestral polymorphism lacks residues 145 to 489
  VARIANT 141: note = Ancestral polymorphism is A, Derived polymorphism is G
  VARIANT 135: note = Ancestral polymorphism is N, Derived polymorphism is S
  VARIANT 112: note = Ancestral polymorphism is G, Derived polymorphism is R
MEALLKWAAELGVSDSPSPPSSSPSGNISSPSCLGGSLVVADFPDAGGRGLAAARDLRRGELVLRLPRAALLTSDRVTADDPRIAACVSAHKPRLSSVQILIVCLLAEVGKGSNSVWYPYLCQLPSYYTILATFNDFEVEALQVYLGRSVDDAIWVAQKAKSAIKSDWEDATPLMKELEFKPKLLMFKSWLWAFATVSSRTLHIAWDEAGCLCPVGDLFNYAAPDDDTLLEDEDTAELTNYQQKNGMTNSSERLTDGGYEDCNAYCLYARKNYKKGEQVLLAYGTYTNLELLEHYGFLLGENPNEKTFIELDLDICSVGTWPKDSMYIHPNGHPSFALLCALRLWSTPTNRRKAVSHQVYSGSMLSTENEMGIMKWLINKCEGTLQQLPTTVEFDDSLLVLLRTIQNSSNCRADAKRSGFEQEFAVFLRFHRAEQDCSGNSLLPFRLMRSVERWELAVQWRCNYKKTLKKCISYCEGLVHELPLQLNQQ

SEQ ID NO: 16553 - protein, 940 aa, Zea mays
  VARIANT 399..940: note = Derived polymorphism lacks residues 399 to 940
MRSLRGVLIPLVLLAGLAFRVDDGGAALLPLPPPALPASPSRLALPGGTPKDDGAAASRSTEVVTAGVRSTEIVAPVGPKKQSLRELLVRPQPARHEPSSLVSGEAKAETRSVLQFYDNGTIQLVDKLSQSPLWEIATGPPLSDHITTTESGPNYLIYPFNGNENMNGNSTELWEVYNGNSVRLPWKLEEFVARSPYIRDSVVTIGSKVSTVFVVDADSGEIIYRHSIPSALKELEGPGVEGAPSKLNVRTSDDSDNIIVLVRTDYSLSASDLGNHLFNWTRTSFTANYYVKYKHPDMLDQSSCLQGDIPCIRTEGLPLALPDLNSANVIVLKDGTPFVSMHGSDALEPVQTPRKLPNTAGKSNILLDDSQNQTHDVARSHAISADPEATLNPTRNTSGWLFPLFPIFLVTGYLLSLISASKSCRQFMIQLIEPFTHNKKTVDIRGRSEGTPKKRKTRKKDGLVNSSETLTASDKECSDTGGSTEAPMKNSALTDALGGRQIGKVYVSNKEIGRGSNGTIVFEGSYDGRQVAVKRLLRSHNDIAEKETRNLIISDHDPNIVRLYGCDHDSDFVYISLERCHCSLADLIQKQSYLSSGESISNNEVSMSINSKISNVKGIDVELWTQDGLPSAQLLKLMRYMNDLICFLLVMLIRDVVAGLVHLHNLGIIHRDLKPQNVLISAEGPIRAKLSDMGISKHLQDDMTSVSHHGTGIGSSGWQAPEQLRHGRQTRAMDLFSLGCLIFYCITKGKHPFGEYYERDTNIVNNRFDLFVVDYIPEAVHLISQLLQPNPETRPTAVYVMHHPLFWSPELRLSFLRDTSDRIEKTSETDLINALESIGPVAFGGKWGEKLDAALVTDMGRYRKYNFESTRDLLRYIRNKSGHYRELSNDLKGILGSLPEGFDHYFASRFPKLLIEVYKVLWVHCKDEEAFSKHFNGSSL

SEQ ID NO: 16554 - protein, 112 aa, Zea mays
  VARIANT 89: note = Ancestral polymorphism is L, Derived polymorphism is P
  VARIANT 88..112: note = Derived polymorphism lacks residues 88 to 112
  VARIANT 78: note = Ancestral polymorphism is R, Derived polymorphism is L
  VARIANT 75: note = Ancestral polymorphism is G, Derived polymorphism is R
  VARIANT 74: note = Ancestral polymorphism is S, Derived polymorphism is F
  VARIANT 70: note = Ancestral polymorphism is V, Derived polymorphism is D
  VARIANT 67: note = Ancestral polymorphism is T, Derived polymorphism is I
  VARIANT 65: note = Ancestral polymorphism is A, Derived polymorphism is T
  VARIANT 55: note = Ancestral polymorphism is D, Derived polymorphism is Y
  VARIANT 27: note = Ancestral polymorphism is R, Derived polymorphism is H
MMRGQRLYDSLKALSDVSSPLNPFLLRLAMVDMLVLFETPPDFALFKALDKGKLDKVEIKKQLEADIITVVDTSGDSRHVWMTRECRWPASSVPDVGAEISIGCHTLSRGFK

SEQ ID NO: 16555 - protein, 258 aa, Zea mays
  VARIANT 103: note = Ancestral polymorphism is R, Derived polymorphism is C
MNSIKSAIFSGHRSHPHVGAAAVPQQQLGSTASFHSTPILQRKHKTQWHNRFNYYTRRRRNRETKRSMLRNMSEYAESLFQSWRDEDEKNAASAGPSWFRGHRWVRNSSNNGFRTHDFYYGNFKSKGGFEFCTSDEDEPENLFRNVFRDQHTYYWSFSSDNFQRNSKRARSQKSRNWSFETDEEDEVSAPSEVSLARQALGLSTSGPLKLEDVKSAYRACALRWHPDRHNGSSKSTAEEKFKHCSAAYKTLCDSLAAA

SEQ ID NO: 16556 - protein, 360 aa, Zea mays
  VARIANT 184: note = Ancestral polymorphism is R, Derived polymorphism is C
MAAAPAAAGGLMQLQPPLCVSPRASASCAPSIWGALPQLRRRRALARAASSVAAGEAEAYTEPELVLLEALLGIQGRGRAVAPRQLQEVESAVQALETQGGIPDPTSSSLIEGSWRLIFTTRPGTASPIQRTFVGVDSFRIFQEVYLRTDDPRVVNVVKFSESVGDLKVEAEATIKDGKRILFRFDRAAFAFKFLPFKVPYPVPFRLLGDEANGWLDTTYLSHTGNIRISRGNKGTTFVLQKSADPRQILLSAISARTGVEEVINDFISSQNGTKADLSILVGEWQLLWCSQTEGESCKNGSGNTFTMSMKEGAVKVGGLQFPLDAQGEFVMEILYIDNKIRISRINQHMLVHLRIANTT

SEQ ID NO: 16557 - protein, 82 aa, Zea mays
  VARIANT 27: note = Ancestral polymorphism is R, Derived polymorphism is I
  VARIANT 38: note = Ancestral polymorphism is C, Derived polymorphism is Y
  VARIANT 48..82: note = Derived polymorphism lacks residues 48 to 82
MKVTVIGLGFVKAEGVVNSMARHGDRRELLKGPLYYACAITLTTIVFWRTSPISIAVICNLCAGDGVADIARRLSLVMPPLP

SEQ ID NO: 16558 - protein, 200 aa, Zea mays
  VARIANT 21: note = Ancestral polymorphism is L, Derived polymorphism is F
  VARIANT 48..200: note = Derived polymorphism lacks residues 48 to 200
  VARIANT 74..200: note = Derived polymorphism lacks residues 74 to 200
  VARIANT 113: note = Ancestral polymorphism is A, Derived polymorphism is P
  VARIANT 118: note = Ancestral polymorphism is M, Derived polymorphism is I
  VARIANT 123: note = Ancestral polymorphism is A, Derived polymorphism is V
  VARIANT 155: note = Ancestral polymorphism is E, Derived polymorphism is K
  VARIANT 165: note = Ancestral polymorphism is D, Derived polymorphism is N
MLLVAQRVNRKRNGCLQEEMLTKLARREKATNIKPDHDIDVYMKVRLLQVLDLEVCANTLVGKEMMRGISGGQRKHVTIENKWEKNGSALMEIDSICEVDSNFEDPQLCVALASDIYMHLREAETKKRPSTDFMEMIQKDVNPSMRAILIDWLVKVAEEYRLAPDTLYLTINYIDRYLSGNKINRQRLQLLGVACMLIAA

SEQ ID NO: 16559 - protein, 171 aa, Zea mays
  VARIANT 93: note = Ancestral polymorphism is D, Derived polymorphism is N
  VARIANT 89: note = Ancestral polymorphism is P, Derived polymorphism is L
  VARIANT 87: note = Ancestral polymorphism is L, Derived polymorphism is P
  VARIANT 54: note = Ancestral polymorphism is D, Derived polymorphism is E
  VARIANT 20: note = Ancestral polymorphism is C, Derived polymorphism is W
MDFFMQLYEGFIRDNVDQFCREGIRLHLIGDSPGLPASLLRAAREANQLATQSESEMVLMLAMGYSGRRDILRACQELATEVQRNLLRPEDIDEALIAGKLGTSIAGGELSYPDLVIRTSGELRLSNFLLWQSAFAELFFSDVMWPDFGEDEYLGALRSYQTRQRRFGQRK

SEQ ID NO: 16560 - protein, 101 aa, Zea mays
  VARIANT 18: note = Ancestral polymorphism is S, Derived polymorphism is F
MHLTLEFGGGLELLLENSTKVHKVEVTTPKDGQGKVTMKFLLSWVKENLIKERPEMFLKADSVRPGVLVLINDCDWELCGGLDAELEEKDVVVFISTLHGG

SEQ ID NO: 16561 - protein, 631 aa, Zea mays
  VARIANT 257: note = Ancestral polymorphism is R, Derived polymorphism is H
MTAYDPKDDVDRLFACFKCGVSPPKSAFRERPLPQAKKSRGSPVSETAGSGGRSSSDVSTTPDAAADKRAAPSSAKSTGRKHMSPFVFYGSPRGVQVKRPQSFLRLLHVIRIDLKKQTDFNPRDVVWATFPRQDEAIRFSKAYAHTNVFCYQEHMSGTRRFLVSTYDEFWKRYNDMDSKIRHHYEVIQEASPCHIYFDLEFDTRLNKKRDTDEMVDILIAVVFSALRDKYSIEGHEEWITELDSSTEEKFSRHLIIRIPKIAFKDNSHVGAFVCEVCSQIAAQRTTNHDLDKLYITKEISSGPVDRLFMDTAVYSRNRCFRLVFSSKSGKKSFLVPTKRFKCQELNDKDVFMESLICRLDDNCEKLLICKLDLECKKTLHFDSEISMSQIQGRSYRHRIATYQNDFSHAYTCGKSPFPPLDGFIESIASFGNVSGKIRSWFWFSQESLIIYNMLRSRYCENIGREHKGNHVFYIVDFQRAAYYQKCHDPDCRGYRSPLRPVPWDVIPELVESDQIEYQGHAMETNIENSSMSGKSITGAGAEDPEWWEQVVEFADSIENMDHSLATLEVKSDASIENMDHAPSLCASEENGCFEADPEWVMHAERAMEQYEEQSGGSQSHATSQVFDLEDV

SEQ ID NO: 16562 - protein, 742 aa, Zea mays
  VARIANT 158: note = Ancestral polymorphism is G, Derived polymorphism is D
  VARIANT 254..742: note = Derived polymorphism lacks residues 254 to 742
  VARIANT 630..742: note = Derived polymorphism lacks residues 630 to 742
MGTALKALTLRVVLAACFFLGSLIHASEVIGDGDEKQQVYIVYMGHQHEPSSEELAAGGFSAAKAAHHRLLNQVLGHGSDATDRMIYSYTRSINGFAARLTDDEKDKLSSREGVVSVFPSRTYRLQTTRSWDFLGFPETARRSLPTEAEVIVGMIDTGVWPDSPSFSDEGFGPPPSRWKGACHNFTCNNKIIGARAYRQGHTGLSPVDTDGHGSHTASTVAGRVVEGVGLAGLAAGSARGAVPGARLAVYKACWDDWCRSEDMLAAFDDAAADGVDLISFSIGSTLPFPYFEDAAAIGAFHAMRRGVLTSAAAGNSALDGGRVDNVAPWILSVAASSTDRRLVGKLVLGNGKTIAGASVNIFPKLKKAPLVLPMNINGSCEPESLAGQSYKGKILLCASGGDGTGPVLAGAAGAVIVNGEPDVAFLLPLPALTISDDQFTEIMAYVNKTRHPVGTIRSTETAFDSKAPVVASFSSRGPNLISPGILKPDLSAPGIDILAAWTPLSPVSGNLKDSRFAAYSIVSGTSMACPHATGVAAYVKSFHPDWSPAMIMSALITTATPMDPSRNPGGGELVYGAGQLNPSRARDPGLVYDTREDDYIRMLCAEGYNSTQLRVVTGSNATACPASASGGRSGAAAGLNYPTMAHHAKPGKNFTVRFLRAVTNVGAPRSVYTAKVAGSGSFVRVTVAPKRLEFSRLLQRLSFTVTVSGALPAANEFVSAAVVWSDGVRRVRSPIIVHTVPN

SEQ ID NO: 16563 - protein, 207 aa, Zea mays
  VARIANT 32: note = Ancestral polymorphism is T, Derived polymorphism is I
  VARIANT 14: note = Ancestral polymorphism is T, Derived polymorphism is A
MELRNRLTELKRKTAVDKTEVEQASSDLKAKTVPLNLALVTLKKRRADAVAMHTNAMKVAQMNLMATTSDCMKMQSKSVKQLCRLFPMRRNDQNVFMGSSKDNFHGMSKTGEQFLAGVYHHLPSILAFTAPHPNSYDRIQPDTWSGAYLCWGKENKEAPLRTACPPGVPLDLVSNFEIKSFDGCANPHLGLAAIVAAGIDGLRRHLT

SEQ ID NO: 16564 - protein, 321 aa, Zea mays
  VARIANT 143..321: note = Derived polymorphism lacks residues 143 to 321
MARLLLFPSQACVDPGRHLLLHPPVSRPRAVRSGPPPAAPRRTGVVSLPGRCPPPLCWNHHPFLPCRSSKRGWVVFASENVQEISSHLPRKDERRSGNLLLRFSALPYCTMAWLSTAQLAQSSVGEKLNMVYEVGELFELGIQLSYLLILIGLLGAGTFFVIRQVLVRRELDLSAKELQEQVRSGDASATEYFELGAVMLRRKFYPAAIKYLQQAIDKWDRDEQDLAQVYNALGVSYKRENKLDKAIQQFQKAVELQPGYVTAWNNLGDAYEQQKDLKSALKAFEEVLLFDPNNKVARPRVDDLRPRVSMYKGVPVKSEKR

SEQ ID NO: 16565 - protein, 642 aa, Zea mays
  VARIANT 452..642: note = Derived polymorphism lacks residues 452 to 642
  VARIANT 366: note = Ancestral polymorphism is R, Derived polymorphism is G
MRWIMHAVTEKDTACEDSLLWPSLQPSAVAMAAAATFGFLHPLIRKPLVPPLYILPLPTQPHAKTHPRSLPLLFLLPRRRRGGPIAALPNTTSSSTNASASPTYDVREAEAAVADLLREGGASADDAAAIAARAPAYAAMLADGVRELDELGLWASWSSGASARLGLSGVVEMEMGRLGFRRKVYLMGRSRPDHDVVPLLESLGVRLSSAKLIAPYVASAGLTVLIDRVKFLKEMLFSSSDYAILIGRNAKRMMTYLSIPADDALQSTLSFFEKMEARYGGVSMLGHGDMSFPYLIESFPMLLLCSEDNHLEPLVDFLEHIGIPKPKIASVLLLFPPIILSDVENDIKPRIREWEKAGIEHDYITRMLLKYPWILSTSVIENYSKMLLFFNQKGISSTVLAIAVKSWPHILGSSSKRMNSVLELFRVLGISKKMVVPVITSSPQLLLRKPDQFMQNVLFFREMGVDKKTTGKILCRSPEIFASNVDNTLKKKIDFLINFGVSKHHLPRIIRKYPELLLLDLNCTLLPRINYLLEMGLSKKDLCSMISRFSPLLGYSIELVMKPKLEFLLRTMKKPLKAVVEYPRYFSYSLEGKIKPRFWLLQSRNIDCTLTEMLAKNDELFAEEYLELGGLLEKPVQSSIGG

SEQ ID NO: 16566 - protein, 848 aa, Zea mays
  VARIANT 240: note = Ancestral polymorphism is A, Derived polymorphism is T
MKSSAVTTKGKAIFELKHKLVQAVNKIADRDTYQIGLDEIEKMADTLAPDMIGPFLSCVIDTDAEQKSAVRKECIKVIGTLARLHGNLLAPHMAKMVSSVVKRLKDTDSVVRDACVDTCGTLAMCARSYGDGGAALVTLVRPLFESLGEQNRYIQAGAALCLAKVIDESNYFPGPVLPQMLVRVVKLLKNPHFMAKPAAIDLIRSIIQAEGASTEQALSSALTSIMDALKSTDWNTRKAASLALSSIAVSSGYLVTSFRTSCLRSLERSKFDKVKPVRDTIIHAIQLWKAIPGSHTPEPSEAGSSTKENYFGDHHDARSIHDGGSRDTSFRRTDHGPSVSVISGSSLSSAKRRSPLSINKVAINNAANLQRMKTGDWRVEVSVPKQSMIPLVNNDEKGSSKACSLKDTKRNAYESVDVDSKFDYDIVDDKQECSSVSEVASRSFETKHVTTAQECTEDCDSAEVTEQCPRGRESKSIGSTITDVTTHDTHSCCLNTMNELALVRKQLQEMERKQANFFDLLQEFMASSAENMSVLNLKVHNLENAADKTVYTITQSESRYHLPGSKHFKNQSVSSLPRLSTSTPRSSMDVNYKPPPISELKHEKWMRDLPSRGSNMCCKEGADFRKDHVRSKVRKLGPVSLEGNLGRCDPSSARSRTSGVKGTYPVSFTSSCEQSGLRNALCTSNQPGEFQDTDGMEPAYMEALNCGDYDDLIDLMDRTGPVLEKLSCETTNELLRVIAEQFLNKKFFDLALPWLQQLADLSTIYKPTQLFASVRAQKEFLSALEEAATGGSMEPALRIAIAQLGFKLSKAFEVGPCRWTCKTLLCHLDRPDFEIGGEENLSQNVQRK

SEQ ID NO: 16567 - protein, 459 aa, Zea mays
  VARIANT 215: note = Ancestral polymorphism is A, Derived polymorphism is V
  VARIANT 140: note = Ancestral polymorphism is R, Derived polymorphism is L
  VARIANT 61: note = Ancestral polymorphism is W, Derived polymorphism is R
  VARIANT 35: note = Ancestral polymorphism is T, Derived polymorphism is A
MPCTLSTQKRAHLAHQTAPTAAMSYWSSSLPKDITIKLAERMVDDNDIDCYMAFRRVCRNWRAETSDHPGKADDRTDPTRFEPTKWALLDRQEERVTFVDVDAGRFLRMSVPVLRDYLFVGATSGGLIVLGEKQEPHRTRLLNPFTGAVAGFKVRAPAEGVKAAAVTTKPLMLFVSLEDGDIIWADQSSDHFKRFNRLDSDKPTPIAALDGDVYASDPHGAIFTSIVDDVPDGQKCRSAATIWMGTSIPSPNHNASPDASPAAAAALAGSGGRYYLVQSGGDLLLVTRPLGGGVPDQPLVRRVDTKQNVLEPVSSIGSRAIFVSHVRCISIDAGKFPFEGIKAGCIYFVEPVLAARGGYEPSRITTCQVAAGLQAREIMFEEGILEGCYRPFTITQAFAEYCRSVHYHELYQMICSYWDWDFSDSESDGTSSYGSASDYEAALSELEEAAEFLGINFEA

SEQ ID NO: 16568 - protein, 471 aa, Zea mays
  VARIANT 375..471: note = Derived polymorphism lacks residues 375 to 471
  VARIANT 352..471: note = Derived polymorphism lacks residues 352 to 471
  VARIANT 231..471: note = Derived polymorphism lacks residues 231 to 471
  VARIANT 216: note = Ancestral polymorphism is A, Derived polymorphism is T
  VARIANT 143: note = Ancestral polymorphism is A, Derived polymorphism is S
  VARIANT 142: note = Ancestral polymorphism is T, Derived polymorphism is A
  VARIANT 130..471: note = Derived polymorphism lacks residues 130 to 471
  VARIANT 75: note = Ancestral polymorphism is P, Derived polymorphism is H
  VARIANT 52..471: note = Derived polymorphism lacks residues 52 to 471
  VARIANT 51: note = Ancestral polymorphism is T, Derived polymorphism is I
  VARIANT 47: note = Ancestral polymorphism is G, Derived polymorphism is R
  VARIANT 25: note = Ancestral polymorphism is A, Derived polymorphism is T
  VARIANT 16: note = Ancestral polymorphism is D, Derived polymorphism is N
  VARIANT 12: note = Ancestral polymorphism is K, Derived polymorphism is E
MLSFHVVEVVMELFPDPSGLAAQFTGDVFEILSKYFPVYFTHGVGNGLDTTQEDLSIALMHVFCSTQFFEPFVIPLLLDKLSSSLPLAKFDSLKYLDKCIRFYGADRMVRHASTVWYKLKEVIFNLSLDQLLISEALNCLKTAIMYTDSSDKDLFINLILLDEDIVNKIHSVSSVEKTILSSLEDLSQLHALGSVISILAESSTYFCTRVLQEHFAHLVDIVGTKADYESWQLNNCNGSSSAPVNYGALYLSVQLLSSCREVALVSYEDFSSVKLAKGSWWLILQKKLEQLIHLFRSIFTIASQSMQPNFRQEYVSCASKLTSYGPDWCLKGLLTLATFPEQYINQVLAYAQQSRERANKEQASLVERMHEYKRQIDRETRSSINGLNDSYNGDGIQTIGRSSHKQIEAVMQSTSKGKVQTIRQGYLSKRSSNLRADWKRRFFVLDSRGMLYYYRKQITRPPVGLCCNIRC

SEQ ID NO: 16569 - protein, 138 aa, Zea mays
  VARIANT 115: note = Ancestral polymorphism is I, Derived polymorphism is V
  VARIANT 107: note = Ancestral polymorphism is T, Derived polymorphism is I
  VARIANT 106: note = Ancestral polymorphism is W, Derived polymorphism is C
  VARIANT 101: note = Ancestral polymorphism is C, Derived polymorphism is Y
  VARIANT 89: note = Ancestral polymorphism is P, Derived polymorphism is T
  VARIANT 88: note = Ancestral polymorphism is L, Derived polymorphism is I
  VARIANT 85: note = Ancestral polymorphism is E, Derived polymorphism is V
  VARIANT 84: note = Ancestral polymorphism is D, Derived polymorphism is A
  VARIANT 74: note = Ancestral polymorphism is D, Derived polymorphism is G
  VARIANT 73: note = Ancestral polymorphism is G, Derived polymorphism is S
  VARIANT 66..138: note = Derived polymorphism lacks residues 66 to 138
  VARIANT 60: note = Ancestral polymorphism is D, Derived polymorphism is N
  VARIANT 46: note = Ancestral polymorphism is R, Derived polymorphism is H
  VARIANT 32: note = Ancestral polymorphism is L, Derived polymorphism is I
  VARIANT 31: note = Ancestral polymorphism is C, Derived polymorphism is Y
  VARIANT 28: note = Ancestral polymorphism is S, Derived polymorphism is Y
  VARIANT 21: note = Ancestral polymorphism is D, Derived polymorphism is N
  VARIANT 18: note = Ancestral polymorphism is R, Derived polymorphism is C
  VARIANT 13: note = Ancestral polymorphism is E, Derived polymorphism is K
MRETDGLVDAVAENLLYRLEDCRKAFPSALCLGGSTDAVRRLLRGRGGIESLIMMNMSADMVKKWRESENATGDGPETHFVIGDEEFLPIKASSQDLIMSCLGLHWTNDLPGAMIQCRLALQPDGLFLAAILCGETLK

SEQ ID NO: 16570 - protein, 709 aa, Zea mays
  VARIANT 202..709: note = Derived polymorphism lacks residues 202 to 709
MDSAASAALKPSALDLLAALLTGRDPEGGAHWASALAENRHLFLLLTTSLAVLVGCGVALLVRRSSAPRAAAAAAQAPPRPLAVKPKDEPDPDDGRQRVIVFFGTQTGTAEGFAKALAEEAKARYDKAVFKVVDLEDYAAEDEEYEEKLKKESIALFFLATYGDGEPTDNAARFYKWFSEGNERGEWLNNLRFGVFGLGNRQYEHFNKVGKVVDQLLAEQGAKRIVPVGLGDDDQCIEDDFNAWKELLWPELDKLLRQEDDSSTAPTPYTAAIPEYRVVFVKPEDDMYINKSFALSNGHTVYDIQHPCRANVAVRRELHTPASDRSCIHLEFDIAGTGLKYETGDHVGVYAENCIETVEEAEKLLGYSPDTLFSIYADQEDGTPLCGGSLPPPFPSPCTVRTALTRYADLLNSPKKSALLALAAHASDSKEAERLRHLASPAGKKEYSQWIVTSQRSLLEVMSEFPSAKPPLGVFFAAICPRLQPRYYSISSSPRIAPTRIHVTCALVYGPTPTGRIHKGVCSTWMKHSTPLEDSKDCSWAPIFVRQSNFKLPADPTVPIIMIGPGTGLAPFRGFLQERLALKQAEVELGHAVLFFGCRNRKMDFIYEDELNNFVDAGALSELIVAFSREGPTKEYVQHKMAQKAAELWSIISQGGYIYVCGDAKGMARDVHRTLHTIVQEQGSMDNNSKAESYVKSLQMEGRYLRDVW

SEQ ID NO: 16571 - protein, 146 aa, Zea mays
  VARIANT 7: note = Ancestral polymorphism is W, Derived polymorphism is S
  VARIANT 16..146: note = Derived polymorphism lacks residues 16 to 146
  VARIANT 22: note = Ancestral polymorphism is N, Derived polymorphism is D
  VARIANT 25: note = Ancestral polymorphism is S, Derived polymorphism is L
  VARIANT 28: note = Ancestral polymorphism is Q, Derived polymorphism is R
  VARIANT 129..146: note = Ancestral polymorphism lacks residues 129 to 146
MQAFLRWTDCVFRVLQNGLAIDVESHNQIKERKNKANKICGVNKVVDTTPGRVGGGFFINSKAEGRLLSCPLSDKGERQYTSVYYHRRMAETEKDIFRSMDESRFMVGGRFKKMTGSTLSIKKVMVKTSGFQEGVEKFVVGATIRS

SEQ ID NO: 16572 - protein, 559 aa, Zea mays
  VARIANT 40..559: note = Derived polymorphism lacks residues 40 to 559
  VARIANT 492..559: note = Derived polymorphism lacks residues 492 to 559
  VARIANT 516..559: note = Derived polymorphism lacks residues 516 to 559
MAASVLQAERHLLLLGSGRNRPLLRMLPPRVLFPHRRRSWPRAVRVSPGDGEGAGGFASAVEKRSIPGIVEEEGYGARGEELEGDVAGALEQRWPPWDGLAERYKLIGATSLAFVICNMDKVNLSVAIIPMSHQYGWNSSTAGLVQSSFFWGYALSQLPGGWLAKLFGGRKVLEVGVVTWSLATAIIPVVAGFMPGLVLSRILVGIGEGVSPSAATDLIARSIPWQERSRAVAVVFGGLSFGSVLGLLFAPPIIQNFGWESVFYIFGLLGIVWCLGFESLIVQRFGDKKSLLNLGQSSTGSDGLISYAMSSESSHSSLEDLQNSLKDVPWGAFFKSKAVWAMIYAHFCGSWGHYTCLSWLPTFFSEELNLNLTEAAWVSVLPPLGSMIITSIAAPFADNLISNGVDTTKVRKICQTIAFVSPATFMMLSSVDLGLPPWEIVAFLTSGVALSSFALSGHVGFIAHIKTSLVNMQAFSWSIMSDCYLFVSFMFQGITNTVGAVPGIVGVALTGFLLDSTHSWSISLFAPSIFFYLTGTVVWLAFASSKPQDFSKSGPESEP

SEQ ID NO: 16573 - protein, 687 aa, Zea mays
  VARIANT 584: note = Ancestral polymorphism is G, Derived polymorphism is A
  VARIANT 400..687: note = Derived polymorphism lacks residues 400 to 687
MGKPSLKKKRASGGGKSGDHGGKPASLERSGSKVLDGDETLFTDMAQEHKEEGNKLFQRRDYDRALLNYDKAIKLLPRAHPDVAYLHSNIAACYMQMSPPDYYRAINECNIALEASPKYTKALLKRARCFEALGRLDLACRDVNKVLALEPNNLTALDVSDRIKKTMEEKGIVLDDKEIMPTPEEVVAAAPKQKPRKKRGGRKFAAKAAAAAVEEVDEQKIAEAIKEEVEEQPRQVKLVFGEDIRWAQVPASCSMAQLREAVRSKFPGLKAVLVKYKDKEGDLVTITNQDELKWAEELAEAGSSLRLYVTEADPEHEPYVDDTNMERNVNSNSDNGSIRSNRQDEDRSTVTCIDDWIVQFARLFKNHVGISSDEYLDLHEVSMKLYTEAIEDTITTEEAQEVFHLAEGNFQEMAALAFFHWGNVHMSRARKRLLLSGDSPSELVLEQVKEAYEWARDEYNKAGTRYEDAVKAKPDFFEGFLALAHQQFEQAKLSWYYAIGSNADLDSCSSEILELFNKAEDNIEKGIEMWEEMEEQRLKNRSKPSQENIVLEKMGLEEYIKDVSTDDAAEQASNLRSQINILWGMLLYERSVVEFKLGLPMWEDCLMAAIEKFKLGGASATDIAVLVKNHCANETAQDGLGFKIDEIVQAWNEMYDIKRWLRGVPSFRLEPLFRRRVPQLHTALEHI

SEQ ID NO: 16574 - protein, 138 aa, Zea mays
  VARIANT 92: note = Ancestral polymorphism is Q, Derived polymorphism is H
MHSFGHRANAVATFAVTILAAICFAASFSDNFNTPTPTASVKILNLNWFQKEANGNDEVSMTLNISADLSSLFTWNTKQVFVFVAAEYETPQNALNQGSNLKGKEFNLTMHWHIMPKTGKMFADKIVMTGYRLPELYR

SEQ ID NO: 16575 - protein, 484 aa, Zea mays
  VARIANT 27: note = Ancestral polymorphism is V, Derived polymorphism is M
MHADPDAEVIALSPRTLLATNRFVCEVCNKGFQREQNLQLHRRGHNLPWKLKQKNPREARRRVYLCPEPTCVHHDPSRALGDLTGIKKHYCRKHGEKKWKCDKCSKRYAVQSDWKAHSKTCGTREYRCDCGTLFSRRDSFITHRAFCDALARESAQMPPLGAGLYVGPGSMSLGLSQIHGFADQAQSSSAAAAPQFDHIMPSSSGSSSMFRSQASASSPSYFLGGSAPPAAAQDFSEDGSQGSQGPLLHGKAHFHGLMMQLPEQQHQPGSSNAAVGANGSNILNLGFFSAGNSGGTSGSLQDARIAIQDQFNLSGSGSGSAEHGNNVMVASIGSHLGRGFPSLYSSSPSAGMAQNSATALLMKAAQMGSTTSSTTHNNHNGPTTTSTLLRATGFSGATGSGQLGTTGGRAAAGEEGAASHEAHFHELIMNSLAGGGFSGTAGFGGGVDDGKLSTRDFLGVGRGAATMAPPGLHMGALDPAQQMK

SEQ ID NO: 16576 - protein, 78 aa, Zea mays
  VARIANT 9: note = Ancestral polymorphism is G, Derived polymorphism is S
MSHPRYGGGYPYPGQQGYYNQGPYPYQGPPVMAPPQYQYAQPPPPPRSPGFLEGCLAALCCCCLLDECCCDPSIVFVS

SEQ ID NO: 16577 - protein, 1131 aa, Zea mays
  VARIANT 146..1131: note = Derived polymorphism lacks residues 146 to 1131
MGHQGGLKEATSLEIEATTMSSDLDKAVGWDLPRLELKAMVLRWDNKGATCLVPKEAATIQGLGEATCRALKTSRMSWDLDKDDKGNLNEVSGLESILGLEEDVEWNLDEVPGLEHCSDLDEDVEWDLDEVPGLETSSDLDDDAEWNLDEVLGVESSSDLEGDEWNLNEVRGLESSSSLDEDVELNLTEVPGLEPSSDLDEDVESNLDKVPGLESEEIEDHYEPTRHVFVFSSIRRVATWSVQSVREEFIRIFVCVASFLRRISCSFWGRKASSLMSTIATPPPPIAQEKAASRNKRKYRAEPPSAELGPYGLEYPLTADCMGFEFMSPEKAAMAAAVAAAEGVSLDLLQNSCEKCKDLHPTAEELLDCQRYVNWSDPNETQLEEILLKSLGTTFDNAVSLITTMGYSEAVARAAVVRAAAQYNWRESLAGFGEAAVEVLKTEGDMLPREGASVEDMRRIEQAVLGSMVMWVNEAQPLCTTGDVMFCLLMSDMNVANASAMDYNTSSLPSVAAQVIAQPDAGNYVTGSGSNLSVSITNPQTGVTFRGKLTPMPPGSYGAVKADSSMAPASLNVSSTKPSVPGKTQCVIPNIEPKEQPVPIHDHSEDQPFVAAATQSVKNDKPSPSKRGGSKRDSLHRQKLTSFDKSSRALGSKGSLRSGKHSYSASAVLERKCRSFSDSTTSNLKGASRVAKGFAASISGSEVSADLSFTGTLSPSPSFDAKIVSNSNPAPTASTDLSLSLPSSSDSLTPSSNHDSITEGVDSSSKINFSYDEEQKVWIPQDKKDKIVLILVQRQKELQAHMHDWTDWAQQKVMQVAHRLAKEKDELQSLRKEKEEADRLQEERHHLEESTRKKLLEMESAISRANAQLEKAEASARRREVENAQLTLQMEAAKRHAAESATNISELLKKDENSRKRSQRWESDRALLQEELAAQKSRLFRVQEQLQHAKELKDQVQARWKQEEAAKTEAIALVTSVRKERGQIETSMRSEENLLHLKAANDAQRYKSEIRVLEQRIAQLKVSLDSSRVAAPKWGADNKSYALHLSEGRKNNNAQVLSNTAVPQGLDFDDIQRDRECVMCLSEEMSVVFLPCAHQVVCAKCSDLHEKQGMKECPSCRAPIQRRVRARPAGC

SEQ ID NO: 16578 - protein, 367 aa, Zea mays
  VARIANT 90: note = Ancestral polymorphism is A, Derived polymorphism is G
MAARQPPALMEELVEEILLRVPPDEPERLMRAAVVCKPWCRLVCGPGFRRRFRERHGAPPLLGIISNRMNEAGAKLARFVPTGSFRPPRADRINWLAIDSRHGRVLLRNSFSNAAVYVAVWDPITDELLALPKTPWMMPSSDTMYNYKGAVLCAADGCDHLDCHGGPFLVVFVGVGAHDNTMSSYVYSSEANAWSEQAHHQYLGHLWESVSSTLVENALYFVVNKSPGILKYNLGTRETTAISCPTMTNPHVALMVAEGGGLGCATIRSSKLCLWSQEVGPGGGHSGWALDRTIELSTLVPAGHSIREFDVASSVNGGGIIHVGTYQGCRSFTTDLKSGKFSEVGFTAILENMVPFISFYTPEHSWN

SEQ ID NO: 16579 - protein, 639 aa, Zea mays
  VARIANT 82..639: note = Derived polymorphism lacks residues 82 to 639
MLTPAAAPRHLPSLKKLLRQCRSIQRLNQLHAHLLVHGSLSVASDLLASYCALSASVTAGYGAICHARRMFDGILDPDRVMYNTITRAYCNSDCPREALRLHRCMLRRGVLPNEFTLPFVVKACTRAQAWDNALAVHGVALKLGFVGQVFVANALLHSYASAGSLGDSRRFFDEMAGRNVVSWNSMIGGYAQAGDTREACALFGEMRRQGFLGDEFTLASLLLACSQEGNLEFGRLVHCLMLVSGSPVDLILGGALVDMYSKCGDLCMARRCFEMMPIKSVVSWTSMLCAQTKHGSVDAARCWFDHMPERNTVSWNTMISCYVQRGQYHEALDLYKQMQSHGPAPDEATLVPVLSACGRIGDLTVGKMVHLYIRDNIHNPDISLINSLLDMYAKCGQVDTAIRLFREMCNRNVVSWNVIIGGLAMHGRALDAITFFRSMVRNTSPDGITFVALLSSCSHGGLLETGQHYFESMRHVYNVKHEVEHYACMVDLLGRRGHLEKAVCLIKEMPMKPDVVVWGALLGACRIHGNVKIGKQVIKQLLELEGISGGLFVLISNLLYETNQWEDMKRLRKLMKERGTRKDMGVSSIEINNSIHEFGVEDIRHESSSEIYAVVDQLSYHLISVHPLAVHPEELCVVE

SEQ ID NO: 16580 - protein, 573 aa, Zea mays
  VARIANT 42: note = Ancestral polymorphism is R, Derived polymorphism is S
MTRALQRSGSNSLASLLRAEPADDVLPDWKPTERDGRRRLRRRRSCLRLPLGAAGGCRVCACDEMDSSAAAPRRRTPGNDEDEDGAAVQCFAWKKGDAAAARGPSSGAGGAGAVVVTEAAAAAAAASLAVLPDDVMEMVLCRLPFASLLAARCVCRRWKDLTVAPQFLRMRREEETGERRAPWLFLFSVDGDVGWGAAPAPAVHALDVAAHRWRRVGAAGLKGRFLFSVAGVGDDLYVVGGRSGGSDASKVKTHKGVLVFSPPTGSWRKVAPMRSPRSRPVLGVFEMSASCSILHTRAEKNVRRGKSRLGGGASAVYEDPHRLSLRRLRIRDMLDEDTDSTERASYHHGRSAGHEEGKEGQPRLAIVAVGGRGRWDEPLVSGEIYDPVVDKWVEIAGFPTDVGLACSGVVCGRTFYVYCESDTLVAYHLDKGSWAVIQTLRPPPRLRDYAPTLVCCASRLFMLCVSWCDRHEPVSRREKVVRKLFELDLGSLQWTDASVHPDAPMDPHAAFAVGQDRIYAVEMFRIFGKVLDFVTACRVSDAEQMWSRVGRENAATEADSMSCRLKSMAVLHL

SEQ ID NO: 16581 - protein, 450 aa, Zea mays
  VARIANT 334..450: note = Derived polymorphism lacks residues 334 to 450
  VARIANT 310: note = Ancestral polymorphism is G, Derived polymorphism is R
  VARIANT 301: note = Ancestral polymorphism is I, Derived polymorphism is K
  VARIANT 253..450: note = Derived polymorphism lacks residues 253 to 450
  VARIANT 183..450: note = Derived polymorphism lacks residues 183 to 450
MSTRSSETASSGQKVLLIGVIGAYLASGFSNVLTTSARRDMNKVVFTVFTPSLMFASLAKTVTLADVISWWFMPVNIAITFMIGGTLGWIACNILKPPQHFRGLIMAFCSAGNLGNLLLIIVPAVCDEDGNPFGDDSSTCRSRSLSYSSLSMALGGLFIWTHTYSLMQKSGKLYHKMQSKSIQCPADSDEEHEQAKEDGPAGCADEEAPLPTSVKPREHEHEHEHGEEEEHQMVSNFTAQSTASSAAMHGHGGILGETDSPELQEAPLLSCESEVADKGFWTKLKDAIHQFIEELMAPPTISAIIGFVVGLVPWLKSLIVGDGAPFKVIQDSLQLMGDGTIPCITLILGGNLTQGLRKSGLKRAVIVAVLCVRFVLLPLIGIAVVRAAYGLGFLSRDPLYRYVLMVQFAVPPAMNIAAFSEPIVAQGIQLSNRKGGDGDGSHVSMSRSKS

SEQ ID NO: 16582 - protein, 345 aa, Zea mays
  VARIANT 4: note = Ancestral polymorphism is K, Derived polymorphism is E
MDLKATQEWSSCEAAEFKALFAELRNEKPCDRMEVLAKRFPAKTVQQLRDKYAEVFADMLYSEIDGQPSRDDATSDLHDWYRLLEGDAHDSVLGPPVETSLFQPSEQVVFKAAGDQEVIQRSHCEPSRKERQAWTAEEHRQFLRGVQHFGRGEWKWISKYFVPSRTPAQLASHAQKHFDRIKKNELDDRRQRHTINDVRLVINHHDTNNTSFSHTGPGKGKTNASGIPLPVLTENLAGQTTHCNHTIQSFSQWQGPVTPSPREQWNGLLAQSRTEHRTWPCHKRRPGATTDPRSKNNRRTVPDFLTAQVPREVLQFAQGSDSTANLSCEIVPIKGRDLATSIPPF

SEQ ID NO: 16583 - protein, 789 aa, Zea mays
  VARIANT 702..789: note = Derived polymorphism lacks residues 702 to 789
  VARIANT 167: note = Ancestral polymorphism is D, Derived polymorphism is H
MAEDGKSNDQILSELDALSHTLYQTHTKRRTTSLALRRSAVDENAGGADAVAVVAAQGLPTSMNGLRLAVAVRKKETRDGGVQTMPSRVQQGAADFEETLFVRCNLYCSGGGATGKPLKFEPRPFLVSAVAVEAPELDLGRNAVDLSLLVKESSEKSQQGERVRQWHMAFPLAGKAKGGELVVKLAFQIMDDGGVGLYSQPPVAASGKTSSSSSSSLFARKHSKSSFSIPSPKVMRSEPALIPSMGAPSVDLLGIDDFKLDEPSPVVAEVKQEPQKEPERVPEDAKADDSEFPEFDFDIVDKGVEVQEEKDEPKEEAEDKKETGDGEEGEEEDASAATGDEVVKEVVLDSAHTWRLNELEAITNQIKALENMMHSDVLEAGAKSPERQDDEVAVLDTYEEEVTREFLMLMEQGEEKGANAKSSSPQVSSLKSGAKPGSGVDATCYISDLGKGLGPVVQTRDGGYLAATNPFDIPVERKELPKLAMQLSKPFILRDQKPPGGGAEVFQRLCAGGSEALCAKLGALISMDDVVGKTAEQIAFEGMASAIISARSKDLVASSSAAESVSLLRTMSAATNYGRQERIATGIWNAQEAPVTADEILAFSLPKIESMAVEALKVQADMSDEQAPFEVSPDAAQAAGHLLDAATPPEEWASACASADAVTLLVVVQLRDPLRRYEAVGAPSVVIIQAVRAGGVRDDEPKFKVANLHLGGLRLKSPDRRNMWDGEKQRLTAMHWLVAYGLGKAAGRKNRAAVSGKAGNEVLWSMSSRVMADMWLKPMRNPDVKIYQK

SEQ ID NO: 16584 - protein, 267 aa, Zea mays
  VARIANT 57..267: note = Derived polymorphism lacks residues 57 to 267
MNEQLMRPPAPLPFHQMWAAVPAMEPPFKPVRAAWKRAARTPWKRKAQPPASGGARWGGAAAPRNTTSFLIRAKRAGGVASLVSPCPVTPAVLPTPVLSPAREVLVEMAKEAWGVDGYGSMKGLIRLRADARDAAGDDSGSGESDVEGHVEVERRLDHDLSRFEMVHLPAAAALGGGDEDDEDEEARTARLEEENLALRDRLFLMERDMADLRRRLLAVEELCRDRHSDGGCVVDATAADEAARSESAAAVVSPGACACEEADAMEK

SEQ ID NO: 16585 - protein, 299 aa, Zea mays
  VARIANT 120: note = Ancestral polymorphism is A, Derived polymorphism is P
  VARIANT 87: note = Ancestral polymorphism is C, Derived polymorphism is S
MIFNQVAPSLKVEWFESDGNYVHKGLQFGIKCIFPGNVVGVNMPASSAPTTATLAPEDTGKMTKIAAAIMSLLTMHIATNLSLSNLCYCSVQAISDAARPACILETRKTAPGLRRIDKWAVLIGGGKNHRLGLFDMAMIKDNHISVAGGIANAMRSVDQFLQKEKLNSCRGRYFFTDAHVDKDKPMCLGIDISVVETRTIEEMEDLLKYAAENKTSLTRIMLDNMVVPLANGDVDVSMLKDAVQLINDRFETEASGNVTVDTVKKIGESGVTYISSGALTHSLKALDISLKIDTELALQ

SEQ ID NO: 16586 - protein, 262 aa, Zea mays
  VARIANT 185: note = Ancestral polymorphism is L, Derived polymorphism is S
MLLPLLRSHPLLHHAARLSSPRTRLLLRRDAIPLARSPPIRMAASSGSGASSPASAPPAAVVHKSKIKFCPACGSPTKLAIPDGDEKMRAVCSSCGRVHYENPKMVVGCLVEHDNKVLLCRRKIEPAYGLWTLPAGYLEVGESTAEGASRETLEEACADVEIVSPFAQLDIPLIGQSYIIFRARLKTPNFSPGPESLECALFALDDIPFDSLAFSSIIVTLRMYTEDVRSGSIKFHYCTINKRLGASPSDLRSFDIDNHIAV

SEQ ID NO: 16587 - protein, 538 aa, Zea mays
  VARIANT 53..538: note = Derived polymorphism lacks residues 53 to 538
MKPALSCSLAHTAHTPHHTSSLALRSSDISSRPFVSKPREPRRWPPPRCRSTRSSISFAPRSPSSTRSGDENEKSGFISLVSRYLSGEAEQIEWSKIQTPTDEVVVPYDTVASPPEDLEETKKLLDKLVVLKLNGGLGTTMGCTGPNGAFNVYGLEEYGILKLYLSSAHTVVPFHYIAVPIVRTTKIPMSCRSVIEVRNGFTFLDLIVIQIESLNKKYGCNVPLLLMNSFNTHDDTQKIVEKYSNSNIEIHTFNQSQYPRIVTEDFLPLPSKGKSGKDGWYPPGHGDVFPSLNNSGKLDILLAQGKEYVFVANSDNLGAIVDIKILNHLINNQNEYCMEVTPKTLADVKGGTLISYEGRVQLLEIAQVPDEHVNEFKSIEKFKIFNTNNLWVNLKAIKRLVEAEALKMEIIPNPKEVDGVKVLQLETAAGAAIRFFDKAIGINVPRSRFLPVKATSDLLLVQSDLYTLVDGFVIRNPSRANPANPSIELGPEFKKVANFLARFKSIPSIVELDSLKVSGDVWFGSGITLKDVNGPEDL

SEQ ID NO: 16588 - protein, 137 aa, Zea mays
  VARIANT 20: note = Ancestral polymorphism is H, Derived polymorphism is D
  VARIANT 95: note = Ancestral polymorphism is I, Derived polymorphism is F
MPAIPTSALVSSSHERNTIHPPVRSGGDRQPAAEMSGRGKGGKGLGKGGAKRHRKVLRDNIQGITKPAIRRLARRGGVKRISGLIYEETRGVLKIFLENVIRDAVTYTEHARRKTVTAMDVVYALKRQGRTLYGFGG

SEQ ID NO: 16589 - protein, 245 aa, Zea mays
  VARIANT 105: note = Ancestral polymorphism is P, Derived polymorphism is S
MAPVGLPPGFRFHPTDEELVNYYLKRKIHGLKIELDIIPEVDLYKCEPWELADKSFLPSRDPEWYFFGPRDRKYPNGFRTNRATRAGYWKSTGKDRRVLHHGGRSIGMKKTLVYYRGRAPQGVRTDWVMHEYRLDDKDAEDTLPIQDTYALCRVFKKNAICTEVDGLQAQCSMALLEGACQQLLTSGSQEYQTSSPDVPVASTSGGADDDAEKDESWMQFISDDAWCSSTADGAEESTSRVALAS

SEQ ID NO: 16590 - protein, 828 aa, Zea mays
  VARIANT 412: note = Ancestral polymorphism is S, Derived polymorphism is I
  VARIANT 239: note = Ancestral polymorphism is S, Derived polymorphism is C
  VARIANT 106: note = Ancestral polymorphism is R, Derived polymorphism is G
MERHRQRSRRQQEDGLDGHDEDGALSAFVCPITMQVMRDPVVIDTGHAFEREAIARWFAECRDLGRGPCCPITMREVRSADLRPVLALRDAIEEWADRQQRDELRRACRWLTKDATEKEAVRALGCVARGWSRGGQASRRTVRAEGIIPMVGGMLRSGSAMVRLKALEAIQEFARETDQDREAVSQGDTIRTIIKFIDCEDCQERELAVSALCDLSKSELVCGKVSELNGAVLILCKVCGSKADNPTIAEKAEKTLENLDRCEKNAVQMAENGRLEPLLNLLIEGSPETQLLMASSLEKIVLSNDLKILVARRVGSLFGGIVEKGSLEAKEVAFKVLEHVSANADSAKVLIEENVLLPLFRVLSINRTSLLPPRLQEAAAAVLANLVASGVDFGTVPLDGDRTLVSEDIVHSLLLLISNTSPPIQCKLLEFFGTLSSSTGTVLSIVSAIKSSGAITNLVQFVESDHQESRTASIKLIHKISFHMEYEIAQVFRASPTLLGCLVKVAFVNDGNAAADEQDAALQILANLPKRDKHLTRELMEQGAFKVAASKVLSIYRRDAGTGSDIYDNAVLEGLAKVLARITYALRDEPRCVSLAREYNLAALFASLLRLNGLDEVQVVSAKALMNLSLESKYLTSTPKFDAEQRSKLALFGRKPTNIQLCRVHSGVCSIRDNFCILEGRAVERLIHCLNHSNKKVVEAALAAICTLLEDGVEAAEGVLVLHRSNGVAPIFDILKENPTGSLQHRVTWAVERILRAEDIAQAASTDRSLGSALVHAFQHGDSRTRRIAEAALKHVQKLPVFSLIIDKRPSIRGSSMGSMERFIKFDR

SEQ ID NO: 16591 - protein, 390 aa, Zea mays
  VARIANT 221: note = Ancestral polymorphism is C, Derived polymorphism is R
MAGYMSRGPQNGSVYVCNLPPGTDENMLAEYFGTIGLLKKDKRTGRPKIWIYRDKVTNEPKGDATVTYEDPHAASAAVEWFDNKDFHGSTIQVHIAESKSKDAFDNPTSLNIIGGVGEQDELDNGAGRGRGRGDGPGKAWQQDGDWMCPNTSCGNVNFAFRGVCNRCGAARPAGAGGTAAGGGGRGRGRGSSDARGSSHAGAAVGGPPGLFGPNDWPCPMCGNINWAKRTKCNICNTSKPGTNEGGVRGGRGGGYKELDEEELEEVKKRRKEAEEDDGEIYDEFGNLKKKFRSKALHTEGAQALPGSGRAGWEVEHRGPSEREGRERSRDRVRDDYYEKETRGRDRGDLGRDQRRSRSRSRDRERERRERRREHDYERRERDRDRDRRHR

SEQ ID NO: 16592 - protein, 334 aa, Zea mays
  VARIANT 72: note = Ancestral polymorphism is T, Derived polymorphism is M
  VARIANT 163: note = Ancestral polymorphism is G, Derived polymorphism is R
  VARIANT 186: note = Ancestral polymorphism is G, Derived polymorphism is A
  VARIANT 198: note = Ancestral polymorphism is S, Derived polymorphism is F
  VARIANT 216: note = Ancestral polymorphism is P, Derived polymorphism is L
  VARIANT 256..334: note = Derived polymorphism lacks residues 256 to 334
MAMEVRRRVPPPHGSAPRRQQATGGEGQRVRVQAGDALPLPIRHTNLIFSALFAASLVYLMRRWQEKIRASTPLHVVSLAKIFAPPLYYTSRQILGPDAINPLPPRDPAKPRHRQRARALTTARIWEQPAALPHVVPGDKGGRKAAQLRCDATRGGEQLFEFGPSPLVFLPLLLIQGGGMDLSRVGEKLLSSIRSVRSLYLLPPTPAAPPSCLEVPERAAAAAAAARAIAGLPPHERINLPSNSEDLVSIYGSNPQGQVMEELEEVFYEEEFDPIKYIMQSIPDEGSDATYFDEQSTLRLAQLDKIAERLPHHVMGHHEEMGMPPTRVEKRFRV

SEQ ID NO: 16593 - protein, 638 aa, Zea mays
  VARIANT 76: note = Ancestral polymorphism is V, Derived polymorphism is A
MAFPSSISIYTAALLLLLSTLGASDDRLVPGKPLMPGTIIVSDGGEFAFGFFAPSNSTPEKLYIGIWYNNVPRLTAVWVANRAAPAISSSAPSLVLTNDSNLVLSDVNGRVLWKTNTTAAGTGSSSPSPRTANATGSVAVLSNSGNLILRSPTGIMVWQSFDHPTDTLLPTMKIWRSYKTHEANNLVSWKDADDPSLGTFSLAGETDPFIQWFIRNGSVPEWRSNVWTGFTVSSQFFQANTSVGVYLTFTYVRTADEIYMVFTTSDGAPPIRTVMSYSGKLETSVWNRNSSEWTTLVVSPDYECSRYSYCGPSGYCDHSDATPTCKCLEGFEPVDREGWSSARFSRGCRRKEALRCGDGDGFLALTDMKVPDKFVRVGRKTFQECAAECSGNCSCVAYAYANLNASAANGDATRCLLWIGDHQLVDSQKMGVLLYSTAGADSQETLYLRVAGMPGKRTKTNTMRIMLPILAAVIVLTSILLIWVCKFRGREINLENRTTIFHGGFTSGGLGEEKTSNDSELPFLKFQDILVATDNFSNVFMIGQGGFGKVYKGTLEGGQEVAIKRLSRDSDQGTQEFRNEVVLIAKLQHRNLVRLLGCCIDGDEKLLIYEYLPNKSLDAIIFSTFYQYLRQVQYAIEL

SEQ ID NO: 16594 - protein, 184 aa, Zea mays
  VARIANT 11: note = Ancestral polymorphism is L, Derived polymorphism is I
  VARIANT 19: note = Ancestral polymorphism is D, Derived polymorphism is Y
  VARIANT 87: note = Ancestral polymorphism is M, Derived polymorphism is I
  VARIANT 125: note = Ancestral polymorphism is S, Derived polymorphism is T
  VARIANT 178: note = Ancestral polymorphism is G, Derived polymorphism is C
MSLAAIFVFLIVSALQLLYRYLDLARKSGGLSDEQIKVRLEIKQLLKEADQLSTPSTFAQAAKLKRLAAAKEKELAKIPEGPVFLEMLVQEHDLKGKQSLYDKYTKFLLVTKVIIYAVLVLCFWSTPVTAVPQHLLQPFGKMFSWRGVDTATGNVVVGILPWLFLTSRVSKMLCQKLGFVLVRP

SEQ ID NO: 16595 - protein, 70 aa, Zea mays
  VARIANT 39: note = Ancestral polymorphism is R, Derived polymorphism is H
  VARIANT 10..70: note = Derived polymorphism lacks residues 10 to 70
MTSAVHRRQWHPAAGAAALYHEHAIAASLARHVSPPLRRVVARRDTSPRQHVGTVAPARVRPPICWTAER

SEQ ID NO: 16596 - protein, 122 aa, Zea mays
  VARIANT 70: note = Ancestral polymorphism is D, Derived polymorphism is E
  VARIANT 94: note = Ancestral polymorphism is T, Derived polymorphism is N
MSVAKRYVLRLFISLKYVTANVVDRQSGRIVTTASTAERPLRDGLECGRACNAKAAAAVGEVLAMRLKVDGLAREPIYANAEKEVAKKGFKNQTKVWAILNALRSHGVNLHIDDDGDHRPHV

SEQ ID NO: 16597 - protein, 196 aa, Zea mays
  VARIANT 151: note = Ancestral polymorphism is R, Derived polymorphism is G
  VARIANT 117: note = Ancestral polymorphism is A, Derived polymorphism is S
  VARIANT 64: note = Ancestral polymorphism is H, Derived polymorphism is R
MGTEAPRRFRFQVEMRCRCIGCVRKVEKAMVSIGSFGGVETSVGDVNSGIVTVVGKVNSTEICRWLKRKTKKSVKIVYPDAPIEDHKQKMILVLGSSSQGGHPTPSAPPLQDDMPWALVPSGVQPDHESLHVIEEKIRGLEKIRDEMKIKGLQNELIAAKSELKQSVRVINGSKKVLLDSALNQLKAYMNLKALGQ

SEQ ID NO: 16598 - protein, 261 aa, Zea mays
  VARIANT 39: note = Ancestral polymorphism is G, Derived polymorphism is C
  VARIANT 132: note = Ancestral polymorphism is G, Derived polymorphism is V
MSRRRRGGSDSDGEDDSFLYRYPLPSVAASEGGGGKPRGGGGGSGGLAPSKSTVYVSNLDFALTNSDLHLLFSRFGRVARVTVLKDRESRRSRGVAFVLFVSREDAAAAAAEMHGKVLNGRTLSASIAADNGRAAEFIRRRVYRDKSRCYECGEEGHLSYECPRNQLGPRERPAPSKKSRRGGGGGGGGRGRGRGGQADWHSDDDEDAAAAVAFEDDKWASVVDTREVEEKAAGKGEGMGKAARREKRKCYFSDESDEDDD

SEQ ID NO: 16599 - protein, 869 aa, Zea mays
  VARIANT 528..869: note = Derived polymorphism lacks residues 528 to 869
  VARIANT 509..869: note = Derived polymorphism lacks residues 509 to 869
  VARIANT 311..869: note = Derived polymorphism lacks residues 311 to 869
  VARIANT 135..869: note = Derived polymorphism lacks residues 135 to 869
  VARIANT 133..869: note = Derived polymorphism lacks residues 133 to 869
  VARIANT 125..869: note = Derived polymorphism lacks residues 125 to 869
  VARIANT 58..869: note = Derived polymorphism lacks residues 58 to 869
  VARIANT 6..869: note = Derived polymorphism lacks residues 6 to 869
MCMDQQNRSSEGRVTCICMEEGGDPQLPSISAPRTTSEGAGGVDLDLLEQLLSGDNGWLEVVSRSPNSVAFPPLSAFFSADATATTVTTAAPAANASWWIQTGGASPSSVEERFSQALSYIRDTQSDGDVLVQLWVPVNRDDGKLVLTTSEQPFTLDHRSDSLLRFREVSTKYQFSADVKSGDSPGLPGRVFIGRLPEWSPDIRYFTSYEYPRVRDAQYLDVHGTMGLPVFEKGSYNCLGVIELIMTRQKINFTSELNTICSALQAVNLRSTEVSSIPRIKFSTASYKDALPEILEVLRAACLTHKLPLAQTWVTCAQQGKRGSRHSDENYRYCISTIDEACFVNEAEMRGFHEACSEHHLLRGEGVAGKAFTTNQPCFLPDIGSSTKLEYSLSHHAKIFKLKGAVAIRLRCTRTGTADFVLEFFLPTDCEALEEQKSVLDSLSGTMRSVCQTLRVVTDREMEDETVLEMNELNSFTPHGKDKVELSFGCNSADRRGEASWTSLAGTSQQESELAALRMHGMFSPGGQGPSLSGVQATAEGSKAKRRTKAEKTVSLQILRQYFAGSLKDAARSLGVCPTTLKRICRQHGITRWPSRKIKKVDHSLRKLQQIIDSVHGAETAFQLNTLYKDITNTSISSDNNLSGSVTVPPTNQSNLTDVNKHQPHKSSSNVPSTSHSHSSCSHSSESSPSCSGGATKHAQQGIIDQMKSENPVKDSSIQTLQTENTSLFEHFSVNETPIDLLQDVTEKANGGHHSSRSPSSPNPKQNTDANMRVKATFGSEKVRFRLNPECNFQELKHEIAKRLSIVDTNPLVLKYLDDDSEWVLMTCDADLQECLHVYKLAGIQTIKISVHLAVSPATRVTTGHTGLS

SEQ ID NO: 16600 - protein, 68 aa, Zea mays
  VARIANT 5: note = Ancestral polymorphism is G, Derived polymorphism is W
  VARIANT 50: note = Ancestral polymorphism is K, Derived polymorphism is N
  VARIANT 57: note = Ancestral polymorphism is W, Derived polymorphism is C
MAVIGYSESLTNIYSIEMMAKWVARFLDGAFRLPSVARMEQSAAEWGRRKKGFLAEWFQPYGAVDYAD

SEQ ID NO: 16601 - protein, 579 aa, Zea mays
  VARIANT 381..579: note = Derived polymorphism lacks residues 381 to 579
  VARIANT 33..579: note = Derived polymorphism lacks residues 33 to 579
MEFAAGAAVAPRPMPAGPGRNRRVGGGAIGIGWARRATAPGLSLAPAVARRAASASGGGHGRVVVRSTGGGCLWFRGEGADGDRSSLARASPSDGAAPARSSVREQTIGIKKELFNLAVPAIVGQAIDPVAQLLETAYVGRLGPVELASAAVGMSVFNIISKLFNIPLLSITTSFVAEDVSKHDSSQYASGNISGKVGERKRLPSISSALLLAAAIGVIEALALILGSGILLNIMGVSHEPEIIVFNTSVITHFPVAAKTTLHASAMHNPARLFLSVRALGAPAVVVSLAIQGVFRGLKDTKTPLLYSGLGNISAVVLLPFFVYSLNLGLTGAALATIASQYIGMFLLLWSLSKRAVLLPPKMKDLEFVGYIKSGGMLLGRTLSVLITMTLGTAMAARQGTVAMAAHQICLQVWLAVSLLSDALAVSAQALIASSFAKLDYEKVEEAGVFVGIALALLLFVSFGRLAEIFSKDPMVIQIVRSGVLFVSASQPINALAFIFDGLHFGVSDFSYSASSMMVVGAISSLFLLCAPRFFGLLGVWAGLALFMSLRMTAGFMRLGWRAGPWWFLHRKEPKYRLQ

SEQ ID NO: 16602 - protein, 594 aa, Zea mays
  VARIANT 19: note = Ancestral polymorphism is R, Derived polymorphism is L
MGQPRRRGYPHGRHHRCPRGIALPAAGAGLLFLSVSLLSVSLLSAPPLADPRPGLGTSSSSRRFLRRHPTNGSDGELEGSESGDAFSVPARGGWTGQDDLWGSKLASNFHGCSNSSSRFLDSGITTQPDRYLIVVTSGGLNQQRTGIVDAVVAARILNATLVVPKLDQTSFWKDSSNFSEIFDMDWFISFLAKDVRIIKEPPEKGGKAMKPYKMRVPRKCTPRCYLNRVLPALLKKHVIRMTKYDYRLSNKLDTDLQKLRCRVNYHSLRFTDPIQELAEKLIQRMREKNRYFIALHLRFEPDMLAFSGCYYGGGEKERRELAAIRRRWRTLHIRDPEKGRRQGRCPLTPEEVGLMLRALGYRSDVHIYVASGEIYGGEDTLASLKALFPNFHTKETLSSQEELAPFLKFSSRMAAIDFIVCEESDAFVANNIGNMAKILAGQRRYFGHKRTIRPNAKQLYPLFMKRGNMSWDAFASQVRTIQKGYMGEPMEITPGRGEFHANPAACICEKTSRNSAIVKSISGNNLEPVTDSGIRKTIGISRPPYPVYTDEEADGSDTEEDPDSSGRGEVIDTEPDDDSAVRQEDPELEEILSD

SEQ ID NO: 16603 - protein, 306 aa, Zea mays
  VARIANT 49..306: note = Derived polymorphism lacks residues 49 to 306
MAAHLRSISLPTRPHSLVLKAEQELQRLRSCCAPVSPPPPVHALRALLQDLSDLHEYAEEIARLPNNWDALRLPRHRRLVEGELEGSVALLDLCGAARDGLADARDQVRDLRLLLRRHRAASHGGPRRGGGAAAAAASARAEACAAGSLKKVARAIRRESCYRRSAVGNTRDDDLSRSGAPRPLAMLAEVRELTVCALQSSVEALLRQVARPSAGKWSLVSRALAHGRSRSFGSGEAREHAATHADADGRSVFGAIKDVVGGDMPLDAGNHLQSLEECIQGLEDGLERLFRNLIRSRVCLLNCVSL

SEQ ID NO: 16604 - protein, 81 aa, Zea mays
  VARIANT 46: note = Ancestral polymorphism is E, Derived polymorphism is G
  VARIANT 37: note = Ancestral polymorphism is P, Derived polymorphism is L
  VARIANT 36: note = Ancestral polymorphism is I, Derived polymorphism is V
  VARIANT 27: note = Ancestral polymorphism is P, Derived polymorphism is L
  VARIANT 24: note = Ancestral polymorphism is T, Derived polymorphism is A
  VARIANT 16: note = Ancestral polymorphism is A, Derived polymorphism is V
  VARIANT 15: note = Ancestral polymorphism is W, Derived polymorphism is L
  VARIANT 13: note = Ancestral polymorphism is V, Derived polymorphism is G
MCLLFITEVDKAGRWARNHYLSSAALPSIKGDKLIVPHESLDISIERLKEHGITTKKSSQNLKKIGACHMSISQRCFMLSI

SEQ ID NO: 16605 - protein, 149 aa, Zea mays
  VARIANT 80: note = Ancestral polymorphism is Q, Derived polymorphism is H
  VARIANT 77: note = Ancestral polymorphism is Q, Derived polymorphism is E
  VARIANT 65: note = Ancestral polymorphism is A, Derived polymorphism is G
  VARIANT 57: note = Ancestral polymorphism is G, Derived polymorphism is W
  VARIANT 43: note = Ancestral polymorphism is S, Derived polymorphism is Y
  VARIANT 37: note = Ancestral polymorphism is A, Derived polymorphism is T
  VARIANT 25: note = Ancestral polymorphism is L, Derived polymorphism is I
  VARIANT 21: note = Ancestral polymorphism is G, Derived polymorphism is R
  VARIANT 19: note = Ancestral polymorphism is A, Derived polymorphism is T
  VARIANT 10: note = Ancestral polymorphism is L, Derived polymorphism is M
  VARIANT 4: note = Ancestral polymorphism is A, Derived polymorphism is G
  VARIANT 2: note = Ancestral polymorphism is M, Derived polymorphism is T
MMSGKRIAHLAKKWQRMAAQRRQRLTWGGAGAAAKQAGESCSSVASKGHCAVYTADWARFEVPLACLSTLVFRELLEMSQEEFGFSGGDGSGRITLPCDTAVMEYAMCLLRRSASAELEQAFLSTVAATSCLYASRVAPCVGACQRVAV

SEQ ID NO: 16606 - protein, 152 aa, Zea mays
  VARIANT 130: note = Ancestral polymorphism is S, Derived polymorphism is P
  VARIANT 102: note = Ancestral polymorphism is V, Derived polymorphism is I
  VARIANT 82..152: note = Derived polymorphism lacks residues 82 to 152
  VARIANT 78: note = Ancestral polymorphism is M, Derived polymorphism is V
  VARIANT 65: note = Ancestral polymorphism is A, Derived polymorphism is G
  VARIANT 43..152: note = Derived polymorphism lacks residues 43 to 152
  VARIANT 37: note = Ancestral polymorphism is A, Derived polymorphism is T
  VARIANT 25: note = Ancestral polymorphism is L, Derived polymorphism is I
  VARIANT 10: note = Ancestral polymorphism is L, Derived polymorphism is M
  VARIANT 7: note = Ancestral polymorphism is I, Derived polymorphism is V
  VARIANT 2: note = Ancestral polymorphism is I, Derived polymorphism is M
MISAKRVAHLAKKWQRMAAQGRQRLTWGGAGAAAKQAGESCSSVASKGHCAVYTADGARFEVPLACLSTPVFRELLQMSQEEFGFSGGDGSGRITLPCDTAVMEYAMCLLRRSASAELEQAFLSTVAATSCCHYASRVALATCVGASLRVAV

SEQ ID NO: 16607 - protein, 158 aa, Zea mays
  VARIANT 28: note = Ancestral polymorphism is T, Derived polymorphism is A
MVSAKRLVQMAKKWQRMAATARRRIALAPPAKGAAEGSSPPCSTSRVAVAGKGHCVVYSADGRRFEVPLPYLDTAVFGVLLGMSREEFGFAGGDGRITVPCDAAVMEYVMCLLRRDASEEVVRAFLSSVVSRPCSHCGNGSLVQSTTGVRQQAAVSSF

SEQ ID NO: 16608 - protein, 143 aa, Zea mays
  VARIANT 13: note = Ancestral polymorphism is K, Derived polymorphism is R
  VARIANT 17: note = Ancestral polymorphism is M, Derived polymorphism is T
  VARIANT 27: note = Ancestral polymorphism is G, Derived polymorphism is A
  VARIANT 70: note = Ancestral polymorphism is A, Derived polymorphism is E
MISTKRIAQLAKKWQRMEALGRKRRLAWGTAAAAKKADRCCASVASKGHCAVYTTDGARFEVPLACLGTEVFAELLHMSREEFGFAGGHGRILLPCDAMVMEYALCLLRRGASADLEKAFLSTMAMSCHSADHAAAPYVAACC

SEQ ID NO: 16609 - protein, 55 aa, Zea mays
  VARIANT 53: note = Ancestral polymorphism is R, Derived polymorphism is K
  VARIANT 40: note = Ancestral polymorphism is S, Derived polymorphism is C
  VARIANT 38: note = Ancestral polymorphism is N, Derived polymorphism is T
  VARIANT 33: note = Ancestral polymorphism is S, Derived polymorphism is L
  VARIANT 32: note = Ancestral polymorphism is L, Derived polymorphism is M
  VARIANT 30: note = Ancestral polymorphism is R, Derived polymorphism is G
  VARIANT 26: note = Ancestral polymorphism is E, Derived polymorphism is K
  VARIANT 25: note = Ancestral polymorphism is C, Derived polymorphism is Y
MAHPGMAPHLQARRAVDVEYKRVSCEYKHRNLSVRVENRSHAAAPGPGDLTIRFL

SEQ ID NO: 16610 - protein, 145 aa, Zea mays
  VARIANT 119: note = Ancestral polymorphism is S, Derived polymorphism is N
MINSKMLVQLAKKWQHMAALGRRRLTMTTTIKDGNLYCTSAIANKGHCIVYTADGKRFEVPLAYLSTNVFVELLRMSEDEFGFTSEDRITVPCDAEVMEYVMCLLRRKPSEEVERAVLNSVVMPCNCMSTMTMVSKGLNQSLSIF

SEQ ID NO: 16611 - protein, 155 aa, Zea mays
  VARIANT 25..155: note = Derived polymorphism lacks residues 25 to 155
  VARIANT 18: note = Ancestral polymorphism is S, Derived polymorphism is F
MEGCRDQDCHFVNDKPSSAVEFVQQKLGGPSISDYEKLKAEKLDLQLKYDKLLETHKETCRQFKLLLQLCKGVGFVHGRGVLHKTMALKIADLGLSRAITVPVNKYTHEILTLWYRAPDVLLGATHYSTPVDICKSKGILAAQTSKSTELAAFLA

SEQ ID NO: 16612 - protein, 202 aa, Zea mays
  VARIANT 38: note = Ancestral polymorphism is A, Derived polymorphism is V
  VARIANT 86: note = Ancestral polymorphism is G, Derived polymorphism is R
  VARIANT 100: note = Ancestral polymorphism is L, Derived polymorphism is F
  VARIANT 157: note = Ancestral polymorphism is S, Derived polymorphism is F
MARSASATAPLSCAIDPAMVLSHKFPEVAYEYDERDVALYALVVGACNADAADEKELQLVYHRDGQSSIKVLPTFISALNAKTGDRFYMDVPGLHYDPTLLLHGKAAILEVETLTCLEGSGEVLCMNRSTIYLRGAGGFSNSSQPFSYATYPSNEVSNVTFSDSTPFAVYEDRIQKSQALLCGLSGYFHPLHSDPTFAQAAG

SEQ ID NO: 16613 - protein, 577 aa, Zea mays
  VARIANT 111: note = Ancestral polymorphism is L, Derived polymorphism is F
  VARIANT 448..577: note = Derived polymorphism lacks residues 448 to 577
  VARIANT 493..577: note = Derived polymorphism lacks residues 493 to 577
MATASEDEAASDRCSGSYSPSADVSESETSSDCSAPTTRRFASSSSASASASATVSRRLASSSSSLPTPASAAAFYLSKPPSSDLSASSYPCPCASVAPEIDMMKERFAKLLLGEDMSGSGKGVCTALAISNAITNLSATVFGELWRLEPLAKARKAMWTREMEWLLSVSDSIVELTPSIQELPEGGGQFEVMVPRPRTDLYMNLPALKKLDAMLLAMIDGFKGTEFWYVDRGVMVEDSGGPFPSSSSSSSCGRPSVRQEEKWWLPCPRVPPKGLSEDSRRKLQQSRDCANQILKAAMAINSDVLAEMEIPEMYLETLPKSGKSCLGEIIYRYITAEQFSPECLLDCLDLSSEHHTLEVANRIEAAIHVWKLKGQKNSTPQARSKKSWGGKVKGLVGDKEKSHTLSERANGLLQSLRLRYPGLPQTSLDMNKIQYNKDVGQSILESYSRVLESLAFNIIARIDDVIYVDDATKKSAAAESVSIFNRGTGVPIQKRISLSPFSIQNTPYASPFATPTFCSSTPVTCSPGRVQPPLNKTNLGRPEIKVEKLFSGDLEKVWTYAGNLSARKDAGDAPERD

SEQ ID NO: 16614 - protein, 199 aa, Zea mays
  VARIANT 40: note = Ancestral polymorphism is G, Derived polymorphism is E
MAEATPTMVFVYGTLKRGFPNHSLLVASATPFVGAASTAGPASLIIGPYSVPFLLPTPASASSGRVVSGELYAPSPAALAELDALEASASPPHQTRCSLSTGLGTHIGVYERRPITVVVDGSGEVVQAEAYFAHPSYAEALWRRCGGEEAEIGEYTVDHAGEYVPKSERLADAAGLIDAIHRFVATATDNRRRAHGLLP

SEQ ID NO: 16615 - protein, 665 aa, Zea mays
  VARIANT 33: note = Ancestral polymorphism is R, Derived polymorphism is L
  VARIANT 402: note = Ancestral polymorphism is R, Derived polymorphism is I
MAASPQQQGQGGPGSGGWTPEQFWSLLDKADRRFARVRDLPSFGRQEPDEFAKAFRAYTQLWRMQQEHRHRLLDAGLRRWQVGEIAARIAHLYYAQYQRTADTALLSEAFVFYHAVLDRAYFQDADHHLAPAKHLRFLARFLLVALLLGRRSHTVPRLASDIRTLLDDSKKSFQDAEYKEWKHVVQEIARFLRADSPFMNMRPLRYSYAFDPPPDTLRTVPTTVKKRGLVLSDTILCSYYPNEVKFTDLSIDVFRMVQCLEWEPCGSFALNDGYSAHDESGQNQPNLLKDLRDAALPPNPLKTILYRPSVTHFLTVLSTKCEELPSNGIMLIYLSATGEMGTSGFCPDTGENVLSNFNKFDISSLSHTSSKENKEPCLWLGCRETEGSNCIYPGDLIPFTRRPLFLVIDSSTSYAFKAGLFDLFPSLELSNHYLDNEGWRSFPFLAYLNLLGTKGLSIHGTERGETSAMLLSPSSRSSAAGFSGDSTRHSGSQFTMFLTSPLQAFCLLLGNNGTDIDRDAYNKAEELLLLSLNEWAATLVASSSLHSIWVEVLGDPLLRRLLLRFIFCRATHSLFKPTNHKTEFLPTCMPPLPESVDAESMLSQSCVLRVASFFGAASQFSFAEVTTWPDVDSEEAVVTSSSGSANKGVPETARDSDISNSSSSF

SEQ ID NO: 16616 - protein, 300 aa, Zea mays
  VARIANT 52..300: note = Derived polymorphism lacks residues 52 to 300
MEGLRIGAPIMQVYHEKSFILPDVSRVLACLYEKDVKFETHTASYRSLLGLQASSHAPVPFYEGPTFLEESREICRYIAEKYENQGYPFLLGKDALERASIEQWLHNEEHAFNPPSRALFFHLAFPLGEGEDDDIDVHTRKLEEVLEVYEQRLSDSEFLVGNKFTLADLVHLPNSHYIKASNKFLYLYDSRKNVRRWWDAISDRSSWKKVLRYMKSVEEKNKQEELKKQQQQQEEAPRTSTDPTRVDSRKQSRTEPRTILVPPADNESSASIVPRTKKPLPGDHLVSTQQIDGVGMPATN

SEQ ID NO: 16617 - protein, 103 aa, Zea mays; identical to SEQ ID NO: 2445
  VARIANT 64: note = Ancestral polymorphism is E, Derived polymorphism is K
  VARIANT 70: note = Ancestral polymorphism is A, Derived polymorphism is S
  VARIANT 78: note = Ancestral polymorphism is R, Derived polymorphism is H
  VARIANT 85: note = Ancestral polymorphism is M, Derived polymorphism is I
  VARIANT 90: note = Ancestral polymorphism is A, Derived polymorphism is S
  VARIANT 93: note = Ancestral polymorphism is R, Derived polymorphism is S

SEQ ID NO: 16618 - protein, 257 aa, Zea mays
  VARIANT 134: note = Ancestral polymorphism is E, Derived polymorphism is V
  VARIANT 132: note = Ancestral polymorphism is S, Derived polymorphism is N
  VARIANT 130: note = Ancestral polymorphism is P, Derived polymorphism is S
  VARIANT 117..257: note = Derived polymorphism lacks residues 117 to 257
MSSSSEGMDVVLLLPVLYSLFSAIFPPLFFIPLCSARSSYILCYSKAPRMTNKPLLLKDVKFQNVHGLTSAYRPLFVRDTTFANGEQKTPSGSARQPLQLTNDVTKMMQKHQLETPQFHQTRFSVLLNVPRSTEKFYFHVVAGIHLRDVSFLIPHSWLPAMLDDQMSFPSLRQTRTTGCFRLHPIRDEDAKFKLCNGMSVQFDVGNMVMVTGGRNTGRVGVIKNWEKHKGIFEVIDVLLGAFCMLCLVFSYLLYRKT

SEQ ID NO: 16619 - protein, 925 aa, Zea mays
  VARIANT 246..925: note = Derived polymorphism lacks residues 246 to 925
  VARIANT 273..925: note = Derived polymorphism lacks residues 273 to 925
  VARIANT 296..925: note = Derived polymorphism lacks residues 296 to 925
  VARIANT 663..925: note = Derived polymorphism lacks residues 663 to 925
  VARIANT 682..925: note = Derived polymorphism lacks residues 682 to 925
MSDYYDSDDDVVLVRQESSDGRVLRAKSTRGKEASGSRYGTWDQSELERHVFSWRLQDVLDRNLLNKKVKKVPKTFNSLDGYLQSFILPLIEETRADLCSALEGIRHAPAAEVTRMVQLDEEQDIFRIGVKNADDPKLAQRDQAYVPKDADLLVLTDRRPRHSSELGLTGKPYLLCSVLKAQSGDGTVVRLSRSLGPAEGLPLFAVFLVNMTTYNRILNALDARAAACRNTSLIEKTLDPKFGRDYNVSSSETPSSLLDRKLDGLKDFELNDSQLYAVHDCVSAVHQPACSVRLIWGPPGTGKTKTISALLWSMLIENHRTVTCAPTNTAVAEVASRVLGVIEESGSGCAATKCFLGDVVLFGNEDRMAVDRKLEKIFIGSRVCRLRQCMMPSTGWTNSLSSMIVLLEDPMVPYERYDEAIQGCLLHFVSEEIKLRNEIAVCSLRTMDDKKVKEMQKDLLEVQKKVRLVEREKMSYETYFQSNYKKLAKDLRTCVETFVDDLPRSATSEENFCCMAEMPLLLDAFGVLVQSEPFEQLQALFKRDTDVSFRLKDARSSCLCKLRLLSSNFELPEMYDSRTIEEFLLQNAKIVLCTASSSYRLHYMQKAQPLEVLVVDEAAQLKECESLIPLQLPGVRHAVLIGDEYQLPALVKSKVCEDAGFGRSLFERLTSLEQPKHLLDVQYRMHPWISKFPVSSFYGGRITDGPNVLNRNYERRHLAGPMYGSYSFINIDGGSEATGKQDRSLINPVEAAAVARIVQKLFIESVDTRKAIRVGVVSPYKGQVRAIEEKLGKQVYSMHNGSFSVKVRTVDGFQGAEEDVIIFSTVRSNTAGKIGFLADTNRTNVALTRAKHCLWILGNAKTLASGKTIWRQIVDDAKERGCFFDAKDDQDLASAIIKASIELDLVENLLKFDRLRIGGSRRSGV

SEQ ID NO: 16620 - protein, 50 aa, Zea mays; identical to SEQ ID NO: 9335
  VARIANT 36: note = Ancestral polymorphism is T, Derived polymorphism is I

SEQ ID NO: 16621 - protein, 244 aa, Zea mays
  VARIANT 70: note = Ancestral polymorphism is R, Derived polymorphism is L
MAAHDPASTRGFNPATTVTTTACGGVGSSRCRSTGADPSNADEGPSAHPTRALPPAEDDLPEGGTATAARRWQRKTPVALAKELVRSRRAVNRLYENKAQLNSVSMHLGEIVATARTVGHLSKSTEVMKIVNNLMKAPELATTMQEFSKEMTKAGVMEEMVNEAVDSALDSEDMEEEIEEEVDKVLASVAGETASQLPDAARTQKIHEASTSRVPEERQAVAEGADDDEEDLEEIRARLAKVRS

SEQ ID NO: 16622 - protein, 229 aa, Zea mays
  VARIANT 21: note = Ancestral polymorphism is W, Derived polymorphism is R
MEKVKNMLKPRPTPQQQLREWQRRLRNECRVLDRQIRDVQREEKNVEKAIREAAKRNDMGSAKALAKELVRSRRAVNRLYENKAQLNSVSMHLGEIVATARTVGHLSKSTEVMKIVNNLMKAPELATTMQEFSKEMTKAGVMEEMVNEAVDSALDSEDMEEEIEEEVDKVLASVAGETASQLPDAARTQKIHEASTSRVPEERQAVAEGADDDEEDLEEIRARLAKVRS

SEQ ID NO: 16623 - protein, 176 aa, Zea mays
  VARIANT 147: note = Ancestral polymorphism is Q, Derived polymorphism is R
  VARIANT 79: note = Ancestral polymorphism is D, Derived polymorphism is G
  VARIANT 72: note = Ancestral polymorphism is S, Derived polymorphism is Y
  VARIANT 43: note = Ancestral polymorphism is T, Derived polymorphism is I
MTVANAMLLNGQNNGYLKHEKSTHLTLLNSSVNTLNGCGVCMTFSLSLYGSSGCIGNLSRSQSLPDSKPKRSLRKKYQDSSTGNRRRWQSGLEAMEKNVSISVSLEGNISSIPNSIANDSKTSMENRVDTSFINHVGPQHTMISCRQVSVFHNESHYLRWLIFWLTYGTKKGSMIS

SEQ ID NO: 16624 - protein, 800 aa, Zea mays
  VARIANT 70: note = Ancestral polymorphism is G, Derived polymorphism is A
MPRPPLHVLLLLLLSLRAAPCPCSAATTDTLSPGNGLAGTAATARLVSNNSKFALGFFKTDSKSPNTYLGIWFNKVPKLTPLWSANGESPVVDPATPELAISGDGNLVIRDQATGSVVWSTRANITSNNTTTVAVLLSSGNLVLRSSSNASDVFWQSFDYPTDTLFAGAKIGWNKRTGLNRRLVSRKNALDQAPGLYSLEMTESNGVGHLLWNSTVAYWSSGQWNGNYFGLAPEMIGAVMPNFRFVNTDEEIYFTYTLHDDAAIVHSALDVSGRGLVGFWLDSKQDWLINYRQPVAQCDVYATCGPFTICDDDADPTCSCMKGFSVRSPRDWELGDRRDGCARNTQLDCASDTGLTDRFFAVQGVRLPQDANKMQAATSGDECSGICLRDCSCTAYSYWNGDCSVWRGKLYNVKQQSDASSRGDGETLYIRLAAKEVAMQKRGISVGVAVGVAIGATAAASILLAGLMIRRRKAKWFPRTLQDAQAGIGIIAFRYADLQRATRNFSERLGGGSFGSVFKGCYLGDPVTLLAVKRLDGAHQGEKQFRAEVNSVGIIQHINLVRLIGFCCEDDKRLLVYEYMPNHSLDLHLFKANGTVLDWNLRYQIAIGVARGLTYLHTSCRDCIIHCDIKPENILLDASFVPKIADFGMAKVLGREFSHAVTTMRGTIGYLAPEWISGTAVTSKVDVYSYGMVLFEVISGRKNSSPEYFGDGDYSSFFPMQVARKLRSGHVESLVDEKLQGDVNLKEVERVCKAACWCIQENESARPTMAEVVQFLEGLSDLGMPPLPRLLNAVTGGSPT

SEQ ID NO: 16625 - protein, 464 aa, Zea mays
  VARIANT 82: note = Ancestral polymorphism is D, Derived polymorphism is V
MSDGSGFPGFHSHSYDRSYSRPLFQVASFSDSGDEQENHVSSPQMCSHSTSRTMPAKPVAPSCLSPSVSRLSMKKTQQVIIVEKSMEEEEMELMKEKYTKLLLGEDMSGSGKGVCTAVAISNSITNLYATVFGTCHRLEPLSPEKRSMWNREMDCLLSICEYIVEFSPTVQAMPDGSTHDVMATSPRSDILMNLPALEKLETMLLGILDSFHKPEFWYADQRNQSFKESKKSFQRSEDKWWLPEPCVPDSGLSDCMHRELQQKRDQASQIHKMAMEINSSILSEMQVPLSYLETLPKSGRVGVGDTIYRYMSSGDQFSPEHLLNFLSLSSEHDALEIADRVEAAMYVWRRKASATHVVSKWENVTELNADGDKNLVLASRARSLLLCLKQRFPGLSQTTLDTSKIQYNKDIGHAILESYSRVLESLAHNIVSWIDDILIADENVKKGHKIRMQKQVFSQISPQR

SEQ ID NO: 16626 - protein, 494 aa, Zea mays
  VARIANT 305: note = Ancestral polymorphism is F, Derived polymorphism is I
MSITCCLPVVECVYCLACARWVWQRCLHSGGYDSETWGVASAEEFEPVPRLCRIILSVYEDDLENPQWAPPGGYGMEPRWVVQRRIYEDTHGHAPTYLLYVDHQHSDVVLAVRGMNMAKESDYAVLLDNKLGQRRFDGGYVHNGLLKAAEWVFDAECDVLKDLLERNPGYTLTFAGHSLGSGVVSMLALLAVHNRELLGGIDRKRIRCFAMAPARCMSLNLAVRYADVINAVILQDDFLPRTDIPLEDIFKSLFCLPCLLCGRCLIDTCIPESVMLRDPRRLYAPGRLYHIVERKPFRYEFAFIFFPERNMQVMLAISTELESGCYGQNNKILNVEFIIFIETIPDCCRCGRYPPIVRTAVPVDGRFERIVLSCNATSDHAIIWIEREAQRALDLLLESEKTMQAPAVERMSSEITVTRDHDEEQQEALRRAIMLGVADVNMPSTYGTFNENPTSEPAEASPLLSDSGRRRAVWEEWIARIFEKDESGQMVPRR

SEQ ID NO: 16627 - protein, 1081 aa, Zea mays
  VARIANT 222..1081: note = Derived polymorphism lacks residues 222 to 1081
  VARIANT 204..1081: note = Derived polymorphism lacks residues 204 to 1081
MMEMILSEFTKHVISSLVNLASNEIAKVLCIRNEISKLARKLESMRAIITDAEQAVVQNETTRDWLKRSREIIYEAEDINDRYNIEKEKFQISQPQECNPSSIFKCCRDVGIDCIVASDIHELHQKLDSIIEEGKRLHVRPASEDQIRLDQTRSYLDIPLLGPDIVGMENDCENLIELLIKGDDIPPQKKRDDIPIRPFLAIIGTIGIGKTTLARKVYHKTETFFQIRVWVHVSKDLRHMTMWSGERLSKGDTADQLEELRQMLRDNKYLLVIDDVWGENVWEGLLKEQAHYGSLGSRVLITTRNEHVARRTGAVHIHHMKGLNEDDGWWLLRTMAFLDESTGNMQDIGRRIVQKCNGLPMAIRRIGCHLREVELKEDDWERIYSSDFCGLSSTIRNAINKSYLELPYNLKRCFLYCSLYPEGSVIDRQCITQQWIAEGFIVTQQDASVEKEAKECYDKLLGRGLLLQENRTYGAERTKMPHLFRSFALLQSQDEYFIGNPQDIGDALRPYRLTITTGGAEAIRNCIRKLKSLRTIILCGSSLNDRTLDSIFQKYTHLRVLDLGGDTQIDRVARSLGSMMHLRYLSFANTQVSEIPSDIEKLRMLQFLILKNCTRLNALPESLGRLTNLRTLDISGCGLNRVKFGFSMMKELRCLQGFLVSSRGSENRNGWSFQELGSLYKLTSLKILRLEKTSIVEDAVQSALQAKHDLKELELCCSTDDGTAEISRAAKIKDVFEALKPGPSIVSLKLENYYGHGFPSWLDPFHLRDLEQLTIDGCLHCQYLPSLGEMKNLKFLAINGSNLSTHIGHEIRGTLDDGVAFPKLEQLVISKMSNLKSWQGLKEIDMPSLMNFRIIGCPKLDSLPSWLKHCTALRSLHIDHADNLESIENIPALKELEVCENSKLKVISNLRRLEDLKVVACLLLDVVQDVPSLCTVHSNEKNSTKLPQWLQPEKPFMLRRLEIVGTEELLDNCSSATAPYWHIIQNADHVYANLPDGSFYFSYAKSSSYFHRSARSLARSPLLSPASFSVPILPQDEVVSTDEIRNISEPIGQSSSRSWMRILFTVLLLLVARIFSLSSEY

SEQ ID NO: 16628 - protein, 236 aa, Zea mays
  VARIANT 184: note = Ancestral polymorphism is C, Derived polymorphism is Y
  VARIANT 68: note = Ancestral polymorphism is T, Derived polymorphism is I
  VARIANT 60: note = Ancestral polymorphism is G, Derived polymorphism is W
  VARIANT 50..236: note = Derived polymorphism lacks residues 50 to 236
MPAPDRDPPLTTVGFHHMRSSATRARFFTGDSGIATAPSFAPPFCPPPHQHSRTATSHDGGPANSVATGLVVWPARKKKKKSSPFSSGSDKPGILSATRPWLAARPRPANPSTEATAAVEANTRLPTTTATPSSSCPTDREGPLKHVTAAAAALSLATAEGLARNREELGESSTVISTGWRFPCLPLWLFLVWDDGLLETSLLFVCWIHAAEAVFDHKTWVDRMIFRVQTRLAYIV

SEQ ID NO: 16629 - protein, 208 aa, Zea mays
  VARIANT 142: note = Ancestral polymorphism is T, Derived polymorphism is M
MPGIPAGKLAAKLTLKYGCTRGVFGAPFFFVNGFLEPGGGSPIDYSTWIGILDPLVSQNGERVEIFTSIVHDSWNQLSNSNLEFPPQIAAACLTSGDEEAFNHENSSMQWAHLCQFHSYTVQNWMRMWIWSRLVMAPKHPTTTLSSWTIGDAEAVTSSMSPAVVVRAVISLSPAAMQCERSTASSLEHIAMSTSRPRQPTLLARARRT

SEQ ID NO: 16630 - protein, 288 aa, Zea mays
  VARIANT 236..288: note = Derived polymorphism lacks residues 236 to 288
  VARIANT 225: note = Ancestral polymorphism is D, Derived polymorphism is V
  VARIANT 223: note = Ancestral polymorphism is S, Derived polymorphism is I
  VARIANT 185: note = Ancestral polymorphism is P, Derived polymorphism is L
  VARIANT 99: note = Ancestral polymorphism is M, Derived polymorphism is I
  VARIANT 97: note = Ancestral polymorphism is N, Derived polymorphism is S
  VARIANT 38: note = Ancestral polymorphism is E, Derived polymorphism is K
  VARIANT 26: note = Ancestral polymorphism is R, Derived polymorphism is C
  VARIANT 6: note = Ancestral polymorphism is Y, Derived polymorphism is D
MWCDSYFGKICVDMPNSLGKYYYFIRLMGRKASHVALECALQSHPNMVILGEEVAASKLTIFDITKQICDVVQARVEKDKNHVVILFLRALWRIFLSYMLCFRKSMASMAKLFLLRISLLSFHHGHLHSEFLAPFIRKHIETEKLLAQLVETEMRRRLVLGHVCYHIIAAGLNGYMATMTDLKNPVNKWRCGATPISSMMTVKRWSCGPLATQIGKPDVHMASVDLKEKAYDVLRQNSSSFLLEDVYRNPGLLQFEGPGVDSNPISLCVEDQDYMSRIRQKSHLFILV

SEQ ID NO: 16631 - protein, 198 aa, Zea mays
  VARIANT 73: note = Ancestral polymorphism is A, Derived polymorphism is S
MQKLVQRSLKEEEKLQHMLANLPSGMRKNDFANQHEQSSSRMLPHFNSSFTEANECELKIKDEPVAAPRKGRAPAPRWYISTEELDSLSSYMRGRLTLEKVNIAINEVASYADANAHLVTCPKKKLSEDTWEKALELRDIAASGAVKGNHFFLEADIKGPGLKLDNTGKAILTVLRHLGRFHEVRIGHHRVFILSKQA

SEQ ID NO: 16632 - protein, 414 aa, Zea mays
  VARIANT 134: note = Ancestral polymorphism is A, Derived polymorphism is T
  VARIANT 120: note = Ancestral polymorphism is A, Derived polymorphism is S
  VARIANT 41: note = Ancestral polymorphism is E, Derived polymorphism is D
MATSNGSGVAQGEEGKTPPPAGSIGGYESLHRLLEANLSPDLFQEASRLLLGLNCARPLEAISLPDATTTLAETHSFDLQAFRFSADKEFLRQSRVVRVGLIQNSIAVPTTCHFADQKKAIMDKIKPLIDAAGASGVNIMCLQEAWTMPFAFCTREKRWCEFAEPVDGESTQFLQELAQKYNMVIVSPILERDINHGETIWNTAVVIGNNGNIIGIHRKNHIPRVGDFNESTYYMEGNTGHPVFETAYGKIGVNICYGRHHPLNWLAFGLNGAEIVFNPSATVGELSEPMWPIEARNAAIANSYFVGSINRVGTEVFPNPFTSGDGKPQHADFGHFYGSSHFSAPDASCTPSLSRYRDGLIISDMDLNLCRQIKDKWAFRMTARYEMYASLLSEYLKPDFKPQVIVDPLINKKA

SEQ ID NO: 16633 - protein, 204 aa, Zea mays
  VARIANT 52: note = Ancestral polymorphism is G, Derived polymorphism is S
  VARIANT 69: note = Ancestral polymorphism is G, Derived polymorphism is C
MGAYKYVSELWRRKQSDVMRFVQRVRCWEYRQQPAIVRLTRPTRPDKARRLGYKAKQGYVVYRVRVKRGGRKRPVPKGIVYGKPKHQGITQLKFQRNKRSVAEERAGRKLGGLRVLNSYWVNEDSTYKYFEIILVDVAHTAIRNDPRINWLCNPVHKHRELRGLTSAGKKFRGLRGKGHTHHKNRPSRRATWKRNQTLSLRRYR

SEQ ID NO: 16634 - protein, 271 aa, Zea mays
  VARIANT 29: note = Ancestral polymorphism is R, Derived polymorphism is W
  VARIANT 81: note = Ancestral polymorphism is L, Derived polymorphism is V
  VARIANT 137: note = Ancestral polymorphism is A, Derived polymorphism is V
  VARIANT 192..271: note = Derived polymorphism lacks residues 192 to 271
MVARRRKLAVRRSTLSVGGNPVVNTVTARPGVARRWVYTTLWRYRLQHRYSADGLTVGLGVQWTPPFRKLAPGAEHRPGTLQMCAGNSCLVFQIACAGGAVPRILRRFLADARVTFAGRNVAADCRMLRAHHGLDVASTLELRRGGGGGGRQSLAEMAERLLGIPRGLVEKPQWVGMSKWDRRRLSPAQERYAAVDANIVSNLRHRLDGRCGGGQADGICATGAVSAPHPWLLCTQQGLVRASDARCEGHQPRAAREPSGLRPLRPDPRRG

SEQ ID NO: 16635 - protein, 169 aa, Zea mays
  VARIANT 115: note = Ancestral polymorphism is G, Derived polymorphism is W
  VARIANT 113..169: note = Derived polymorphism lacks residues 113 to 169
  VARIANT 110: note = Ancestral polymorphism is R, Derived polymorphism is C
  VARIANT 71: note = Ancestral polymorphism is R, Derived polymorphism is W
  VARIANT 69: note = Ancestral polymorphism is D, Derived polymorphism is V
  VARIANT 47..169: note = Derived polymorphism lacks residues 47 to 169
  VARIANT 26: note = Ancestral polymorphism is P, Derived polymorphism is S
  VARIANT 22: note = Ancestral polymorphism is D, Derived polymorphism is G
MATYTTSNSTEEYYTNSGCDGDCLQPVHVILGFDSVFLGRSDIKCVQLNGAMNITEKGRAIDIFTHDADYRVFLMSLKAGGVALNLTVASHVFLMDPWWNPAVENQAQDRIHRIGQFKPIKSTRFVIKDTVEERILQLQQKKQLVFKGTMGDSPDAMSKLTEADLKFMF

SEQ ID NO: 16636 - protein, 122 aa, Zea mays
  VARIANT 104: note = Ancestral polymorphism is K, Derived polymorphism is R
  VARIANT 51: note = Ancestral polymorphism is T, Derived polymorphism is I
  VARIANT 38..122: note = Derived polymorphism lacks residues 38 to 122
MSVSPAKFEQKGDVFVSKKTDKQKKRKIKKVEDKMLGWGGHDDKKLMIPATVILRHMFTPVELRADEELLFELEADVREECIKFGLVDNVKVCENHPQGVILVRFKDRKDGAKCIEKMSGRW

SEQ ID NO: 16637 - protein, 204 aa, Zea mays
  VARIANT 54: note = Ancestral polymorphism is K, Derived polymorphism is N
MGAYKYVSELWRRKQSDVMRFVQRVRCWEYRQQPAIVRLTRPTRPDKARRLGFKAKQGYVVYRVRVRRGGRKRPVPKGIVYGKPKHQGITQLKFQRNKRSVAEERAGRKLGGLRVLNSYWVNEDSTYKYFEIILVDVAHTAIRNDPRINWLCNPVHKHRELRGLTSAGKKFRGLRGKGHTHHKNRPSRRATWKRNQTLSLRRYR

SEQ ID NO: 16638 - protein, 373 aa, Zea mays
  VARIANT 226: note = Ancestral polymorphism is S, Derived polymorphism is L
MPLAESPPWRRKATDFFSTSSVKLKQAGQSAGDNIVDVAGKVGSVVKSRWAVFQEARQQQQQQQRPPHETVQERIITAAASTGLLFRKGISETKEKVAVGKVKVEEAAKKTADKSKSILNNIERWQKGVASTDVFGVPIEATVQREQSDRAVPLVLVRCADYLVISGLNNEYLFKSEGDKKVLQQLVSLYNEDSGASLLEGVNPIDVGALVKCYLASIPEPLTTFSLYDELRAARVSIPDLRNILKKLPNVNYMTLEFVTALLLRVSRKSSLNKMDSRSLAVEFAPLIMWRQGDTGTDLRNHLKFTLKPPPKIVDTTSNAATWDLLDEDDEDASSQIPLDDASPPDYSSIEVIQCLIEHHNAIFTDANETVWR

SEQ ID NO: 16639 - protein, 574 aa, Zea mays
  VARIANT 355..574: note = Derived polymorphism lacks residues 355 to 574
  VARIANT 428: note = Ancestral polymorphism is N, Derived polymorphism is S
  VARIANT 429: note = Ancestral polymorphism is S, Derived polymorphism is N
MLLRAALHLNRLFSTDAALAPPKLRNLPYRLRHVAVPAARAVVSEYLHSTRCLPSSHADSIATHSPRSLFSFLAALPTVPCSLPTAEFPALLRRHLNFHPLNELPFFLESIGGPTAAPPCFNSIFLSDHPSLLGAVAALAHFGFPWSRLGLLYPGVLLDMPPDLISTRLSVLEARLHGLPRAAIIAACLTFPSLLEGDLSDYDLLIKDIATTFIGLGPDLRASNDIDAFSAVCRRMRMFYDAGTEFGSIGGLVGGSQRVFLELGEKRIAERLWFFKELGMEGKEMGRFLLSNARIFDLDFSDVVISVPRYLLNVGLAEDEVDAAVGKHPYVVGKNQLENLARVLRAMELEHRFLEKILAGGESLRYLSPEFVLEDDSYDAEVERAFLDGMAKVMVDRKAQFVDKKLEFLKSVGYGENEITTKVIPVINSTKDLLLERFDYLLERGVEYKILCRILRVFPKVLNQSKDMLNEKLNYLTEELGYSLEYLGCFPAFLCFDLENRVKPRYTMLWWLQEHGLLRKKLAPATVLANSEKRFISTLYLVHPAVPKLWLECFSSRIHMDYYLKNINQHPDNI

SEQ ID NO: 16640 - protein, 775 aa, Zea mays
  VARIANT 146..775: note = Derived polymorphism lacks residues 146 to 775
  VARIANT 206..775: note = Derived polymorphism lacks residues 206 to 775
  VARIANT 607..775: note = Derived polymorphism lacks residues 607 to 775
  VARIANT 683..775: note = Derived polymorphism lacks residues 683 to 775
  VARIANT 690..775: note = Derived polymorphism lacks residues 690 to 775
  VARIANT 697..775: note = Derived polymorphism lacks residues 697 to 775
MAELPARPPEGLRGGGWGWGRGVEIPILSSYHVRHAGSPSTTGSSPAISLPRSSPMSTRSRSPSSAASGCPDDALSSADLHSKLFVRVRRASLWPLLYLLSSLSSQYRAAQVEPAELSLDLAKMSREIRGSPEILFAREVARKWRQHAADKRLLREQKNALAVAALCSLSLGPPVHKSTTVSKLAVEELDIGHAFKERQARKQRSWSRLNVSELSGPILNENNPDARCLYWKLLVLVPPGMESQTNSFVSKWLLRKLMGYGIGDIGLVVSSAGLSIWTEWISFPNACCLSVVRASDQQVIDNDIANSTSCIVFVVSESISWEMQKERFNSLLAYIPDESNLPLLIFSGDTYNEGYEYASKYIINRLGLNGLNRGKIGSSLVIFLVENYTEDHANGFFDDDKLREGLKWLVSSLPVQPDATLVKTHELLLEYLNPQLELLNTHVAPGAGPGDCISVFNNAVNQLAEEILAAANANYSQWPAPEIDLLERTSNERIYAEMFLPSIGWSSPSRIQPLLAAINSCKIPEFSYDLSWLNYGSHMGKQIQDQKKLLEECLARYLTESARLLDESQVVTEVNVMVQNCVGLELRDSSYYLAPRWVAIFRRIYNWRLAKISTGKFSEAYVLTQHLYQAPAAAGSNGTTQGLTANTASSDVVDHIMMPAVSTGITLDEIIEISCDLDAVDAQPVTLPPRLPVHVHEEPQALADNNGVHGVDEMYIPRRVELGEVMPIDTDDKLSRLRLELGEVMPIETDDKLSRLLEQCTKLQDRIDETLSIYF

SEQ ID NO: 16641 - protein, 191 aa, Zea mays
  VARIANT 44: note = Ancestral polymorphism is R, Derived polymorphism is S
  VARIANT 74: note = Ancestral polymorphism is A, Derived polymorphism is V
  VARIANT 84: note = Ancestral polymorphism is G, Derived polymorphism is R
  VARIANT 88: note = Ancestral polymorphism is V, Derived polymorphism is M
  VARIANT 89: note = Ancestral polymorphism is H, Derived polymorphism is Y
  VARIANT 112: note = Ancestral polymorphism is G, Derived polymorphism is R
  VARIANT 115: note = Ancestral polymorphism is D, Derived polymorphism is V
MAATAHLTGVLGVSSPPLAPSHCSCSGAKKQSCSLRQGRQQRRRLRVARAVEVDAPSAGAPEPEEAEEPSVDFAFVSPRLLPDGTPDVHYRTARGGQKLRDIMLDGYIDLYGPYDKVLLNCSGGGVCGTCIVEVVEGKEMLSPKTDVEKELLKRKPKTWRLACQATVGNADSTGQMIIQQLPEWKIHEWDK

SEQ ID NO: 16642 - protein, 88 aa, Zea mays
  VARIANT 48: note = Ancestral polymorphism is G, Derived polymorphism is R
  VARIANT 52: note = Ancestral polymorphism is T, Derived polymorphism is I
  VARIANT 62: note = Ancestral polymorphism is K, Derived polymorphism is N
  VARIANT 64..88: note = Derived polymorphism lacks residues 64 to 88
MPSVLWVSLFMWSYQKLASVYPRERPLLLLRVSGEVVEVDEKLSDLPGLVNTSPYEKGWLIKVKLSNSGELNSLMDDDKYSKFCEGNH

SEQ ID NO: 16643 - protein, 346 aa, Zea mays
  VARIANT 280..346: note = Derived polymorphism lacks residues 280 to 346
  VARIANT 237: note = Ancestral polymorphism is D, Derived polymorphism is G
  VARIANT 221: note = Ancestral polymorphism is F, Derived polymorphism is I
MSRWRAAASSISAAAASRNSAAEARVLSRALAKAPSPPPLPPQTLSRTFAKSAAATATATSPGPGATSPPAGTWSEIRLNSMFLSKPCSLALPPDSPHRAVDPQFKGIRRFLLTLLLFYSKQSKSIRGANVVYDRITSQVDTPAIYDVFQLEKTFKTTFSLLVLHMWLVLRRLKEEGKDGVKFGQYIYEMYNHDVELRVSKAGVFDTFLNITFVSQRTPKFGCCTVEVVLQFFLVSDFNVNLLLTKWMKELEKIFYGNIVKYDAAISPEAHQDDLVNVIWRNIYAEEGSEAMDVAAAPAVQALARYTRREATCLSLTDRDSMFSGNFKFTTLVPATPSPSPKKHGR

SEQ ID NO: 16644 - protein, 261 aa, Zea mays
  VARIANT 104: note = Ancestral polymorphism is D, Derived polymorphism is Y
MELTSSSRSVLSSCNRPVARALCRTAYPGARRKEKGIVCILSEEKEVVQRTIRRRAAFSLLLASPVLSVAFSAYGKSKTMNPYDERRLLQQNKKIQEANRAPEDFPNFIREGFQVKVVTPDNYITRASGLMYEDIKVGTGDSPKDGQQIIFHYVGYNEAGRRIDSTYIQGSPAKIRLGNGTLVPGKSHLILDIDTSGFEEGIRDMKPGGKRRIIIPPELGPPVGPSTFFSAKQFEVFDVELLAVQDCQRRTIAFYSDVVCS

SEQ ID NO: 16645 - protein, 278 aa, Zea mays
  VARIANT 228..278: note = Derived polymorphism lacks residues 228 to 278
  VARIANT 209..278: note = Derived polymorphism lacks residues 209 to 278
MAMDAERRQAELIAQFSSQAVALSSAQQLAALVLEATSHPALFAFSELLALPALSMLAGTQYSSSLDLLRLFAYGTLKDYKSKIVACAFAILTLLPFADNSGSLPALLPDQVRKLKQLSVLTLAESTKILPYDQLMQELDVSNVRELEDFLINECMYSGIVRGKLDQLRRCFEVQFAAGRDLTPDQLNNMIEILSDWLGTSDSLLHQIQEKIKWADTMSDVNKKHQKEFEDRVEEAKKSIKQADIDIRGHDDYLSESVGIMDFEEDRVRPKRRRQPLA

SEQ ID NO: 16646 - protein, 623 aa, Zea mays
  VARIANT 113: note = Ancestral polymorphism is S, Derived polymorphism is F
  VARIANT 117..623: note = Derived polymorphism lacks residues 117 to 623
  VARIANT 254..623: note = Derived polymorphism lacks residues 254 to 623
  VARIANT 389..623: note = Derived polymorphism lacks residues 389 to 623
MAAPAVASPSRATPTDIPTAAPSPASPPRRLASAPPAVDASGSSSPASAHSGDQLSAPDASSPLLASRSEEYRLLFRLPPDEVLVQDFNCAVQENILLQGHMYLFLHHICFYSNIFGYETKKTIPLQEVTDVRKAKTAAIFHNAIEIVAGSRRHFFGSFLSRDEAYRIIVDGWEQHVSDARLLLERQETKSASSSEENGYVVLEGTKESKQDGDLSLPDRSVNSTAVSSSNADGGDSNINISKRFSEVEENGLEDNIVALNPFNLEPVDAPPSVPESYTMISESKFQVPVEVLFNFLLSDGAFGFVDDFHTKCGDKEFSCSKWRTDEQGGLVRDVSFLHPIKIYLGAKFGTCQEVQKLRLYKNRRLVIQTSQSIGDAPYGDHFTVEGIWDVEQDSLDENCCDLRIYINVAFSKKTIFRGKIEQSTKDECREVFSLWIKLGHDLLKQEYDRSKGASSTPDSGVQPGATTNEESAVEVAVPVVSSSHDESGARSLIPPTQDHQQRTGRDPSITSTSQELWGSLSSYMRSRQLGPVLAMSLVALIILMQVTIIVLLTRPPQVQMDPHGIWTGSSGYSKESIEWVQKRLSLLSEEMQLAEAHMETMRREFAWLRSYLERLQRTRGST

SEQ ID NO: 16647 - protein, 153 aa, Zea mays
  VARIANT 107: note = Ancestral polymorphism is G, Derived polymorphism is A
MEQTFIMIKPDGVQRGLFLAQIGDIISRFEKKGFYLKGMKFMNVERSFAQQHYADLSDKPFFPGLVEYIISGPVVAMVWEGKDVVLTGRRIIGATRPWEAAPGTIRGDYAVEVGRNVIHGSDSVENGKKEIALWFPEGVAQWKSNLHPWIYEA

SEQ ID NO: 16648 - protein, 328 aa, Zea mays
  VARIANT 278..328: note = Derived polymorphism lacks residues 278 to 328
MGNLHAKGAGTGAKGAGAANTSISNSRDSMSNAATPSPVEQATFKWVIDGFSSLLDKDQGWTYSNVFELMGVEWYLKLNPKYEVSNEECVSLRLELSQSSVKLDTIFEASFKFMIYDQLIGKHKVHLGNHSFQTASTSSAIAFMLPLKALRQSSRFIVNNSCVFGIGFIKVATIKVNTTLETLFVRKMNIFNEAKVYTWKIEDFSALKNPSHSPEFEIAGYTWIISLNPSYDGNSLSLFLKMKKTNDVPKGSGSLVEFALSIKDQENGKDRKYPGRCQFSSKHHRWGWKKFISLEDFKDSSKGYLIKGKCCIEAEVAISGSSKTEYSM

SEQ ID NO: 16649 - protein, 152 aa, Zea mays
  VARIANT 20: note = Ancestral polymorphism is G, Derived polymorphism is S
MASASKEEVIGKLNVRVVRGNNLVIADPLTHTSDPYVVLQYGAQKVKTSVQKKNPNPEVFDEDKFTADDSMGVAEINITDIYDAAKLDLKHASDGTRIKTIYPVGVNYLGGESHVQWKDGKVVQDLILKLRKVESGLIVVQLEWVHVPGVKL

SEQ ID NO: 16650 - protein, 408 aa, Zea mays
  VARIANT 235: note = Ancestral polymorphism is T, Derived polymorphism is I
  VARIANT 221..408: note = Derived polymorphism lacks residues 221 to 408
  VARIANT 213: note = Ancestral polymorphism is D, Derived polymorphism is A
  VARIANT 180..408: note = Derived polymorphism lacks residues 180 to 408
  VARIANT 173: note = Ancestral polymorphism is R, Derived polymorphism is C
  VARIANT 167: note = Ancestral polymorphism is R, Derived polymorphism is C
  VARIANT 163: note = Ancestral polymorphism is A, Derived polymorphism is V
  VARIANT 103..408: note = Derived polymorphism lacks residues 103 to 408
MAPPARSPTAGPRRRALVVLALALLLLLPLLLLLHLISSPSPRHLPAPRTPSQSQACDYSAGEWVRDPFAGSSLRYDHTCKEIFKGWNCIANGKGNARDLLSWRWTPAGPGCELPRLDPRRFLERHRDTSIGFVGDSLNRNMFASLVCMLRGVNGEVRKWRPAGADRGFTFLRYNLTVAYHRTNLLVRYGRWSRNPNGGPLESLGYKQGYRVDVDIPDQTWVEACSFHDVLIFNTGHWWWAPSKFDPIRSPMLFFEKGRPIVPPLLPPAGLDLALQNMISFANKATRPNTVKFFRTQSPRHFEGGDWNEGGSCQCNQPLSSKEVEEIFSLDNNSTNVEARLVNQHLVKALQQTSFRVLDITRMSEFRADAHPSTTGGKKHDDCMHWCLPGPTDTWNDLLALSLEALES

SEQ ID NO: 16651 - protein, 100 aa, Zea mays
  VARIANT 75..100: note = Derived polymorphism lacks residues 75 to 100
  VARIANT 39: note = Ancestral polymorphism is M, Derived polymorphism is T
MPATPTIIGALLGLGTQMYSNALRKLPYMRHPWEHLLGMGLGAVFVNQLVKFDEKLKEDLDKMLERARLANEQRYIGTVLTCPGMLCLQIHFAIVAGSSR

SEQ ID NO: 16652 - protein, 104 aa, Zea mays
  VARIANT 9: note = Ancestral polymorphism is P, Derived polymorphism is L
  VARIANT 11: note = Ancestral polymorphism is R, Derived polymorphism is T
  VARIANT 15: note = Ancestral polymorphism is S, Derived polymorphism is L
  VARIANT 37: note = Ancestral polymorphism is T, Derived polymorphism is M
  VARIANT 70: note = Ancestral polymorphism is A, Derived polymorphism is T
  VARIANT 76: note = Ancestral polymorphism is T, Derived polymorphism is M
  VARIANT 80: note = Ancestral polymorphism is T, Derived polymorphism is K
  VARIANT 86: note = Ancestral polymorphism is T, Derived polymorphism is I
MAVVEACDPARIDISSKTAASSERTTQLISGGRHAATPPLPSSCSPPTPASRSSSTVSPSPPSLHLASRARTKLRTFLLKPFKLITVFLHETSHALACKLTCGD

SEQ ID NO: 16653 - protein, 200 aa, Zea mays
  VARIANT 51: note = Ancestral polymorphism is V, Derived polymorphism is D
  VARIANT 68: note = Ancestral polymorphism is P, Derived polymorphism is S
  VARIANT 86: note = Ancestral polymorphism is M, Derived polymorphism is I
  VARIANT 122: note = Ancestral polymorphism is A, Derived polymorphism is T
  VARIANT 146: note = Ancestral polymorphism is A, Derived polymorphism is G
  VARIANT 158: note = Ancestral polymorphism is M, Derived polymorphism is T
MAVPRPRIRALRRGTLLLFLLVPLIYSGLRALNKIGLSSEENYSGEHVSFVTVFTTYNSVSAGDGNVSPDSVTVGNSSYSKIERSMTILNTFISFIKVSMPRSDVIILTDPGSKFSVNQGSATLLPIEGNYSRGNLMLQRIKTYIGFLEQKLVEFDRTERLNHFVLTDSDIAVVDDLGHIFEKIHIFIWLLLFVITKGNH

SEQ ID NO: 16654 - protein, 265 aa, Zea mays
  VARIANT 231..265: note = Derived polymorphism lacks residues 231 to 265
MDDAAGNILASLGRVHLVDLVASEGLPSDNYKMCVSTLMQSLSQYSTAIIQLSPADGALLRSGLESARFFFHQQGYNWNEAVHTNDPCEWPGITAKDPSSAKELPRQEQQLDKTLLTLVKSDRSGLYVKDLHGCWILVDGDIGPHDVVVYPGLALYQETAGYVNPAVHKTEVGNIHGCMFGRCSLMFKFMPRSVARLSGSEMRAAGHGVDAQFQIILLINCFLRLNHHYTQNKIQPMYMPCKRYTMAYNVRLVSRLSRLTTVSSV

SEQ ID NO: 16655 - protein, 339 aa, Zea mays
  VARIANT 81: note = Ancestral polymorphism is R, Derived polymorphism is W
  VARIANT 3: note = Ancestral polymorphism is R, Derived polymorphism is K
MGKLLPRHPSPLLLLAAAICISSSSLAAVRGAPVYRADYLVDGNQLVDMQYHMGPVVSGTPTNLYLIWYGRWEAAAQAVLRDFLASLSAPAPFPAVSDWWARTPRMYADQTGANVTGAFAVAGEHSDAGYSHGASLRRIDVQSVIRSAVYAYPDPLPLDPYSGAYLVLTSPDVQVDEFCRAVCGFHYFTFASVVGVTVPYAWVGNSATQCPGKCAYPFAAAAEYGAGGAQPQAVLRPPNGDAGVDGMVIVLGHELAEMSTNPLVNAWYAGDTPTAPTEIADLCLGVYGDGGGAGGLVGNVSRAPDGSAYNVNGVNGRRFLVQWLWNPVRGACYGPNSSN

SEQ ID NO: 16656 - protein, 448 aa, Zea mays
  VARIANT 126: note = Ancestral polymorphism is Y, Derived polymorphism is H
MEAADYGKLFVGGISWETSEDRLREYFGRFGEVTEAVIMRDRSTGRARGFGFVVFADAAVAERVTMDKHTIDGRMVEAKKAVPRDDHSIVSKSNGSSTGSPGPGRTRKIFVGGLPSSVTEADFRRYFEQFGIITDVVVMYDHNTQRPRGFGFITYDSEDAVDKALHKSFHELNGKMVEVKRAVPKEQSPGPVVRSPVGVGQNYATNRVHSFLNGFNQGYNPNPIGGYGMRVDGRYGLLSGARNGFSSFGPGYGMGMNVEGGMSGTFGASSGFISNSNGRQMGSYFNASSNRLGSPIGYLGLNDVPGSMLSSMSRNVWGNGSLNYPSNPTNMSAFASPGNGSQVSLTGDNWGGLPSAHGMGNISSLGSGNLARGAGDNNFGLPSGSYGRSNSTGTIGEPFSAAGNTYDVNNPDTYGGSSIYGGTAWRFTSSEVDMPFGHDIGNFDPTIK

SEQ ID NO: 16657 - protein, 197 aa, Zea mays
  VARIANT 32: note = Ancestral polymorphism is E, Derived polymorphism is G
  VARIANT 46: note = Ancestral polymorphism is A, Derived polymorphism is V
  VARIANT 66: note = Ancestral polymorphism is A, Derived polymorphism is D
  VARIANT 67: note = Ancestral polymorphism is K, Derived polymorphism is E
  VARIANT 72: note = Ancestral polymorphism is G, Derived polymorphism is D
  VARIANT 76: note = Ancestral polymorphism is E, Derived polymorphism is K
  VARIANT 79: note = Ancestral polymorphism is C, Derived polymorphism is Y
  VARIANT 97: note = Ancestral polymorphism is A, Derived polymorphism is G
  VARIANT 102: note = Ancestral polymorphism is G, Derived polymorphism is A
  VARIANT 105: note = Ancestral polymorphism is G, Derived polymorphism is D
  VARIANT 112: note = Ancestral polymorphism is E, Derived polymorphism is K
  VARIANT 113..197: note = Derived polymorphism lacks residues 113 to 197
  VARIANT 125: note = Ancestral polymorphism is V, Derived polymorphism is I
  VARIANT 131: note = Ancestral polymorphism is I, Derived polymorphism is F
  VARIANT 135: note = Ancestral polymorphism is M, Derived polymorphism is V
  VARIANT 140: note = Ancestral polymorphism is S, Derived polymorphism is L
  VARIANT 152: note = Ancestral polymorphism is F, Derived polymorphism is V
  VARIANT 156: note = Ancestral polymorphism is S, Derived polymorphism is P
  VARIANT 171: note = Ancestral polymorphism is S, Derived polymorphism is L
MPPTRPGPLPRLSITPCHMAQPPLPLSSPPIGRTTGPAAGRIVTSAAMVKAYPTVNEDYLKAVDKAKRKLRGLFAEKNYATLMLCLAWHSTGTFDVGTKTGGPFGTMKNPVEQAHRANAGLEIVVRLLEPIKGFMEARASIGPRNRPNPLVFDFGSSPRISRVLVSILSPSLHLIGGELGPVLMIPWVRWTAGNKIL

SEQ ID NO: 16658 - protein, 137 aa, Zea mays
  VARIANT 50: note = Ancestral polymorphism is D, Derived polymorphism is A
  VARIANT 63: note = Ancestral polymorphism is G, Derived polymorphism is D
  VARIANT 68: note = Ancestral polymorphism is A, Derived polymorphism is V
  VARIANT 70: note = Ancestral polymorphism is A, Derived polymorphism is V
  VARIANT 75: note = Ancestral polymorphism is R, Derived polymorphism is G
  VARIANT 119: note = Ancestral polymorphism is R, Derived polymorphism is I
MCDSGVHVISCLDNYIMEVIDASLPLQDQTGANNPILCLRSIHWKNINQDYGVVEVSFSGRGGSDPDAYAVVLKRKLDLYYVVVAKFAAGTSAGRPRTFAKHDEKDVYSRRGHQKKRIIRFYETSKSLCAREMQGHL

SEQ ID NO: 16659 - protein, 1310 aa, Zea mays
  VARIANT 680..1310: note = Derived polymorphism lacks residues 680 to 1310
  VARIANT 739..1310: note = Derived polymorphism lacks residues 739 to 1310
MATQSHSSSAAAIDMYETASQPDASVAGDAYTFLEFNTQGDEFDYPDFPELSQPPPRSTPLTSSIPGAGASSSSWPAPPPPPSDAASAEPDLTSLDVPTPPASSSSPSPRSASKARSLAAADGLASGVAALSFEDPVGAGAGEDGYDYGKGDFVEHACRYCGIHNPACVARCNVPSCRKWFCNSRGNTSGSHIVNHLVRAKHKEVCLHKDSPLGETILECYNCGCRNVFLLGFISAKLENVVVLLCREPCLSVNALKDMNWDLSQWCPLIDDRCFLSWLVKARVPSEQEQLRARQISAQQINKVEELWKTNPDASLEDLEKPGVDDEPQPVVLKYEDAYQYQNVFAPLIKLEADYDKMTKESQSKDNVTVRWDIGLNKKRVAYFVFPKEDNELRLVPGDELRLRYPGDSSHPTWQSVGHVIKLTAQEEVALELRASQGVPTELNVGFSVDFVWKSTSFDRMQGAMKTFAVDETSVSGYIYHHLLGHEVEHQIIRNTLPRRFGAPGLPELNASQVLAVKSVLQKPVSLIQGPPGTGKTVTSGAIVYHMAKQGQGQVLVCAPSNVAVDQLAEKISSTGLKVVRLCAKSREAVSSPVEHLTLHYQVRHLDTSEKSEFHKLQQLKDEQGELSSSDEKKYKALKRATEREILQSADVICCTCVGAGDPRLSNFRFRQVLIDESTQATEPECLIPLVLGVKQVVLVGDHCQLGPVIMCKKAARAGLAQSLFERLVILGVKPFRLQVQYRMHPCLSEFPSNCFYEGTLQNGVTVNERHSSGIDFPWPVPNRPMFFYVQMGQEEISASGTSYLNRTEAANVEKIVTTFLRSGVVPSQIGVITPYEGQRAYIVNYMSRNGSLRQQLYKEIEVASVDSFQGREKDYIILSCVRSNEHQVCSFPVILCFAYDVEALASSLSSKLLRKFMPSMLFQGIGFLNDPRRLNVALTRARYGIVILGNPKVLSKQPLWNSLLTHYKEHECLVEGPLNNLKQSMVQFQKPKKIYNDRRLLLGGAQGMHGANFGAGASSQAADKRSGRGKGQSFVSYGPPNGVHKPGVHPAGYAVPRMPFPPFPGAPHSQPYAIPTRGLHGPIGAVPPVHQPGSRSFGAPRSNTGGPIGGHLAHQQNSQQAMGGIGSNFNYAGMENSSSQPSGVAQMSQSGLMTQMPVQGLSQTFRDGFSIGGMSQDFIVDDFKSQGSHVPYNIAEFSTQASQGGYGVEFTQAPQSGYSGNYMNQNTHPGYSHIGTTNDIVSQDHMAHGSHGMFTQVGYNDPSQDESSQIHYGMAAAGPLHSQSMMNPLYSQSYAHYNTQPHSLQPPPQ

SEQ ID NO: 16660 - protein, 203 aa, Zea mays
  VARIANT 9: note = Ancestral polymorphism is L, Derived polymorphism is F
MLRHAARRLVSRTAAAPTARRALVTAEVPAEAAEDSTFVEAWKKVAPNIEPPTTPLFLMQPRPPTPATIPTKLTVNFVLPYKSEIANKEVDMVIVPATTGQMGVLPGHVATIAELKPGVLSVHEGNDVTKYFVSSGFAFVHANSIADIVAVEAVPVDQIDPAFVQKGLAEFTAKLGSASTDLEKAEAQIGVDVHSALNAALTG

SEQ ID NO: 16661 - protein, 638 aa, Zea mays
  VARIANT 23: note = Ancestral polymorphism is A, Derived polymorphism is D
  VARIANT 22: note = Ancestral polymorphism is S, Derived polymorphism is L
MRWRSPAVLRLQLWLLAVSASLAALGVLAADLSKEPFTIRISCGSFDDVRTEPTNTLWYRDFGYTGGRFANATRPSFIVPPLKTLRYFPLSDGPENCYNINNVPNGHYQVRLFFALLDNPNLDSEPIFDVSVEGTLFSSLLLGWSSDDEKTFAEALVFVQDSSLSVCFHSTGHGDPSILSIEVLQIDDDAYNFGPPREKGTVLRAVKRLKCGSGKPAFDEDLNGIHWGGDRFWLGLQTLSSSSDDQSISSENVIAETLLAPNFYPQGIYQSAIVGTDRQPSLSFEMDVTPNKNYSVWLHFAEIDNGVTAEEQRVFDVLINGDTAFKDIDIIRMTGERFTALVLNKTVAVSGITLKIILQPVKGTRAIINAIEVFEIIPAEKKTLPQEVSALRTLKGSLGLPLRFGWNGDPCVPQQHPWSGVDCQFDSTKGNWIIDGLGLDNQGLKGVIPSDISKLQHLQNINLSGNSIKGNIPISLGTISVVQVLDLSYNELNGSIPESLGELTSLQILNLNGNRLSGRVPASLGGRPLHRARFNFTDNAGLCGIPGLRECGPHLSVAAKIGMAFGVLLAILFLVVFAACWWKRRQNILRAKRLAAAREAPYAKSRTQFTRDVQMAKHQRTHENARSSNSEGSPHLLS

SEQ ID NO: 16662 - protein, 227 aa, Zea mays
  VARIANT 98..227: note = Derived polymorphism lacks residues 98 to 227
  VARIANT 76..227: note = Derived polymorphism lacks residues 76 to 227
  VARIANT 55..227: note = Derived polymorphism lacks residues 55 to 227
MDNEREQSLGDLEKELEAKVSDTQCAAAEIQDLLKQVDAQPVNVKDVDRMRREMQAIEDDIANTEKGKAALEDKFWEVEAKLVTKLEELERHAHQFNQALKQLKPTVAFQYMIDSKGSSPAEMLGTGYKTVLKPALLAHAEENKRICLSNLENLNDLQKQLQGNAKVLEEERNNIFSLQAKNDDLCCAVVGTFLGSGRDVLPRTDRDLTRRPTAVNEYSCGVDTLNI

SEQ ID NO: 16663 - protein, 446 aa, Zea mays
  VARIANT 203: note = Ancestral polymorphism is V, Derived polymorphism is A
  VARIANT 122: note = Ancestral polymorphism is Y, Derived polymorphism is F
  VARIANT 107..446: note = Derived polymorphism lacks residues 107 to 446
  VARIANT 57: note = Ancestral polymorphism is Y, Derived polymorphism is C
  VARIANT 9: note = Ancestral polymorphism is R, Derived polymorphism is M
MDGQGTKHRILMVSDFFFPNFGGVESHIYYLSQCLLKLGHKVVVMTHAYGNRSGVRYVTNGLKVYYVPWRPFLMQNTLPTLSLTFPIVRTIIIREKISVVHGHQAFSTLCHEALMHARTMGYKVVFTDHSLYGFADAGSIHMNKVLQFTLADIDQAICVSHTSKENTVLRSGISPEKVFMVPNAVDTAMFTPSPKRLNCDEIVIVVVSRLVYRKGADLLVEVIPEVCRLFPKVHFIVGGDGPKRVRLEEMREKFSLQDRVEMLGAVPHAQVRSVLISGHIFLNSSLTEAFCIAILEAASCGLLTVSTRVGGVPEVLPDDMIVLAEPAPGDMVRAVKKAIDMLPGIDPQIMHLRMKELYSWDDVAKRTEIVYDRAMESPTTNLLDRLPRYLTCGSWAGKLFCLVMIINYLLWRLLEFLQPAVGIEEVPDIGPLHAHLGSRNDEAQEK

SEQ ID NO: 16664 - protein, 962 aa, Zea mays
  VARIANT 745: note = Ancestral polymorphism is D, Derived polymorphism is G
MAAPTVVLLPVWGAGHLMSMLDAGKRLLTRGGRALSLTVLVMRAPTEQLAADLDAHIRREEASGLDVRFVRLPAVQPPTDFHGIEEFISRLVQLHAPHVRAAISSLASPVAAVVMDFFCTALLDVTRELAVPAYVYFTASAGMLAFFLRLPSLHEEVTVQFEEMEGAVDVPGLPPVPPSSLPVPVMDKNHPNYTWFMYHGRRFAEADGIIVNTAAELEQSVLAAIADGRCTPGVRAPTVYPIGPVISFSPPPTNTEHPHECVRWLDTQPAASVVLLCFGSQGFSAAPQAHEIAHGLERSGHRFLWVLRGPPAPGERHPSDANLSELLPDGFLERTKGRGLVWPTKAPQKEILAHAAVGGFVTHGGWNSVLESLWFGVPMAPWPLYAEQHLNAFTLVAYVGVAVAMKVDRKRNNFVEASELERAVKELMGGGEEGRKAREKAMEMRDACRNAVEEGGSSYSSLRRLSEKISWRERLDADMPSPTIVLLPMWATGHFSSMLEAGKRLLFCSAGRTAAYSLTVLVTPPPMAASSEASSSQQAHCEMMATVDGIVFHHLPAIEHRTDLAHPSEYIRLYAPQVKEAIAGLAAPVAAVVVDFFGTPLLDVAHDLAVPAYVYFASTGAMLALMLRLPGIQEELASRLREEGGVVDVPGMPPVPVASMPSPDVNDYTWFAYYGRRFLETRGIIANTAAELEPGVLASIAGGRCTPGGRAPTVYPIGPVLSPKPRVVVDARSSSSAQECIRWLDAQPPASVVFLCFGSMGWMNAEQAREVAAGLERSGHRFLWVLRGPPAGSGSGHPTDANLGDLLPDGFLERTKAQGVVWPGWAPQLEILAHAAVGGFVTHCGWNSVLESLWHGVPMAPWPLYAEQPLNAFELVACMGVAVDLRVVGTGRASSVVEAAELERAVRSLMGGSEEGRKAKEKARKMKAACRKAAEKGGSAYAALQAVVQDMLESHVPGTAPK

SEQ ID NO: 16665 - protein, 493 aa, Zea mays
  VARIANT 270..493: note = Derived polymorphism lacks residues 270 to 493
  VARIANT 202: note = Ancestral polymorphism is W, Derived polymorphism is C
  VARIANT 2: note = Ancestral polymorphism is A, Derived polymorphism is V
MASLNVLLLPEPGSGHLMSLIEAGKRLLGHGAGGGDGLGREFTVTVLVVRPPTPESAAEVGAHVRRVAESGIAGVRFHHLPAVEPPADCAGNLQEFKSRYLELHRPHVEAAARELGAAALVVDFFATAVLDVARGLAVPAYVYFTSTAALLALTLRLPALAETVAADFETFEGTVDVPGLPPVPAASVPGFLGRKDSPNFTWFVYHGRRFMDADGIVVNTVAELEPGLLAAIAGGRCVPGRPAPPLYPIGPVLNLGAGGGASGDEACVRWLDAQPRASVVFLCFGSLGWFDAAKAREAAAGLERSGHRFLWALRGPPAAGSRHPSDADLDELLPAGFLERTRGRGLVWPRWAPQKAVLAHPAVGGFVTHCGWNSTMESLWHGVPLAPWPLYAEQHLNAFELVAVVGVAVAMEVDRRRDNFVEAAELERAVRALMGGGEEGRKAREKAHEMKAACRKAVEERGSSYAALERLRHAIRKGANTATAHFKAPQPLI

SEQ ID NO: 16666 - protein, 480 aa, Zea mays
  VARIANT 66: note = Ancestral polymorphism is G, Derived polymorphism is R
  VARIANT 198: note = Ancestral polymorphism is W, Derived polymorphism is C
MATPALVLLPEWGSGHLMSMLESCKRVLLSSSGGKAFSITLLVMRPPTAEATSEVEAHVRREAACGLDIRFHRLPAVEAPTDAVGVEEFIARYIGLHAPHVRDAVAAMACPVAALVLDLFAAPLVDVARGLGVPSYVFMSSTGAMLALMLHLPVLHESVPAVDFDEMEGDVPLPGLPPVPPDSMPCPVADKRSPNYACFVRLGDRFMDATGVIANTADELEPGPLAAVARGRCVPGRPAPPVYPIGPVLSLGGRSPSHECVAWLDAQPPGSVAFLCFGSMGWFDPPQVAEITAALERCGHRFLWVLRGPPSDASGSEHPTDANLDELLPEGFLERTGGKGLVWPTWAPQKEILAHPAVGGFVTHGGWNSVLESLWHGVPMAPWPLYAEQHLNAFQLVADMGVAVPLKVDRKRGNFVVAAELERAVRSLMDADGEQGRRAREKAARMKAVCRKAVEEGGSSHAALQRLAEALHDGAVIPKK

SEQ ID NO: 16667 - protein, 614 aa, Zea mays
  VARIANT 556..614: note = Derived polymorphism lacks residues 556 to 614
  VARIANT 297..614: note = Derived polymorphism lacks residues 297 to 614
MAMDQPGSNQDGVVNMTRAMQALSPWLNHPRATITTVEVLVLAAAVLLLLQLFFGFYRRRWRSSFLGTGLRASSKLMDALVFYTLGTMQSSPIKNSLYPVWAAFLVMASTGTTVVQHYDFYDSFRNKYTEVVVDVFRYGFYGLMFSLLIDPNTLTLKTALDLNRHLKKSRASSRFVIALFYVALSTKLLESYGLAIGGYRHQKPSAFTFPNRIRRRRLQAADAETKEGSTTDDDPQSMKGYRAVVWFRDTLVLETPNPIIEVHVSRADYILTLLLLGIALAVELVQATLYLASDWAQVSLATMHVKKHWYETSASTFGAVIAFLRRATLSGRQQLMRRNRMEQYSVVLRQGKQGPVEVSDAVKRAVARSLISTYGGNLTTNVVEETSLQDMLIHHIATEYCDISGPAPSKRTTTRCRCSKHQGFFAANLSGYLFGNVLGSLLPNNRVDDGIALARRDNDRGVAVHLSRYCAYLIGSVPELLPYHEAEIAELAQTVMGERIELLGSSYMDSKIYAKMKDLEGTGEDDDPRKIFQKGIKFGKKLERKPDGDRWELLQEFWAKATIHAAKSHYTTEQHMQHLENGGEFLTHIWALLSHAGLLNSNTGNLGSAPSAAV

SEQ ID NO: 16668 - protein, 117 aa, Zea mays
  VARIANT 45: note = Ancestral polymorphism is Q, Derived polymorphism is R
  VARIANT 49: note = Ancestral polymorphism is G, Derived polymorphism is R
  VARIANT 102: note = Ancestral polymorphism is D, Derived polymorphism is N
MSCPATKQVQQKDHNDPPLYAVTYYSDHSCNSAFLPLFPSEFQLRTPSGKAVSICFDSSSGAPAQEPAAVASVATNASGGSPSSSAAAARRGTPPDISYPLDLRWSDTYPWGAGAVD

SEQ ID NO: 16669 - protein, 454 aa, Zea mays
  VARIANT 27: note = Ancestral polymorphism is S, Derived polymorphism is R
  VARIANT 255: note = Ancestral polymorphism is P, Derived polymorphism is L
  VARIANT 347..454: note = Derived polymorphism lacks residues 347 to 454
MRGEEAGAMEAADYGKLFVGGISWETSEDRLREYFGRFGEVTEAAIMRDRSTGRARGFGFVVFTDAAVAERVTMEKHMIDGRMVEAKKAVPRDDHSIVSKSNGRSTGSPGPGRTRKIFVGGLPSSITEADFRRYFEQFGVITDVVVMYDHNTQRPRGFGFITYDSKKKALHKSFHELNGKMVEVKKAVPKEQSPGPVARSPVGVGQNYAANRVHSFLNGFNQGYNPIPMGGYGMRVDGRYGFLSGARNGFSSFGPGYGMGMNVEGGMSGTFGATSGFISNSNGRQMGSYFNASSNRLGSPIGYLGLNDVPGSMLGSMSRNVWGNGSLNYPSNPANMSAFASPGNGGQVSLTGDNWGGLPSAHGIGNISGLGSGNLGRGAGDNNFGLPSGSYGRSNSTGTIGEPFSAAGNTYDVNNADTYGSSSVYGGTVWRFTSSEVDMHSFGHDIGNVGPTIK

SEQ ID NO: 16670 - protein, 520 aa, Zea mays
  VARIANT 102..520: note = Derived polymorphism lacks residues 102 to 520
MSSSEPQVDATTEPKSQLKRESSDIGWECGRLVDPNDKNRVKCLLCGHESTGGIHRFKQHVGSSVAKCKKSLVGSSDSVSKLGPMDSFARRIDPKANQAEARRQQNINETLWKERTHQVQQYVARWVYTLGIPFHACDNDEFKEMVEAIGRFGLGFQPPSQHHYRDKLLEEEHARTKSLLQDREDEKNKYGCSVMTDAWTDMKRRSIMNICTHTTAGTSFIKSNVSHTSEVFEPLVKLLRLVDGDVKPSMGFLYGELINAKNAIKEAFGNVEIKYKEVMSIVEKKMKDMLDSPLHVAAYMLNPYYSYTNSSIFCDSTIMEKSMICVETFYHGEDEKAYRVVNDDLDRFQTKQGFFSRNMTRSCQCLDFNPAYLQTHTKRRNRLTTERLNNLIFIQFNNRMLSKKERISRNKNYEVLLSNDCSEAQGFFFQGGDEQALVQIRDEDEDEGEMQGTCIPWSVLGDAMGVEDELQPHRSARVAREVDEEVWESGKEDEDNVHEDIDYEEDNCEISNTSDYVHVA

SEQ ID NO: 16671 - protein, 353 aa, Zea mays
  VARIANT 283..353: note = Derived polymorphism lacks residues 283 to 353
MAGRHRNPLPPSYPRAAAAAAGNHLPPPLHPHLPPHHPLDDYRDPPRLPPHHHIDDFRDPSRLPPGHPDSFQEPPPPHLRHFVGHGHGGAGGPLPPQPHVVAALEERLGAEIDEAHALLAQNQRLAATHVALVQEVAAARHELGRTANALTSAQEESDLRLREVYERSLKMEAELRAVHEMRADLAQVRMDIQNLGAERQELMGQVQGLTQDLARSAEDLQKVSALKSEIQEIKHETQHLRSCIELEKKGYAESYEQGQEMQKNLISVASEVEKLRAEVANAEKRSRAIVSAGNQGYNGSYGNPKANYAANPYNSGYGMNQATAATDSGSQYGTGATHGSWGAYDLQRASGRR

SEQ ID NO: 16672 - protein, 555 aa, Zea mays
  VARIANT 331: note = Ancestral polymorphism is P, Derived polymorphism is L
  VARIANT 367: note = Ancestral polymorphism is T, Derived polymorphism is R
MVILDRTPAAAQGAACSPLPKSPRFSWEVASPPSDPILPYLRSISRAMDELGTGPQYDTTALDRLKHYLTECIAKYGDDYQYSTDPRLLKIWILYADAIEDFPSVYNQLEEKGMFQEHALLYDSYAQYLIAHGKLVEADKVYGIGISRLVKAEPLDNLKKMHLTFLKHLENILEEADAEEQCKSSNIQKNEPSVIDPWSPSTRNTLLEKINGGLRKFSGYYKSNKVYCGKVPLTSSLNVLRNKGIKLGGRKYQIKGSTGTGAFAKVYKATVDSNAEEMVALKIQNPSFTLEFYMYCQLDLRISDVERPSFGYAHEMHIFSDVSVLVCDYLPYGTLLDVINSHLVVGRYMDEVLCMYYTIEMLNMLETLHSVGIIHGDFKPDNILVCYPSGEITEDNFRSEKRVERNQGLCLVDWGRGIDLALFPSCTEFHGDCGTSGFRCIEMQEHRNWTYQVDTYGLCVVVHMMLHGSGMNVKKVPRIGGGYEWQPKQPFKRYWNVDLWQKLFSTLLNPPSNDSDVAALQSLRASFRQYMCSNRQLVGKLNQLLAKQKASLCSS

SEQ ID NO: 16673 - protein, 286 aa, Zea mays
  VARIANT 160: note = Ancestral polymorphism is T, Derived polymorphism is N
  VARIANT 41: note = Ancestral polymorphism is G, Derived polymorphism is A
MALLPQILHSPHPALAAAASSSRAFCRAPRHLHVSASRGRGRGRLATAAGASGPGPSSPEPSPPESDDGLVELPLFPLPLVLFPDATHALHIFEYRYRIMMHTVLQTDLRFGIVFVGNSGSAAEVGCVGEVVKHERLADDRFFLICKGQQRFRVARIVRTKPYLVAAVQWLEDRPPAEPPAPGEDAEALAADVEALMRDVIRIANRLNGKPEKEVGDLRRGLFPTPFSFYVGNTFEGAPREQQALLELEDTAARLRRERDTLRNTLNYLTAASAVKDAFPSSPSSG

SEQ ID NO: 16674 - protein, 739 aa, Zea mays
  VARIANT 110..739: note = Derived polymorphism lacks residues 110 to 739
MPMSTMPPPPPPHHSPAIQRPSTTGSDVPLNFHRCHYQIPFFKIKIQGSLLPVPRAPAPLPPHVPTSCAAPGHCQVGHTMQPPQSLVSRARTAIHSAAARVLTDIKADLRDAEGSGGRSRAPSPRTSLDREAAEASATGREPDVKPPSPRDEVLEISPPENEDSSSIPTESTCSTKLTFPPASIVKQLVSAIENGKSFKSMSDMRYTGEQLLKDKGGLSLSVVKSLVRRDKEERSSSDFFGDEETQSLMYSLFKLEEQFSFEASQCFPELVHSRSVSKDLHGAPPGSFIHHLAVVIGSISSVHKMAFFWQSVVLELRKLWSDWQPVPRMPLEVAPDLNSCLLHQEIQVVNCCIARKKRRKAAKESLDSLLNQASIGKSEPRLSEAKFPDSEMYARDNTGDYVLRLGADQSSENLTLLETGEPIYSPTLQEGPIMTAELIKETEELVLRTGSFCLCVIVLVLDALNFYQICRLSRQAANPGCVLEDFVRWHSPPDWSEDCAANSTTVGEGSSRRGRLSDRMQTKEGNLWKELWEAAKPIPAVEQTPIYDEDLAVESIFDALEVIEPSKLFEQLLGVILSVCFVAAESVLAADSNLSKLFYDCKDYIIGVYHNDMSKDELDEMYKVYETMEAIVTHPEEALQIMEQPDEKSVDNKNRFTLKLNFMAKDRPPLWKRTTKDDKISQKVEKNTSEEKNTKIFSNLFDKKVSIFSKKNVRSSEVPPASTSSSSPGPFDESEWTIL

SEQ ID NO: 16675 - protein, 251 aa, Zea mays
  VARIANT 18: note = Ancestral polymorphism is S, Derived polymorphism is Y
  VARIANT 30: note = Ancestral polymorphism is I, Derived polymorphism is F
  VARIANT 45: note = Ancestral polymorphism is F, Derived polymorphism is Y
  VARIANT 50: note = Ancestral polymorphism is G, Derived polymorphism is D
MSSARHTAVFLLLLGVVYELSTVALANFYIPKFGGHGVFGRRCRFGFGGDIGFGGGAGGGFGGGGGLGGGISHGGGFGAGGGLGGGGGFGGGLGSGFGVGSGIGGGGGSGGGLGIGHGGGFGGGGGGGGGGGGGLDGGHGGGFGSGGGVGSGVYGSGGGFGGGGGGGLGSGHGGGFGSGLGVGSGSTHEGLDGVGGIGGGGGLGAGYGGGFSAGAGIGGGIGKGLGGGGGYGGGFRASASFEGSVGGGGGH

SEQ ID NO: 16676 - protein, 441 aa, Zea mays
  VARIANT 76: note = Ancestral polymorphism is G, Derived polymorphism is D
MAVAKKPTRALPHLLLVAFLCLTCSVCARFDDDYDDSRYGPGGFGRGPGFDRGPRGGYRRGPDFGRGPFGRDCRFGRCRRGGGGLGGGGGGGLGGGGGGGLGGGGGLGGGGGGGLGGGGGLGGGGGGGGGLGGGGGAGAGGGFGGGVGGGGGAGGGLGGGGGGGFGGGGGGGLGGGGGKGGGFGAGDGIGSGAGGGSGLGGGGGGGMGGGGGGGLGGGAGGGFGAGGGVGGGAGGGGGLGGGGGGGLGGGKGGGFGAGGGMGGGAGGGGGLGSGGGLGGGGGLGGGKGGGFGAGGGMGGGAGGGGGLGGGGGGGFGGGKGGGFGAGGGIGGGAGGGGGLGGGGGGMGGGGGGGLGGGSGGGFGGGAGGGVGGGGGLGGGGGGGMGGGGGGGLGHGVGLGGGGGGGLGIGIGVGVGVGLGAGAGAGAGGGAGAGAVAGNRGR

SEQ ID NO: 16677 - protein, 850 aa, Zea mays
  VARIANT 726..850: note = Derived polymorphism lacks residues 726 to 850
MTRRGSSSGRRRRRDQEDEDDLPSDDTSDTDFVADSGDAVENDDSDEEFAPDKDTPPAPAVPEAALPPPVPIRIKNQARNRREKRRRGKKARRDAPPLPWEEWQVANDSWLDERNAADGGVEATDATVAAVPTADPAPEVVLRLLRFQKEWLAWALAQEASVTRGGILADEMGMGKTIQAISLVLTARRLRPPDHHSAASSSNSSVGRTKPQVGCTLVVCPVVAVIQWTEEIERHTASGSVRVLIYHGAKRVTQSFDFNSYDFVITTYSTIEADYRKHIMPPKTRCQYCNKLFYPNKMKVHLMYHCGPNAKRTEAQAKQQSKRKWDSSKEKVKEKRRVHKKGDEVNKDFQELADELGRQLRGQSPLHSVRWERVILDEAHFIKDRRCNTARAVFALESECKWALSGTPLQNRVGELYSLIRFLQIFPYSYYFCKDCSCEILDTSMKKQCDCGHSSVRHFCWWNKYISTPIQYGSTSFEGKRAMTLLKEKVLKGIVLRRTKKGRAADLALPPKIVTLRRDSFDKNEMEFYEALYTQSVTQFDAYVDAGTLMNNYAHIFDLLTRLRQAVDHPYLVAYSKTAGHPEGMKNEGNESMESQCGICHNLAEDVVVTSCDHAFCKTCLIDYSAALGNVSCPSCSIPLTVDLTAQNSVGKVTRSVKGRKCSGILSRLPSLVDFKTSTKIDALREEIRNMIEHDGSAKGIVFSQFTSFLDLIQFSLERSGIKCVQLNGAMNITEKGRAIDTFTHDADCRVFLMSLKAGGVALNLTVASHVFLMDPWWNPAVENQAQDRIHRIGQFKPIKSTRFVIKDTVEERILQLQQKKQLVFEGTVGDSPDAMSKLTEADLKFLFQI

SEQ ID NO: 16678 - protein, 209 aa, Zea mays
  VARIANT 40: note = Ancestral polymorphism is A, Derived polymorphism is T
  VARIANT 19: note = Ancestral polymorphism is R, Derived polymorphism is I
  VARIANT 3: note = Ancestral polymorphism is S, Derived polymorphism is L
  VARIANT 2: note = Ancestral polymorphism is R, Derived polymorphism is C
MRSAISETFLESNRRLLQRILKMMHTVASHTSENRMTASAVGACMASLLLRPLLAGECEMDEVFDMDGDDSAQLLAAANAANSAQGIVVTLLEEYEGIFHDEHLRCSLSPESQIEDSGTEASTDDGNLEAKGNGFHDAENDVDQELDDDNGVERILSGKLSESSGYAGSDLYDYKNGNIMIDEKTNVLTIIFYDYNVDTIVKWEYLEHG

SEQ ID NO: 16679 - protein, 1278 aa, Zea mays
  VARIANT 876..1278: note = Derived polymorphism lacks residues 876 to 1278
  VARIANT 882..1278: note = Derived polymorphism lacks residues 882 to 1278
  VARIANT 890..1278: note = Derived polymorphism lacks residues 890 to 1278
MPRTPSLSPSPSPSPERHQHQPARRRGGAAPSQLALHHHHHHRGGHSPSPPPRRSLRPRRAAAPSSRPLVDDFFPFPSSPSSSPFRSRQRGPSPEPSSSDSGADGGAAGSSVSDRRRRKLKLVVKLSQLPPDQLQRRAPPPPSYSDDSDGTEDLAGDGSGDEEQVKPPKKRRIEPRADRSRHREFGGGGRSDPTSAPRTKRPSVPGTARTTPLPDQKALEMILEKLQKKDTYGVFAEPVDPEELPDYHDVIEHPMDFGTVRKKLARNAYRSFEQFEDDVFLICSNAMQYNAPDTIYFRQAHSIQELARKKFQELRDEGIPTENPIKIGQKIRPNFCTGALVKKPVLRYPDDDIDLSHKEKVKRPNSNNVDDDMSFKNQVKKTMSKNSQDRSCLLQKERIKKPIPRNSEDNLSSSFHKERPKKLISRHSKDDPDSPSGKEQVRKVISKNLENDESSPFHKHQVKKSTPQSSKDDFLSQKKHIKPIGRNGEDPGFSSRKKPIEDPVRTNVEDAGFSSTKRLSEKPISVNGEEDRDHCHQESSKEPSCGVEQDGQGYSCDEEAVKKPVCMDSHDAQGSDISAATIASVGDGSNGLSMSQPNATEPTGCPLTNGVIDKDISSPLDEIRSEKTDDILAKPSYKPIVVDETRRKTYDASEEQPLMKSDPVFDVFSAEPKELVNVGLDAEHSYAYVRSLARFAGSLGTQGWRIASDRIRQALPADVNYGRGWVGEYEPPLPSILVVNDQPRYPKSSETNRRRNAPLPRDNERFRSTETNNPKDMRRVATCNNVVGVAGPLESPEIKPRLFGVTTEPQHRSTDALSLHENHRVSGNVAKTKRTTNEQTRKGNSSSSARPLEMQLQKGASSGALDIPAPNKMAGQPRPFLQPPESTRAQQMKKIDSSKSKIPIEMAPQQVECAKDADSSVHDTPSSNGQPKHFFQSQAAASSGVHDMHSSNGQSKHYQSQAAASSGMHAMSSSNGHPKHYFKSQAAPSSGVHDMSSSNGQPKHFFQSQAVASGVHDMASNGQSKPLFQSQEATVLQPKNEATWVYHGRPGDGKVGTSKKSRPSTSIGFITKNQSINAAKFAMNLNGQSIVSDHTKSAGATAMPAQANIPNRGLDAPRNIFSAFPANVRENQSIPSAPVAQSWISFGAATENKPTIVSPAFVDNNCGWKMPFANVQPCDDTKLSVVPQFFRHPVQVVRENSVQNKGLVIFPQLVQPDFARSQGQPQWQGLFPHMQQKPGKDVLRPDLNIGFPSPGSPPARQSSGINLEAQQPDLALQL

SEQ ID NO: 16680 - protein, 722 aa, Zea mays
  VARIANT 559..722: note = Derived polymorphism lacks residues 559 to 722
  VARIANT 541..722: note = Derived polymorphism lacks residues 541 to 722
  VARIANT 523..722: note = Derived polymorphism lacks residues 523 to 722
  VARIANT 345..722: note = Derived polymorphism lacks residues 345 to 722
  VARIANT 287..722: note = Derived polymorphism lacks residues 287 to 722
MEGLFLIDVSTEDDLLFNLVSPAPRRPDPLHAESLVGAEATSSGVSPSAVVRATDPDCVMEEREDPERTESPEQRKAKKGVNLRKSLAWDSEFFTSEGVLDTEELAIVNSTYRKAQGSRLPGIIEETRRSGESTTSTLESETWAMESLETELFDNVRASIQRSLGKPDKLSGRPVAASNPPKATANAPRVAARKGVDRMPQSKMRAPVSTSQGAVSRQRPQVTINEPVAARDKNLTGAAEAKISSKPPRALPRVAMMRSSTNTTVTSRASDKRNSTGGAVNRQAVGKTASTSAVLRSGRGTNSSSILKSGFFTSAATSSHCMLMDTKPEAKTKSATLSIKNRPAQRVPVRPSSKSDISKTIPSRSSGNRIPAKGHADRASPSISPSSSMDSMSSVISGASTASTVGKMSHTSDNLNALSPSLRKSNDCHPNPKFRPPIVTEGHSSGTAASRDNLKATAEITNQGKGLKPSGLRRPTPKIGYFDAENYIDQNIGAQVQPQLSNIQCLPTQNMNLNAAPSTYGQQESKLTAAPHEESCVSKSKLMTPLSLMVEVEPFKVAELACTNLTDPVVVRPESVQPQSMEIQCLLPATPNPQPTFHQQVLKPIAAPLEAVQMEVEAFKVDKPEACIHLSSPVVVKPENKSIDQNAGALLQLQLVAEPESCTRKSKTVVAADYSKENIPALNQNIQANGDANSLVELLTQKLSSISLGEAAPNVAPRSCWE

SEQ ID NO: 16681 - protein, 302 aa, Zea mays
  VARIANT 275: note = Ancestral polymorphism is A, Derived polymorphism is T
  VARIANT 212: note = Ancestral polymorphism is V, Derived polymorphism is D
  VARIANT 101: note = Ancestral polymorphism is T, Derived polymorphism is I
MCDVCVAYQGSPGTVIEAFVLKAFPECTTVPLQRSEAALEAVESSLADIAILPIENAYTGSFHKSYDILLSHDLQIVQEVQMDVELCLLALPGVHKDDLKTIFSHPQYLAQCEHSISGLSVSKKNVDHGVVGAEIISKQNLRDSGVICSARAAELYGLNILECNFQLNFIQKYDTVKTKMLQDESPNVTRYLVLAKTANLPKEHDQYKTSVVFGLEEGPGALCKALGSFWKRGINLTKIESRPNRGKPMRIRGTEKLFNYIFYVDFEASMTDVRAQNALKGLEEVASFLRVLGCYPCSTTTI

SEQ ID NO: 16682 - protein, 615 aa, Zea mays
  VARIANT 298..615: note = Derived polymorphism lacks residues 298 to 615
  VARIANT 257..615: note = Derived polymorphism lacks residues 257 to 615
  VARIANT 199: note = Ancestral polymorphism is Y, Derived polymorphism is N
  VARIANT 175: note = Ancestral polymorphism is Y, Derived polymorphism is H
MPVQDPSSLPSAAGGGARAKRTSSAPIRSADYAHSPTHHCVALRDATGLQTILAGLPPLAHPSLVLTASDAAREARLALSVAAALDRRDVPGGDTALHLAVRLRLPSLASALAAAGADPTLQNHAGWTPLQEALCLGCREIAACLLRAHRLAAWAKLRRRAPALSAALRGVQDFYLEVDFHFESSVVPLLSRAAPSDTYRIWKRGADLRADTTLAGFDGLRIRRADHSFLFFGEETSAGGRRLPPGSLLVLHRGRREVHDAFAAAAAAGDEDAATSDAAAYRPGLNITSARLVPRTTWLRKEKTENVGEWKARVFDVHNVVFSFRTLKAASAGRKDFTFELAGDEDGDEDDDEFLPLEIRDDDEDGDFLVADIPPPPARRSCYVPGRRSVAGPPSHLGTPQRRRNSVDVPRRLPACASVGRGEDGIFARHPGTTTTTGGAKWKEEETIKTLRPSVWLTEDFPLSVDEFLPLLDILASRVRAVRRLRELLTTKFPLGTFPVKVAIPVVPTVRVVITFTKFVPLTEPEEFFTPMSSPSLLASPGPGSITAKPDAHKSSSYLRWGSKNSRPKAVNLSQVADNADPFTVPSDYAWVNSLGSKNHDKKSAKSKKGKSKET

SEQ ID NO: 16683 - protein, 307 aa, Zea mays
  VARIANT 3: note = Ancestral polymorphism is H, Derived polymorphism is Y
  VARIANT 17: note = Ancestral polymorphism is G, Derived polymorphism is R
MLHRLIWSGAGGGAIAGVLIAAGGRGMVGVLSNRVDRDDLKAGDHIYTWRAAYIYAHHGIYAGDGMVIHFTRAAGHEIGTGTFLDWFLYSSSPAATEGPPCQKCGHLVKSDGVITSCLDCFLDGGSLYLFDYAVSPAFFLAKARGGTCTLAASDPSDVVIHRARYLLDNGFGMYSLFKNNCEDFAIYCKTGLLVETAFSVGRSGQLASLTAAFSAVASSPLRFLTTSAGGLAIVTSGMYCVGRYVSDIGVRRDVVKVPVERLVEQNVTWIPQCVATETDIAAGAPQQQLEVPCAVAEEASVIQPAAP

SEQ ID NO: 16684 - protein, 367 aa, Zea mays
  VARIANT 331: note = Ancestral polymorphism is I, Derived polymorphism is S
  VARIANT 155: note = Ancestral polymorphism is D, Derived polymorphism is Y
MGGELLLALLLVSAAAAPQVLGVGNGDNHMRIIQEDIIETVNNHPSAGWTASRNPYFSNYTIAQFKHILGVKPAPQNALSNVPVKTYSRSLELPKEFDARSAWSRCSTIGNILDQYNVLSDDNRVTVALVGLLVLWSASRTVFAFTSTWRVDTEDIAVLISILLSVNDLLACCGFMCGDGCDGGYPIEAWRYFVQNGVVTDECDPYFDPVGCKHPGCEPAYPTPKCEKKCKEQNQVWQEKKHFSIDAYRINSDPHDIMAEVYKNGPVEVAFTVYEDFAHYKSGVYKHITGGIMGGHAVKLIGWGTSDAGEDYWLLANQWNRGWGDDGYFKIIRGKNECGIEEGVVAGMPSTKNMVPNFGGAVGRAIV

SEQ ID NO: 16685 - protein, 157 aa, Zea mays
  VARIANT 37: note = Ancestral polymorphism is T, Derived polymorphism is I
MAGVRGEEFDEGDVWDVLQDDSRHQAQAAPLTAATTTTPPRNTIRRGGKNKCKKAITTMSSKEYEPAAGARGGNNKGGGGRSSAPVAIPAGSSSSARRGGGRGDEEDDAGEMLPPHEWLARKMERMGGVASASPPDQAGRSKGRELTKVRDAVLRLL

SEQ ID NO: 16686 - protein, 697 aa, Zea mays
  VARIANT 242..697: note = Derived polymorphism lacks residues 242 to 697
  VARIANT 235..697: note = Derived polymorphism lacks residues 235 to 697
  VARIANT 213..697: note = Derived polymorphism lacks residues 213 to 697
MIRFRVDEKGRWTVIRFVPVHNHQLAKPGERHMLRSAKSLAVGKSGVIDPLASTEAHPINGFSDMTGDIVENSGYTIRECYNQVGMQSITVIEAGDSQSLVSYFKHKTNEEGMFYWDVQVDQEGRMTNFFYRDGKSRNDYGCFGDAIIFDTTYRTNKYNLICAPFVGVDHHWQNVVFGCAFLLDESVTSYAWVFKSFLESMGGRSPKSIFTDQDEAIMQAVKQVFPNTQHCFSYWHILKNAQSHLGSLNTSQAFQSMFTKCMQGSDSEEDFKESWTAMIQEYKLQDNNWLIDLYTFHHKWCSAFNKDTFDGGINSSQWGEVSSNILNGISDENTSLTRFALLLEKVVKDLRRNESEEDFRCSQTAPVRAIKHSTVLKQAAESYTHRIYKLFEAEFLDGCGATSCHETSSGGNLLRFGITMQGRGSKVWDVVLDTSTMEISCGCRKFERMGLLCSHALKVFTLQNVDTIPEKYVLKRWTKDARRSMYTLAQDDSTQQECTEAELAYRNRAMQYAYNLIIKSQELEESRKIFWDSLETGEKALEVFFEMRNMRTQAAKDADKNVKKKKKTSKGTNPKKAKQAPGVSSTGPELIVHTNEHQFQSSQDAQGNATIGRPYYYQAFPNAPIQPNQMYMHTNMHTMPLCTPQVLFRFHTKYIDKMLTCVKYLSIAFCVNSHWPLYMPPSNSVIAHFQAVMVAMV

SEQ ID NO: 16687 - protein, 359 aa, Zea mays
  VARIANT 303..359: note = Derived polymorphism lacks residues 303 to 359
MSCSHLSTAWSSSALASSASTTRRRSPPRSGLLVRCSLRELRTRIDSVRNTQKITEAMKLVAAAKVRRAQEAVVSSRPFSEALVEVLYNMNQEIQTEDIDLPLTRTRPVKKVALVVLTGERGLCGSFNNNVLKKAETRIDELKQLGLQYTVVSVGKKGNAYFQRRPYIPLERDLEVSSVPTVKDSQAICDLVYSLFVSEEVDKVELLYSKFVSLVRSDPIIQTLLPMSPKGEICDVNGVCVDATEDELFRLTTKEGKLTVEREKVKIETQPFSPVVQFEQDPVQILDALLPLYLNSQILRALQESLASELAARMSAMSSATDNAIELRKNLSIAYNRQRQAKITGEILEIVAGADALAG

SEQ ID NO: 16688 - protein, 179 aa, Zea mays
  VARIANT 60..179: note = Derived polymorphism lacks residues 60 to 179
  VARIANT 61: note = Ancestral polymorphism is T, Derived polymorphism is I
  VARIANT 115: note = Ancestral polymorphism is I, Derived polymorphism is L
  VARIANT 122: note = Ancestral polymorphism is S, Derived polymorphism is N
MAWSAAAVSRFAAASPPAAPISVRLGAAASRSSLSFSSGRRRPVAASLSTSATAVKEAVQTEKAPPALGPYSQAIKANNLVFVSGVLGLNPETRKFISENVEEQTEQVMKNMGEILKASGANYSSVVKTTIMLADLQDFNKVNEIYGKYFPVPAPARSTYQVAALPLNARIEIECIAAL

SEQ ID NO: 16689 - protein, 118 aa, Zea mays
  VARIANT 53: note = Ancestral polymorphism is T, Derived polymorphism is M
  VARIANT 55: note = Ancestral polymorphism is V, Derived polymorphism is M
  VARIANT 79: note = Ancestral polymorphism is G, Derived polymorphism is D
MGNCCLERPRRGGSGSAGSVHYARTNPVWVEDRREEACKGEGEGAGHAPAAATEVKIRITRKQLEELLRRVEDGKHGGGCGVPVQDVISELLCVASTSSNFRHREEGQWRPSLQTIPE

SEQ ID NO: 16690 - protein, 107 aa, Zea mays
  VARIANT 24: note = Ancestral polymorphism is A, Derived polymorphism is V
  VARIANT 34: note = Ancestral polymorphism is H, Derived polymorphism is Q
  VARIANT 54: note = Ancestral polymorphism is R, Derived polymorphism is L
  VARIANT 82: note = Ancestral polymorphism is R, Derived polymorphism is T
MLPASAATPPPAYDRLDKKDAEEARHVRAQFLIHKVLNDPTPSSSSRAARVGVRLKKLRLAIRGVRARARRAVQRHLRNLRRLIARGGGGGRGSSSVRPAAAGPPPS

SEQ ID NO: 16691 - protein, 95 aa, Zea mays
  VARIANT 38: note = Ancestral polymorphism is E, Derived polymorphism is K
  VARIANT 60: note = Ancestral polymorphism is L, Derived polymorphism is I
  VARIANT 63: note = Ancestral polymorphism is A, Derived polymorphism is T
  VARIANT 80: note = Ancestral polymorphism is R, Derived polymorphism is G
MLLLRASTPFAYAKVDKVDAEEARHLRAQFLIHKVLEKKSPRPSALARARPRIGVRLKKLRLAVRALRARACRALQRHLGNLRRLVGRGGVQGSP

SEQ ID NO: 16692 - protein, 465 aa, Zea mays
  VARIANT 66..465: note = Derived polymorphism lacks residues 66 to 465
  VARIANT 117: note = Ancestral polymorphism is W, Derived polymorphism is C
  VARIANT 122..465: note = Derived polymorphism lacks residues 122 to 465
  VARIANT 149: note = Ancestral polymorphism is R, Derived polymorphism is Q
  VARIANT 161: note = Ancestral polymorphism is F, Derived polymorphism is S
  VARIANT 192: note = Ancestral polymorphism is N, Derived polymorphism is I
  VARIANT 338: note = Ancestral polymorphism is I, Derived polymorphism is N
MQPPHQPPMNGQHSQPPPQGPVVPMPPQQQAPPLPYYQQQQAPQYYQQALPQPWGQQQQYAAPPPQYPPPPQTQHYATPPQQYAPLPQQQYAPPPQQQYAPSPYGTTPGSGEVRTLWIGDLQHWMDENYLHYNAFAAVAQQIASVKIIRNKQTGHSEGYGFIEFYSRAAAEHTLMNFNGQMMPNVEMTFKLNWASASTGDKRGDSGSDRTIFVGDLAHDVTDSMLEDVFRAKYPSVRGANVVVDRMTGWPKGFGFVRFGDLNEQARAMTEMNGMLLSTRQMRIGAAANKKNRDAQQTYATDGAYQSSKGNSSENDPNNTTVFVGGLDSNVNEEYLRQIFTPYGEISYVKIPVGKHCGFVQFTSRSCAEEAIRMLNGSQVGGQKVRLSWGRSPQNRQASQHDANNQYNGNSYYGYQQPGYEGYGYGASSAQDPSMQNYYGYSGCGNYEQQQPTQEQQLQQPPPPQH

SEQ ID NO: 16693 - protein, 155 aa, Zea mays
  VARIANT 28: note = Ancestral polymorphism is S, Derived polymorphism is L
  VARIANT 40: note = Ancestral polymorphism is A, Derived polymorphism is V
MDYSYPMEEQHSGFRQWQWQWRLFSLLSSQPELLPPPRPANHVRWEETAAAHLFSASLPGVRKEEIRVEVEDARYLVIRTELDAGTGTGGAVADARSFDRKFRLPGMVDVDGISAAYTHGVLTVKVPRMHTRARPVVDILGAGAGPASDHAARAA

SEQ ID NO: 16694 - protein, 332 aa, Zea mays
  VARIANT 122: note = Ancestral polymorphism is P, Derived polymorphism is L
  VARIANT 154: note = Ancestral polymorphism is M, Derived polymorphism is K
  VARIANT 161..332: note = Derived polymorphism lacks residues 161 to 332
  VARIANT 213: note = Ancestral polymorphism is R, Derived polymorphism is H
  VARIANT 244..332: note = Derived polymorphism lacks residues 244 to 332
MAVEEEEDEDAIVAPSPATSCSRRSSPSRRRTTRAQPCPRPSPFPNSGEQDYRPPVVADSLYLSLPYLFLPRSLRQGLGIPPSTASTAATATKHAGTGWWSNRGRPCPCPSTTPPPRIQRLPVAARGGRQIRKGVLPRLLEEILSTRIMVKQAMKKLSPSQQVLHKVPDVVVALMPICEAFGSIPPPPNHKSTIHGEISVYIVLSCAFLCLLRLWKFYRPPQEYCIAGRGGSVKLELTLDYLLLMHNNHIEFSNSFASNRDSCNDMGSVNEVPAQAIYIDYFPKLRAWFCKPIMTKPKVALKPQTLSPQSEAQAPHDPQTPEQQQSGTGVGV

SEQ ID NO: 16695 - protein, 482 aa, Zea mays
  VARIANT 236: note = Ancestral polymorphism is A, Derived polymorphism is P
MDSSLVLALIAVALPVLLHLLKRGKTPWRPAAAKLPPGSLGLPVIGQSIGLLRAMRANTAERWILDRIHRYGPVSKLSLFGRPTVLVAGSAANRFIFFSSALAMQQPRSVQRILGDKSILELTGADHKRIRGALVEFLKPDMLRLYVGKIDGEVRRHLDECWAGRCTVTVMPHMKRLTFDIISLLLFGLERSPLQDALAGDFARVMDGIWAVPVNLPFTAFSRSLRASARARRLIAGIARETRAKLERGEASRSSDLIACLLSLTDHSGARLLSEEEIVDNSMVALVAGHDTSSILMTFMVRHLANDPDTLAAMVQEHDEIAKNKGDGQTLDWEDLAKMKYTWRVALETLRLVPPIFGNFRRAMQDIEFDGYLIPKGWQVFWAASVTHMDTGIFHEPAKFDPSRFENQSAASAPPCSFVAFGGGPRICVGMEFARIETLVTMHYLVRRFRWKLCCKNDTFARDPMPSPLHGLPIELEQKASP

SEQ ID NO: 16696 - protein, 927 aa, Zea mays
  VARIANT 177..927: note = Derived polymorphism lacks residues 177 to 927
  VARIANT 71: note = Ancestral polymorphism is S, Derived polymorphism is L
MLQTPIAMATALSKSAVKSHPRSPTTAQPPPNPGSNAASAGVGAAPPPPPPLSAAAGATPSKNAAMVELKSRVLAALAKLSDRDTHHIAVEELERIIRAPPLTDAVPMLLNALASDSPGFASPARRESLRLLATLCASHPDAAAPHLHKVLAHLARRLKDPASDTSVRDACRDVAGQLAAVYLRPLSASGVAEAGNATVMLFVKPLFEVMGEQSKAVQGGAAACLAKAVEGAGPGPGAIGMFGKLGPRICKLLGGHGVQAKAALLGVMGSLAQVGAISSHNMPQTLQSIRDCLENSDWATRKAAADTLCVFATHSGHLIGDGIAPTISALEACRFDKVRPVRDSMIDAVQLWKKLTGEDATADGRNKDLGDGEGKLDSRRSMQSGGKSECFDDCSPDSPSNMKGSSIAEKAAVLLKKRPTLTDRELNPEFFQKLETRKTDDLAVEVVVPRKTLQSHLRSEDDTEEDDDPVGPVDSNGSAEDEANLTQMRASSNFQNIRDRWASQRGNSNKDAKSRTADVEDRGEPSTKDSTAATMNIPGEGPSVNNKTNWLAIQRQLSHLERQQTSLMNMLQDFMGGSHDSMVTLENRVHGLERVVEEMAREISLSSGRRGGGPALRFDSSPGRSSNNGFHEYSNSKFGRSGDGRMGFAERFFSTDGMASGMKNPSWRPDSESWDSYAYSGSRSGMNVRRGLDSVSSDNRMARNERSNDQAGPRRGWDKGQGPFRFGEGPSARSAWRASKDEATLEAIRVAGEDNGNSRAAARVAIPELDGEALNDGNQGDERGPLWEAWTRAMDAVHLDDMDSAYAEVLSTGDAELLVKLMEQTGPIIDQLSNEVANEVLHAVGQFLVEESFYDVALNWLQQLTDLVMENGSGYLGIPLDAKRDLLLGLHEATVIELSDDWEGATPVQIMKQLASSWRIDLQQLIN

SEQ ID NO: 16697 - protein, 186 aa, Zea mays
  VARIANT 31: note = Ancestral polymorphism is G, Derived polymorphism is E
  VARIANT 47: note = Ancestral polymorphism is G, Derived polymorphism is D
  VARIANT 151: note = Ancestral polymorphism is R, Derived polymorphism is H
  VARIANT 175: note = Ancestral polymorphism is R, Derived polymorphism is I
MASIPCTFQLSTAASRRVSPRVAAQGRGQGGGGAVLRTPLLGAGRRGLGWLRPSRLSRVVPASESGRAGPTCWFKFGNKDAEGAGIYGSQARDDFDRDDVEQYFNYMGMLAVEGTYDKMEALLNQDIHPVDILLMLAASEGDRPKIEELLRAGARFDVKDVDGRTALDRATDETREFILGFAAKKA

SEQ ID NO: 16698 - protein, 162 aa, Zea mays
  VARIANT 9: note = Ancestral polymorphism is N, Derived polymorphism is K
  VARIANT 13..162: note = Derived polymorphism lacks residues 13 to 162
MRRYSALPNGGRQETLADRAHRYRGIVLVILAPLALVSLVLLLMPRSPAGTMGSARDRQQLAETKTRSMEEEVIKLHKCLQDKDEQLHSFTSSTEQYHHELDDLRTHLSFTQATGEAGTQLNLQLACSGRSVSKRVLLTMGIRHEPHPCHRLGKGTVIFMVT

SEQ ID NO: 16699 - protein, 308 aa, Zea mays
  VARIANT 27: note = Ancestral polymorphism is R, Derived polymorphism is C
  VARIANT 125: note = Ancestral polymorphism is V, Derived polymorphism is A
  VARIANT 219: note = Ancestral polymorphism is E, Derived polymorphism is D
  VARIANT 220: note = Ancestral polymorphism is R, Derived polymorphism is K
MTTTTTAAAAAVNVAAVAQLCAGPRRRKPAAGARVDLRWARLLRLAVVTRVLGVVRDQLLACSSCGGGGGGAARRRYLRLGPPAGANAGPVLSPVDRDDDCAADAEAAAPRDAADDVDNVVSLKVSLLGDCQIGKTSFMVKYVGDDGEDQNGLQMTGLNLMDKMMAVRGAKIAYSIWDVAGDHQSVDHIPIACKDAVAILYMFDLTSRCTLNNIVDWYERARKWNKTAIPILIGTKFDDFAQLPLEMQWTIVNQARAYARAMKATLFFSSATHNINVNKIFKFITAKLFDLPWTVERNLTIGEPIIDF

SEQ ID NO: 16700 - protein, 261 aa, Zea mays
  VARIANT 85: note = Ancestral polymorphism is V, Derived polymorphism is I
MGQQSLIYAFVARGTVVLAEYTEFTGNFTTIAAQCLQKLPASNNKFTYNCDGHTFNYLVEDGFTYCVVAVESVGRQIPIAFLDRVKEDFTKKYGGGKAATAAANSLKREFGPKLKEHMQYCVDHPEEVSKLAKVKAQVSEVKGVMMENIEKVLDRGEKIELLVDKTENLRSQAQDFRQQGTNVRRKMWLQNMKIKLIVLGIIIALILIIILSVCHGFKCGSKGGGGGGRDLQMAGVPWHRRGERPWGVLLFFGRRVVESWR

SEQ ID NO: 16701 - protein, 79 aa, Zea mays
  VARIANT 14: note = Ancestral polymorphism is S, Derived polymorphism is W
  VARIANT 28: note = Ancestral polymorphism is R, Derived polymorphism is Q
  VARIANT 32: note = Ancestral polymorphism is P, Derived polymorphism is L
MFLDCERRDFVVQSYHRELLEQRQSALRRWPPQRSPIARFQPRKMLPENAAREPWKASATKKLSRKRARDKKSSSRRTH

SEQ ID NO: 16702 - protein, 105 aa, Zea mays; identical to SEQ ID NO: 5871
  VARIANT 22: note = Ancestral polymorphism is L, Derived polymorphism is F

SEQ ID NO: 16703 - protein, 381 aa, Zea mays
  VARIANT 163: note = Ancestral polymorphism is R, Derived polymorphism is G
MRLLAAKMSGGAKAYAAVVLIRIMYSGMHVMSKVALDQGMNPLVFLFYRHTTAALVLIPVTFVVERRKAKPVTFKIGWKMFIHALYGVTACGDLFNLGLNYTSATSSSALYNVQPVVTFILAVIFGMETLKLTRFHGKVKFAGILFCVAGVTILAFYEGPMFRSFNHHHLFQNGGGGGGSSAAGAGDTHSKKQWVLGIFLMTLSNVLAGLWTVLQGPLIEDTSKLMNTTLQISWASLQAFLVAVAVERDFSKWRLGWNVGLAAIIYSGVIVTALSYYMQMWTIAKRGPVFLAMSMPLTFVFTIVISSFVIGDAVSLGSIFAGALLVGGLYNVFWGKSIEERDDDDLMNKISGPGKAGLDKAADNNPASSSQVPDDGAEAKV

SEQ ID NO: 16704 - protein, 433 aa, Zea mays
  VARIANT 138: note = Ancestral polymorphism is I, Derived polymorphism is T
  VARIANT 344..433: note = Derived polymorphism lacks residues 344 to 433
MRAPMEGRPNPRTRSCSFTDTHRRVISFSSTGPGGEEAAWRETPEETRKRLEELDAVLEGLVEPKMRPPTPPPPPASRLNESTISNRMTPNMAACIAVESISILEKLHSKGFVHGDVKPENFLLGQPGSPEDKKLYLTDLGLVLFSQLSPPSLLLLICGTQNCTTSKWRENNGHHVDYDQRPDIFRGTIRYASVHAHLGRTGSRRDDLESMAYTLIFLIRGRLPWQGYQGDTKSFLVCKKKMSTSPEMLCCYCPAPFKQFLEIVTNMKFDKEPNYAKLISLFDGLIEAPASRQIRNDGALKVGQKRGRLVADLEEDEQPKKKVRLGSPAAQWISVYNARWPIKQRYHYNVADSRLSQHIEKGNDDGLYISSMASSANLWALIMDAGTGFCSQVYELLLVFLHKELLTPRNHTRLVYVRQRISLPFASPVTVPS

SEQ ID NO: 16705 - protein, 479 aa, Zea mays
  VARIANT 325..479: note = Derived polymorphism lacks residues 325 to 479
MMKWGLSSGTPADSYYEVRSDCTDGVPKSKFKIKAGKTLSARKWQAAFSPDGCLDIASVLSRIQRGGVHPTVRGEVWEFLLGCFDPRSTFDEREEIRQIRRIQYDRWKEDCRQMDSHVGSGKVITAPLITEDGRPIKDPLVLLEATADKDTSEVAPSTSINGNEIDESAERITDKQIIEWKLTLHQIGLDVLRTDRTMVFYENKENLSKLWDILAVYAWIDKDVGYCQGMSDLCSPMIVLLKDEADAFWCFEKLMRRLRGNFKCTDQSVGVSNQLQHLASIIQVLDPKLHDHLETLGGGDYLFAFRMFMVLFRREVSFGDSLYLWEMMWALEYDPDIFFATCEEQGAVHKNKVSKSKLKGLRHFGKWDKDKDKEDDKNGAEDGEDGPVPISVFMVASVLKEKREKLLQEARGLDDLIRILNDVNGNLDAKKACAGALKLHKKYLKKVTSYPIGNQAPAIMLASTNSVLEYLSSASSFLN

SEQ ID NO: 16706 - protein, 689 aa, Zea mays
  VARIANT 275..689: note = Derived polymorphism lacks residues 275 to 689
  VARIANT 448..689: note = Derived polymorphism lacks residues 448 to 689
MIHHLLCLLHQSTPPGTSPPPTPARTRHTMASLEAAETSPPSTPTTSASPCPTPRPLATAPPTMGAALLRAARSGDERQLVKALLADPAAPDLETAATAGGNTLLHVAAAGGHVDLALLLLRRAPRLLTARNAALDTPLHLAARAGAHKVVALLAASSSSSSSSPACSLRALTRATNRRGETALHDAVRGGHEAAARALATADPGLVGMCGGAGESPFYMASAAGSLGMLRMLLKAYKDAEEEVPDLGSSIGPGGRTVMHAAVLTSNEMIQELLQWNPTLVKEVDDSGSTPFHYIASVGNISAMKLLLRRDSSPAYSSDSNGLFPVHIAAKMGYGQFIYELCRFCPDCDELLDSRGRNFLHTAIEHKKWKVVWRFSGTADLGRMANVMDSEGNTPLHLAIKNADQMIVSLLMATNSVLPNIVNNQGLTALDLAVLATDKGISYTLNPQVIILRCLAWTGAVLSPRRLDHFIDDFGIGKTSGNELKKFTNIAQNLIVGSVLVSTVTFAAVFTLPGGYISEGHPHAGAPILSHRYTFKAFVMANTLAFVGSTLSTIWLTYAGSEHVHPLLRAIYMFLSVISMEQATRSMVIGFALGAYVVLSPVSERIAIVVCMSTFMTLLLRNPSSWQLWFLFMPIKRRLGWKGAFKTHLPPETRSRLTIGVGSNFACQFLRRMLGMLFTYSFIFLLALL

SEQ ID NO: 16707 - protein, 356 aa, Zea mays
  VARIANT 195: note = Ancestral polymorphism is M, Derived polymorphism is T
MNNLLSDSFERDEKPESERDIEMGNRNPKDNSDYGLKDFFEQVKEIEVLLDKMSNIVHKLQEANEESKSVTKASAMKVIKERMEKDIDGVLKIARNVKVKLEQMDRNVWTLSLTMSSACDSLHPMLARAHYSPLRFAESREQTEAGVWEGHQRRPIKDVHDHVRSSCIYYANAKVIQQNVNFDCSALKKKLKERMNDFQNLRQTIQEEYREVVERRIFTVTGTKPSEEVIDRLIETGSSEQIFERAIQGTGRGQILDTVEEIQERHDAVMEIEKRLLELQMIFADMAALVDAQREDLDNIENLVQNAVNHVVSGTEALRTAKSLQKKSRKCMLIAIIILLVIAAIVVLSILKPWAK

SEQ ID NO: 16708 - protein, 124 aa, Zea mays
  VARIANT 100: note = Ancestral polymorphism is A, Derived polymorphism is V
  VARIANT 13: note = Ancestral polymorphism is M, Derived polymorphism is L
  VARIANT 11: note = Ancestral polymorphism is I, Derived polymorphism is V
  VARIANT 10: note = Ancestral polymorphism is N, Derived polymorphism is K
  VARIANT 7: note = Ancestral polymorphism is R, Derived polymorphism is S
MATDVLRARNVLLPAPPQRIRAAAAARRRAAGSDSHHPGATATRRRSPPAGTSSPAAGRRHPGGRRARPAAEVYAGPSFSTSPDPSLLPLPQFPARKAVAVAMTTAVDAAAAATRDLRLILRLE

SEQ ID NO: 16709 - protein, 108 aa, Zea mays
  VARIANT 50: note = Ancestral polymorphism is L, Derived polymorphism is R
  VARIANT 59: note = Ancestral polymorphism is G, Derived polymorphism is S
  VARIANT 74..108: note = Derived polymorphism lacks residues 74 to 108
  VARIANT 103..108: note = Ancestral polymorphism lacks residues 103 to 108
MSSLRSLASALIGDAARLHSATGSAGEEPDRVYGAVLCRADSAGANYRRRRGALGAIDGDGHSPCALHSDVTVYSELYHLRFSDRNFLANFKNAPKWADVKLWFLSDC

SEQ ID NO: 16710 - protein, 685 aa, Zea mays
  VARIANT 232..685: note = Derived polymorphism lacks residues 232 to 685
MLVLLPLLLLAVASSPAPTTAGDGGGAVPVGNIFSFFCSPTNSSVLRTYQPNSTFAGNLQKLVSELPSNASAASGFAAGRFGAGAGPGAAYGTALCRGDFLGGQCADCLAEGFSQAASRCPGSVDATMYYDQCQLRFSDQDFLLAAASANNMPESTAWNMNRVSAGNVAAFDALVKGLVAAASDAASDRSSRYATGQAGFPPESINVYALVQCAQDLTARRCRECLAGLMGQMGNFFAGRVGGRILGVRCVIRYEKDVFFAQTPDMLTVAPLLGSTSTKGSSSTTLWVVAVAVPVSVLLACFLACVLWIRKRRRRVTNVSGTVSVPTMSMEMEQVLKLWRVEESDSEFSLFDFDQIADATDNFSDDHKLGQGGFGPVYKGELPGGLEVAIKRLSSVSVQGLMEFKTEIQLIAKLQHTNLVRLLGCCVQADEKMLVYEYMHNKSLDFFIFDGGDRGRALTWGRRFRVVDGVAQGLLYLHKHSRLRVVHRDLKASNILLDRDMNPKISDFGMARIFCSNVTEANTTRVVGTHGYIAPEYASEGLFSVKSDVFSFGVLLLEIVSGKRTAGFYQYGKFFNLTGYAYQLWQDGKWHELVDPALGDDLPVGEVMKCVQVALLCVQDSADDRPSMSEVVAMLGSEGVTMPEPRQPAYYNVRISSLAVSSDSFAESSCRMISNITLTDHEEGR

SEQ ID NO: 16711 - protein, 841 aa, Zea mays
  VARIANT 43..841: note = Derived polymorphism lacks residues 43 to 841
  VARIANT 457..841: note = Derived polymorphism lacks residues 457 to 841
MPQPGGVASGFNHVEVNEQDYKTRLYVCHGKHVVHVKEVPFARSSLNHDDIFILDTKSKIFQFSGSNSSIQERAKALEVVQYIKDTFHEGKCEIASVEDGRMMSDAEAGEFWGFFGGFAPLPRRAPAEGNEKQEETAFKLLCFDQGKLEPVNCKSLAHELLETNKCYFLDYGAELYVWMGRITSLQERKGASEAAEKLLSDSSRTRTPMIKVIEGFETVAFKSKFKEWPQTPGLKMSSEDGRGQVAALLKRQGLNVKGLMKAAPAKEEPQSYIDCTGNLQVWRVNDKDKVPLSSSDQSKFYTGDCYIFQYTYPGDDKEECLVGTWFGKKSIEDDKVIAVSLASKMVESAKFQAVQARFYEGKEPIQFFVIFQSLQVFKGGISSGYKRFIAEIGIDDESYSEDGLALFRIQGSGPENMQTIQVEPVASSLNSSYCYILHDGNTVFTWAGNLTTALDQELMERLLDVIKPNTQSRSQKEGSETDQFWSLLGGKSEYSGQKMVQELESDPHLFSCILSKGNLKVKEMHHFTQDDLMTEDVFVLDCHTSIFVWVGQQVDVKLRLQALDVGEKFIVLDFLMENLARETPIFTIMEGSEPLFFTRFFTWDLAKSLQMHGNSYQRKLAIVKGGGAPALDKPKRRTSIYSGRSTAQDKSQRPRSMSFSPERVRVRGRSPAFTALAATFESSSNRNLSTPPVVKKLYPRSVTPDSSNTSKSSVIAALAGSLDRPSQTPAPAFMKDGSESEKPKQEGDGKGVHTVATSVESLTINEDVKENEPEDEDGLPIYLYERLKTTAVDPVTEIDVTRRETYLSSTEFREKFGMTKEAFSKLPKWKRNKLKIALQLF

SEQ ID NO: 16712 - protein, 855 aa, Zea mays
  VARIANT 207..855: note = Derived polymorphism lacks residues 207 to 855
MAARCSGGCDGREDSAVEALVQWQKVSDFLIGASYMSIPLELLHFATCADLAPLRWVLLQFGAFIVLCGLVHLVAIFTYARPDSRRLLLAITAAKALAAVAASVAAVSLPTFVPQLLRLKTREALLRDKARQLDRDVALVRRREETATRIVRAITKHVCCGCHGGASLAPDVLRTAVFHLSDALGLHSCAVWMPAAAAAASDGGPSLLHLVHRLPEDDHQDPTTRLAICSTDPDVAAVMASKNAKVLRPGSALRRTTSTSGHGHAGAAAIRMPMLRVSNFVDASSSLSDGQGAGVSYAIMVLVLPAPAPTTKNHRTRGPRGEGGGGAREWSRQELEIVEVAADQLAVALSHAAVLKEWQLTRHKLAERQRVLVHARHDAAVATRARDASQSAMRDGVLRPMHSVAGLLSLMQAQQHEDEAFRCTEQRVAVGAMARISALSTTLTDDVMAALLTPTAAGVSLARRPFDPRALVKDAAGVAGCLARCRGLGFSHRAEMSSLPAGCWVVGDDRRVFHLLLHMVGVLLDQCECHCHDLCFAVDTVPVGDQETMSGSGLPDWITPNFSGCNTVCVRFRFGITRHFRNGLLLSSSPRPQERITRRTSVSISSASSKTRLSIATCNKIVQMMNGKMWWESTPASGGQHEEHMSLILHFQLVYGVASPSASSPAGGGGFYHIGGRFGVPSPSTSAPPQHNFNGLRVLLLNTDDTSREVTRKLLERLGCQVLPVPSAARCLSLLLGSATATGGGDQPSFQSPYLVLQAVLVDLHTPAAAIADAATAMDDGFEVALRIREVTGDRFSWLLILVALPLPPRASRIDVRDVCKRTGVNGVIYKPISPSRCQRWQLSFTGFSKTTTDR

SEQ ID NO: 16713 - protein, 688 aa, Zea mays
  VARIANT 10: note = Ancestral polymorphism is R, Derived polymorphism is L
  VARIANT 35: note = Ancestral polymorphism is R, Derived polymorphism is W
  VARIANT 188..688: note = Derived polymorphism lacks residues 188 to 688
MATATAALGRVASPRLVMGYLLFLTVASLLLFSPRAAAQAWQLCGNTGNYTANSTYQSNLESLAKALSANASRSRNLFAEGSVGAVPYVVYALALCRGDTNATACGSCVATGFQDAQQLCPYKNDAAVVYDDCYLRFSNQDFIASTTDNGNDNIILMNTQSVSSPVQAFDAAVVMLLNATGDYAAANSSRFATGEEGFDASYPTIYGLTQCTPDMSSADCRSCLGSIISAMPGSLSGSKGGRIIGTRCNFRYEVYSFFSGAPSLRLPAASPPAPLPSPTAFNVTPTATPPGRTRTKTGLALAIVLPIIAAVLAISFVCLCFFSRRRKQAREQTPSYSTIAGDMESIESLLFDISTLRAATGNFAESNRLGEGGFGAVYKGILRDGQEIAVKRLSQSSGQGIQELKNELVLVAKLQQKNLVRLVGVCLQEHEKLLVYEYMPNRSIDTILFDPERNKELDWGTRFKIINGIARGLQYLHEDSQLKIIHRDLKASNVLLDSDYTPKISDFGLARLFGGDQTREITSRVVGTYGYMAPEYAMRGHYSIKSDVFSFGVLVLEILTGRRSSGSFNIDQSVDLLSLVWEHWTMGTIAEVMDPSLRGKAPAQQMLKCVHIALLCVQDSPVDRPMMSTVNVMLSSSTSSLQAPLKPVFFIPKSGYYSTVYSESYPTASQTTGAVSPNEVSITELEPR

SEQ ID NO: 16714 - protein, 648 aa, Zea mays
  VARIANT 21: note = Ancestral polymorphism is L, Derived polymorphism is S
  VARIANT 2: note = Ancestral polymorphism is A, Derived polymorphism is V
MAPHLLAVAVAVAAIIATVSLLAPGAAAYPWPVCGTSNDFEPNSTYQANLNLLAAMLPNNVSASPVLYATAVVGAVPEQVWGMGLCRGDANASSCLACLTQAFQDLPNDCSYNKDAAIYYDPCTLHYSDVHTLADDDTGPTTMSYNINNNANVTSDPARFERLLAALVNATAEHAASNSTRRFATGEADADFDRQFPKVYALAQCTPDQTPAQCRKCLAGLISQSLDGFQNNIGGRVLWVNCTWRYETSPFFNGPAMVRLASSSSPPAAAAAGGGERKYSVFIVVLAVVLPTLAALNLVFCFCFWRRPAPQAKQSQPMYSTEAEDVETVDSMMIDVSALRAATGNFDESNKLGEGGFGAVYKGVLPDGDEIAVKRLSKSSTQGVEELKNELALVARLRHRNLVRLVGVCLEQQERLLVYEFVPNRSLDLVLFGTDTREPLSWEQRYRIINGIARGLQYLHEDSQLKVVHRDLKASNILLDVEMNPKISDFGLARIFGRDQTQAVTSRVVGTYGYLAPEYLMRGNYSVKSDAFSFGVMVLEIVTGRKNNGSSHKSGDLLTTVWEHWEAGTVAELVDPSLGGSFPEGDVLRCIHIGLLCVQGDPAARPVMSSVVTMLGTDTVTLQAPSKPGFFARKSGTSTTVSADDGSI

SEQ ID NO: 16715 - protein, 584 aa, Zea mays
  VARIANT 12: note = Ancestral polymorphism is G, Derived polymorphism is S
  VARIANT 15: note = Ancestral polymorphism is L, Derived polymorphism is V
MALTNVFVVLLSTALAVLPFSPADAGVVGVSYGRLGNDLPGTASVVKLLKKSGITSVRLYDANSKVLKALANTGITVMVMLPNDKLAAAAADPSSARRWVRRNVAAYYPATQIHAVAVGNEVFEEAKNLTGQLVPAMSNVHDALVKLGLDGAVKVSTPIAFTALQESWPPSAGRFRDDIARSVMKPMIDFLERTGSYLTVNAYPFFAYAEEPDKISLDYALGNSNATGVRDPVTGLVYHSLLDAQLDATYFAMEKLGTSRSSARGPKSVAPAAHVSESGWPSGGKPKRGGRPRPRPRGGGRRLELEQAGGEAASVANAQAYNNYLIKRVLSGDTGTPYHPDADMDVYIFSLFNENQKGDGADDVEQHFGLFYPNRTKVYEFDFRGGALVASWCVANASAGDARLQAALEYACGHGADCGAIQPGAPCFEPDTRLAHASYAFNSYYQRNGRAKAACDFDGAAYVVYHEPAGTCDPNVSWCVANAAAGDARLLAALNYACANGADCGAIQPGGACFEPNTVVAHASYAFNSYYQRKGRGSGTCDFAGAGSVVYHAPKIIGKCVLPSKAWIQETTTVKSRGFKTSSV

SEQ ID NO: 16716 - protein, 708 aa, Zea mays
  VARIANT 27: note = Ancestral polymorphism is L, Derived polymorphism is P
MCSASIFLPRCPNTMFQKNLLPLAAVLAVVASLMAAAAGYPWSVCGDSTDSSDFMPNGRYQAHLDFIAAALPKNASKSPYLFATVVAGTVPDQVWAVGLCRGDAKPTACFTCLTLAFQDLPGYCTYAKDASIYYDRCMVHYSDVHTLSGDDDTGPMMDRYAIGDTQTIASDPGRFVLLVAALVNATADYAAYGSGSAARRGFATGEADAGFDPEFPKLYALAQCMPGQTPALCRECLSRLISQSLDGFRNSIGGRVLAVSCTYRYESAPFYDGPAMVRLAPPSSGAPAPAPAVNFRVPAADGRKYHVPWVALAVVLPALAALNLVACLCLRFRRRRRRQPTAPRDKQQKDPVHSTEAEDIEMVESMMMDVSTLRAATGDFDESNKLGEGGFGAVYKGVLPDGEEIAVKRLSSSSSQGVEELKNELALVAKLKHRNLVRLVGVCLEQQERLLVYEFVPNRSLDLALFGADGREQPPLELDWGQRYRIINGIARGLQYLHEDSRLRVVHRDLKASNVLLDKNMNPKISDFGLARIFGRDQTQAVTSRVVGTYGYMAPEYMMRGNYSVKSDAFSFGVMVLEIVTGRKNSNDGCDLLTTVSTTITPAEEWMLAASRSLQIHEQVWMHWEAGTVAELVEPTSMGGSFPEGDVLRCIHIGLLCVQPDPAARPVMSSVVTMLGSDTVTLQAPSKPGFFARNNSAYTTVSTVPVDA

SEQ ID NO: 16717 - protein, 487 aa, Zea mays
  VARIANT 446..487: note = Derived polymorphism lacks residues 446 to 487
  VARIANT 363: note = Ancestral polymorphism is G, Derived polymorphism is C
  VARIANT 311..487: note = Derived polymorphism lacks residues 311 to 487
  VARIANT 33..487: note = Derived polymorphism lacks residues 33 to 487
MEGLAAVLLLYALLVFALESPRVSTPLSGGWRYSAEAPPLLRRGRARGVRPRRVGARTGSSALPLRHRPRRLAPRLRPLRRAPPVRGGRCRGGRPRVLRPRGPRPRRRRRALRRERHGQVPALDRARRGGARRAEPRGGAALRARAGSHITVAATPRAPHEERNPAIAVVKDGERPAMVSQFMVELQGLRAVDGEDPPRVLHFNPRLRGDWSGQPVIEHNTCYRMNWGAAQRCDGWRSRPDEETGWGPLSVHVDGLVNARSGLGTIMTGVCARGCYRSVTEWGPRCAFSDCRVFAHYTPKLCDLEFSTVWQAPPLPDESVEIFIGIMSSANHFAERMGVRKTWMSAVHKSPSTVARFFVALHGRKEVNVELKKEAEFFGDIVFVPFLDNYDLVVMKTLAICEYGCDDDTFVRLDSVITEIKKVPSGKSLYMGSMNIQHKPLRHGKWAVTYEEWPEEMYPAYANGPGYVISSDIADFIMSKFMKQKLT

SEQ ID NO: 16718 - protein, 732 aa, Zea mays
  VARIANT 123: note = Ancestral polymorphism is K, Derived polymorphism is E
  VARIANT 233..732: note = Derived polymorphism lacks residues 233 to 732
  VARIANT 268..732: note = Derived polymorphism lacks residues 268 to 732
  VARIANT 314..732: note = Derived polymorphism lacks residues 314 to 732
  VARIANT 324..732: note = Derived polymorphism lacks residues 324 to 732
  VARIANT 341..732: note = Derived polymorphism lacks residues 341 to 732
  VARIANT 403..732: note = Derived polymorphism lacks residues 403 to 732
  VARIANT 462..732: note = Derived polymorphism lacks residues 462 to 732
  VARIANT 493..732: note = Derived polymorphism lacks residues 493 to 732
  VARIANT 505: note = Ancestral polymorphism is R, Derived polymorphism is L
  VARIANT 550..732: note = Derived polymorphism lacks residues 550 to 732
  VARIANT 567..732: note = Derived polymorphism lacks residues 567 to 732
  VARIANT 568..732: note = Derived polymorphism lacks residues 568 to 732
  VARIANT 586..732: note = Derived polymorphism lacks residues 586 to 732
  VARIANT 596..732: note = Derived polymorphism lacks residues 596 to 732
MTPCPMHRRLQESRKAVQETYVCAAQEFRELVEHQSPSRRLSDSPPATPPAPGARFSTSGHRHSATCNQEPTVQAAQATSSRADPSIVIFYSDTIRRSIIVIFYSDTIQMLPKKSLSGYQKRKKRKHEEQLVESQKGALHKFFNIDVNEVEGQESDPADEHTQQDHDHEHDHNLNAEGEISEDGSMEENLVTAINAVEDSMMRENLQPLSDHEKSNDDEQDSSGLSIFDPRTWDNLDNNKRDILIEKGPLFKSSKSKSLLASDGVRDWQRLSRRLKEHDSSVDHLTNMNTWNELRMRLSKHKTIDDDLQREISKERERWRQVFLRIVSAVKFLAKHNLAFRGTNDKLYQANNGNFLGIIEMMSEFDHVIQDHIRRIQNSEIHHHYLGHRIQNEIISLLADCVKQTILKVIKAAKYFSVILDCTPDVSHEEQMTMIIRCVNISGTVPRVEEFFLEFLKVDDTSGLGLFDELKSALVSLDLNIVDVRGQGYDNGSNMKGKHQGVQTRMLEINPRALYMPCACHSLNLTLCDMGKSCRQAITFFGIIQRIYTLFAKSTKRWKIFVDNVPGLTVKSWSNTRWESRIKSVQAIRYQTPQIRSALKALEEVSKKLQSKIVSIDATLKHIEGVISYFKKYRDEGFTSSMDTARMISSELDIEPIFPTKRKGKRKKHFDEQEDEDEEMQQSAIDLFRREYFLVMIDAAIASLTSRFEQMKAFDNVFGFLFNSGNLKSLDE

SEQ ID NO: 16719 - protein, 204 aa, Zea mays
  VARIANT 5: note = Ancestral polymorphism is V, Derived polymorphism is A
MNKIASAGALLAVVAVVAALAATTASAKDYTVGGSDRWDTYVDYGKWTAGKTFMVGDTITFEYMPYHNVLEVTAADYASCNAGSPISTHSGGSTAFKLTATGTRYFICGIPRHCLNGTMHVTITTVPYDSATAAASGPAQAPLQSSSSPPAADAYAPGPAAGHKVALGAAGKSPAGAPSSAPRYQQPAAAVAGLAVAALVALVA

SEQ ID NO: 16720 - protein, 252 aa, Zea mays
  VARIANT 48: note = Ancestral polymorphism is Q, Derived polymorphism is R
MASPEGTTWVFDCPLMDDLAVAADFAAAPAGGFFWAAPPSLQPQAPVQSVVAASAPNPCMEISSSVDCGQEKEQPTNKRPRSESTTESSTKASREKIRRDKLNERFLELGAILEPGKTPKMDKTAILSDAIRVVGELRSEAKKLKDSNENLQEKIKELKAEKNELRDEKQRLKAEKESLEQQIKFLNARPSLVPHHPVIPASAFPAPQGPAAAARHKLMMPVIGYPGFPMWQFMPPSDVDTSDDPRSCPPVA

SEQ ID NO: 16721 - protein, 231 aa, Zea mays
  VARIANT 2: note = Ancestral polymorphism is A, Derived polymorphism is E
  VARIANT 29: note = Ancestral polymorphism is K, Derived polymorphism is N
MARVEAVVICLLVLAMDVAAGVLGVYAEKAQNQASFRVVGKLFSFHCRVSGNQGAGASSVFRNQAGWPWPPLTRCGWRLQGRHLRILFVECRQPVRRAYELGMAAAAVLAAAHAIANAAGGCACACSGDKLRRASPNRQMASFALVLTCDKRFLSSGDCGWSRMVLVVALSLLVLGALPNAKRKLAECGVARHRFLSIGGVLCFVHAPFCAVYYASASAAAREARRDATHV

SEQ ID NO: 16722 - protein, 134 aa, Zea mays
  VARIANT 9: note = Ancestral polymorphism is G, Derived polymorphism is S
  VARIANT 17: note = Ancestral polymorphism is T, Derived polymorphism is M
  VARIANT 40: note = Ancestral polymorphism is K, Derived polymorphism is N
  VARIANT 57: note = Ancestral polymorphism is L, Derived polymorphism is I
MAGRGKAIGAGAAKKATSRSSKAGLQFPVGRIARFLKAGKYAERVGAGAPVYLAAVLEYLAAEVLELAGNAARDNKKTRIVPRHIQLAVRNDEELTKLLGGATIASGGVMPNIHQHLLPKKAASSKASVDDDDN

SEQ ID NO: 16723 - protein, 135 aa, Zea mays
  VARIANT 17: note = Ancestral polymorphism is M, Derived polymorphism is I
  VARIANT 101: note = Ancestral polymorphism is T, Derived polymorphism is M
MAGRGKAIGSGAAKKAMSRSSKAGLQFPVGRIARFLKAGKYAERVGAGAPVYLAAVLEYLAAEVLELAGNAARDNKKTRIVPRHIQLAVRNDEELSRLLGTVTIASGGVMPNIHNLLLPKKSGGGSAKAAAGDED

SEQ ID NO: 16724 - protein, 258 aa, Zea mays
  VARIANT 131: note = Ancestral polymorphism is S, Derived polymorphism is I
  VARIANT 178: note = Ancestral polymorphism is S, Derived polymorphism is A
  VARIANT 222: note = Ancestral polymorphism is F, Derived polymorphism is S
MAGAFAFRLVPRLAAEPAARGKGGGGGANRDAGSRALVSKKPNKQQHLWIRKETAGSGKKALRLIDAVRYTLAIDTVSKLPNEREAIYGALDKWSAFEPEFPIIAAAKALGMLKRRRQWLRIIQVTKWLMSKGQVLTWTTYDTLLLALLMDKRVDEAESVWNTVIQTHTRSVPKRLFSRMILIYDIHQRPDKVLEIFADMEELGVRPDEDTARRIGKAFVASGQEEKEKHVLEKYLKKWKYIHFNGERVRVRRDGPLA

SEQ ID NO: 16725 - protein, 237 aa, Zea mays
  VARIANT 13: note = Ancestral polymorphism is A, Derived polymorphism is T
MAAAVVDDAGMDAVQKRLMFEDECILVDEQDNVVGHESKYNCHLMEKIDSENLLHRAFSVFLFNSKYELLLQQRSATKVTFPLVWTNTCCSHPLYRESELIQENYLGVRNAAQRKLLDELGIPAEDAPVDQFTPLGRMLYKAPSDGKWGEHELDYLLFIVRDVKVQPNPDEVADVKYVNRDELKELIRKADAGEDGVKISPWFRLVVDNFLMGWWDHVEKGTLGEAVDMETIHKLKE

SEQ ID NO: 16726 - protein, 361 aa, Zea mays
  VARIANT 353: note = Ancestral polymorphism is S, Derived polymorphism is A
  VARIANT 275: note = Ancestral polymorphism is E, Derived polymorphism is K
  VARIANT 171..361: note = Derived polymorphism lacks residues 171 to 361
  VARIANT 146: note = Ancestral polymorphism is P, Derived polymorphism is S
MLRKILDFSPDRRHCRIQMLHFFSSTMVLQAMVQMDVLVPTGDMTAVRRTAQFFLNSFQERLTAQRKEREMTTAELGFKKQLTKEEKFERRKQRLAAIGEDLLAIAADQPFRFLATFTFVVRAFSVLDGIGKGLDPRFHITEIAKSYAKELLRFNDAGVEIVVKASFNIWSKLLTYLYDSTSPKDCFSRCVKRHVYSSYDEFLRLHEDEFHASRSQESRRPKIVYQFVLVFLFVGMPDSNELMFNTEQPTYNFGAYKNSKLRKERRAQFDSIHVKSEAAARSCFAFRWIYLANGMWIRSRGNEPCSQNQAKKTDINCDATLKSLFGGRDKVGMLEISKLLSRDFPKISKLLWSMEPGMALW

SEQ ID NO: 16727 - protein, 259 aa, Zea mays
  VARIANT 31: note = Ancestral polymorphism is A, Derived polymorphism is T
MTQLLSGPYDKEGAVINISAGAGGTDAQDWADMLLRMYVRWGEKQRYKTRVVEKSPGEEAGIKSATVELEGRYAYGYLSGEKGTHRIVRQSPFNAKGLRQTSFAGVEVMPLLPEESMAVDIPEEDLEISFTRAGGKGGQNVNKVETAVRMVHIPTGIAVRCSEERSQLANKIKALSRLKAKLLVIALEQRASEIKQIRGDIVKAEWGQQIRNYVFHPYKLVKDVRTGCETSDITGVMDGELDPFIRAYLKYKLTAAATS

SEQ ID NO: 16728 - protein, 206 aa, Zea mays
  VARIANT 119..206: note = Derived polymorphism lacks residues 119 to 206
  VARIANT 124: note = Ancestral polymorphism is V, Derived polymorphism is A
  VARIANT 179: note = Ancestral polymorphism is W, Derived polymorphism is R
MAKLPRLPCSFAVLALMCIIPLTAPRPALSSRAAPRDGVSFAGAGNTIHQLLKDHGLPGGLLPRGVESYTLDESTGLLEARLSAPCYATYDNGELAYFDNVVRGNLSKGALRGVEGLSQEELFVWLPVKGILVQDQEPGVILFDIGLAHKSLSRSLFEDPPDCKPSASGGMSAASAARREGTQGVTGLRLRREMAAAGSDQSQEQR

SEQ ID NO: 16729 - protein, 114 aa, Zea mays
  VARIANT 33: note = Ancestral polymorphism is A, Derived polymorphism is V
MPRLFLFCLVSSQLAATAVTARPFATVLLHGGAMSRVAADAPYSAAAVALHAHSLLEESRFAGSPLSSHRGGHRPFDRAFAGGKIIVAGLAAAIVVAVFCYIRITRKKSVEPKV

SEQ ID NO: 16730 - protein, 464 aa, Zea mays
  VARIANT 30: note = Ancestral polymorphism is T, Derived polymorphism is M
  VARIANT 33..464: note = Derived polymorphism lacks residues 33 to 464
  VARIANT 37..464: note = Derived polymorphism lacks residues 37 to 464
  VARIANT 42: note = Ancestral polymorphism is P, Derived polymorphism is L
  VARIANT 44: note = Ancestral polymorphism is S, Derived polymorphism is R
  VARIANT 46..464: note = Derived polymorphism lacks residues 46 to 464
  VARIANT 55: note = Ancestral polymorphism is I, Derived polymorphism is L
  VARIANT 63: note = Ancestral polymorphism is L, Derived polymorphism is I
  VARIANT 82..464: note = Derived polymorphism lacks residues 82 to 464
  VARIANT 165: note = Ancestral polymorphism is S, Derived polymorphism is I
  VARIANT 167: note = Ancestral polymorphism is L, Derived polymorphism is H
  VARIANT 214: note = Ancestral polymorphism is L, Derived polymorphism is I
  VARIANT 300: note = Ancestral polymorphism is A, Derived polymorphism is S
MDRAELTTEQVLKRDIPWEHYMSTKLISGTCLQLLRRYDHKPESQRAPLLEEIWIILLAYKRLSDMHICTELFFPAIFGLIQSINRDGPAYIRVFLNILRSISKEETVEYVLALIDEMLAIFRLLWKGNWFVQEKSCKILTVIISARPKLQNGTLPNGDASNSKSKLTSTHDVLRGLVDWLCSQLRNPTHPSCSIPTSIHCLSTLLREPYVRTLFVQADGIKLLIPLISPASTQQSIQLLYETCLCIWLLSFYDAAVDYLSTTRVMPRLVEVVKGSTKEKVVRVVVLSFRNLLAKGAFAAQMIDLGLPQMVQNLKAQAWTDEDLLDALNQLEVGLKENLKKLSSFDKYKQQVLLGHLDWSPMHKDPSFWRENINNFEENDFQILRVLMTIIDTSSDTTALAVACYDLSQFLQYHPSGRIVVADLKAKDRVMKLMNHENTEVRKNALICVQRLFLGAKYASFLQA

SEQ ID NO: 16731 - protein, 403 aa, Zea mays
  VARIANT 135: note = Ancestral polymorphism is V, Derived polymorphism is A
  VARIANT 54: note = Ancestral polymorphism is R, Derived polymorphism is C
  VARIANT 48: note = Ancestral polymorphism is A, Derived polymorphism is D
  VARIANT 37: note = Ancestral polymorphism is A, Derived polymorphism is S
  VARIANT 31: note = Ancestral polymorphism is E, Derived polymorphism is D
  VARIANT 28: note = Ancestral polymorphism is L, Derived polymorphism is I
  VARIANT 26: note = Ancestral polymorphism is S, Derived polymorphism is I
  VARIANT 23: note = Ancestral polymorphism is A, Derived polymorphism is D
MTSRNHRTLPGLEATEPERPAAALSIDLMEEIFLRVASPADLARASTACVSFRRIISDPSFLRRYRSIHPPLLLGLIGVAGFTPADPPHPSAALSRAVARAADISFDFLPRSRTANWRHSHPWYPCDVRDGRVLVKCIREEPVVYLDLAVCDPLSRRYLLLPPLAEDLVLASVGLQKPSVVHSGVSFIPSGGVEETSFRVISWKYSKTRLAVFVFTSSSGSWSVGTSTTRDDLGLDHEFVRLYSVQCVYGHCYWRLCGTSKLIKLDMNSMEFSTVDLPPDHEKRNVIIVESWGSNVAMFSMIDEGASVDYYTSSQNDSEKSHEWHMMISIPLPADYIIGPCFKGPAEGYIFLEGIRIDHEAGHSGLFSLEIKSFKIERVCMSPYRFFGRPYFGFPPSMSPTRI

SEQ ID NO: 16732 - protein, 848 aa, Zea mays
  VARIANT 276..848: note = Derived polymorphism lacks residues 276 to 848
MAAAGARLPLALLLPLFVTFFASPASATDTITANSSLSDGQTLVSAGGVFQLGFFTPASSTARFLGIWYMGLAPQTVVWVANREAPITGTTASLAINATGSLVLADPSGRVFWSSPQSNMSSTGSPVGAQLLDSGNFVLQGGGGAVLWQSFDYPSDTLLPGMKLGWDLTTGLDRHLTTWRSTGDPSPGDYTFGFDLRGVPEGFIRRDGTVPVYRNGPWNGLQFSGEPEMEPNNSNFQFEFVDNASDVYYTFLVDGGGGSGNGGVVSRFVLNQSSVQRYVWPPGGQGWSLYWSLPRDQCDNYAHCGAFGACDTSGGSAACACVHGFTPASPRDWELRDSSAGCRRLTRLNCTGDGFLPLRGVKLPDTTNATEDATITVDQCRQRCLANCSCLAYAASSIKGGDSGCIIWSSPLIDIRHFPSGGQDLFVRLAASDLPSDGDGSRKKNVVVAVVVSLSAVLLVGVGGFFLWKKLFRNKAGRFQSAQRFSSFDSSVPLTPVQLQDRSKEDEAGQSSDLNVTLFDMDAIALSTDNFAAWNKLGEGGFGAVYKGQLEGGQAVAVKRLSKYSTQGLGEFKNEVMLIAKLQHVNLVRLLGCCVHGEERMLVYEYMENKSLDNFIFDKNRSAQLHWSKRFDIILGIARGLLYLHQDSRYKVIHRDLKAGNILLDKDMNPKISDFGVARIFGDDTDSHTRKVVGTYGYMSPEYAMDGVFSVKSDVFSFGVLVLEIVSGRKNRGMYSSGEQTSLLSQAWRLWREGNALALLDEAVVRAGTHRSSEVLRCVQVALLCVQERPDDRPHMAAVFLALGNPSAVLPQPRHPGYCTDRGSASTDGEWSSTCTVNDVTVTIVEGR

SEQ ID NO: 16733 - protein, 863 aa, Zea mays
  VARIANT 94..863: note = Derived polymorphism lacks residues 94 to 863
MVGTSPGGGVFCFSSMVSSPRLLFLLLAGASLCCVAAQKTDTLRQGESLSGAATLVSSPEGVFEAGFFAPDPKQPSRQYLGIWYHSISPRTVVWVANRVAPATSASPSLTLTVTGELRVLDGTAANGTADAPLLWSSNTTSRAGPRGGYSAVLQDTGSLEVRSEDGVLWDSFWHPTDTILSGMRITLQAPGRGPKERMLFTSWASETDPSPGRYALGLDPGNSGQAYIWKDGNVTYWRSGQWNGVNFIGIPWRPLYRSGFTPAIDPVLGNYYTYTATNTSLQRFVVLPNGTDICYMVRKSSQDWELVWYQPSNECEYYATCGPNAKCTASQDGKAKCTCLKGFHPKLQEQWNAGNWSQGCIRSPPLGCETNQSGDGFLPMGNIKWPDFSYWVSTVGDEPGCRTVCLNNCSCGAYVYTATTGCLAWGNELIDMHELQTGAYTLNLKLPASELRGHHPIWKIATIISAIVLFVLAACLLLWWKHGRNIKDAVHGSWRSRHSSTQSQQNSAMLDISQSIRFDDDVEDGKSHELKVYSLDRIRTATSNFSDSNKLGEGGFGPVYMGTLPGGEEVAVKRLCRNSGQGLEEFKNEVILIAKLQHRNLVRLLGCCIQREEKILVYEYMPNKSLDAFLFNPEKQRLLDWKKRFDIIEGIARGLLYLHRDSRLRVVHRDLKASNILLDADMKPKISDFGMARMFGGDQNQFNTNRVVGTFGYMSPEYAMEGIFSVKSDVYGFGVLILEIITGKRAVSFHCHEDSLNIAGYAWRQWNEDNAAELIDPVIRASCSVRQVLRCIHIALLCVQDHADERPDIPTVILMLSNDSSSLPNPRPPTLMLRGREIESSKSSEKDRSHSIGTVTMTQLHGR

SEQ ID NO: 16734 - protein, 282 aa, Zea mays
  VARIANT 216: note = Ancestral polymorphism is C, Derived polymorphism is S
MQAPPAPSSVDLPLAVAPPPVKAPTPRPPPPASLQPESPGVFFSAAAAAAPLGTAHRRIAIAVDLSDESAYAVRWAVANYLRPGDAVILLHVRPTSVLYGADWGAVDVSLPNPSATAASEDGDGDCETAAAARRMEDDYDAFTATKADDFASPLKDAGIPYKIHIVRDHDMKERLCLEVERLSLSAVIMGSKGFGAARRTSKGRLGSVSDYCVHHCVCPVVVVRFPDDGSAEGGEAAGLSAAVGAEDVLHPVPEEEGEYHDAAEEHKGKLGFYSYICLLCMS

SEQ ID NO: 16735 - protein, 901 aa, Zea mays
  VARIANT 386: note = Ancestral polymorphism is P, Derived polymorphism is S
MAPKAPANNGAVVVAGGHHGGSTDVGGVAGGATTTTVPTSVAANGNGKQHGTRKQRRPAAVVVSPMDKYWTPVDDKEAAEAVDDGGEDGRRPLLFRTYKVKGILLHPYRLLTLLRLIAIILFFIWRIRHPHADGMWLWWISIVGDFWFGVTWLLNQVAKLNPTKRVPDLSLLRQQFDLPDGNSNLPRLDVFINTVDPINEPMIYTMNSILSILAVDYPIDRTATYLSDDGGSIIHYEGLLETANFATLWVPFCRKHSIEPRAPESYFAVKSRPYTGNVPDEFADDHRRMSKEYDEFKVRLDALFTKIPERSDAHNAEAKEGVKATWMADGTQWPGTWFDPAENHKKGQHAGIVKVMLNHPGDEPRFGGPASAETPLDFSAVDVRLPMLVYISREKSPSHDHQKKAGAMNVQLRISALLTNAPFIINFDGDHYVNNSQAFRAAMCFMLDRRDGENTAFVQFPQRFDDVDPTDRYCNHNRVFFDATLLGLNGIQGPSYVGTGCMFRRIAVYGIDPPRWRTDAFKLVDNPSKFGSSMLFINSIPSAANQEWSMASPPAHEESVMEELNNVMKCAYEEGTEFGKEIGWVYNIATEDVVTGFRVHRTGWRSMYCRMEPDAFRGTAPINLTERLCQILRWSGGSLEMFFSHCPLLAGRRLNLMQRIAYTNMTAYPISSVFLVFYLLFPVIWIFRGEFYIQKPFPTYVLYLVVIIAMTELIGMVEIKWAGLTLLDWIRNEQFYIIGATAVYPLATLHIVLKLVLRGNGVSFKLTAKQATSAVNEKYAEMYVVQWTPLLIPTIAVIAVNVGAIGAAIGKAVVGGWSLLQMADASLGLVFNAWILLLIYPFALGVMGRWSKRPYILFVLFMIGFAVVAAVVVAIHAARTGSVRFHSGHSGGASFPTSWGF

SEQ ID NO: 16736 - protein, 898 aa, Zea mays
  VARIANT 813..898: note = Derived polymorphism lacks residues 813 to 898
  VARIANT 530: note = Ancestral polymorphism is I, Derived polymorphism is R
  VARIANT 326: note = Ancestral polymorphism is D, Derived polymorphism is Y
MAAAVTRRVGLHVEATNGGADDESRRNSSAADHSPVAKRINDAAANAKRNDVWVAAQEGEMPAAAGNSSQPPLLFRTMKVKGSILHPYRFVILLRLVAIVAFFIWRIRNRNRDGVWLWAMSMVGDVWFGFSWVLNQLPKLNPIKRVPDLAAIRDQYEQPSASGGESNNKLPGIDVFVTTVDPVDEPILYTVNSVLSILATDYPVEKYACYLSDDGGTLVHYEAMLEVASFARLWAPFCRKHSVEPRAPESYFGVKRRQPYTGSVQGEFTSDHRRMRREYEEFKVRIDSLFSTVCQRSQAYNRKHAKDDEAGMVMKATWMADVGNLDAILGCYYKLYFIRAKVVLNHPGHKPELGSPASIDNPFDFSNTDTRLPMLVYMSREKRTGYNHQKKAGAMNAMLRVSALLSNAPFLINFDCDHYVNNSQAFRASMCFMLDPRDGRNTAFVQFPQRFDGVDPTDRYANHNRVFFDGTMLSLNGLQGPSYLGTGTMFRRAALYGMEPPRWRTTGSVKVIDDDDDHKGKEYGRSTLFRNAVLDDAANQERSITPVFLDDDETTTISSEVASLMTCAYEDGTTWGRDVGWVYNIATEDVVTGFRMHRQGWRSMYCSVEPAAFRGTAPINLTERLLQVLRWSGGSLEMFFSHSNAFLAGARMHPLQRVAYLNMSTYPVVTVFILAYNLFPLMWLVSERYYIQRPFGTYVLYLVATIAMIHVIGMFEVRWAGITLLDWCRNEQFYMIGATGVYPTAVLYMALKLVTGKSIHFRLTSKQTEACSGGDKFADLYVVRWVPLLVPTIAVLAVNVAAVGVAVGKAATWGLLTQQAQHALLGMVFNVWILVLLYPFALGVMGRWGKRPAILFGVLVMAIGAVAVVYISFRATYYPTGWSEMETTSALGKAESFF

SEQ ID NO: 16737 - protein, 129 aa, Zea mays
  VARIANT 93: note = Ancestral polymorphism is F, Derived polymorphism is S
  VARIANT 87: note = Ancestral polymorphism is G, Derived polymorphism is E
MSKGQVLTWTTYDTLLLALLMDKRVDEAESVWNTVIQTHTRSVPKRLFSRMILIYDIHQRPDKVLEIFADMEELGVRPDEDTTRRIGKAFVASGQEEKEKHVLEKYLKKWKYIHFNGERVRVRRDGPLV

SEQ ID NO: 16738 - protein, 147 aa, Zea mays
  VARIANT 20: note = Ancestral polymorphism is S, Derived polymorphism is I
MLKRRRQWLRIIQVTKWLMSKGQVLTWTTYDTLLLALLMDKRVDEAESVWNTVIQTHTRSVPKRLFSRMILIYDIHQRPDKVLEIFADMEELGVRPDKDTVRRIGKAFVASGQEEKEKHVLEKYLKKWKYIHFNGERVRVRRDGPLA

SEQ ID NO: 16739 - protein, 826 aa, Zea mays
  VARIANT 346..826: note = Derived polymorphism lacks residues 346 to 826
MAPVFFLLPLLLGQILLCAAGDTINSSTPLSGAQKIVSKGNKFTLGFYTPPQGTNTSSNQGNYYIAIWYSNIPLQTTVWMANPDLPVADPTTAALTIGSDGNLVLLDQSKNRQVLWSTNISTSSNSTIAVLQDGGSLDLRDATNSSMVYWRSIDHPTNTWLPGGKLGLNKTTGVSQRLVPWTNTANPSPGLFSLELDPRGTTQYLIQWNDSITYWSSGPWNNNIFSLVPEMTSGYNYDFQFINNATESYFIYSMKDNSIISRFIIDVDGQIKQLTWVPASQSWILFWSQPRTQCEVYALCGAYGSCNLNALPFCNCIRGFSQKVQSDWDLQDYSSGCKRRVPLQCQTNSSSSQAQPDKFYTMANVRLPDNAQTAVAASSQDCQVACLNNCSCNAYTYNSSGCFVWHGDLINLQDQYSGNGGGTLFLRLAASELPGSKRSKAVIIGAVVGGVAAVLIVLSIVAYFLFQKYRRERTLRIPKTAGGTLIAFRYSDLQHVTNNFSERLGGGAFGSVFKGKLPDSTAIAVKRLDGVHQGEKQFRAEVSTIGTVQHVNLVRLLGFCSEGSRRLLVYEFMPKGSLDLQLFLGETTALSWATRYQIALGTARGLNYLHEKCRDCIIHCDVKPENILLDESFVPKVADFGLAKLLGRDFSRVLTTMRGTRGYLAPEWISGVAITAKADVFSYGMMLFELISGRRNSDHGEQHGSTFFPTFAASKLHEGDVRTLLDPKLNGDANADELTRACKVACWCIQDDESARPTTGQIVQILEGFLDVNMPPVPRSLRVLGESPDVINFFSDISSNQTSQTQNSTTSQTRSTTSGSSHLQSP

SEQ ID NO: 16740 - protein, 409 aa, Zea mays
  VARIANT 174: note = Ancestral polymorphism is P, Derived polymorphism is L
  VARIANT 216: note = Ancestral polymorphism is A, Derived polymorphism is T
MDMASPALLTDDLLSDIFLRLAEPADLVRTAAACVPFRRLVADRAFLRRYRSLHPAPLLGFLDHNGFHPALPPHASAPAARAVSLAADFSFSFLPASSTGRGWVVRDVRDGRVLLDRSPEDRGDEPQVFTEIAVCDPLHRRCVLLPPVPVDLATAVEHPLRLEFDRWCEPFLVPHGADGEDETSFEVICMVQCKAKLVAFAFSSTTGEWRAVASMAWRDLMAGLGVSSRSPTFSGRQYARGCFYWVMDWRDKLLVLDAGRMEFSIADVPPSCHRRQIAVVEAGEGRVGMLALRDHVADGAVSLHYTVRRDDADGSNSNQWQVEKIIPLDPGFRYYIRGAMERYTLLLRFPEHLSLAGVHVSSSAVIEDLECFSMDTKTLQLERVCELNHHIMRAYVYTNFPPSLSPQSI

SEQ ID NO: 16741 - protein, 1821 aa, Zea mays
  VARIANT 74..1821: note = Derived polymorphism lacks residues 74 to 1821
  VARIANT 684..1821: note = Derived polymorphism lacks residues 684 to 1821
MSQRGDRGEGHARRPGRSSSFGGHRGGGVGGAGKGGAGSSGQPPLSSNRSFRKPGNGHGGHQRVVNQPDTTGFQPAPAPGTHQTPARPPPAPQNAAVHVPVSASRPQHQDPHVSSSLSASEKPANPPLPLPKATHAAPRALPKNSNTALPQGGSQGEPSKGFNFQFGSINMNGLPQFPARTSSAPPNLDEQKRNQALVEELKVTPAPVQPALKQQQLQQQPQLPPQLPPQQVPQQPQQQSARKEAVGSSQHNSINPHITSQLKRDVHPSPSVPNVTSLRPTVQIPGVQMPIPFHHQPAQVSLQFGGHGAQLQPQVVPSSYQMSMGLTGSSTQVPQQLYAPTLQHHQLQQQAMMHPGQGMGYVPSVAHQFPQLGNIPMNIASQYAQQQPNTHAAARKTTVKITHPDTHEELKLDKRMDSSGQRAAPSLTQQSQPVGNYAPHIGFFHQPQSSYNQSGMYYPTTAGVNQVATGSSGPRYNYPVTQSGQAMTYISPSAVPPVSAQSQYTVKPHPIGLVTEKSSTHVTISAPPAKSEPPKLRAAEDSASSRQKDNEIVSGIAVSSKSILEKEESNDPLVTVKHSTVISPSLPIHGAKSQTSVTSSPVVNSVSPVAGVDGKSIESIQRTGSFNDNKKIVTKKDVRISSEPPNSASSVEDKVQTVKAGGSDHQETNNLNNELDLASSSSCSTVPLAVSRIFPGTVSVNANSTAVTAADVPGTDRSSRRPSPEGTGEPAVESFTVLAVECDKRKRTDEVATDPSKDNISSDATKHELPDACAVDPTEQASAVTSNTDDSYASPIVNNQEQLLKESAPSASEEQAMMNNFSKNSETSHFLDSNAVEVRTGTSEPTVQSSNDEGDSDISPETDLAVCNVPLVSSEGQLKSESRADDQQAAEPTVSVRSVSREKPSVEIARSKSAAGKRKKKKEMLAKADAAGSSDLYNAYKGPEEKSEMVGTADGADSSSIVDTTHVLLDEAERDVSTFADDCKKKVELDDWEDAADMSTPKLAPDSGNQAGTTQVLDSDTSEANSRKKYSRDFLLTLQHHCTGLPVGFQMNEAVNAIMNNLVGKSYVVDREPYPSPGRGLDRPTSRGDRRGAAMTDDRWTKTGVPLSPGRDVHMDLPNGTSVVNYRSSGGNHGVLRNPRGQPSNQYGGGLLAGPVHSVGPQVPRSGSDSDRWQQKGLMPSPVTPMQTMHKAERKYVVGKVSDEEEAKQRQLKGILNKLTPQNFEKLFEQVKEVNIDSVATLTGVISQIFDKALMEPTFCEMYANFCFHLAGALPDFSEDNEKITFKRLLLNKCQEEFERGEREEAEADKTEEEGEIKQTKEEREEKRIRARRRMLGNIRLIGELFKKKMLTERIMHECIKKLFGNCDDPDEENIEALCKLMSTIGEMIDRAKAKEHMDAYFGMMHKMSTSQKLSSRVRFMLRDSIDLRRNKWQQRRKVEGPKKIEEVHRDAAQERHAQSSRLGRGPAVSSVSRRGAPSMDYGSRGSSALASSSSQQGSIRGMPPHSRGSQDIRYEERNQFDNRTVLPQRVVKDEAITLGPQGGLARGMSIRGLSPASNTELPSVIDHRRILSGSNGYNSVTDWTSSSGREDSSSIIPDRTSGRTSASSQSAGPSQRPASQEGRPGSKSYSEDELREKSVLAIREYYSAKDEKEVALCIEELNAPSFYPSVVSLWVNDSFERKDMERELLAKLLVSLCSGRHNLLSKQQLSDGLSSVLTLLEDTLSDAPRATEYLGRLFARFVEESILLLEEVGKLIQEVGEEPGYLIRDGIAADILGAVLDSIKSDKGDSFLNEVKSTSSLKLVDFRPHHLKRSKLDAFM

SEQ ID NO: 16742 - protein, 388 aa, Zea mays
  VARIANT 117: note = Ancestral polymorphism is P, Derived polymorphism is L
MASPELPGAKRNNVLVPPSPLLRLNDDLLADIFLRLPTLADVGRAATTCASFRRVVADSTFLRRLRSVHPAPLLGLLLFSSVHPAEPPHPSAPYARALQRAADLSFSFVPCAGRWIPIDARDGRVLLESETMGGDFAVCDPVSRRYLFLPRIPGHPAAQRCRRLEPFLVPASNEEPETSLRVVCVAERKPGQLVAFVFSSDTGRWGSLTVDVSVPPSCKFSWSSYGFGSCYWKVTGSNKLLGLDTRSMVFSSFDIPSGYGQQDSVVVEAAEGRFRMFTLHNSMISAASYLVHAVRVIREEGNNLWQVKRRVRLPSQYIFSFADATDKHLLLRGIPWNLHLEPSTPGADIGYFSVEFESMQVEKICGIRNLLYAKLYTGFPPSLSLPSI

SEQ ID NO: 16743 - protein, 587 aa, Zea mays
  VARIANT 147..587: note = Derived polymorphism lacks residues 147 to 587
MLSSSAEAAGPARHGEMKKKKRMRRGPVASPGPSAVTVAVASQTCGKWRPDESQRPEIDDAPVFAPTEEEFKDPIGYIASIRPQAERYGICRIIPPSSWRPPCPLKEKSFWETAEFNTRVQQVDKLQNREPTKKTTQSQVQRKRKRRKRLRFGMTRRRPGSSVGSEEKFGFQSGSDFTLAEFQEYANGFKQEYFGMKGSDEISISSIRNRIKIWEPSVEEIEGEYWRIVVGSTDEVEVDYGADLDTATFGSGFATLSSLDGNKQDPYGVSCWNLNILPRLPGSVTSFEDEDIPGVVVPWLYVGMCFSSFCWHVEDHFLYSLNYMHFGEPKVWYGVPSGEAVKLEESMRKNLPKLFEEQPDLLHELVTQLSPSVLKSEGLSVYRAVQKSGEFVLTLPRAYHCGFNCGFNCAEAVNVSPVDWLPHGQCAVELYREQRRKTSISHDKLLLKAAKEAARQLWMNHRGGKVEYRWMNTCGKDGVLTSAIKTRVKMEGAAWEVNAHLESKRMDEDYDSTDRECFSCFYDLHLSAVSCQCRPNRFACLNHTNLLCSCGMDRKTVFFRYSMEELDTLVAALEGDPAAFYWWGHNH

SEQ ID NO: 16744 - protein, 488 aa, Zea mays
  VARIANT 31: note = Ancestral polymorphism is G, Derived polymorphism is R
MQQHKISRLLLFTEEKGRRLAVLLCWLFGNGCVLAWNSMLTIEDYYAFLFNSYHPTRVLTLVYQPFAVGTALVLAHRGARINTRARNLAGYTLFFLSSLALILLDAATSGRGGMAAFAGVCVVSAAFGVADAHVQGGMVGDLSLMCPEFVQSFLAGFGASGALTSALRFTTKAAFESTRGGFRKGAMLFLAVSCIFELLCVLAYAFVFPRLPIVKHYRARAASEGSLTVAADLAAAGITGPAGPGSGQGHTARLSNKELLLQNKDLAADVFLIYVLTLSVFPGFLSEDTGSHGLGSWYVLYCIVYTIPCKATTRAPTVVFAVPRYVLVLIAAYNTGDLVGRCLPLARRLRLACRARITAAAAARFLLVPAFYLAGRWGGGQGYTILLTAVLGLSNGYLSTSPCASSRRRPEDTRQVLALARRGWGACMLRSALRLSRAVVPYAHRFFQLFRLQGPEQNALGNVLVACLLAGISTGVALDWLWLIGKGW

SEQ ID NO: 16745 - protein, 369 aa, Zea mays
  VARIANT 18: note = Ancestral polymorphism is G, Derived polymorphism is D
MSMEVAGAEAPVKGKFLGILVCWLLGNGSLFAWNSILTIEDYYSHLFPDYHPTRVLTLVYQPFAFGITLIMTYYEAKMNTRLRNLAGFSLFFLGSFALIISFMAGLAASGVLTSALRLVTKAAFESSKDGLRIGAILFFSITCLFELVCLLLYTFVFGKLPIVKYYRAKAAAEGSKTVASDLAAAGIISEQQGQMEEDPEKYKRLTTKELLMQNIDYALDIYLIYVLTLSIFPGFLSEDTGAHNLGTWYALVLIAMYNVWDLIGRYVPLIPCLKLTSRKGTLAAVLARFLFIPAFYFTAKYGDQGYMIFLTSFLGLTNGYLTVCVLMEAPKGYKGPEQNALGNVLVVCLLGGLFSGVVLDWLWLIGKGW

SEQ ID NO: 16746 - protein, 453 aa, Zea mays
  VARIANT 25: note = Ancestral polymorphism is L, Derived polymorphism is P
MAGSSSYSVLPLWYHPFNSCHFLLLFFLLLDLKDQTMDNDDAQIGVAKTQGKYWGIFICWLLGNGCLFGFNGMLTIEDYYVYLFPKYHPTRIITLTYQPFVLATTAIFTYHEAKVNTRVRNLAGYTLFFLSSFGVIILDVLSSGSGGIAPFVGICTIAAAFGIADGHVQGGMTGDLSLMCPEFVQSFFGGVAASGAITAALRFFTKAVFENSRDGLRKGAMLFSSISCFFELLCVLLYALVFPKLPIVKFYRSKAASEGSQTVTADLAAGGIKSLPNPLAEEDGVVERLNNKQLLHENMDYALDMFLVYVLTLSIFPGFLAEDTGSHSLGSWYVLVLIASFNVSDLIGRYLPLVEQMKLTSRTGLLTAAISRFLLVPAFYFTAKYGDQGWMIMLTSLLGLSNGHLTVSVLTEAPKGYKGPEQNALGNLLVLFLLAGIFVGAVSDWLWLIGKGW

SEQ ID NO: 16747 - protein, 483 aa, Zea mays
  VARIANT 68: note = Ancestral polymorphism is P, Derived polymorphism is L
  VARIANT 214: note = Ancestral polymorphism is T, Derived polymorphism is M
  VARIANT 268..483: note = Derived polymorphism lacks residues 268 to 483
MEKTVVLYPGLSVSHFVPMMQLADMFLEEGYAVAVALIDLTLDQDAALADAVDRVASAKPSVAFHRLLRIQNPPTVTDDGEPFLWYFQILKRYNDRLREFLCSLPPRSVHAVIVDALSVDALDVTKELGLPAYTFCAANASALAVFLQLPWIRAEGQPSFKELGDAPVNFSGVPPIPASHLVRQMLDPESEIYTAMMNAMRRGAEDPDGILVNTFASLEARAVGALRDPQLVPPSSGRARRTPPVYCVGPLVAGAGAEAKEKHECLAWLDGQPERSVVLLCFGSIGAATHSEEQLREVAVGLQRSGHRFLWVVRAPLRGDTERLFDPRADTDLDALLPDGFLEATRDRGLVVKHWAPQVEVLNHRATGAFVTHCGWNSVLEGITAGVPMLCWPMYAEQKMNKLFMVEEAMVGVEMVGWQQGLVSAEEVEAKVRLVLEESEEGNQLRTRVAAHRNAATMARRGGGSSRAAFGQFLSDAAKLARE

SEQ ID NO: 16748 - protein, 518 aa, Zea mays
  VARIANT 374..518: note = Derived polymorphism lacks residues 374 to 518
MQAIKKTIVLYPGLFVSHFVPMMQLADVLLEEGYAVAVALIDLTMDQDVTLAAAVDRVASAKPSVTIHRLPRIQNPPAITDCGGDGLLWYFKTVKRYNDPLREFLCSLQQQQPARSVVHAVILDGPSADALDVTKELGIPAYTFYATNASAVAVFLQLPWTHAEGQPSFKELGDTPLSISGVPPMPASYLMPPMLDDPASETYKTMMRVSRRNPEPEGILVNTFASLEGRVLRALRDPLFLPIGDDGCRRMPPVYCVGPLVVGAGDGDGVGVGEAKEKHECLAWLDEQPERSVVFLCFGSLGAAAHSEEQLKEIAVGLERSGHRFLWVVRAPLPTEGVDPGRLFDPRADFDLCALLPAGFLERTRARGLVVKLWAPQVNVLNHRATGAFVTHCGWNSVMEAVTAGVPMLCWPMYAEQKMNSVVMVEEAGIGVDLVGWQQGLVNAEEVERKVKMVMEFKEGEQLRARVTAHRDAAAVAWKDGGSSRAAFGLFLSDVDNHVHKAKTWSSANGRDGKLGQS

SEQ ID NO: 16749 - protein, 237 aa, Zea mays
  VARIANT 49..237: note = Derived polymorphism lacks residues 49 to 237
  VARIANT 70: note = Ancestral polymorphism is D, Derived polymorphism is Y
  VARIANT 114: note = Ancestral polymorphism is P, Derived polymorphism is L
  VARIANT 115: note = Ancestral polymorphism is A, Derived polymorphism is T
  VARIANT 125..237: note = Derived polymorphism lacks residues 125 to 237
  VARIANT 136: note = Ancestral polymorphism is S, Derived polymorphism is Y
  VARIANT 141: note = Ancestral polymorphism is G, Derived polymorphism is R
MLRRALRAQSPAREAPSSIRPPTSTRKSLHTCYLPSSDDDRKDYLEIPWAELRSMVEPSFAERSLIYHKDYLSDATIVTSSAVNITEHAVLTTDGHSLPYDYLIIATGHALASPASRAERINEFQRDNGKIESSESVLIIGGGPTGVELAGEIVVDYPGKRRRNSIADCHFVCIGKPLSSSWLHDTILKESLDSKGRVMVEKDLRVKGFNNIFAIGDITDIPVGFLIVPTTIHYLNL

SEQ ID NO: 16750 - protein, 284 aa, Zea mays
  VARIANT 2: note = Ancestral polymorphism is A, Derived polymorphism is V
  VARIANT 16: note = Ancestral polymorphism is S, Derived polymorphism is N
  VARIANT 77: note = Ancestral polymorphism is G, Derived polymorphism is V
  VARIANT 93: note = Ancestral polymorphism is C, Derived polymorphism is Y
  VARIANT 112: note = Ancestral polymorphism is R, Derived polymorphism is H
  VARIANT 116..284: note = Derived polymorphism lacks residues 116 to 284
  VARIANT 124: note = Ancestral polymorphism is A, Derived polymorphism is T
  VARIANT 134: note = Ancestral polymorphism is N, Derived polymorphism is I
  VARIANT 136..284: note = Derived polymorphism lacks residues 136 to 284
  VARIANT 139: note = Ancestral polymorphism is G, Derived polymorphism is D
  VARIANT 155: note = Ancestral polymorphism is R, Derived polymorphism is H
  VARIANT 167: note = Ancestral polymorphism is F, Derived polymorphism is I
  VARIANT 175..284: note = Derived polymorphism lacks residues 175 to 284
  VARIANT 195: note = Ancestral polymorphism is E, Derived polymorphism is K
  VARIANT 203: note = Ancestral polymorphism is P, Derived polymorphism is A
  VARIANT 228: note = Ancestral polymorphism is A, Derived polymorphism is V
  VARIANT 232: note = Ancestral polymorphism is D, Derived polymorphism is Y
  VARIANT 237: note = Ancestral polymorphism is G, Derived polymorphism is S
MAVTVVRDVETGLDTSTSDQDGDKPSWFTPKRIFEPGPPYFGAMGSNTGGASGGFYQPFNSNLAGAGASTGIQNFPGVRLRGLPFDCNDIDICKFFVGLDIVDCLLVNKNGRFTGEAFVVFPTAMQTEFALHRNRQNMGRRYVEVFRCKKLEYYRAIANEVSQGGYFESEYRRSSPPLSPPKKPAEDKGSMEYTEVLKLRGLPYSATTEDIIKFFLEYELTEENVHIAISSDGKATGEAFVEFPTTEVAKTVMCKDKMTIGTRYVELFPSTPEEVSRARTRGRH

SEQ ID NO: 16751 - protein, 311 aa, Zea mays
  VARIANT 104: note = Ancestral polymorphism is G, Derived polymorphism is D
  VARIANT 133..311: note = Derived polymorphism lacks residues 133 to 311
MYGADVAALGMLSTIATCLAIDAYGPISDNAGGIAEMAGMSHRIRERTDALDAAGNTTAAIGKGFAIGSAALVSLALFGAFVSRVAISTVDVLTPKVFIGLIVGAMLPYWFSAMTMKSVGSAALKMVEEVRRQFNTIPGLMEGTTKPDYATCVKISTDASIKEMISQIAISASNTGGAWDNAKKYIEVNLHADFTGPSFPCMNLHYTFSKKLFLKEKCLFIYNFLVFGFAQAGASEHARTFGPKGSDPHKAAVIGYTIGDPLKDTSGPSLNILIKLMAVESLVFTPFFAAHGGITCVLCNGICIERQYTEG

SEQ ID NO: 16752 - protein, 245 aa, Zea mays
  VARIANT 121: note = Ancestral polymorphism is T, Derived polymorphism is S
  VARIANT 23: note = Ancestral polymorphism is A, Derived polymorphism is D
MPYFAMLLLKELQRLFPSIPLVAEEDSASLRSSKADDNSSDILVESIFSAVVDKVSNNGSHLTQDDVLRAIDRGGKDAVSFDSNPATYWVLDPIDGTKGFLRGNDALYVVGLALVVNGKVTVGVMGCPNWTNDDIVNKKDDSVAACNGRGILMVSHIGCGTWSRRLSADIGQLNTAQDIWKRCFVDTCSIAHMAHYCIPDSQTWDMIPLSATYDSTTDATDPRNENEILLLSVFCGRFVALSNLH

SEQ ID NO: 16753 - protein, 302 aa, Zea mays
  VARIANT 163: note = Ancestral polymorphism is D, Derived polymorphism is V
MAAISSLPFAALRGAAEWRPSSTAAAVSGAVVLSARSRRGSRSVVRCVATTGDVPPTVAETKLNFLKSYKRPIPSIYSAVLQELLVQQHLMRYKKTYQYDAVFALGFVTVYDQLMEGYPSNEDRDSIFKAYITALNEDPDQYRADALKMEEWARSQNGSSLVDFSSRDGEIEAILKDISERAKGKGNFSYSRFFAVGLFRLLELSNATEPTILDKVVPSLINLFLPFLSCGKRRREKKDRKPRSRTKLSQNLMETFIPQGIRISPLQRRVSQDNRINSNIWTVLRNHQMFPFHHRRLWLLVL

SEQ ID NO: 16754 - protein, 76 aa, Zea mays
  VARIANT 7: note = Ancestral polymorphism is V, Derived polymorphism is L
  VARIANT 43: note = Ancestral polymorphism is A, Derived polymorphism is T
MAHMSRVWAAATVAAVRAQRERAPSAAAGARDRLAGLAPQAAALAGARAACADGRRQAGADESLRKAMYLSCWGPS

SEQ ID NO: 16755 - protein, 605 aa, Zea mays
  VARIANT 496: note = Ancestral polymorphism is A, Derived polymorphism is D
  VARIANT 493: note = Ancestral polymorphism is S, Derived polymorphism is L
  VARIANT 491: note = Ancestral polymorphism is A, Derived polymorphism is T
  VARIANT 419: note = Ancestral polymorphism is T, Derived polymorphism is I
  VARIANT 406: note = Ancestral polymorphism is R, Derived polymorphism is H
  VARIANT 365: note = Ancestral polymorphism is L, Derived polymorphism is V
  VARIANT 350..605: note = Derived polymorphism lacks residues 350 to 605
  VARIANT 299: note = Ancestral polymorphism is A, Derived polymorphism is T
  VARIANT 292: note = Ancestral polymorphism is A, Derived polymorphism is D
  VARIANT 281: note = Ancestral polymorphism is L, Derived polymorphism is P
  VARIANT 278: note = Ancestral polymorphism is L, Derived polymorphism is F
  VARIANT 276: note = Ancestral polymorphism is R, Derived polymorphism is W
  VARIANT 271..605: note = Derived polymorphism lacks residues 271 to 605
  VARIANT 188: note = Ancestral polymorphism is A, Derived polymorphism is T
  VARIANT 187: note = Ancestral polymorphism is A, Derived polymorphism is T
  VARIANT 180: note = Ancestral polymorphism is E, Derived polymorphism is D
  VARIANT 67: note = Ancestral polymorphism is I, Derived polymorphism is T
MMGEAGEEESAAAPAEVSRQAELDEQRCLAEALDALSSLVSASLSATLFPLKWQLTRDRLHACLADTTVPAGDESGEDRRDAFVNLLRDVAATAREARELVPRSQGRQYGGGKLRLRSDLDVLAAALDAHVARLDEVHASGALTRARALVVPRPGAGATRDDVRFYVRDLFARLRAGGAEMRREAATALSEVLRDDEKCVRVVASDVADGVGVLVALLECPDARVREDVLEAVSVIAGSDAHRGDLVVGGVIAPVVRVLDAAASASSEAAKERAARVLCKLTENSDNAWAVAAHGGVTALLDLCTDHGASGGELVCAACRVLRSLAGVDEIRKYMVADAGAVPVLVSLSQRATDDAARIQAMELVVAIGSGDSSAREAVVQEGAIEVLVRALDASSSSKVREVALRAIDGLCLSPPTSTDRLLAAGFLDSVLSLLRTGDTTLQHCALKAAHRLCPVSEEIRKAMGDAGFMLELVSVLGASSKSPEAREMAAESLCALVSVHRNRKRFVQEDRDDVARVLQLLGSGDEEKLTPAKRFLLSTVTRLADSSSGRRKILTSEHVRHKQHTPTYQNLEKLAETDVPDAKRIVKRLGGSRLRSIFHGIWSL

SEQ ID NO: 16756 - protein, 215 aa, Zea mays
  VARIANT 28..215: note = Derived polymorphism lacks residues 28 to 215
MATPAPTLPEPAAQELTAAVAGAGQRQQPHHQHPLLAAAAAASLLAVLYLPRPVLLLVLSPASLSSLLLLLSLLHLGSTPPPPPPALAAPPPSSPPPTEEKKQQEQEQAPEAACPPPPPPPPPPEPERGAVFPELLEFASWAAKGRALEVIHEEFEAEWGLPEEMGLPWDSDSDSDPDSGSDDGYVRGGGDADDGMIEIELEEDSLIEIDISRCR

SEQ ID NO: 16757 - protein, 110 aa, Zea mays
  VARIANT 109..110: note = Derived polymorphism lacks residues 109 to 110
  VARIANT 66: note = Ancestral polymorphism is T, Derived polymorphism is A
  VARIANT 59: note = Ancestral polymorphism is S, Derived polymorphism is P
  VARIANT 57: note = Ancestral polymorphism is A, Derived polymorphism is T
  VARIANT 2: note = Ancestral polymorphism is D, Derived polymorphism is G
MDDAVNLLESLPLDVLIKILCKVNYSDLRHLLLVSKQVKEATIYARELHFKFSTPSAKPVFRDEEAGGGDDTCPCAPKQHRAAKSRLRGQNLERIAVNLSASYESMLPEV

SEQ ID NO: 16758 - protein, 352 aa, Zea mays
  VARIANT 37..352: note = Derived polymorphism lacks residues 37 to 352
  VARIANT 32..352: note = Derived polymorphism lacks residues 32 to 352
MRAEKRSRKAWLAAMPVLFGATKGAEVCSFKCQIAHWRQGHKDECHPPSVNTRHDDEEEKAEVGRAAKENVSVGVKQVAEMNKPDVGSETSDANHDLKSSNGKSKHMPSKAVCSSVEIPGGHKSNNTVEISQNVQSVDSSKMGSSIKHANFVEDGSSTEDLNEALPCNSHSSSLNINGHSSFVNKEFCNHSKEYQRAKDATVVEDCSQTNSTRANGATLSPTGILSHLNDIGSSFGPEMLQEAGAAHTYIESFAYRLYILIIRCVAPPLVPELDRDAVAPAGSGDRKAAKLGSWSSMSSNRGSKKRKSSSSSFGRRSTSTCEERQGVFRMLMSWNQESRFSNKIKTTTSKER

SEQ ID NO: 16759 - protein, 157 aa, Zea mays
  VARIANT 116: note = Ancestral polymorphism is R, Derived polymorphism is Q
  VARIANT 60: note = Ancestral polymorphism is E, Derived polymorphism is D
  VARIANT 41..157: note = Derived polymorphism lacks residues 41 to 157
MAAPRARSLDPGVGGRGPIVDSFLLEEDEAGGAARVMARLQCELTELEEKKAAQEQRAAESLARVKAIRDGSRMGKLIVCSKVDDLCTNELHELLHGLSRVDQEIRALLPPPAPARTAEAGGLMRGPQPPLHSQGRPRPPRQLPWVSSQSQPPSCPF

SEQ ID NO: 16760 - protein, 269 aa, Zea mays
  VARIANT 116: note = Ancestral polymorphism is T, Derived polymorphism is I
MASTIMAATSRIVAAKTPFLGQGRAAANASPLRDVAAAAAGGRITMGNDLWYGPDRVKYLGPFSAQTPSYLTGEFPGDYGWDTAGLSADPEAFARNRALEVIHGRWAMLGALGCITPEVLEKWVRVDFKEPVWFKAGAQIFSEGGLDYLGNPNLVHAQSILAVLGFQVILMGLVEGFRINGLDGVGEGNNLYPGGQYFDPLGLADDPVTFAELKVKEIKNGRLAMFSMFGFFVQAIVTGKGPLENLLDHLDDPVANNAWVYATKFAPGS

SEQ ID NO: 16761 - protein, 1188 aa, Zea mays
  VARIANT 25: note = Ancestral polymorphism is T, Derived polymorphism is I
MLSAASVMAPAAATQKSSLEVLLETLKKRDEQPKDAPPTLPARPTCRGRLPTTRRSSLPAGFMLENGMATVAATEAAVVDKKADAKMEIVGLEAKEEKLVKGCIFGTKRKFPNTEVLEESPYVGKFLEERKGTSVCKNPPHISSATIRMNGNVACTDILDYILQKKLRVWCSSPNAKWELGQIQSMSGDDAEILLANGKVLMVSPEQLLPANPDILDGVDDLIQMSYLNEPSVLYNLQLRYSRPVLIAVNPLKEVALYGKSSIMQYKQKANDDPHVYAVADLAFNEMLQDGINQSIIISGESGSGKTETAKIAMQYLSDLGGASGTESEVLQTNVILEALGNAKTSRNHNSSRFGKLIEIHFSESGKMCGAKIQTFLLEKSRVVQRAQGERSYHIFYQLCSGAPPLLKKKLFLKSANDYNYLKQSNCLKIDGVDDSKKFTVLVDALDTIQISKEDQMKLFSMLAAVLWLGNISFCVIDNENHVEVVSNEGLSTAAKLLGCTANQLVIALSTCKIRAGNDSIVKKLTLTQAIDARDALAKSIYANLFDWIVDQINHSLGTGRQFTWRSISILDIYGFECFNKNGFEQFCINYANERLQQHFNRHLLKLQQEEYLEDGIDWTPMEFVDNTNCLSLFEKLCQVTRMLYFLSYYSGNKHLPIQNVKQKLEQVTYDTAGFLEKNRDPLHSESIQLLSSCTCELSKHFASVMVADSQNKSSLSWHSVKDTHKQSVVMEFKAQLFKLMQQLESTTPHFIQCIQPNSKHHPRLFEHDLVLHQLKCCGVFEVVRISRTCYPTRITHQQFAERYRFLLLRSIASQDPLSVSIAVLQKFNIPPEMYQVGYTKLFFRTGQVAALENAKRQMLLGTLHIQTQFRVIRGERTRIHFDNLVKRWRAAVLIQKHTRRRLAANMFNDQLNHVILLQSVTRGFLARRKYKCLQNEKESKASHSIVQGNTRKNNSESRICHEMNGHYPHEPVITELQGRITKAEAALRGKEEENVMLKQQLEQYERKWSEYEAKMKCMEEAWKRQLSSLQLSLVVAKKSLAADDAATRAARTDCTPTHAQYDSEDTLSTGTRTPEVIESKHDNHNPEAKVSAGNSDRRVNAVNHLAKEFEDRRQVFEDDAGFLVAVRSGQIGSNMNPDEELRKLKDRFATWKKDYKSRLKETKVNLSKVGTHDEKSRKRWWGKKSSK

SEQ ID NO: 16762 - protein, 508 aa, Zea mays
  VARIANT 185..508: note = Derived polymorphism lacks residues 185 to 508
MLPSKLHAHPPRPSMADPNLQAEVLTASVRVNGTEAEATLRGGELTWRPADTGGGGEGQERGLELESEVLGCRVDGRKLKLATFTASGGGDGKGGGGDGNRRREEVVVEMETEDAALRWGDIIRDCLASLGNQYSSCNIATGRPKKLFIIVNPYGGKRSGRSIFQNEVLPLIEASGVLYTMQETKHRLHAQEIARSLDLRKYDGIICVSGDGVMVEVVNGLLQREDWETAIKVPLGIVPAGHKRALDVTSVVQGNTRFFSVLMLTWGLVADVDIESEKYRWMGSARLEFYKLTLCSAMCNTTSFQLLLRMLNLRRYNGRILFVPAPGYEEVGDPVEQTTGHETNGVSGATDKNGETCGYVGPSIKEADLRWRSLNGPFVSVWLGNVPFASEDAMAAPKAEFADGYLDAAIIKDCPRWDVLGLVLQMKDGAYVNSPCVEYFKVKAIRIEPGLRVGSSTKGGIIDSDGEVLARGDGSHSRAGDEPGHLMAYGPPIQLTVDQGLATIFSPR

SEQ ID NO: 16763 - protein, 477 aa, Zea mays
  VARIANT 268..477: note = Derived polymorphism lacks residues 268 to 477
  VARIANT 45..477: note = Derived polymorphism lacks residues 45 to 477
MARQRMVCGVRRVQTPPRPVVGAGPDGKHTALEAVTIVLDLPPPQPGSMSGLTSVDMVPASDPKSAMALQRLVQATVWFLGENANYAASEYAWESATPPGTALMMLDADKMVAAASSRNPTLASALTRLQRCAFSGSWETAIYEFLHALALGGVQSNFSELQLSNGENQGASGTGLGSLTSPMLRVLDEMYRGQDDPVRDIRQRDNNKQEWSDEELKKLYETHERLLDFVSLLCFVPRAKYLPLGPTRYNMVKQGLISDPVFSFWFNRHADEGEGGEIVFGGMDSSHYKGDHTFVPVTRKGYWQFNMGDVLVDGKSTGFCAGGCAAVADSGTSLLAGPTAIITEINEKIGAAGVVSQECKTVVSQYGQQILDLLLAETQPAKICSQVGLCTFDGTHGVSAGIRSVVDDEAGKSNGGLKSDPMCNACEMAVVWMQNQLAQNKTQELILNYINQASLTDPEHRGVSVPFSMLLCLTISL

SEQ ID NO: 16764 - protein, 967 aa, Zea mays
  VARIANT 80..967: note = Derived polymorphism lacks residues 80 to 967
  VARIANT 767..967: note = Derived polymorphism lacks residues 767 to 967
MSSPGPQQAPPAQPPPPQAAAPPTAAPATVSATSISVQLPPIQPKPPPQPGPTSGPQPPTPAQLLNLGPQPPLYRGPICWNSYCKDPDPNSFGRRGWKVRSGPPYSVYADLCGRCYSQFEQGIYCETFHSEEGGWRNCESCGRRVHCGCIVSIHKYQLRDAGGVDCAKCARSTRAAMAPPSPVWTNPIHSSQNVSDRKDITVKSWRPPAGQISSQWRQTNLWSVSSIQSDLQQRLAFEFDRPSGSEKLLPGRTFIHSQERKFDDMHDRPATPAGMNHIMRERDPNGHGQTTNMDPAYSYTLYHRDGSHPNNLHDSNHHCGENDSLSSRKVAMPEASTSVDAGFKLDSHHTSNLKDDPPSLSVGLASNFAPQNGPKDHIRIAPTQQQSQMTSSSLQKQFYSHAVTGYNEFQAQMRNGRPRMDSKARSQLLPRYWPRITDQELQHLSSEYPTHSTYVNNSNSVITPLFEKMLSASDAGRIGRLVLPKKCAETYFPPISQPEGLPLKVQDASGKEWIFQFRFWPNNNSRMYVLEGVTPCIQSMQLQAGDTVTFSRIDPEGKLIMGFRKATNNSFEQEQATKPANGALATSEANGKVSAPDSSPNAAVSRQNKLNTETKSSSPVEQATALKMDKDGLTQKEGPGTGSSSPGSVKRKTTILGQKNKRLRMDNEESMELKITWEEAQELLRPPPKAPSIVIVDGHEFEEYEEPPVLGRKTYFVADKSGSNHQWAQCEDCSKWRKLPIDALLPSKWTCSDNKWDPERCSCESAQEISIEELAEFIPIKPAKKPKLKIESDAIDASDGLDTLANLAILGEGEALPSQPTTKHPRHRPGCSCIVCIQPPSGKGPKHKQTCTCNVCMTVRRRFRTLMLRREKKATKDLSRKKETGQSSEKATQQAVSGPPGANATATRSAQKADGNTDGPEDMAVDHKVTTSSPVKNHIDLNIQPERDDEQSPKSGAAGLLSRDNAT

SEQ ID NO: 16765 - protein, 254 aa, Zea mays
  VARIANT 214: note = Ancestral polymorphism is R, Derived polymorphism is W
  VARIANT 213: note = Ancestral polymorphism is R, Derived polymorphism is C
  VARIANT 178: note = Ancestral polymorphism is K, Derived polymorphism is R
  VARIANT 160: note = Ancestral polymorphism is A, Derived polymorphism is E
MDDSSVKAEEQTMLLEEGGQAMAAKPAYTSLTSQILRLIFMDQLLLLENRLTLRAISKFGGYLLYFYICDRANLLGESAKNYNRDLFLFLYFLLFIVATMTSFKVHQDKSSFTGKSVLYFNRHQTEEWKGWMQVLTRTCMTADQGSSGEFVHATFRCFQAFLILKIGHQVHIDVLTPKVFIGLIVDAMLPYWFSAMTMKSVGSAALKMVEEVRRQFNTIPGLMEGTTKPDYATCVKISTDASIKEMIPQALLLC

SEQ ID NO: 16766 - protein, 285 aa, Zea mays
  VARIANT 57..285: note = Derived polymorphism lacks residues 57 to 285
  VARIANT 94..285: note = Derived polymorphism lacks residues 94 to 285
  VARIANT 101..285: note = Derived polymorphism lacks residues 101 to 285
  VARIANT 105..285: note = Derived polymorphism lacks residues 105 to 285
  VARIANT 164: note = Ancestral polymorphism is D, Derived polymorphism is Y
  VARIANT 172: note = Ancestral polymorphism is T, Derived polymorphism is M
  VARIANT 173..285: note = Derived polymorphism lacks residues 173 to 285
  VARIANT 231..285: note = Derived polymorphism lacks residues 231 to 285
MSASPASAPAENAGAGPRASDDVASSQPPKRAKSKLAFGDQSVLIIFVLGGVNTLERGALLEVFESKVVHVNGKSLDKAAKITLNGGDEIIFRSPAANQPWSASWRSCSSWASSTSTSSPRRSSEARTARSSRASLPLSALFLLHVAISHALFTHIDSDDTALDASSPGTDTQRRLLSRLASDWLALLLFKSAYLLALLLLSLLSVVASVYSAKRDALTFPRVLSVVPRVWRRLAATFLAAFALLFTYHAFVVLVFVGLLVAVDNGSGLAGLLAFLVAVKRGTVC

SEQ ID NO: 16767 - protein, 128 aa, Zea mays
  VARIANT 77..128: note = Derived polymorphism lacks residues 77 to 128
  VARIANT 62: note = Ancestral polymorphism is R, Derived polymorphism is P
  VARIANT 21: note = Ancestral polymorphism is R, Derived polymorphism is C
  VARIANT 20: note = Ancestral polymorphism is R, Derived polymorphism is Q
  VARIANT 15: note = Ancestral polymorphism is K, Derived polymorphism is T
  VARIANT 13..128: note = Derived polymorphism lacks residues 13 to 128
MMLVFYNFNFFVQQTNTRSRCQKKLKAYDLSALSESLPEPGAPKQKPEAKLNCKSRQTLVLREAAHLKAVLGKMQFQLDPFAAIHQHLLATQPPAAAKGDAVKEGKDSKNKKRRRKKGASSSSQAMDI

SEQ ID NO: 16768 - protein, 260 aa, Zea mays
  VARIANT 237..260: note = Derived polymorphism lacks residues 237 to 260
  VARIANT 233: note = Ancestral polymorphism is A, Derived polymorphism is T
  VARIANT 205: note = Ancestral polymorphism is A, Derived polymorphism is V
  VARIANT 192: note = Ancestral polymorphism is G, Derived polymorphism is E
  VARIANT 40: note = Ancestral polymorphism is H, Derived polymorphism is Y
MNSKDILTHKFYEHISIHFGAEYVVESSDVFTMTDKALTHLKSGATKVVTYADAPMFVVGVNENIYDPKMNVVSNANCTTNCLAPLAKAYKEKQSKKLQGREAYKEKQSKKLQGREQDVSWIVFYQAYKEKQSKELQGREVRLDFAKGRTTQTPRSGSRDSNIISFFVATEFLLFPFLQPFWKVLQEGSSRGRSVVGEFHMFSIATIVIHVISSCDDKCQNLGVLEVNFIEPAHYKQDFERNPLFIWIETRLRQIIIDFW

SEQ ID NO: 16769 - protein, 176 aa, Zea mays
  VARIANT 156..176: note = Derived polymorphism lacks residues 156 to 176
  VARIANT 127..176: note = Derived polymorphism lacks residues 127 to 176
  VARIANT 99: note = Ancestral polymorphism is P, Derived polymorphism is S
MSSSLYLVFEYMEHDLAGLAATPGLKFSEPQVKCYMQQLLCGLDHCHNRGVLHRDIKGANLLLDNNGILKIADFGLATFFNPKQKQHLTSRVVTLWYRPPELLLGATNYGAAVDLWSVGCILAELLSGKPIMPGRTEVEQLHKIFKLCGSPSEEFWANLKLSRATIFKPHIRTADV

SEQ ID NO: 16770 - protein, 103 aa, Zea mays
  VARIANT 67..103: note = Derived polymorphism lacks residues 67 to 103
  VARIANT 65: note = Ancestral polymorphism is H, Derived polymorphism is Q
  VARIANT 61: note = Ancestral polymorphism is G, Derived polymorphism is E
  VARIANT 46..103: note = Derived polymorphism lacks residues 46 to 103
  VARIANT 8: note = Ancestral polymorphism is G, Derived polymorphism is E
MPEDTYKGHGFRTELISMILDLKPRFLRFPGGCFVEGDWLRNAFRWRESIGPWEERPGHFGGVWHYWTDDGLGYYEFLQKVPSCNSGVSHNDEVDTVAIAPFV

SEQ ID NO: 16771 - protein, 74 aa, Zea mays
  VARIANT 55: note = Ancestral polymorphism is A, Derived polymorphism is V
MVFFCFLVEQRRTVRSSKPAAGICSRCGGCASVADMETATRVCYLLTVHRRTWRAIICTFCGAMLKSYRHYRLY

SEQ ID NO: 16772 - protein, 167 aa, Zea mays
  VARIANT 112: note = Ancestral polymorphism is A, Derived polymorphism is T
  VARIANT 85: note = Ancestral polymorphism is R, Derived polymorphism is C
  VARIANT 82: note = Ancestral polymorphism is R, Derived polymorphism is C
  VARIANT 37: note = Ancestral polymorphism is G, Derived polymorphism is D
  VARIANT 32: note = Ancestral polymorphism is R, Derived polymorphism is W
MAVVARAGLAMPPAVVPAAAAAAAAEEEMRWRQLDSGVSAVSFGFVATAILVSMFLAMAILEHFLRPPAHTLGHAPPRGIRRRLRFFLGRGGERGDAPGSDLEAARKLQGHAPLEIPVYPKGVSVLMPGQDMPTFIAHPAPAPCPPERIRWPSHQPPPFAGSSSNPS

SEQ ID NO: 16773 - protein, 111 aa, Zea mays
  VARIANT 24: note = Ancestral polymorphism is A, Derived polymorphism is V
  VARIANT 20: note = Ancestral polymorphism is V, Derived polymorphism is L
MARWSSSALVAVLVVLAAAVACSAARPVPAQQQQQAGEDVKRPDTLHEGTVLIPGMGRYEIGSHYIPDIGGLDHSIPAATHGQFLPGADDTWVPNPGFEVPNPFMPGAATP

SEQ ID NO: 16774 - protein, 169 aa, Zea mays
  VARIANT 59..169: note = Derived polymorphism lacks residues 59 to 169
MHLSNLRINNDASIRHGHGVGLPAVSIFFRRGPRLLGWGTPFPDHGQVDSPNSCQEHEEEEKTSDRAPRRLLSGPVEYALRAILLGGYVGFPDDDPESGFAPDDPDLLRNRPVPDRLLVVSAGVAANLAFAFAFLVVYEQTLTVVPRRWLGHGCGGHGGRRASDEDVTA

SEQ ID NO: 16775 - protein, 166 aa, Zea mays
  VARIANT 27: note = Ancestral polymorphism is V, Derived polymorphism is M
MASSMMSSRAGAAAAGGGEHRRQHVTVACGGLTRPSTRPVPGAAGPRPGTPRPRGPAAAAGGSSSSSPTGRAGPECNWWGAAARQQATPRRTRSARAAGARVPTGKGNRELVRRALTPPAARGRGRGRAGGAVLLRRWSFRPAPSRLRNASSLSSQSPDSPRPRPS

SEQ ID NO: 16776 - protein, 419 aa, Zea mays
  VARIANT 199: note = Ancestral polymorphism is Y, Derived polymorphism is F
MRSMESTDSSSGELPPPQKQPSSAPDLPPGFRFHPTDEELVVHYLKKKAASVPLPVAIIAEVDLYKFDPWELPDKATFGEQEWYFFSPRDRKYPNGARPNRAATSGYWKATGTDKPIMASGGNREKVGVKKALVFYRGKPPKGLKTNWIMHEYRLADAASSTTSRPPPPCNAGGKATSLRLIKLYLVSQLDDWVLCRIYKKIDKLGVGDPPRIMECGEDSVENAVAAYPTHAAAAAMAVAVAGGGGAYHTGNYTSLIHHHHEDSFLVDGLLTAEDAGGSSLSQLAAAARAAAPTDTTKQLLVPSSTTPFNWLDASALTILPPAKRFHGYNRDTTDGGGTSLPSPSERNNLQAAVGAVDSGASGGTSAVIPSFLNPLGVQGATSYHHHAIFGTPVTPEAAAAAACSFQHPYQLSGVNWNP

SEQ ID NO: 16777 - protein, 933 aa, Zea mays
  VARIANT 254..933: note = Derived polymorphism lacks residues 254 to 933
MSASTSLAKSSSEQSAFVELMAEDSGGWACSPRTRRSNHGRLRQACKLIHSKHFGSPEEDDKVFTKIESNRNVRLRRGPKARIMASAHPFWTHKSVSSGGNEIISGVNAGGLSSPEESRAILPRTTCTSSSSCGWDSKVGRGPQVNSSDSVLADLIKRAKAFGKPRSCLFRLHQGKVPRPVAVDLKGAILSSHSPSYAEMAARPPAPASRSSEAAHRPFAPNSRLPGMAVSRQSDGWHGRTSPRQGRGFGVQPQRHGPGHGGPLGRGSLGRGAAGRGGRFPPQPRFQQYGEVPAASQETMPQAATADGMSWMPRDAERRQSTAAPPGNSVKAKKLKSPLCFRCKLSGHLNDECKADLDCVVCNKKNSHVVAKCPLLKLPKPDASFFGFGNNELGFFRIPDFDYRLETPDPAPTALIKVSGGKLSAEAVQAELARFITKEWVWEALPHSDDSFLVVFPSVDELIRMADVEFTLKNHGVTLTISEWKDASDVEPSYQLDEVWVHVRGVPHAWRHYLGFWALGSVIGATLDVDMYTYRKMGVIRLLVGVMSRDPLPLTTDIVFDKKGYEITYSIEDKNFIPASPVIFREESRNDGGGGMDKVSEQEDKSPEHAFKKHKLDGKGGGAGSMAGGFGDGEDSPMLGAAAISPLEKANEPVPAVMKGFPLLNLSALHSVRPSLNGRTGADLKLHKNGMSSAAGFLSGGKRSSVVGSYDTNGCNLMLQSILDEQIVSNMKGADPTGVINSVHTTRIVPDASSWSKNIPDEQLVSNKKGVGPSVVLTSAHTAMNMPAACCWSMGQRSFAFEREGQPMDDVRKIERSLHIGAGQVKLPIPPEKKLMPPGKDEDSTLKAMKRASRRNLDGDLSGFKPAGQALRTVSTSSLPIGPFQSGYPFGVTEAIKLGHPSARGAATVGCGGFATLGANGHGLFFPGAWVAI

SEQ ID NO: 16778 - protein, 185 aa, Zea mays
  VARIANT 120: note = Ancestral polymorphism is G, Derived polymorphism is A
  VARIANT 68: note = Ancestral polymorphism is P, Derived polymorphism is S
  VARIANT 62: note = Ancestral polymorphism is L, Derived polymorphism is F
  VARIANT 41: note = Ancestral polymorphism is R, Derived polymorphism is Q
  VARIANT 11: note = Ancestral polymorphism is P, Derived polymorphism is L
MSGLPPAARPLLPSPCASSSVVRAKAASACCSSLKQSRPGRSAAARSTVAARQAAPLLAAALVLVAAPPGLPAAISPAFAQPVSEGAALFRKACIGCHDMGGNILQPGATLFLKDLERNGVATEEELYNITYYGKGRMPGFGEKCTPRGQCTFGPRLSEDDIKILASFVKSQAQNGWPKIEGDGD

SEQ ID NO: 16779 - protein, 185 aa, Zea mays; identical to SEQ ID NO: 16778
  VARIANT 120: note = Ancestral polymorphism is G, Derived polymorphism is A
  VARIANT 68: note = Ancestral polymorphism is P, Derived polymorphism is S
  VARIANT 62: note = Ancestral polymorphism is L, Derived polymorphism is F
  VARIANT 41: note = Ancestral polymorphism is R, Derived polymorphism is Q
  VARIANT 11: note = Ancestral polymorphism is P, Derived polymorphism is L

SEQ ID NO: 16780 - protein, 452 aa, Zea mays
  VARIANT 24: note = Ancestral polymorphism is G, Derived polymorphism is S
  VARIANT 113: note = Ancestral polymorphism is A, Derived polymorphism is S
  VARIANT 138: note = Ancestral polymorphism is P, Derived polymorphism is S
MLQGVLSRAPATDAAAAMKAKRAGASPGEEEEGDGRSARGKRQQLLGLGPATALASAAAAEEGPETRGLRLLSLLLRCAEAVAMDQLTEARELLPEIAELASPFGSSPERVAAYFGDALCARVLSSYLGAYSPLALRPLAAAQSRRVAVAFQAYNALSPLVKFSHFTANQAILQALDGEDCLHVIDLDIMQGLQWPGLFHILASRPRKPRSLRITGLGASLDVLEATGRRLADFAASLGLPFEFRPIEGKIGHVADAAALLGSRQRRRDDEATVVHWMHHCLYDVTGSDVGTVRLLRSLRPKLITIVEQDLGHSGDFLGRFVEALHYYSALFDALGDGAGAAEEESAERYAVERQLLGAEIRNIVAVGGPKRTGEVRVERWSHELRHAGFRPVSLAGSPAAQARLLLGMYPWKGYTLVEEDACLKLGWKDLSLLTASAWEPADDAAASAPTG

SEQ ID NO: 16781 - protein, 362 aa, Zea mays
  VARIANT 172: note = Ancestral polymorphism is Q, Derived polymorphism is R
MEPQFCSSYYCGDAVSAAYVPSDPNHYGLQHYDDSVVVVDSNCYSNSTMASSGFQQASSSAYYYYDDHIAYGGDHHHHPSSSSTAWASASPSPSGAATPSSSHHQQQLLHFGGGGADEYYTYQEDGMEDQFSALTLMGAACVSASSTSSGASTTDTPAPGAYSSPATWTTMQPNAAAHGASACPRDYLLLQEEAAAGGGAGGDAPLIGVRRRPWGKFAAEIRDSTRNGERVWIGTFDTPEAAALAYDQAAYSMRSSSAVLNFPVEHVQESLRALGLSVDAGVSPVLALKRRHCIRKRLPKNKTAAGAKEERTKVAASSSSRGHGGHGHGLGKQKQQQAAPCVLELEDLGADYLEELLALSDQ

SEQ ID NO: 16782 - protein, 90 aa, Zea mays
  VARIANT 55..90: note = Derived polymorphism lacks residues 55 to 90
  VARIANT 34: note = Ancestral polymorphism is V, Derived polymorphism is A
  VARIANT 32: note = Ancestral polymorphism is D, Derived polymorphism is N
  VARIANT 13..90: note = Derived polymorphism lacks residues 13 to 90
  VARIANT 9: note = Ancestral polymorphism is P, Derived polymorphism is L
MANLFNLFPDSGQPDDVVLSVATSIWLPRLGDHVFAFGRDKKVCFQWEVLSHDNQVQEVSRIPNGSNPDNCISLLRTCLSLAILTMAMMN

SEQ ID NO: 16783 - protein, 539 aa, Zea mays
  VARIANT 265..539: note = Derived polymorphism lacks residues 265 to 539
MGNCCVTPKAADDAGGGKKPKEPKQKKGKKPNPFSIEYNRSGQASAPKLVVLRDPTGRDIAARYELGAELGRGEFGVTYLCTDRASGEALACKSISKKKLRTAVDLEDVRREVEIMRHLPKHPNVVTLRDTYEDDNAVHLVMELCEGGELFDRIVARGHYTERAAALVLRTIVEVVQMCHKHGVMHRDLKPENFLFANKKESAALKAIDFGLSVFFTPGERFSEIVGSPYYMAPEVLKRNYGPEVDVWSAGVILYILLCGVPPFWAETEQGVAQAIIRSVIDFKRDPWPRVSDNAKDLVRGMLNPDPKRRLTAHQVLGHPWLQNIKKAPNVNLGETVKARLQQFSVMNKFKKHALRVIAEHLSVEEAADIKDMFEKMDLNKDQMLSFEELKLGLHKFGHQMPDADVQTLMEAADADGNGSLNYGEFVTLFVHLRKIGNDEHLHKAFAYFDRNQSGYIEIDELRESLADDLGQNREEIINAIIRDVDTDKDGKISYDEFATMMKAGTDWRKASRQYSRERFTSLSLKLQKDGSLQMTSTR

SEQ ID NO: 16784 - protein, 266 aa, Zea mays
  VARIANT 178: note = Ancestral polymorphism is P, Derived polymorphism is L
MAATTAADAFPSTVSSDSDSDDLLLPNLLPSTTTAPAPSSPSREQLHHFQIPSLPSPITVRALPSRGLSFQLWPSASTLLRVLPATPCLLPRPPALGSPLSVLELGSGTGAAGLALAAALPARTVLSDLPDALPNLRHNVELNEHLLGSAGGAASVVPLRWGDASAMADVAVAQTASPFDLVVASDVVYYEELVDPLIETLRFFVKGEVAFVMAHMRRWKRTDKKFFGRARKLFDVEVVHEDPPLEGWRHGPVVYRFTAKKQHGKK

SEQ ID NO: 16785 - protein, 189 aa, Zea mays
  VARIANT 65: note = Ancestral polymorphism is T, Derived polymorphism is M
MAVAQAATVVAAAAACRGISPSGTTGVFRWRPRRRALARARPARRGSRATGRGRGLVVVAEFGGTYEDGFEDVHKNIINYFTYKATHTVLHQLYEMNPPAYTWLYSYISVNDPLDGDYFLRLLAKERQDLAERVMITRLHLYGKWIKQRCDHAMMYERISKENLDIMRQRLVETVVWPTDDTNFGESKD

SEQ ID NO: 16786 - protein, 85 aa, Zea mays
  VARIANT 17: note = Ancestral polymorphism is T, Derived polymorphism is I
MKAQVAAATVLVLLLLTFAAEARTCMSRSQEQKGRCFHDTDCAAVCVKQSFTGGLCNGRPPFKQCFCTKPCKRERADATLRSSGL

SEQ ID NO: 16787 - protein, 939 aa, Zea mays
  VARIANT 110..939: note = Derived polymorphism lacks residues 110 to 939
  VARIANT 749..939: note = Derived polymorphism lacks residues 749 to 939
MAGAESGLGFLGTRALAHRHRACGHCSLPFSSVAATAEASTTRDQLAAAPAGADGLHALAEQVVQLVLADGSGASSPRVAFADGVFVDSSLKLKPAFEEVPVGKYRADTQSVDFQKSSYSYDSGHINQNLSRKCEALVVSGLAEYGDEIDGIVPADIMKIQPILQEDLKLDFSKSRTNKTGNAEITKRRRMVVIDEVDSFLFRPHVGLRAKFQVKKKQFFRNFITITLFGAVGTLISFTVISLGALGLISRLNIGALELGDYLALGAIFSATDSNFDPGNISGAKLLNFISSFLYLFGSSTILGVASGLLSAYTIKKLYFGRHSIYREVSIMMLMAYLSYMLAELLDLSGILTVFFCGVVMSHYTWHNVTESSRVTTKHAFATLSFISETFLFLYVGMDALDIENPVKSIALSNTILALVLVSRAAFVFPLSFLSNLTKKTPNGKISFRQQVIVWWAGLMRGVVSIALAYNKVNLVFGLYGLSFGLDVLLLLLPLSIPKHRTFFVVAFDLMFPRFCGSARHFGRCARHFGRDIIMPNLKSSVTTTASAVEYMDEVLKALPLGEARNEDSRTLQFNYGSFKHKALDKSLTKKEKTLAILHEFQVLQVVAVCECGLDYDRLQFCPTDMQKKFPGGVTHSFTDSTEDQDRLLSFEKMFIGVNGSSLKTNGNLEVVRGIPVERLMMETDSPYCDIINTHAGSQYVKSVWPSKKKEKYEPDSTVKGRNEPCLVREKTLAILHEFQVLHVVAVGECGLDYDRLQFCPADMQKKYFEKQFELAEAVKLPMFLHMCAVGEDLCEIMTRNLHRFPGGVTHSFTDSAEDRDRLLSFEKMFIGKISSPSNKNLHLLQHDDQCSTTLIRVEIQISSVENICCSFKYSILLHAFSVEASKQVLEVVAGSKEISDIEGLSRTLYHNTCRLFFPQDLDASTNAQLESGTAVQDC

SEQ ID NO: 16788 - protein, 134 aa, Zea mays
  VARIANT 109..134: note = Derived polymorphism lacks residues 109 to 134
  VARIANT 57: note = Ancestral polymorphism is K, Derived polymorphism is N
MYPRGPDGGRDASSRPMLATPAGNDTREEDEITTAEAHVEKDAARMDAALLMRTTPKMDEFHTGGDLDSSGSGSGISGPSASKRQLQRRGSWRQRVSRSSIHAYPFPLCFYLICFFARASNREECGRGCNGSAV

SEQ ID NO: 16789 - protein, 91 aa, Zea mays
  VARIANT 18: note = Ancestral polymorphism is L, Derived polymorphism is F
  VARIANT 24: note = Ancestral polymorphism is A, Derived polymorphism is V
  VARIANT 26..91: note = Derived polymorphism lacks residues 26 to 91
  VARIANT 28: note = Ancestral polymorphism is A, Derived polymorphism is T
  VARIANT 30: note = Ancestral polymorphism is A, Derived polymorphism is V
  VARIANT 32: note = Ancestral polymorphism is P, Derived polymorphism is L
  VARIANT 65: note = Ancestral polymorphism is P, Derived polymorphism is S
MARPCSSSSAAARLLLLFVAVAAALQATVVAPPVASGFIRKSCRATQYPSVCEHSLAAYGGSPPPRGLARGPRSGSVRVRGPPVRLPVRIR

SEQ ID NO: 16790 - protein, 949 aa, Zea mays
  VARIANT 613..949: note = Derived polymorphism lacks residues 613 to 949
  VARIANT 356..949: note = Derived polymorphism lacks residues 356 to 949
  VARIANT 186..949: note = Derived polymorphism lacks residues 186 to 949
  VARIANT 106..949: note = Derived polymorphism lacks residues 106 to 949
  VARIANT 54..949: note = Derived polymorphism lacks residues 54 to 949
MDGDDEADPPISHVASHVTDTWAFTPRRKFSIVTTQKNAALARQQRKRALDQRRLLTRGPAKSIRTPMNCGYFPEEYIAALKASYRGRSYHGTLDYECEHCHALFWYGEKSSINRETERPQYHTCCKSGKIYIPSFRDRPEPLASLAIFNGDSKSKKFMRSIRQYNCLFAFTSMGARIDNSINDGRGPPLFKICGQVHHRVGSLLPLDDSAPQFLQLYVYDTANEVSNRLKCLDADHRPVESLDPSIVHDLISMLDQHNPFAKKFRMTRDQLADHNNEDFIIRIVGAKEGDPVQYNLPTTDELAMLVVGDFSLDTYKRDIIIETHNRELKRISSLHPAYMPLQYPLLFPYGERGFQLGIHYSNRNPIGATTGRHMTMQEYYCYQFHYRKNQPNPYLCYGLLSSQAKVDARAAIEESRLHYIAQNQRNLRMESIQGIADAVSRGCINGDEMGKRVVLPASHVGGRRYMIQNYHDGLAICGKYGPPDFFVTFTCNPSWPEITESIFQHGQTAPDRSDVVTRVFHLKLHELLQDIRSGTIFGPLLAVYILNKPIMYSIHVQKMLSVPYSTPGSLNAERSKLIYLYRFHLFFIIALMPNKPLSALTLQDRNAEVQIQIHRKWEFRGAVDNGPILHIDMILTDCTGNAIHCQIPSFLAATRGDEFQVGKIYKMTRFSVARAKSTYKPVDGDLMLYVTPYTTLELCHTSQSCFPLYVYHLTSYDKIDPDGSNARNFHGEVLLSGGATCHWYFNPSIEEAEAFYSRIESEKINIELPSLDKQEITPPSFPQREHHNLKYILSLNPHDVPDQGYECTVTITCIPEGKTWYYIACNTCPNKPSTDPVIRQCSTCRSTNYCFRYKLTFKASDGTEEAEMFAFDNVARTIIGKPCPTVVASFPDASAIPPEIAAIVSRKYTFIIEFNSQSFRFLEKNIAHQRNCSIIWKNDITTNSTRKR

SEQ ID NO: 16791 - protein, 180 aa, Zea mays
  VARIANT 15: note = Ancestral polymorphism is A, Derived polymorphism is V
MGGGGAALLLLVMWAGVASAAVYEVGGTIGWTVMGNPDYAAWASSKQIVIGDTVVFTYNKQFHNVLAVSKADYKNCIATKPTATWSTGNDSVVLNTTGHHYFLCGYPGHCAAGQKVDIRVASSAAPSAAPSPTPSGSKPSGGATAAPSPHPNAAPKALSASSVAAAVATSLLSLAAAVLA

SEQ ID NO: 16792 - protein, 240 aa, Zea mays
  VARIANT 220..240: note = Ancestral polymorphism lacks residues 220 to 240
  VARIANT 208: note = Ancestral polymorphism is L, Derived polymorphism is R
  VARIANT 196: note = Ancestral polymorphism is V, Derived polymorphism is A
  VARIANT 116..240: note = Derived polymorphism lacks residues 116 to 240
MMTPVRTSSASRFGVVGFLLLRLCLASASLRLFAYLDRVPCPCALHFLVTSIPLETKLVVDGGGGGGTGRGARSSVIGLGPKCNVDVKIGPKTTRVSFNCCANCCCVVYLHAEQSEAKNGADHGGEHLAMNGGASLDGTDHGSEHSATSGGSVHGGWRRRGARCRRRRVKVDGGSQTRRVNPKPRLDELWKVWAVVGPDQQARIALKLLADAPTRPIVSSRHIWRDCFVTAFAREITQPT

SEQ ID NO: 16793 - protein, 68 aa, Zea mays
  VARIANT 30..68: note = Derived polymorphism lacks residues 30 to 68
MGIFTCQSSANEGIANVGVQFQDSSVHGLQKLPFKSMTHQHPTLPGDRIRVTCMNVGGLNLQCCYNLT

SEQ ID NO: 16794 - protein, 110 aa, Zea mays
  VARIANT 74..110: note = Derived polymorphism lacks residues 74 to 110
  VARIANT 59..110: note = Derived polymorphism lacks residues 59 to 110
  VARIANT 46: note = Ancestral polymorphism is A, Derived polymorphism is D
  VARIANT 44: note = Ancestral polymorphism is R, Derived polymorphism is Q
MAKNTRSRCQKKLKAYDLSALSESLLEPGAPKQKPEAKLNCKLREAAHLKAVLVKMQFQLDPFAAIHQHLLATQPPAAAKGDAVKQGKDSKNKKRRRKKGASSSSQAMDI

SEQ ID NO: 16795 - protein, 266 aa, Zea mays
  VARIANT 186: note = Ancestral polymorphism is R, Derived polymorphism is G
MGNDVEQMQPHVQATLRKNCLFTISETHAESQPTAIQTKQNQKEDDDGIEATASDALGPLLDRALTELKERQFPHNGSTEDGQVLTDNQLHTPPYQVKKSYNARTPKRRSKRREDFVNEDSIERAERLVAKRNLENSKGNTFKNSVLSFSDEQITEKITNIGISLGNNDALVKKSVNLLRSIEKIRFKRPPVKTDQDNKTKLDESDEDIDLKPLSLLCGDLTEEIMDSQVEENILVHNPQRRKNFNSVKKKKSQTYPTRNQIHISR

SEQ ID NO: 16796 - protein, 175 aa, Zea mays
  VARIANT 100: note = Ancestral polymorphism is S, Derived polymorphism is Y
MEDHAPVIVVPIGRLRRSTARRCWHAVYFNIHKLDNKKRFKKIFNNSNGPRKFHKREKGKGKGKPPPPKGNKVCHKCGSEGHFARDCTCPKHLVLLYQQSLKKEKFNKPIFEAHFNLAEATPEVGSSLLASTETQMTLARENVTTVDNKLILPQDDETDDIIIKYLSKDPYENLV

SEQ ID NO: 16797 - protein, 414 aa, Zea mays
  VARIANT 319..414: note = Derived polymorphism lacks residues 319 to 414
MGPTAGSGEDKAMSELRKKHRVDLERLTITSRPFKTLSFFVLAIAQNLERTCSSVLKKGYQLKTAMLLVVATWLLLMFTDGLNEKHLQELFWYVRFGLWWIILGVASSIGLGSGLHTFIMYLAPHVALFTIKAVQCGRVDLKSAPYDTILLERRPSWLEKDCLQFGPPIYHETIPFSKILQEVYLEAILWGIGTALGELPPYFLSRTASMSGRIIDELEDLDASISEGFLSSALRQAKRWLMSHSQYLSFTLILLLASVPNPLFDLAGILCGQFNIPFWKFFLATLIGKAIVKVCIQTTLVITLCNNQLLDLVEKRLIWAFSNVPGVASVLPSFVSKLKMDKNKFLSAHVAASASTSVKGKKWNLSFSLVWNTLVWLMVANFIIQIVTSTAQGYLRTQQEREISKKLETELSAS

SEQ ID NO: 16798 - protein, 176 aa, Zea mays
  VARIANT 65: note = Ancestral polymorphism is P, Derived polymorphism is L
MSSSSSPRHPCFGAALPERLGYVQCKFCATILLVGVPIGGSLQLLKTVAVQCGSCCGILSVALPPDEAPAPASVELLPLMQEAGGVDPPPRDSDESSGEDRGETTEAATVADNHAAFPAVNKPPLRKQRTPSAYNCFIKEEIQRIKARDPGITHKEAFSAASKNWAHLPRIQKTGG

SEQ ID NO: 16799 - protein, 328 aa, Zea mays
  VARIANT 25: note = Ancestral polymorphism is R, Derived polymorphism is P
  VARIANT 49: note = Ancestral polymorphism is A, Derived polymorphism is V
MSQQPAPAPPYRPYRQVREATPHSRAVSCLRFSPCGRLLATASLDGTVALLSPSSLTVIAVLRGHSDGVSDLSWSTESFYLCSASDDRTIRIWDIRPVLAGGAQAAADSSADRCVRVLKGHTNFVFSANFNPQTSSQIASGGFDCTVRIWDATSGRCTRAIEAHSEPVTSVHFIRDGSIVVSGSHDGSCKIWDAKSGACLKTVIDEKKPAVSFSMFSPNGKFILVAMLDNSLKLCNFATGKFLKVYSGHVNRQYCIQSAFSVTNGKYIVSGSEDNCVYIWDLQGRNILQKLEGHTDTVISVSCHPTENKIASGGLHNDRTVRLWVQDS

SEQ ID NO: 16800 - protein, 328 aa, Zea mays
  VARIANT 49: note = Ancestral polymorphism is A, Derived polymorphism is V
MSQQPAPAPPYRPYRQVREATPHSRAISCVRFSPCGRLLATASLDGTVALLSPSSLAVIAVLRGHSDGVSDLSWSTESFYLCSASDDRTIRIWDIRPVLAGGAQAAAVSGADRCVRVLKGHTNFVFSANFNPQTSSQIASGGFDCTVRIWDATSGRCTRAIEAHSEPVTSVHFIRDGSIVVSGSHDGSCKIWDAKSGACLKTVIDEKKPAVSFSMFSPNGKFILVAMLDNSLKLCNFATGKFLKVYSGHVNRQYCIQSAFSVTNGKYIVSGSEDNCVYIWDLQGRNVLQKLEGHTDTVISVSCHPTENKIASGGLHNDRTVRLWVQDS

SEQ ID NO: 16801 - protein, 284 aa, Zea mays
  VARIANT 16: note = Ancestral polymorphism is A, Derived polymorphism is V
  VARIANT 39: note = Ancestral polymorphism is P, Derived polymorphism is R
  VARIANT 43: note = Ancestral polymorphism is T, Derived polymorphism is A
  VARIANT 47: note = Ancestral polymorphism is S, Derived polymorphism is G
  VARIANT 138: note = Ancestral polymorphism is R, Derived polymorphism is W
  VARIANT 141: note = Ancestral polymorphism is S, Derived polymorphism is L
  VARIANT 256: note = Ancestral polymorphism is L, Derived polymorphism is S
MRDFASCLNQSAVQVAHSSSSSGQNFVQSAYVARLRDKPCVVTVTWSKVAMGQAFAIAIHDYSNRCLCKAEVKPWLFSKRKGSKVMELDSGNVEIIWDLSAAKFAAGPEPLEGFHVALLYGLEVVLVLGNLSKEEDHRVLSDASHCDAVMIARKEHIYAKKMYSAKARFLDIGQIHHISIECDMAGVRDPCLEIRIDKKKVLHLKRLAWKFRGNQTIYVDGLPVEVLWDVHDWLFGSTNGCAVFLFQSGQSMEKILFRTCSQNEKEAEAHRLGFTLILKAWKTE

SEQ ID NO: 16802 - protein, 67 aa, Zea mays
  VARIANT 27: note = Ancestral polymorphism is R, Derived polymorphism is K
  VARIANT 34: note = Ancestral polymorphism is E, Derived polymorphism is D
MAAWMRSLFSPLKKLWIRMHSAHSKRRGIYILYEDVKSCPCEDVHILWSILVDSSHSRPPPMRLDHH

SEQ ID NO: 16803 - protein, 805 aa, Zea mays
  VARIANT 84..805: note = Derived polymorphism lacks residues 84 to 805
  VARIANT 70..805: note = Derived polymorphism lacks residues 70 to 805
MSSAPPPPPSLNPEVPPRIVRAPPRRPPPRAPGPPPWAERRPAVSVDLDRGRRSVRTEVDGVRAASLPARHRLRVEGNRWQRDWKVSEVVARLLALPHADADAVDAVLNCWAGRFARRNFPLLIREIAISGSLKHAVHVFRWMKNQENYCARNDIYGMMIRLHARHNKVDQARGLFFEMQEWRCKPNTDTYNSLIHAHARAGQWCWAINIMDDMQRAAIPPSRTTYNNVINACGAAGNWKKALELCKKMTENGVGPDLITHNIVLSAFKNGAQYSKAIAYFEIMKSSKVAPDTCTMNIVIHCLVKIGLYGEAIELFNSMRERRTTCHPDVVTYTSIMYSYSVCGQAENCKAVFDIMVAEGVRPNIVSYNALLGAYASHGMHTEALETFKLLKQNGLRPDIVSYTSLLNAYGRSAQPEKAREVFNEMRKNACKPNKVSYNALIDAYGSAGMLKEAISLLHEMEQDGIQPDVISISTLLTACGRCKQLTKIDIILAAAKSRGIQLNTVAYNSGIGSYLSLGDYKKALVLYTSMRAGNVKPDAVTYNILISGSCKLGRYVESLKFFEDMLDLNIHLTKEVYSSVICSYVKQASGKLTEAASTFNSMKETGCFPDVLTYTTLIKAYSDDGSWRRAWDLFKEMENNGTQPDAIVCSSLMEALNKGGQPERVLQLIEFMKQKKIQLNQKAYFEIISSCTMLRDWKTASQIIEHLDSSLSSISFGTLNHILNFLGKCGRTESMMKVLQWMEDAGVCPTLYMYQSVLPYIWRDNSMDYVTLMQEKISMTLPNLIIVCMKNMLFFFDLIIYLNI

SEQ ID NO: 16804 - protein, 258 aa, Zea mays
  VARIANT 11: note = Ancestral polymorphism is S, Derived polymorphism is P
MDLETENRLASLLIEEARRLQLEADREGVHAYLRKPNVRHRPNSRFLTATVRGVQQANRVVEVNEMWRARAKELELESKMKSKNSRSNNRDDFRGEKPKSDLRNHSSGSRFEQEGTTYSNSYSEREDGLSDDEIERFLHSRAKRGRGAVGSRMDEPGPYLDSLSRHQDNGPSPDIRVEEKWERQVQGPEKPSFLRSKSPDSHWHKDTSDGRASSSEPLSKKEKKKKSEKKDKRDKRKEKDRKKHKHRHHRNHKSRRRE

SEQ ID NO: 16805 - protein, 54 aa, Zea mays
  VARIANT 53: note = Ancestral polymorphism is H, Derived polymorphism is L
  VARIANT 52..54: note = Derived polymorphism lacks residues 52 to 54
MTMPWGLAACIVDMVWAVLAGWVSTCLVIANEVARGMRSGEIGAVHEDITKWLI

SEQ ID NO: 16806 - protein, 428 aa, Zea mays
  VARIANT 249: note = Ancestral polymorphism is L, Derived polymorphism is F
MAAARACIVALALVAALFVAGSAAAAAGNAGGRPQLSLRQRRRQLLRQRQVRSHLKRLNKAPLATIESPDGDIIDCVHISNQPALDHPFLKNHTVQMRPAYHPEGLYDDESKVASQRNAQTITQMWHQNGRCPEGTIPIRRTKEEDVLRASSVRRYGKKKRRSAPNPMSVDPDMLNESGHQHAIAYVEGDKYYGAKATINVWQPKIEQANEFSLSQLWILGGSFGQDLNSIEAGWQVSPDLYGDNNTRLFTYWTSDAYQATGCYNLLCSGFIQINNQIAMGASIFPISNYGGSQYDINILVWKDPKEGNWWLQFGNDYVLGYWPSFLFSYLADSASMIEWGGEVVNSEPDGSHTSTQMGSGHFPEEGFGKASYFRNVQVVDSTNNLKPPRGVGTFTEQSSCYDVQDGSNADWGTYFYYGGPGKNSNCP

SEQ ID NO: 16807 - protein, 353 aa, Zea mays
  VARIANT 240..353: note = Derived polymorphism lacks residues 240 to 353
  VARIANT 202..353: note = Derived polymorphism lacks residues 202 to 353
  VARIANT 166: note = Ancestral polymorphism is R, Derived polymorphism is C
  VARIANT 116: note = Ancestral polymorphism is T, Derived polymorphism is I
  VARIANT 113: note = Ancestral polymorphism is R, Derived polymorphism is G
  VARIANT 105: note = Ancestral polymorphism is S, Derived polymorphism is N
  VARIANT 69..353: note = Derived polymorphism lacks residues 69 to 353
  VARIANT 60: note = Ancestral polymorphism is T, Derived polymorphism is K
  VARIANT 50: note = Ancestral polymorphism is S, Derived polymorphism is Y
MEHRRVKDQESDGVSQKDIENFDKISLSSNTSTSSLSTAGGPKDSSKLKSIVTLALTLLTSSQAILIVWSKRAGKYDYSVTTANFSVETLKCLLSLVALSRIWNSQGVTEDNRLITSFDEVRVYPIPAMLYLVKNLLQYYIFEYVDAPAYQILKNLNIISTGVLYRIILKKKLSQIQWAAFILLCAGCTTAQLSPSSDHVLQTPIQGWVMAIVMALLSGFAGVYTEVIIKKNPSRNINAQNFWLYIFGMLFNLVAICVQDFDAVMNKGFFHGYSFITVLMILNHALSGIAVSMVMKYANNIIKVYSTSVAMLLTATVSVFLFGFHLSLAFLLGSTVVSVSVYLHSVGKLQQRN

SEQ ID NO: 16808 - protein, 285 aa, Zea mays
  VARIANT 132: note = Ancestral polymorphism is D, Derived polymorphism is Y
MPFLLTPGARAVPSPSTLSRLLLPLHLQITNGRHNHQHGHVPASPLLYPRLRNRRSRFFAASSSSSSPQMAAPADAAGGSSDAFEVIRVHQAKAVRLSPVEEIRTIMDRSVRCVLATHSQDHAGYPSGSMVDFACDQDGYPILAVSSLAVHSKNLSGNPKCSLLVAKDPEDRTDTVITVYGDAVPVSDEEKDSVRSAYLRRHPDAFWVDFGDFSFLHIKPKAVRYVSGVATALLGSGEFNVAEYKEAKVDPISQFSTPITSHMNKDHANDTKLIVQHSTTVKARK

SEQ ID NO: 16809 - protein, 66 aa, Zea mays
  VARIANT 55: note = Ancestral polymorphism is R, Derived polymorphism is H
MDAYYASVPDVAYGTGRFLYDGGRLTGAHTPAELGMEEQDEIDFFTELLGGGGRRAAAEPGRPVVA

SEQ ID NO: 16810 - protein, 250 aa, Zea mays
  VARIANT 145: note = Ancestral polymorphism is G, Derived polymorphism is E
  VARIANT 185: note = Ancestral polymorphism is Q, Derived polymorphism is L
MASPGRKEGPPVARSFSFRLAAGGELGLAAAVAPAVPIARPVRFVTLTVQDAQRRDVTRTMRVTDTLQGLMDHYYDMVGSAGTRRAGRFVFDGKRLKGKQTPEELGMKNRDKIDFFVDLSATDDGGDVEPAVYVTVKVVVVDMKGRTMERTLQSTHKLQVVMDAYYDSVPDVSRGVGKFLYDGGQLQGWQTLAQLKMDDKDEIEIDFLADMMGGGGPPGRWAATAAEQPPVPAYLDLRTAPSLMAANNFY

SEQ ID NO: 16811 - protein, 52 aa, Zea mays
  VARIANT 34: note = Ancestral polymorphism is A, Derived polymorphism is T
  VARIANT 32: note = Ancestral polymorphism is D, Derived polymorphism is G
  VARIANT 26: note = Ancestral polymorphism is E, Derived polymorphism is K
  VARIANT 14: note = Ancestral polymorphism is V, Derived polymorphism is M
  VARIANT 13: note = Ancestral polymorphism is A, Derived polymorphism is T
  VARIANT 9: note = Ancestral polymorphism is N, Derived polymorphism is I
MTTLLENFNPHKAVKNIFDQRHEMIETGEGIGWAVGEALALLLLSLRGTMSD

SEQ ID NO: 16812 - protein, 308 aa, Zea mays
  VARIANT 124: note = Ancestral polymorphism is G, Derived polymorphism is R
MELHFQAQPPVFQLENYSSSSSYYYYQQQEAAAQAKPSKPRGRKKGSNNHSKFVGVRQRPSGRWVAEIKDTTQKIRMWLGTFETAEAAAKAYDEAARLLRGTDARTNFAPRISPDCPLAVRIRGLLHHKKIKKAKAAAAAAKQQASSSSPASTTSNSNSNSHSTNSARGGGSSITTTTTSSSSSSSSSSAVSCDDDMATQGGGTGALDAGEVYRPGFATAGTEEEFDSWMFDSAFPALDSFAAVDSAVPAAGTTEEPGAEMAEFERIKVERRISASLYAMNGLQEYFDRVLDASACDSLWDLSPLCHH

SEQ ID NO: 16813 - protein, 578 aa, Zea mays
  VARIANT 384..578: note = Derived polymorphism lacks residues 384 to 578
MATVLLPLLLLLGSAVTLLTCAGAGASFPVNVWPKPTSMSWAEPHAAVPVSPSFHIVASSGNPYLASAAERYAKLLFRETYRPIVRPAVNVTAGNALEKLTVAVSDLAAPLQHGVDESYTLEILPTGAATVTAATAWGAMRGLETFSQLSWRAGRGDLLLVAAGVRVEDRPLYPHRGLMLDTGRTYFPVADILRTIDAMAANKMNVFHWHITDSQSFPIVLPSEPSLAEKGAYGENMRYTVEDVERIVEFAMSRGVRVVPEIDSPGHTASWAGAYPEAVTCAGKFWLPDGDWNHRLAAEPGAGQLNPLAAKTYEVITNVVNDLTSLFPDGFYHAGADEVTPGCWEADPTIQADLERGATLSQLLERYVSAVHPLVVSRNRTAVYWEDVLLDAAVNVSASAIPPATTVLQSWNNGPNNTKLIVQAGYRAIVSSASFYYLDCGHGDFVGNNSIYDDPNSDFDANGGSWCGPYKTWQRVYDYDIAYGLTPEEAQLVLGGEVAMWTEQVDTTVLDGRVWPRASAMAEALWSGNRDASGRKRYAEATDRLIDWRQRMVGRGVRAEPIQPLWCRTRPGMCNAVQ

SEQ ID NO: 16814 - protein, 687 aa, Zea mays
  VARIANT 213: note = Ancestral polymorphism is V, Derived polymorphism is A
  VARIANT 55: note = Ancestral polymorphism is T, Derived polymorphism is M
  VARIANT 26: note = Ancestral polymorphism is P, Derived polymorphism is L
MKANQNMSAKLLSLVVLLLLIHVSVPSSSADVGHQFIYQGFAASDLALNGLAAVTPGGLLALTNATFQAKAHAFRPAPVHFLNASSSAAAATARARARSFSTCFVFAIVSAYEGLSDHGLAFVVAPTTSFSAAKAGQYLGILGAINGTASDPVLAVELDTILNPELSDIDSNHVGVDVNSLVSEQAMPAGYYDDAAGGAIRELQLNSRKPMQVWIDYDGQAGRLDVTLAPVRVPKPSRPLVSTAVDLSTIVGRGGPMYVGFSSATGVVATHHYVLGWSFGLDGPAPPLDMSKLPVLPRVGPKPRSKVLDVLLPLATALVVAAALAAISFAMWRRRRFAEVREDWEDEFGPHRFSYKDLFHATNGFDAVNLLGVGGFGRVYKGVLPASPALEIAVKKVSHGSRQGVREFVAEVVSIGRIRHRNLVQLLGYCRRRGELILVYDYMANGSLDKYLYDQHVPALSWHERYRIIKGVAASLLYLHEDWEQVVIHRDVKASNVLLDHEMNGRLGDFGLARLYDHGTDPQTTHVVGTMGYLAPELVRTGKATPSTDVFSFGVFLLEAACGRRPIDRDRQVVLVDWVIEHHRDGSVLDVVDPRLVGKYEAEEATLVLKLGLMCAHPLPNVRPSMRRVVQYLDSDQAVPDLSPNYTSYSIMSLIQNDGFDSYITSSHPYMTNSIVVSSASVLSQGR

SEQ ID NO: 16815 - protein, 681 aa, Zea mays
  VARIANT 337..681: note = Derived polymorphism lacks residues 337 to 681
MLFETFVVATLLILLLVPVGRCADATAGSDDERFVYNGFKGANLTLDGASTVTPNGLLVLTNGTIQMKGHAFHPSPLPFRDRGAQNATAARSFSTTFAFAIFGPYIDLSSHGLAFFVSSDRAALSTALPGQFLGLLNSTDNGNGRTHVFAVELDTLFNADFLDRNSNHVGVDVDSLVSRAAADAGYYDDGTGQFRNLSLVSRKAMQVWVDYDSGSTQVTVTMAPLGLARPKKPLLQTTVDLSGVVQGTAAYVGFTSATGILFSRHFVLGWAFAFDGAAPALNISALPALPPAGPKPRPKVLEIVLPIATATLVFAVGVLVYALLRRRARYAELREDWETAFGPHRFSYKDLFHATGGFSDKRLLGAGGFGSVYRGVLRKSNTEVAVKKVSHESKQGMKEFIAEIASMGRLRHRNLVQLLGYCRRKGELLLVYDYMPNGSLDKHLYDRSKGARALGWPQRLHVIRGVASGLLYLHEDWEQVVVHRDVKASNVLLDGEMNGRLGDFGLARLYDHGTDAHTTHVVGTMGYLAPELGHTGKATPATDVFAFGAFLLEVTCGRRPVEQDEHNSHTVLVDWVAERWRRRLILDAADTMIPDGFNPDEVCLALKLGLLCSHPLPNARPTMRQVMQYLDGDMVLPDLSPEYFGFTAVERMYSREVSKDTMAYVSSSTSMGAISDLSSGR

SEQ ID NO: 16816 - protein, 340 aa, Zea mays
  VARIANT 170..340: note = Derived polymorphism lacks residues 170 to 340
  VARIANT 164: note = Ancestral polymorphism is E, Derived polymorphism is D
MSSAAQQQQKAAAAEQEEVEHGPFPIEQLQASGIAALDVKKLKDSGLHTVEAVAYTPRKDLLQIKGISEAKADKIIEAASKIVPLGFTSASQLHAQRLEIIQVTTGSRELDKILEGGIETGSITEIYGEFRSGKTQLCHTLCVTCQLPLDQGGGEGKALYIDAEGTFRPQRLLQIADRFGLNGADVLENVAYARAYNTDHQSRLLLEAASMMIETRFALMVVDSATALYRTDFSGRGELSARQMHMAKFLRSLQKLADEFGVAVVITNQVVAQVDGSAMFAGPQFKPIGGNIMAHASTTRLALRKGRGEERICKVISSPCLAEAEARFQLASEGIADVKD

SEQ ID NO: 16817 - protein, 401 aa, Zea mays
  VARIANT 165..401: note = Derived polymorphism lacks residues 165 to 401
MACAAAPSPLPGVPARRSTTAPCVVFAVGPHPPRFYRPFKPSTGGAPRSSLRVVASSSKADPVEERLPVAPLADVLVSANASSPSPPVEPQPQVSTGTWKWRGYNIRYQHAGTAGPALVLVHGFGANSDHWRKNMSVLAMAHRVYAIDLIGYGYSDKPNPREIEENFYTFETWGEQLNSFCAEVVQSEVFFICNSIGGVVGLQAAVMEPKTCKGIVLLDISLRMLHIKKQPWFGKPFIKSFQSLLRNTIVGKLFFNAVATPESVKNILCQCYHDTSAVTDELVQIILQPGLDPGAVDVFLEFICYSGGPLPEELLPLVKCPVLVAWGEKDPWEPVELGRAYASFDTVEDFVVLPDVGHCPQYLHLRAGGKHHLTDYNLIIRDHEEIFDFITAKEHVISEQR

SEQ ID NO: 16818 - protein, 470 aa, Zea mays
  VARIANT 357: note = Ancestral polymorphism is R, Derived polymorphism is T
MEFTESFKQTGPCSFSPDSRFLAIAVDYRLVVRDVLSLKVVQLFSCVDKISSVEWAPDSEYILCGLYKRPMVQAWSLSQPDWTCKIDEGPAGIAYARWSPDSRHILTTSEFQLRLTVWSLVNTACVHVQWPKHGSKGVSFTKDGKFAAICTRRDCKDYINLLSCHSWEIMTVFAIDTVDLAGVEWSPYDSAIVVWDSLLEYKVLIYSPDGRCLFKYLAYESGLGVKTVAWSPCGQFLAVGSYDQAVRTLNHLTWKTFAEFSHAGYIRSPCNAAIYKEVDDPWQLDMSELCLSEGLSRNMPDNGAENGTEGGGSRVKYAVMDVPITLPSLKPAFDKPNPKQGIGMLSWSSDSHYFFTRNDNMPTVLWIWDICRLELAAVLVQKDPIRAAAWDPTCTRLVLCTESPHLYMWTPSGACCVNIPFLNFRIVDLKWSSNGSCLLLKERESFCCATIISALPEEEPDHSDDTSEDE

SEQ ID NO: 16819 - protein, 500 aa, Zea mays
  VARIANT 183: note = Ancestral polymorphism is S, Derived polymorphism is N
MACLPFLCSWFSMFQFGGNHFKWTLKFGAFVGITIGNDMSNIPPATDIVSILKAKKIQHVRLLDSDHQMLNALANTGIEVMVGVPNDQLLRVGQSRSTAADWINKNVGAYIPATNITYIAVGNEVLTTIPNAALVLVPALQFLQSALLAANLNTQVKISSPHSMDVISKAFPPSAATFNLTWSSIMSQYLQFLKNTGSSFMLNAQPYYGYVGGQGVFPLEYALFRSLNPNSQISDPNTNLFYTNMFDAIIDATYNSIQAMNFTGIPVLVTASGWPWRGGPSEKAATVDNALAYNTNLIHHVLNNSGTPSQPNNQPSTYIFELFNEDNRSGPVSEQNWGIMFPNATTIYSLSFEDVATAIPESPALRGVFCVANSSASHSALKHSLDWACGPGSANCSAVQPGQPCYASDDIVAVASYAFNDYYHRTQSSGGTCNFNGTAMITSTDPSHGSCIFSGSAGANGSNGGTASGPVSPDSFASKSQSCWLTHLVATLLPILFVVM

SEQ ID NO: 16820 - protein, 184 aa, Zea mays
  VARIANT 54: note = Ancestral polymorphism is N, Derived polymorphism is I
  VARIANT 148: note = Ancestral polymorphism is S, Derived polymorphism is I
MSSSSSFPNSRFPFAAGAGASGGSGSSVRPWGSSGGTSVSSSGKRIQKELLDLNASDCSAGPKGDNLYHWLSTIIGPQGSPYEGGIFFLDIVFPPDYPFKPPMVTFKTRIYHCNIDSTGKVHLDILKDGWSPAFTISKVLLAIKDIISNPDPYSPLMMSISRQYLTDRAKHDEIAAEWTMRFAR

SEQ ID NO: 16821 - protein, 270 aa, Zea mays
  VARIANT 49: note = Ancestral polymorphism is E, Derived polymorphism is A
  VARIANT 63: note = Ancestral polymorphism is P, Derived polymorphism is S
  VARIANT 227: note = Ancestral polymorphism is R, Derived polymorphism is S
MALVSASSSSTTAVAALPRNGQQRASSSLFSSSSSSSFLVGKTLLRQAEAARPSFAVRAAADSDRPIWFPGSTPPPWLDGSLPGDFGFDPWGLGSDPESLRWNVQAELVHCRWAMLGAAGIFIPEFLTKIGVLNTPFWYTAGEQQYFTDTTTLFIIELILIGWAEGRRWADIIKPGSVNTDPIFPSNKLTGTDVGYPGGLWFDPLGWGSGSPEKIKELRTKEIKNGRLAMLAVMGAWFQAEYTGTGPIDNLFAHLADPGHATIFQAFTPK

SEQ ID NO: 16822 - protein, 157 aa, Zea mays
  VARIANT 118..157: note = Derived polymorphism lacks residues 118 to 157
  VARIANT 104: note = Ancestral polymorphism is P, Derived polymorphism is S
  VARIANT 31: note = Ancestral polymorphism is T, Derived polymorphism is I
  VARIANT 8: note = Ancestral polymorphism is D, Derived polymorphism is G
MENKFGADPNSDRACTLCLWKCVSRWRSIATLEKPLIRLLTNLFTAPSMGNFLFCLMGDMSYTLHHHDGCWKAPLHCSETDDEQMIAFNVHRVRASAIFLAAFPSLLRKYVKALLHTWARGRGAMPLVSFMFLRDLCIQIGSDCLDTCLKVSIRIIW

SEQ ID NO: 16823 - protein, 335 aa, Zea mays
  VARIANT 17: note = Ancestral polymorphism is S, Derived polymorphism is Y
  VARIANT 254: note = Ancestral polymorphism is R, Derived polymorphism is W
MAASSRRASQLLGSAASRLLLGRGFAAAAAAAPSPAVFVDKSTRVICQGITGKNGTFHTEQAIEYGTNMVGGVTPKKGGTEHLGLPVFNSVAEAKAETKANASVIYVPPPFAAAAIMEAMEAELDLVVCITEGIPQHDMVKVKAALNRQSKTRLIGPNCPGIIKPGECKIGIMPGYIHKPGRIGIVSRSGTLTYEAVFQTTAVGLGQSTCVGIGGDPFNGTNFVDCLEKFVDDPQTEVFYVFQALFSSVKLEVRLRRMLQRSSRKAKHKSLLLHSLLDLRHPQAVAWVMLELSWQEERVLPRTKSRHSERLVLPLSSHQRRLVLPCLKSSNSVEW

SEQ ID NO: 16824 - protein, 412 aa, Zea mays
  VARIANT 96: note = Ancestral polymorphism is A, Derived polymorphism is T
MPERRIVPVPATSDIGVLPMDALREILLRLQAKELCRLRLVCRLWRSLLSDPHFAAPHYARHRAVLIIAAYKDDAGRDVLVDIMDLSGQIVKKVPTMEGDRAAVRGGGTLDRVCVRKIDDSRSSYRVFNPIREEVYYLPDRLFDPATGAVYRIPDSYAEEHVELASSLITEPKYLFGQVARTGECKMFRMLFHFSVGIGGRGMFEVCTLNSDNSSSRAAGWRRAAPLEKGIQISRFTSVVIDGVVYCLCFGPHHSITFDNRVTEQDLIFTFDLETEAWGPSIRGPPITFPDDADLMFYYLGLPNVKQLTIANLNRSLAVVHGPAPYVDVWILLDFAKGLWVKMYSIQFEKYTILKPVHPLFVFGDGRIILYKQDHDYLQIYDPRTNTLADLLESKHFSAVARYTGNLLSLER

SEQ ID NO: 16825 - protein, 130 aa, Zea mays
  VARIANT 33: note = Ancestral polymorphism is T, Derived polymorphism is I
MEVAHGMTGSSSAVMVAATSPYSFSISGSTVETIKTVPTRRGPVAQERLSKAADLVRHCVETCADSPCRFKDGDADGREGAGGGGRGTSHGAPRRRHHPTRASSGGGCSVQGGPRTEALMETMMSMAEKV

SEQ ID NO: 16826 - protein, 783 aa, Zea mays
  VARIANT 417..783: note = Derived polymorphism lacks residues 417 to 783
  VARIANT 257..783: note = Derived polymorphism lacks residues 257 to 783
MATTITRLLHHLALFLLIVEFADAVLIPKTKNHAALKPQASSTTYIVHANDLAKPPHFRSLEEWYRSMVITHASSTRAASSSSILYTYDTVMHGFAVQLTGDEARLMSSAPGVIGVYEDRVLYPQTTRSPGFMGLEPGNGAWKQADFGDGVIIGFVDTGIWPESASFDDSGLGPVRSSWRGKCVDAHDFNASLCNNKLVGAKAFITPAADAVEERKSRGVSSPRDKEGHGTHVASTAAGAEVRNASLYMFSRGTARGMAPKARIAMYKACGVGGYCRNADIVAAVDAAVKDGVDIISMSVGGARPTAFHDDVVAIALFGAERKGVFVVLSAGNNGPQATTVINSAPWMTTVGAATVDRQYPAQLTLGNGVVLAGQSLYTMHAKGTHMIQLVSTDVFNRWHSWTPDTVMGKIMVCMHEASDVDGIILQNAGGAGIVDVDPQEWSRDGSVAYAFTLPGLTLSYTAGEKLRAYMASVPYPVASFSFACETVIGRNNRAPVVAGFSSRGPNLVALELLKPDVVAPGVNILAAWSGDASVSGYSDDGRRADYNIISGTSMSCPHVAGIAALIKKKHPSWTPAMVRSALMTTARTVDNRGGYILDNGHSVIVGRRIDNFRVATPLVAGAGHVQPDLALDPGLVYDAGEHDYVHFLCALNYTAEQMRRFVPDFVNCTGTLAGGPASLNYPSFVVAFENCTDVRTLTRTLTKVSEEAETYSVTVVAPEHVKVTVTPTTLEFKEQMETRSYSVEFRNEAGGNPEAGGWDFGQISWENGKHKVRSPVAFHWKN

SEQ ID NO: 16827 - protein, 137 aa, Zea mays
  VARIANT 51: note = Ancestral polymorphism is P, Derived polymorphism is L
MAHPMYGSGPLRSRNAASSDEIQLRIDPVHGDLDEEIDGLHSRVRMLKGGPWLSAIFELENILVGVAQEINSEAKFQNDFLHELQMTLAKAQAGVKNNMRRLNKSIIQQGSNHVLYVVLFALFCFFIVYLLSKFSRR

SEQ ID NO: 16828 - protein, 113 aa, Zea mays
  VARIANT 10: note = Ancestral polymorphism is E, Derived polymorphism is K
  VARIANT 11: note = Ancestral polymorphism is S, Derived polymorphism is F
  VARIANT 16: note = Ancestral polymorphism is A, Derived polymorphism is V
  VARIANT 19: note = Ancestral polymorphism is V, Derived polymorphism is I
  VARIANT 32: note = Ancestral polymorphism is R, Derived polymorphism is Q
  VARIANT 40: note = Ancestral polymorphism is D, Derived polymorphism is H
  VARIANT 63: note = Ancestral polymorphism is V, Derived polymorphism is M
  VARIANT 88: note = Ancestral polymorphism is Q, Derived polymorphism is R
  VARIANT 96: note = Ancestral polymorphism is G, Derived polymorphism is E
MTAVFGWDNESVLLDAMVVEATLICESHRKRRASTCSNDDGIGSNTKYGDTVDRAPLFHAAKVYLAMVQIMPIHEILASTPIEKMTLQIFQTYHQGATFLQWCGAKTTTWSTQ

SEQ ID NO: 16829 - protein, 452 aa, Zea mays
  VARIANT 51: note = Ancestral polymorphism is T, Derived polymorphism is S
MVRVSCLLQDNLMVNMRDIETSNDGQLDEPLGRVSIISYGSGHMLNDITSSCWFTYLLVFLTDVGLSPGDAAIVMLSGQLADGFTTIFVGELMDRFGHFKLWHAGGSILVAISFSSVFGSCVPCKLMGTNSSTLETVGYSTFATIFNVGWAVTQVAHMSMVNCMSSNPTSRVSLVSCRNAFTMVANLSLYGIALLIFTILQSVNVMFQYRWIAYVSISIGSCFVVIFLVGTKEPGSIRHCVDKSLSRISWTYWFKKVLYYQVALVYTLTRLVTNVSQAFLAFYVINDLEMSQSSKALETRWSSWRLKLYFSAGAVLWILSGLGIVFLPSRMHNLMYAISIIIGAANALMTVTSISMEGVLVGEDLNGCAFVYGSLSFVDKVSCGVVLYILESYQGSTEIRSNLGTAFGYSITRLGLGLVPAVCSLLSSIVAYTMDLPDPDTRRRPLVEPLLV

SEQ ID NO: 16830 - protein, 168 aa, Zea mays
  VARIANT 28: note = Ancestral polymorphism is G, Derived polymorphism is D
  VARIANT 16..168: note = Derived polymorphism lacks residues 16 to 168
  VARIANT 12: note = Ancestral polymorphism is R, Derived polymorphism is Q
  VARIANT 11: note = Ancestral polymorphism is F, Derived polymorphism is S
MSKEEIRELLFREILEYHPQLLSSYINGTERTTFLYPSVVDQFKKQFSHLEESGGNGPSVPTDRKHASLPRTTVVHSNPIPAKEQPLAVSSRVRPVSDDSCKNPWEKASSPGNVTRTSLTPQGLQAQACTFVFTYYQLPLFQIATGSVRVNGPVTDSRSNKASALNLQ

SEQ ID NO: 16831 - protein, 97 aa, Zea mays
  VARIANT 12: note = Ancestral polymorphism is L, Derived polymorphism is H
  VARIANT 29: note = Ancestral polymorphism is L, Derived polymorphism is R
  VARIANT 74: note = Ancestral polymorphism is V, Derived polymorphism is A
MAPAIAAMLTMLLLLTAHAFAGHVESEHLGGRQAQGLQEPPLVAGGAFPDSQCAETRLYRGPCVEMLCAAACLVQMRHGGHCRGNFVKGRCYCLSCS

SEQ ID NO: 16832 - protein, 241 aa, Zea mays
  VARIANT 8: note = Ancestral polymorphism is S, Derived polymorphism is L
MAAALASSRNSHLPAMRSSPAVSPLPNNYRMRVNPSIAYVARPETAAACKRGHRHHRASHDDKTRRTTSRSPLVMRRRWRRSASRDSRRRRKGSDARADYYRRPDDDDAHRHGYYDDAHRAADTSKQEAGEQRDRAREVDTRRSSSSRSSKERREPRETAAAHHQHYYHPAAESIARPLVAAAEDRKRSSPGKEADQEDDAEARRRRHEIQRMREEARRELDKVVTTVWFNDPYISPTCAC

SEQ ID NO: 16833 - protein, 815 aa, Zea mays
  VARIANT 480..815: note = Derived polymorphism lacks residues 480 to 815
MPPPHPTDAEAGPEQVAPTEAVPLAAAAPAPVKKKRNLPGTPDPDAEVIALSPGTLLATNRFVCEVCGKGFQRDQNLQLHRRGHNLPWRLRQRGPGAAPPRRRVYVCPEPGCVHHSPTRALGDLTGIKKHFCRKHGEKRWACPRCGKRYAVQADLKAHAKTCGTREYRCDCGTLFTRRDSFVTHRAFCGALGEETGRALAPPAPPSPRPPDLEAEENVDNDKEEEENEDSALAEVEVPQRVEVAVPEEPEPEPQRIPSPPPLPQEPPCRPSPPPLPQEQPRRVSPPPLPKEPPCHHPTPPPLPKEPQRLPFPPEQQAVVALVPNVDEPEVAAVGTVAAKLEDETDQDETTCFQEADQYKDAELEVSNLLDKDTPMLPCFLPSPSEAIGTDGSSTTCGAGGSVSNSIVPSTTTNTFAGLFASATTSTTSQSRSLRDLIGVDPTFLCLAIGAPSLFPQTSASNSGTFAPPPAPHMSATALLQKATEAGATQSSSSFLKEFGLASSSSSPRPKQQQPHGRVAETSTDPWQYRNSNQQMEMERHQSHQRREMESSSQPWQHPRITQQMEMERHHQRSHQQREMESSSQPWQHPRSTQQMEMERHHQRSHQQREMESSSQPWQHPRSTQQMEMERHHQRNHRQRETESSSQQWHHHHHHPNDQMMGLESYRSNQQMEMDPSSQQRWAQHQRSNQQQQMEMMERHHLSNQQIRSTQQMERRAMVSGGGLGLGLAYESGNPGLPLPDLMTGPSPLLGPKPATLDFLGLGIGGTMGGSTASRGLPALMVGRELDMGPSAQVPPAAAAAPWEDAKRKTNGRTIL

SEQ ID NO: 16834 - protein, 362 aa, Zea mays
  VARIANT 311..362: note = Derived polymorphism lacks residues 311 to 362
  VARIANT 302..362: note = Derived polymorphism lacks residues 302 to 362
  VARIANT 205: note = Ancestral polymorphism is Y, Derived polymorphism is N
  VARIANT 202..362: note = Derived polymorphism lacks residues 202 to 362
  VARIANT 129..362: note = Derived polymorphism lacks residues 129 to 362
  VARIANT 128: note = Ancestral polymorphism is C, Derived polymorphism is Y
  VARIANT 75: note = Ancestral polymorphism is S, Derived polymorphism is F
  VARIANT 36: note = Ancestral polymorphism is A, Derived polymorphism is T
  VARIANT 35: note = Ancestral polymorphism is T, Derived polymorphism is M
  VARIANT 5..362: note = Derived polymorphism lacks residues 5 to 362
MVFYQFPLMDINKGPKNKPSILGTVSLNLADYALTAGETIEIILPLSIPGGAPERASSLHLTLSMVELRAFQETSDASQRSAATLPLSPSPSDSLPGGKYEVLVIKAGLRKVKILTDLVSTRRPKKTCQGGGEDKFCVNSDSVEYPCDTESLDDDLDDRVEEDEFGDSTIRKSFSYGYLQSVNYVGGLVYAHAKIDGEHEDWIYYSNRKTDVGFHVEKGSRGYGLANTMVSEFGDDNFVIENWELKEIISCDGRMKLSSQMFFASIDQRSERAAGETACTSLVAIIADWFQANQNIMPIQSQFDSLIREGSLEWRNLCENETYRKRFPDKHFDLETVLHTKIHPLTVSPSNLLFDLSYYDYG

SEQ ID NO: 16835 - protein, 498 aa, Zea mays
  VARIANT 40: note = Ancestral polymorphism is R, Derived polymorphism is S
  VARIANT 41: note = Ancestral polymorphism is R, Derived polymorphism is L
  VARIANT 63: note = Ancestral polymorphism is P, Derived polymorphism is A
  VARIANT 270: note = Ancestral polymorphism is R, Derived polymorphism is T
MHVAVKMMASSTEEELEMNKKKVCVVGAGVSGLVSARELRREGHDVTVMEQSGGVGGQWLYDPRTDASDPLGAAGVHSSVYASLRLTSPRDIMGFSDFPFFPRSNDDGDSRRYPGHAEFLRYIRDYCDTFGLMDAVRLNTKVLHVGRPLLDDDGVVTRWTVRYCSSGHGVSEHEAVAEEEFDAVVVASGHYSQPRLPAINGMDKWTRRQLHSHSYRVPDSFHAEVVVLVGFHQSGVDIALELCKVARDVHVVSVKSLEGLTPGVRKAVPRHHNLHLHLQIECLCEDGKVMFADGSCVVADSIIYCTGYDFSFPFLDTGGLVTVDDNRVGPLFEHTFPPALAPSLSFVGVPSQVQTPLFYEVQARWVAQALSGRRLLPPAEEMLRAAEEYHRAREKAGVPRRMSHAIFFDFDYCDEFGEKHVGLPRPPEWKKELMRAAVARLLQDTETFRDDYRDGDLVLESLRLEGWSSAPSPGTLNDKENGIAMHDMMHDRDGETLE

SEQ ID NO: 16836 - protein, 513 aa, Zea mays
  VARIANT 84..513: note = Derived polymorphism lacks residues 84 to 513
  VARIANT 88: note = Ancestral polymorphism is R, Derived polymorphism is C
MASAPLPAAIEPGKKGNVKFAFACAILASMTSILLGYDIGVMSGASLYIKKDLKISDVKLEILMGILNVYSLIGSFAAGRTSDWIGRRYTIVFAAVIFFAGAFLMGFAVNYWMLMFGRFVAGIGVGYALMIAPVYTAEVSPASARGFLTSFPEVFINFGILLGYVSNYAFSRLPLRLGWRVMLGIGAAPSVVLALMVLGMPESPRWLVMKGRLADAKVVLGKTSDTPEEAAERLADIKAAAGIPQELDGDVVAVPKKRDSEEARVWKELILSPTPAMRRILLSGIGIHFFQQASGIDAVVLYSPRVFKAAGITSDNQLLGTTCAVGVTKTLFILVATFLLDRVGRRPLLLSSVGGMIFSLVGLAAGLTVIGHYQDEKIPWAIGVAIASTMAYVAFFSIGLGPITWVYSSEVFPLHVRAMGCALGVASNRLTSGVISMTFISLSKAITIGGAFFLYAGVAVLAWVFFFTFLPETRGRTLEAMSKLFGATDDELKPQDGATKDKQKLELAATGTN

SEQ ID NO: 16837 - protein, 206 aa, Zea mays
  VARIANT 11: note = Ancestral polymorphism is V, Derived polymorphism is A
MESRRRAVPTVTAVAVATLLLTMMTSSGVGGDFAADRAECSEQLAGLATCLTYVQEQATATAPTPDCCAGLKAVLQSSRKCLCVLVKDRDDPNLGLKLNVDKALGLPAVCHAPANISDCPRLLDLPAGSKDAQVFEQYAKQQAAAAAQGGAPTSGRSSAAASTTAGAQKSGASAAGRWLGVGRVGGAGGGARAVAPLAVPFLLLLG

SEQ ID NO: 16838 - protein, 204 aa, Zea mays
  VARIANT 1: note = Ancestral polymorphism is M, Derived polymorphism is L
MSLQANDGGAVIETPASPLPQEDILGLRQELAVIEDEIHILAKQTIPRLRVDNEMEYRDIIQGGMKLEEHMHALKLIKEEVLVLSSEKMELEALCKELSVKVQSLYRELEQIQSENKQIPAIREGLHDIQEEISRARMAYEHEKRAKVELLEGSQAIESDFINIKIEAQRLRTELEKRRSRVFKHHAFGSYYKKIEHGIASSNW

SEQ ID NO: 16839 - protein, 552 aa, Zea mays
  VARIANT 393..552: note = Derived polymorphism lacks residues 393 to 552
  VARIANT 26..552: note = Derived polymorphism lacks residues 26 to 552
MCHVNLHFSSLHCTDQTQCFFVSSLWTCYCHIMWNDFFNDSEQTTSRRLADRKIARFEKNITKRGSVPETVKKANDYPVGPILLGFFVFVVVGSSSTSKNVLPNSNLHRTPRNGELIVVETAEIVSRPKARMLGKRNSRDRRSPDAVKPMRRPLNKYPFATAVLWSATPLFLGYDLAVVYNTVVRAQADLKLLACTVALSSSLGAVAAVGAQRLIGGRQAALLSGAVLCAGAIARGLATGSAAAFTAGVFVNGVGMGLALVAVPAYAAELGPSSARRALAAHPDGLVYLGCILGSVVYSMRLVRVPAHHACWLTVATGIAVPALLSAVVLFMPDAPRWRVSRDRESKARRMLSRTSATLEEAELRLVEIKVECGGLLQDGSDEPLAVSKRALWWREEIETLRELLVCPTEPLRRAVLTALVAKVFQQVSSIGSILQYVQRAFRDSSRGALVVFVFVMSYPMSLVLVELGWLLVTALARSCRLGRRVPTGGVTRRQEQLKWVRGLSATMLLSLMALVWIALGPAPWAGASSRGCLRWLRATVAVVKKSVISAI

SEQ ID NO: 16840 - protein, 428 aa, Zea mays
  VARIANT 324..428: note = Derived polymorphism lacks residues 324 to 428
  VARIANT 273: note = Ancestral polymorphism is H, Derived polymorphism is Y
  VARIANT 263: note = Ancestral polymorphism is A, Derived polymorphism is V
  VARIANT 255: note = Ancestral polymorphism is T, Derived polymorphism is I
  VARIANT 245..428: note = Derived polymorphism lacks residues 245 to 428
  VARIANT 114..428: note = Derived polymorphism lacks residues 114 to 428
  VARIANT 98..428: note = Derived polymorphism lacks residues 98 to 428
  VARIANT 90: note = Ancestral polymorphism is Q, Derived polymorphism is R
  VARIANT 82..428: note = Derived polymorphism lacks residues 82 to 428
  VARIANT 75: note = Ancestral polymorphism is G, Derived polymorphism is C
  VARIANT 71..428: note = Derived polymorphism lacks residues 71 to 428
  VARIANT 7: note = Ancestral polymorphism is R, Derived polymorphism is M
MDIEECRTRLQDKVRLLHPKNAEGIVDYMIANTPLENIRSYLLTATDNVLMNLFEGANRLQNILNLSEENEPLFGLFTPFDQIGPQKQHQFSSRNHSQVLQAPLYPIGPSGAFQNPYSKLTGFRDHFQSLSILDGDTPSHYKCASINVGGYPSNGKVQTKTCRFYLSIRKCKYGENCHFSLVCGYPEINDMRQVDHLGSLQMLEMEIDLLLLQPSSQVPVDHLEKKFLEIYTKLLEIDGFHTEDQRNRKTGYGLTDLFMQLNATRETERRGRYYVVLVKDAPKYVTHGFQPAVPLAGSDFNKICVTFKSESIFTHTDVQNYFSQYGTVSEERFSEERHMHGHVSFVDLETAKRIISESGPHFICGNEVRAKAYREKHELNQYGTVNEVIIPIMQKRPDFGFILSERGPHFICGNEVHVKAYREKHELE

SEQ ID NO: 16841 - protein, 324 aa, Zea mays
  VARIANT 134: note = Ancestral polymorphism is L, Derived polymorphism is V
MAVDRVDGEEAFEEVDPTGRFGRYADVLGLGSVKKVYRGFDQEEGIEVAWNRVRLRSLADRDPGMVERLHAEVRLLRSLSHDHIIGFHKVWLDRDAGVLNFITEVCTSGSLREYRHRHRHVSVKALKKWARQILEGLNHLHTHDPCIIHRDLNCSNVFINGNNGQVKIGDLGLAAIVDKTHVAHTILGTPEFMAPELYTETYTESVDIYSYGMCVLEMVTREVPYAECGSVVQIFHNVTRGVPPAALKRLKDAELRGFIERCIGQPRNRPSAADLLQDPFFNGVRGGDDDDDAAALADASSVVAAAPVPRPRSYVDDLAGLRLD

SEQ ID NO: 16842 - protein, 465 aa, Zea mays
  VARIANT 110: note = Ancestral polymorphism is D, Derived polymorphism is Y
  VARIANT 183: note = Ancestral polymorphism is P, Derived polymorphism is S
  VARIANT 189: note = Ancestral polymorphism is A, Derived polymorphism is T
  VARIANT 194: note = Ancestral polymorphism is R, Derived polymorphism is C
  VARIANT 195: note = Ancestral polymorphism is L, Derived polymorphism is V
  VARIANT 201: note = Ancestral polymorphism is S, Derived polymorphism is P
  VARIANT 206: note = Ancestral polymorphism is L, Derived polymorphism is Q
  VARIANT 218: note = Ancestral polymorphism is P, Derived polymorphism is S
MVSLAGSQIPSPSPGQSPCAAARPQRRQGHSMRTIRSALLQPDSSPGSPSPRDGGADAGDSDIENLTDSVIDFHLRELAATAGPAHPAAVAKSSSAINAAATELLDLSRDFSDYSSFNSDISGELERLAAAAGAAPRSDAPDAAAVDLNDLESMDLSADAAPLDRVEPFVLACVRALGPDAGPDARRAAAARIRLLAKHRSDIRELIGVSGAIPALVPLLRSTDPVAQESAVTALLNLSLEERNRSAITAAGAIKPLVYALRTGTAPAKQNAACALLSLSGIEENRATIGACGAIPPLVALLSAGSTRGKKDALTTLYRLCSARRNKERAVSAGAIVPLVHLIGERGSGTCEKAMVVLGSLAGIAEGREAVVEAGGIPALVEAIEDGPAKEKEFAVVALLQMCSDSPHNRALLVREGAIPPLVALSQSGSARAKHKAETLLGYLREQRQGVACRAGAVAATSLAR

SEQ ID NO: 16843 - protein, 128 aa, Zea mays
  VARIANT 75: note = Ancestral polymorphism is Y, Derived polymorphism is C
MSYYGQQPPVGVPPQQGYPGKDGYPPAGYPPAGYPPPAQGYPPQGYPQQGYPPQYAQPPPQQQQSSGPSFMEGWYVLHPPRSLHSSWLPSAAAASWTPASDGTIRAGSNTAASEATSLRKSWNWAVLF

SEQ ID NO: 16844 - protein, 611 aa, Zea mays
  VARIANT 424: note = Ancestral polymorphism is A, Derived polymorphism is S
  VARIANT 36: note = Ancestral polymorphism is V, Derived polymorphism is A
MATSVVVARLAGEASQPKVLPSANGVSSESYWRVAATRRWQGRGVRCCAAGFRGGGADADAVIASEDFVGFFREAWPYIRGHRGSTFVVVISSEVVCGPHFYRVLQDISLLHGLGIKFVLVPGTHIQIDKLLSERGKKAKYVGQYRITDEDARKAAMDAAGRIRLTIEAKLSPGPPMLNLRRHGVIGRWHGLVDSIASGNFLGAKRRGVVNGIDYGFTGEVTKIDVSRIRERLDSDSIVVISNMGFSSSGDVLNCNTYEVATACALALEADKLICVVDGQVFDDHGRAIQYMSIEEADLLIRKRARQSDIAASYVKVVDEEGINSLHKGDDRPSLSPKAYINGYAASFRNGLGFNNGNGIYSGEQGFAIGGEERLSRSNADPFKNGLGFNNGNGIYSGEQGFAIGGEERLSRSNGYLSELVAAAYVCHGGVQRVHIIDGCVDGSLLLELFTRDGAGTMIARDVYEGTRMATAEDLPGIRKIIRPLEDSGVLVRRTDAQLLEALESFYVVERDGSIIACAALFPFPEEQSGEVAAIAVSEECRGRGQGDKLLDYVEKMALSLGLKKLFLLTTRTADWFVRRGFSECSIGSIPEQRRKRINLSRGSKYYIKQL

SEQ ID NO: 16845 - protein, 327 aa, Zea mays
  VARIANT 6: note = Ancestral polymorphism is P, Derived polymorphism is T
MAMVQPADTAVKANEILARFRPIAPKPTLAAAAAAAAAPVAQAAAEGVVAANRVLCHLQSRPCRARKRGRPTVVPVSPKSGAQPPAKRRRASTPYPPLRCAAATTGAHVSAVVPGSARLPPASAGVEDIAKAAAAAATEEGRDVPVERDLLRKLLEPRVISPRAVRPVWSAIHVGCIHRTDDAACTDAAVSKTAVQVEAELEVDALPAVVSDSGNRVRLVNDAYKEMVGQPECPWLDAVAATSRRISGEVALVVADRSSLPDSYGAFTCTAKIEWEDDGKVTSIAAPCDVSRLQCESRDYLFAWRFRTAAADADASVGHSSEEISES

SEQ ID NO: 16846 - protein, 217 aa, Zea mays
  VARIANT 164..217: note = Derived polymorphism lacks residues 164 to 217
  VARIANT 149..217: note = Derived polymorphism lacks residues 149 to 217
  VARIANT 130..217: note = Derived polymorphism lacks residues 130 to 217
  VARIANT 40: note = Ancestral polymorphism is E, Derived polymorphism is K
MAAPLRRSLPSLGRALLTPAPARMLSAEASDALVEIKPGEIGMVSGIPEEHLRRKVTCCILLSRVFSCQMVDGVDDCGRLQRDTFWSQYGHTGSWDWIVVLDVIGEWASLCLLLQVFVMKMGSFFFTTGQLILVSCQVLIYSPARTASQQGSGKVGRWKINFLSTQKWENPLMGWTSTGDPYANVGEAGLTFDSAESAKAFAEKHGWNYVVGLLFSM

SEQ ID NO: 16847 - protein, 334 aa, Zea mays
  VARIANT 49: note = Ancestral polymorphism is A, Derived polymorphism is S
  VARIANT 22: note = Ancestral polymorphism is S, Derived polymorphism is L
MSAAAALRPIEPLPLPTGLSLSPRLKLLLTFFRADLTVRPLDEWQLKSALLAFLRDPPLPLPLLPDSDLSVSRLPDLQKRRREEPVASGVLHVRDLSFLRPRKGDGEAEEMTGEQEKYFEWRSTLVQKLEGIELNLEGVKFRMTVEIPSSDDFRTMKKSWEDFYSSELLNTRNPVRKIAKRPDTIVVRGVPSRWFAETRVSSKPSTLVTHTVFSALGKIRNLNISNDDEIEAKGHGVNKGLISGLNCKVQVQFESYNDFQDAMKALCGRSLEKEGSRLKVDYDVTWDCEGFFRISQYEPVRNNLEERDSLASVNSQRKHHTSRIESDYRKRFRE

SEQ ID NO: 16848 - protein, 396 aa, Zea mays
  VARIANT 180: note = Ancestral polymorphism is T, Derived polymorphism is I
  VARIANT 29: note = Ancestral polymorphism is P, Derived polymorphism is A
MATAATATAGSRAAVLLLLSLALALALRPSDAGAGGDCHFPAVFNFGDSNSDTGGLSSLFGAAPPPNGRTFFGMPAGRYCDGRLVIDFIAESLGLTHLSAYLNSIGSNFTQGANFATAGSSIRRQNTSLFLSGFSPISLDVQFWEFEQFINRSQLVYNNKGGIYREILPRAEYFSQALYTFDIGQNDITSSYFVNNTTEEVEAIIPDLMERLTSIIQSVYSRGGRYFWIHNTGPLGCLPYALLHRPDLAIPADGTGCSVTYNKVAQLFNLRLKETVASLRKTHPDAAFTYVDVYTAKYKLISQANKLGFDDPLLTCCGYGGGRYNLDLSVGCGGKKQVNGTSVVVGKSCENPSKRVSWDGVHFTEAANKFVFDQIVAGALSDPPVALRQACHSRGQ

SEQ ID NO: 16849 - protein, 63 aa, Zea mays
  VARIANT 38: note = Ancestral polymorphism is S, Derived polymorphism is F
MPYFFTAHSHKVLRFGYEILSKTYKMKCLHCSSGVQDSEHSPSTVVIISTRDCRFYIFIVLML

SEQ ID NO: 16850 - protein, 635 aa, Zea mays
  VARIANT 246..635: note = Derived polymorphism lacks residues 246 to 635
MAAPSASAPLLRSHPHHGSLFPSSPRHRPAAASLSGFPPLRPASARRLPYTAVRSSSTASPSAPVEDAPAAAAPTGDAEEERVVLPTNESSERLLRIRHTCAHVMAMAVQKLFPNSKVTIGPWIENGFYYDFDMEPLTDKDLKKIKKEMDRIIRQNLPLVREEVSREEAQKRIEALNEPYKLEILESIKEEPITIYHIGEEWWDLCAGPHVESTGKIDRKAVELESVAGAYWREHGESEQYLSPQYWNDSLCLDDAGGGLVFWHPKGAIIRHILEDSWKQIHLQHGYDLLYTPHVAKADLWKISGHIDFYKDNMYNQMDVEDEMYQLRPMNCPYHILVYKRKLHSYRDFPIRVAELGTVYRYELSGSLHGLFRVRGFTQDDAHIFCLEDQIKDEIRGVLDLTEQILGQFGFRYYEINLSTRPEKSVGTDDIWEKATIALKNALDDKGWEYKVDEGGGAFYGPKIDLKIEDALGRKWQCSTVQVDFNLPERFDITYVDSNSEKKRPIMIHRAILGSLERFFGVLIEHYAGDFPLWLAPTQTRILPVTDNELQYCNEVASELKSRGLRVEVCHGERLPKLIRNAETQKVPLMAVVGPKEVQARTLTIRSRHNGEIGTMPVDEFITRLQLAVANKSSL

SEQ ID NO: 16851 - protein, 183 aa, Zea mays
  VARIANT 117: note = Ancestral polymorphism is G, Derived polymorphism is S
  VARIANT 7: note = Ancestral polymorphism is L, Derived polymorphism is H
MLQPQLLRPPRLSLADPVSTTISCSRGGGGRRRRPKPKTKTVAFPPLPLRRLVSTSLRRMLPRPRPLIVLPGGGGGGWLRLGRRRKTRAEEVAAVALALALGGDRFVALAEAWNASGLGQVLDVWAAVLGTRRSRRGSGLRRLAAFLLGVVVCTLVCHMRGASFFEGIQKSASGRKLMQILLH

SEQ ID NO: 16852 - protein, 482 aa, Zea mays
  VARIANT 286..482: note = Derived polymorphism lacks residues 286 to 482
MASSSKKVCVVGAGVSGLVSARELRREGHDVTVMEQSGGIGGQWLYDPRTDADDALGAHSSIYASLRLNTPRESTGFSDFPFAYPSNDDGAGDGRRYPGHAEFLRYIRRFCDAFGLMDAVRLNTKVLHVAPLAPRSHGDGVTRWTVRCSSRLGDCQDEAVTTEETFDAVVVAVGQFTQPRLPAINGMDKWSRRQLHSRSYRVPDSFENQVVVVVGCQASGVDIALELRTVARDVHISVKSVDDDVAVSPGMRKAVSRHHNLHLHVQASFCCGLFVDIYNSPEDRQECMCLCRSIACARTGMWCSPMAPRWSPTPSSTAPGERATSLYQMYVYSFPFLDTGGLVTVDDSCVGPLFEHTFPPALAPALSFVGVPKKVVVPRFFEAQARWVAQVLSGRRSLPPEAEMLRSAEENNRARGKHLAHDILDDYDYCDDFGEKHCGFPRLEGWKKELRWSSLARRHDSTESFRDVYHDDSNLIREGFQA

SEQ ID NO: 16853 - protein, 76 aa, Zea mays
  VARIANT 47: note = Ancestral polymorphism is A, Derived polymorphism is T
MRFVVAAVAKPTAQHQRLLAVPVRDTRWLLVSGSVRVYTSKTRGFTTKCQIGLQLYQLFHLAKNQSTSTPSCSWLL

SEQ ID NO: 16854 - protein, 271 aa, Zea mays
  VARIANT 94: note = Ancestral polymorphism is G, Derived polymorphism is A
MAMAQQASLPCSTATTWRELTNTSWRDDDYRRMVMAYLIEAVYLLELERQERRDAAAVAQQWWKPFHFRLAHELVDDRDGSVFGAVFERDHQGGRPGPGPSPSGAPSAVIAFRGTLLRAPTIRRDVEDELRLLARNSLRGSARLARAAQALRATIDRFGSENVCVCGHSLGAGFARQVVRTLVASSSSSPRQPRQQAAAFAAATLESHLFNAPYLSLPMGVRSVVRTADCLLKALRSGVATVGKWHGKALRNVAYASCVLGYTRLESTRKL

SEQ ID NO: 16855 - protein, 592 aa, Zea mays
  VARIANT 337: note = Ancestral polymorphism is I, Derived polymorphism is M
MDTLFRLVSLQASEQQQQQSASYNSRSTTSSGSRSSSHQTNASYNYYYHSNSSGGGGGQYYYGQQHPHQHQHQQYYLEPYQQEECGNTHHLYMDEDFSSSSSSRQHFHSHGAVVQPPTSSTATPTAPTPSLSTSSTAAGAAHALFEAADLSFPPDLNLDFSSPASSSGGGAASSAAVGGGGGGRWASQLLLECARAVAGRDSQRVQQLMWMLNELASPYGDVEQKLASYFLQGLFARLTASGPRTLRTLAAASDRNTSFDSTRRTALRFQELSPWSSFGHVAANGAILESFLEAAAASPEPQRLHILDLSNTFCTQWPTLLEALATRSADDTPHLSITTVVSSAPSAPTAAVQRVMREIGQRMEKFARLMGVPFSFRAVHHAGDLAGLDLDALDLRDGGATTALAINCVNSLRGVVPGGARRRDAFAASLRRLDPRVVTVVEEEADLVAFDPGAPEESGDTEAAFLKVFGEGLRFFSAYMDSLEESFPKTSNERLALERGAGRAIVDLVSCPASESMERRETAASWARRMRSSGFSPVAFSEDVADDVRSLLRRYREGWSMRDAGLDDSAAGAGVFLAWKEQPLVWASAWRP

SEQ ID NO: 16856 - protein, 197 aa, Zea mays
  VARIANT 144: note = Ancestral polymorphism is T, Derived polymorphism is R
  VARIANT 112: note = Ancestral polymorphism is E, Derived polymorphism is K
MSKAQGSNDHQHEHEDPEGSKPLEEYTIPKGTITRIMRQVLPQDSRVTGGAKETMDQCIVQFSTALVRAATQECRRDRRLTITADDLIVGFANLGLADYVQPMSVYLRLYRETVNNQQQAVAPPSPTVQRGTTTAVPPPPPNLTLQLGLPSVPDVTELARDTDVYALWHGAAPAAGSTSASSVAPMPPPAADGDEDE

SEQ ID NO: 16857 - protein, 362 aa, Zea mays
  VARIANT 3..362: note = Derived polymorphism lacks residues 3 to 362
  VARIANT 52: note = Ancestral polymorphism is L, Derived polymorphism is H
  VARIANT 95: note = Ancestral polymorphism is P, Derived polymorphism is L
  VARIANT 100: note = Ancestral polymorphism is R, Derived polymorphism is H
  VARIANT 167: note = Ancestral polymorphism is A, Derived polymorphism is D
  VARIANT 168: note = Ancestral polymorphism is A, Derived polymorphism is S
  VARIANT 170: note = Ancestral polymorphism is A, Derived polymorphism is T
  VARIANT 215: note = Ancestral polymorphism is A, Derived polymorphism is G
  VARIANT 216: note = Ancestral polymorphism is L, Derived polymorphism is V
  VARIANT 226: note = Ancestral polymorphism is R, Derived polymorphism is C
  VARIANT 231: note = Ancestral polymorphism is G, Derived polymorphism is D
  VARIANT 255: note = Ancestral polymorphism is L, Derived polymorphism is F
  VARIANT 284: note = Ancestral polymorphism is G, Derived polymorphism is D
  VARIANT 287: note = Ancestral polymorphism is R, Derived polymorphism is H
MESDASTSPRRRSTSCYSDSGDSSCSEPFSECGSDDLSFTPAAAAGIHRLLLSCAAEASEDAISSLVAELECPSQSLDSLRRAAMELRLLAKHNPDNRVRIAAAGGVRPLVRLLSHADPLLQEHGVTALLNLSICDENKATIVEAGAIRPLVHALKSAASPAARENAACALLRLSQLDGASAAAIGRAGAIPLLVSLLETGGARGKKDAATALYALCSGARENRQRAVETGAVRPLLDLMADPESGMVDKAAYVLHSLVSSGEGRAAAVEEGGIPVLVEMVEVGTSRQKEIATLSLLQICEDNAVYRTMVAREGAIPPLVALSQSSSARPKLKTKAESLIEMLRQPRSPSLRTRPAAVVAAE

SEQ ID NO: 16858 - protein, 453 aa, Zea mays
  VARIANT 366: note = Ancestral polymorphism is G, Derived polymorphism is D
  VARIANT 365: note = Ancestral polymorphism is V, Derived polymorphism is A
  VARIANT 286..453: note = Derived polymorphism lacks residues 286 to 453
  VARIANT 262: note = Ancestral polymorphism is T, Derived polymorphism is M
MEPVVLNRERAATDRLKGMPMLFDDYRDENFYGLPRKYSIVARVEVKFPIEPRFRDRQHFVLSDINGAKIEAITYMYETVKHFDNLLHEKHVYKMHNVKFSLHPGEFNFRHLNGPMELCLNQQAIVEPYTFLIQMAPFPKQIFLNLADIAELPNRTLVDIMAIVVHMDTIHRTMWGPFRKIVIMDARELLHRKERQDETCSALTATLGPSISCEVVPAEGFQQGFSSLPPEIAEELFRAELADTDSEVCSSPLSAELRKVRTTATVNFDNSLSPAHTLVQIVCADQKGLIYDILRTMKDCNIQIFYGRFRSDKKGSASKGSSGCREVDLFVKQVDGKKVTDPAKQDALRSRLRSETLHSLRVMVVGRGPDTELLVANRRSRRVGLRNSKRKLRVITRLLCNFSMSLKWRGRRYLWQGLGQRRKPKRPGSMHAPLRRPGTNGSVKESELLSKEN

SEQ ID NO: 16859 - protein, 499 aa, Zea mays
  VARIANT 169: note = Ancestral polymorphism is S, Derived polymorphism is F
  VARIANT 294: note = Ancestral polymorphism is L, Derived polymorphism is P
MARSAAVLEPRDMAVRPCPLATAGGRRPMPGKKSKARGGGDDLIDSSDADSVGSSSTALSDLSISYATEHVNSQEFVLDKYIDALYEKRSGGHPYRHTLLGFSSISFWLFAVQALMAKGSTREAALVKLVDAFESFMLHGLVENRYATLLSQFNNSVKKGSTKEFFLASHAIGLLAITLGAGNSSHEIMEESHPQLCRVLQAWSDASKMIPALDCLAVITFVGATDLAETESSLKAMWDVIHPKSGSNVGTVRKPRPPVLAAAVSAWTFLLTTVGSWRINTDSWKESVLSVFLLLPIAFLSTLLEADDRAVRMAAGEALVLCFELNLLDVSSCEDGDVNTGGTGGSKNKLFLDMQALKAKISGLASNLSAEAGGKGADKKNLTDQRDLFQRILDFVKYGDCPEESIKIAGKRDVLRVSSWSELIQLNFLKRFLGKGFLKHVQENGLLQDIFDIKVDKTETLSSTDKKIFRSEEEKERALRLNKERRLAQVRKNAVMLDE

SEQ ID NO: 16860 - protein, 258 aa, Zea mays
  VARIANT 200: note = Ancestral polymorphism is P, Derived polymorphism is L
  VARIANT 199: note = Ancestral polymorphism is Q, Derived polymorphism is L
  VARIANT 196: note = Ancestral polymorphism is L, Derived polymorphism is F
MATGSAWSRESRSAQRSPVQKLPRVKFVQARGIGLARWAGRLPCSLPDGLKSAFLSRTYGWTTHTIRPIPQLVQKGPATDVAGRPVSTATNASNPWWLTFEKAIASAGGELSKPEILSSTTDSRFARQLGIPALGFSPMTSTPILLHDHNEFLEDRVFLRGIQVFETTLKDRLTTIQSHQRPPPPRPRRLMMMIHLQLQPVALDQVILCCPHGPLMNLLRLTVAYFPIPVCVGSTDEQDMKAALFQKQSFGDVHGAFA

SEQ ID NO: 16861 - protein, 260 aa, Zea mays
  VARIANT 231: note = Ancestral polymorphism is V, Derived polymorphism is D
  VARIANT 229: note = Ancestral polymorphism is L, Derived polymorphism is I
  VARIANT 218: note = Ancestral polymorphism is A, Derived polymorphism is T
  VARIANT 217: note = Ancestral polymorphism is S, Derived polymorphism is F
  VARIANT 213: note = Ancestral polymorphism is R, Derived polymorphism is H
  VARIANT 204: note = Ancestral polymorphism is A, Derived polymorphism is V
  VARIANT 199: note = Ancestral polymorphism is T, Derived polymorphism is I
  VARIANT 161: note = Ancestral polymorphism is G, Derived polymorphism is D
  VARIANT 160: note = Ancestral polymorphism is M, Derived polymorphism is I
  VARIANT 145: note = Ancestral polymorphism is R, Derived polymorphism is H
  VARIANT 132: note = Ancestral polymorphism is A, Derived polymorphism is S
  VARIANT 120: note = Ancestral polymorphism is G, Derived polymorphism is D
  VARIANT 117: note = Ancestral polymorphism is G, Derived polymorphism is R
  VARIANT 115: note = Ancestral polymorphism is A, Derived polymorphism is S
  VARIANT 114: note = Ancestral polymorphism is G, Derived polymorphism is D
  VARIANT 47: note = Ancestral polymorphism is N, Derived polymorphism is K
  VARIANT 45..260: note = Derived polymorphism lacks residues 45 to 260
  VARIANT 42: note = Ancestral polymorphism is R, Derived polymorphism is K
  VARIANT 39: note = Ancestral polymorphism is A, Derived polymorphism is V
  VARIANT 38: note = Ancestral polymorphism is G, Derived polymorphism is S
  VARIANT 35: note = Ancestral polymorphism is R, Derived polymorphism is S
  VARIANT 19: note = Ancestral polymorphism is L, Derived polymorphism is Q
MGYVTNSAIIPCLIGKGGLIISDSLNHNSIVNGARGSGATVRVFQHNSPAHLEEVLREQIASGQPRTHRPWKRIIVIVEGIYSMEGELCKLPEIIVVSKKYKAYTYLDEAHSIGAVGQSGRGVCELLGVDLADVDIMMGAQKLARIRENSNFFRSELKKMGFEVLGDNDSPVMPIMLYNPAKIPAFSRECLRQKVVVVTVAFPATPLLLARARICISASHTREDLIKALDVISRVGDLVGIKYFPAEPPKIAGADHDKLE

SEQ ID NO: 16862 - protein, 173 aa, Zea mays
  VARIANT 54: note = Ancestral polymorphism is G, Derived polymorphism is D
  VARIANT 33: note = Ancestral polymorphism is A, Derived polymorphism is V
  VARIANT 17..173: note = Derived polymorphism lacks residues 17 to 173
  VARIANT 5: note = Ancestral polymorphism is P, Derived polymorphism is L
MDGLPLDGFDYASILGQCCELPMGFVQLLVGVAGPLLLDREPFREVGNAFLLSGGSEGIVADGADPAGPLLLDREPFREVGNAFLLSGGSEGIVADGADPAGPLLLDREPFREVGNAFLLSGGSEGIVADGADPAAPASSFIKFVNITFWRTPEAAKSHAKMAHSLENPRSCV

SEQ ID NO: 16863 - protein, 295 aa, Zea mays
  VARIANT 122: note = Ancestral polymorphism is G, Derived polymorphism is D
  VARIANT 10: note = Ancestral polymorphism is I, Derived polymorphism is M
MPSSALPMEIDMMAQFLGADDDHCFTYDYEHDVDESMEAIAALLLPTLDTDSNSSSSCFNDDVPPQCWPQPGHSSSVTTLLGPAESFEFPVMDLSFPTSDFDPQSHCATPYLTEDLGSLQHGKHSPVMEEEAADVEPAAKKRKASATATATAKGSKKSRKASKKDCIVDDDDVYVDPQSSGSCTSEEGNFEGNTYSSAKKTCTRASRGGATDPQSLYARKRRERINERLRILQNLVPNGTKVDISTMLEEAAQYVKFLQLQIKLLSSDDMWMYAPIAYNGINISNVDLNIPALQK

SEQ ID NO: 16864 - protein, 78 aa, Zea mays
  VARIANT 32: note = Ancestral polymorphism is A, Derived polymorphism is S
  VARIANT 44: note = Ancestral polymorphism is T, Derived polymorphism is I
MAVVLTPEASMLAAVPESLLANAVSKRSKRRATLSTGDSIERATKLKAARNLDKSFTEVSSDTNVIDRALSKEEKEFY

SEQ ID NO: 16865 - protein, 456 aa, Zea mays
  VARIANT 192: note = Ancestral polymorphism is T, Derived polymorphism is M
MMQFTHTAPPPPPLHPNGHAGGLGLGLFLDVGAPRAARPWPGSFPTPASKISLGNLNSTSCMEQLLVHCANAIEANDATLTQQILWVLNNIAPPDGDSNQRLTAAFLCALVARASRTGACKAVTAAVAAAVESAALHVHRFTAVELASFVDLTPWHRFGYTAANAAILEAVEGFPAVHVVELGTTHCMQIPTLIDMLASRPEGPPILRLTVADVAPCAPPPALDMSYEELGAKLTNFARSRNMSMDFRVVPTTPADAFTSLVDQLRVQQLVMDGTEALVLNFHMLLHTVPDETAGSVSLTHPVSLRTMLLKSLRTLDPNLVVVVEEDADFTADDVVGRLRAAFNFLWIPYDAVDTFLPKGSEQRRWYEAEIGWKVENVLAQEGVDRVERQEDRGRWGQRMRSAGFRAVSFGEEAAGEVKAMLNEHAAGWGMKREDDDLVLTWKGHNVVFASAWAPS

SEQ ID NO: 16866 - protein, 438 aa, Zea mays
  VARIANT 44: note = Ancestral polymorphism is D, Derived polymorphism is N
MASAAAATQVGTYFLRNYYNLLQQTPDVVHQFYSEASTMVRVDDLTGTTAAANNMMDIHSLIMSLNFTQIEIKTANFVNSWGDGVLVMVSGLVQTKEYSHQRKFIQMFFLAPQEKGYFVLNDYFHFVDQEHVQPAPVIAQEDYESNLAPNTVVETAPEYVHEEEAQQIAPEVHDVVENYTYSEPQQQVVSDNWGEEPLPEEPPSFSNEMAVAPEEPVQAPPVPLPHVDEPVCEPVKKTYASILKTAKAPAFPVAQQVPVSKTSHPTTESNQTQHSVMASSMGTEKPRSDVFGEGASHDDEESKSVYVGNVPSSVSEADLENEFKKFGRLIPDGVAIRSRKETGGYYAFVEFEELSGVHNALKASPIEINGRQIYVEERKPNSGIRGGRRGGRGRFSGGGRGYSRGGGDEYNSNRGRSNGYGRAPHQERGILGSHTPRN

SEQ ID NO: 16867 - protein, 610 aa, Zea mays
  VARIANT 269..610: note = Derived polymorphism lacks residues 269 to 610
MESCKKVAASLKSCEPWGNRASWTNAVGPGWKLSFAVEPWTKGFSASCAAPYSAGATEHQLSLDEKVDNSTVASGFDGKWRQHAADKRLLREQKNALAVAALCSLSLGPPVHKSTTVSKLAVEELDIGHAFKERQARKQRSWSRLNVSELSGPILNENNPDARCLCWMLLVLVPPGMESQTNSFVSKWLLRKLMGYGTGYIGLVVSSAGLSIWTEWISFPNACCLSVVRASDQQVIDNDIWSCFGQYDMAAVGPSFLYLAPALAIINSQEFFGINDNVDKSSGDELHLLLLISAFDGTKDIMEALSNKHTNLANELENSEEVPFPGHLTSKSNVCSFRVVLLELMIGRRSMDKSRSAGLPPEVSFMLDLWYEETLLRYYAPALGFLMFAVGVNSSAKDLIETIKRPDAIAAGYIRQFVKLVTVDDPFITTDYMVSGGSTGSWPGSPSRNVGKIDEASELRRTVSDIKHNVQTQLSENAKTNKRVIGIHKELQKLHREAIQNTINSVTMVATLIASIAFVVIFNLPGQYFQDVNSGGDIDCEKGIAVDRLVGSQDLRSKDDFLTRALEHILILKTKGIIDEKKKDDEDDDEESEAKNRRVRSSTAQASDSD

SEQ ID NO: 16868 - protein, 198 aa, Zea mays
  VARIANT 7: note = Ancestral polymorphism is L, Derived polymorphism is R
  VARIANT 19: note = Ancestral polymorphism is C, Derived polymorphism is S
  VARIANT 20: note = Ancestral polymorphism is Q, Derived polymorphism is E
  VARIANT 40: note = Ancestral polymorphism is P, Derived polymorphism is Q
MDQDDYLSLCLAAALVAASQQAAGDAPPLRARAAASELRPLHFRCPICGKAFASYQALGGHKASHRKPAAAAAAYDGKAPSSPSSSGQHQKGAVAAGIGGASAGGRHVCTVCHRYFATGQALGGHKRFHYLHGPSVPASSLPPSTAGAAAGVGWLDLNLTPLAPDVSFAGVRRRRGEDDEVQSPLPLPAKKHRASTSA

SEQ ID NO: 16869 - protein, 557 aa, Zea mays
  VARIANT 366: note = Ancestral polymorphism is G, Derived polymorphism is D
MDKERKQGFFAALKEEVVRGLSPSRSRGKSPAPPRSASPARMLIPRRRKAPAAPPPPPPEKVLEQYLGEQLVARSGSLRPGGEALAPLIEGPDAERLAAGDPDAEDSGRREGFGHWVRGHLTRTPSMASSAAGGGGGPGGSSGSFRRSDLRLLLGVMGAPLAPIPSKTAEPLPLLSIKGTPIESSSAQYILHQYTAASGGYKLLQSVRNAYAMGKVRMVASEFETATRVVKNRGPSGRGAAAVEQGGFVLWQMAPDMWYVELAVGGSKVHAGSNGRLVWRHTPWLGAHAAKGPVRPLRRVLQVPAVLPTPRLIPSPPTRANHLTISASFLSVWHWHWQLAMQGLDPLTTAGLFAEARCVGEKKVNGEDCFILKLSADPQTLKLRSEGPAEIIRHVLFGYFSQRTGLMVQMEDSHLTRIQPHAGGDAVYWETTISSALEDYRAVEGVMVAHAGRSAVTLFRFGEAAMSHTKTRMEEAWSIEEVAFNVPGLSVDCFIPPADIRSGSVGEACELPSQPHGERARTGAAVHPSRVAAVERAGTAAGAGGRGEKKVMWRVQV

SEQ ID NO: 16870 - protein, 623 aa, Zea mays
  VARIANT 251: note = Ancestral polymorphism is S, Derived polymorphism is I
MSTEATLNNSGGSESALLLLEQLAEVFGKLKTHTETFLHLQNGIKWEDIEGHFLSLDESYRSKFDELVEKEKALEEKKAEACRLIAEKEAKVSTKEHASLNQLQELRDAAVSSLAEVRQKYKVELAEILEASGSKDKKVSTSINDNNASRASEENTPASGSGEASEALPVETKPRPVLKQLCEQMDTKGLLKFLSENCRKLASFRDELSVALKCATDPARFVLNSLEGFFPPDQTNSPGSKHNALEVQRKSCILLMEAIAPALGMKEPGGDDPWSSEIKEQAKEIAEEWKSKLAEIDLDASNGYSLEAQAFLQLLTTFNVDSVLDEDELCKIVVAVSRRKQTAVSCRSLGLNEKVPGIIEELVKRHRQIDAVHFIQAFGLSETFPPAPLLKTYVEEQKDTIENNGDATAISLTDDPKSRELIALRAVIKCIEEHKLQKECSLGPLQKRVSELKPKGEKRPSSDAGRTYAKKPRGPGISFPRRPAGSVGSAARRPPFPGYTWQRAPAPMPSRGPAPVPSRAPLPAPLPDRYGAADRYHYTPPAPAYDSGAFSSYSEPFSAPKPFQYTPGSVAASYNSSPYKVAYGGPGAPVRSTYPGYASASGPAASSSYANYMGSVYRPPQQP

SEQ ID NO: 16871 - protein, 178 aa, Zea mays
  VARIANT 75: note = Ancestral polymorphism is G, Derived polymorphism is E
  VARIANT 76: note = Ancestral polymorphism is H, Derived polymorphism is Q
  VARIANT 77..178: note = Derived polymorphism lacks residues 77 to 178
  VARIANT 96: note = Ancestral polymorphism is M, Derived polymorphism is I
MERVPGVEEQKSADQVNQAGLADESTTVPWLKLGLDAPKSEEVKPQEAKPVATPHRTFSCNYCMRKFFSSQALGGHQNAHKRERCAARRTYRLQMMMGLPPSASFLQPLRVNSHSTILKGHGERAAVAVARFDGGQMSGWMPFAVEEPGGLVWPGSFTASSDESKKQMEKNLDLTLRL

SEQ ID NO: 16872 - protein, 136 aa, Zea mays
  VARIANT 118..136: note = Derived polymorphism lacks residues 118 to 136
  VARIANT 116: note = Ancestral polymorphism is V, Derived polymorphism is M
  VARIANT 69: note = Ancestral polymorphism is M, Derived polymorphism is L
  VARIANT 57: note = Ancestral polymorphism is T, Derived polymorphism is I
  VARIANT 49: note = Ancestral polymorphism is D, Derived polymorphism is H
MPAATSVSLAVADAVWAEIRSAGRASDEHLSILETLFGKNMLRACKIVDERGVRRVTGAPSGRSVFLVMGESKRKEEYLCFPEHLCTCYSFFYDVVGRGEQLSCKHQLAARLAEAVGEHQEVEVKDEELANMLVIL

SEQ ID NO: 16873 - protein, 86 aa, Zea mays
  VARIANT 66: note = Ancestral polymorphism is E, Derived polymorphism is K
  VARIANT 59..86: note = Derived polymorphism lacks residues 59 to 86
  VARIANT 58..86: note = Derived polymorphism lacks residues 58 to 86
MGSQRRLLLLLALLLLTLVAGEGDGALSGAGSTATDDGANATDASPPAGAPLDVRARKWWRFPATEGLVTGSERRVPNSSDPLHNR

SEQ ID NO: 16874 - protein, 88 aa, Zea mays
  VARIANT 65: note = Ancestral polymorphism is T, Derived polymorphism is I
  VARIANT 64..88: note = Derived polymorphism lacks residues 64 to 88
  VARIANT 57: note = Ancestral polymorphism is A, Derived polymorphism is T
  VARIANT 43: note = Ancestral polymorphism is R, Derived polymorphism is H
  VARIANT 39: note = Ancestral polymorphism is V, Derived polymorphism is E
  VARIANT 35: note = Ancestral polymorphism is A, Derived polymorphism is V
  VARIANT 31: note = Ancestral polymorphism is G, Derived polymorphism is S
  VARIANT 30: note = Ancestral polymorphism is M, Derived polymorphism is I
  VARIANT 27: note = Ancestral polymorphism is P, Derived polymorphism is R
  VARIANT 25: note = Ancestral polymorphism is P, Derived polymorphism is S
  VARIANT 22: note = Ancestral polymorphism is S, Derived polymorphism is L
MAMIMPSTTCSTSSPSQSRSLSSKPPPFTMGFLDALYHVVMRRNAVYVTFVVIDASAGEQLLGQTRSQILDLGMGSFGLDWNRHASAL

SEQ ID NO: 16875 - protein, 166 aa, Zea mays
  VARIANT 29: note = Ancestral polymorphism is T, Derived polymorphism is I
  VARIANT 46: note = Ancestral polymorphism is P, Derived polymorphism is L
  VARIANT 47: note = Ancestral polymorphism is P, Derived polymorphism is L
  VARIANT 61..166: note = Derived polymorphism lacks residues 61 to 166
  VARIANT 77: note = Ancestral polymorphism is P, Derived polymorphism is L
MAEDAPNAAAEGGQPAPPEGSADAAPSATAGAKAAEALLPSLSIWPPSQRTRDAVVRRLVQTLAAPSVLSQRYGAVPESEAERAAAAVEAEAFAAASKSAAAESPASIEEGIEVLQAYSKEVSRRLLELAKTRSAAATVPAEGSAQEAEDSSATSPAAEEAAVKEE

SEQ ID NO: 16876 - protein, 143 aa, Zea mays
  VARIANT 121: note = Ancestral polymorphism is G, Derived polymorphism is R
MVSFEMNDLKMSTEIGLGLTGFGVLFTLLGIIMLFDKGFLAMGNILFVSGVLLTIGLKPTVQFFTKPKNHKGSIFFGFGFFLVLIGWPVSGMLVESYGFITLFSGFWPTAAVYLQKSPSFGWIFHHPLVTSLITRFRGRRVPV

SEQ ID NO: 16877 - protein, 156 aa, Zea mays
  VARIANT 130..156: note = Derived polymorphism lacks residues 130 to 156
MAAAEAWVRQEKVRKFEEFVDQRLKPDLTNAIAQRNKVFEQQKTFLDLKRNIENLERNGVTSMRSMVNLGSEVYMQAEVPDTRHIFVDIGLGFHVEFTWQEALQFISVREARLTRQIDEYTHLIASIKAQIKLVCEGIREVLQLPAEKELSPRNTW

SEQ ID NO: 16878 - protein, 139 aa, Zea mays
  VARIANT 61: note = Ancestral polymorphism is G, Derived polymorphism is E
  VARIANT 56: note = Ancestral polymorphism is A, Derived polymorphism is V
  VARIANT 52: note = Ancestral polymorphism is A, Derived polymorphism is E
  VARIANT 35: note = Ancestral polymorphism is R, Derived polymorphism is W
  VARIANT 34: note = Ancestral polymorphism is A, Derived polymorphism is V
  VARIANT 12..139: note = Derived polymorphism lacks residues 12 to 139
  VARIANT 10: note = Ancestral polymorphism is E, Derived polymorphism is K
  VARIANT 9: note = Ancestral polymorphism is T, Derived polymorphism is I
  VARIANT 7: note = Ancestral polymorphism is T, Derived polymorphism is N
  VARIANT 6: note = Ancestral polymorphism is P, Derived polymorphism is S
  VARIANT 3: note = Ancestral polymorphism is S, Derived polymorphism is P
MLSLSPTMTEVYLLLGARAYWLLHRGHAMALLGARRDGRHTHLQRGARVCRACLRAVEKRGQSGTEPSARILQLLLENGIRVNELTRTKAALILPSVVGSSTYKLHFLIHNMIHCQYNKRNLTNWTGSTIVGVSIHQYN

SEQ ID NO: 16879 - protein, 306 aa, Zea mays
  VARIANT 270: note = Ancestral polymorphism is C, Derived polymorphism is Y
  VARIANT 248: note = Ancestral polymorphism is A, Derived polymorphism is V
  VARIANT 246: note = Ancestral polymorphism is W, Derived polymorphism is R
  VARIANT 241: note = Ancestral polymorphism is E, Derived polymorphism is K
  VARIANT 156: note = Ancestral polymorphism is R, Derived polymorphism is W
  VARIANT 129: note = Ancestral polymorphism is G, Derived polymorphism is R
  VARIANT 113: note = Ancestral polymorphism is G, Derived polymorphism is S
  VARIANT 70: note = Ancestral polymorphism is K, Derived polymorphism is N
  VARIANT 26: note = Ancestral polymorphism is P, Derived polymorphism is R
MAKAAEVGNSIGRREILARLNQQLPPIGKPFLRSASYLKEALLLALTDSHQGSTHLSSPLDVTLKLGAYKSFSDLSHVLQFANFTATQALLDEIASTTSSCIHIIDFNLGVGGQWASFLQELAHRRGTGNAPLPMLKLTAFVSSASHHPLELHLTRENLTQFAVDLGIPFEFTDINLDVFDPAELIAPSPNEHFMNCFQPCMFLLDSLDAAGTNVDVASKIERFLIQPRVEDAVLGRQKAEKAMAWRAVFTSAGFAPVPLSNLAEAQADYLLKRVQVRGFHVEKCGMGLALYWQSGELVSVSAWRC

SEQ ID NO: 16880 - protein, 331 aa, Zea mays
  VARIANT 24: note = Ancestral polymorphism is E, Derived polymorphism is G
  VARIANT 25: note = Ancestral polymorphism is T, Derived polymorphism is M
  VARIANT 26: note = Ancestral polymorphism is V, Derived polymorphism is M
  VARIANT 27: note = Ancestral polymorphism is R, Derived polymorphism is W
MAPTRGAGGGVRLPPMNALEILRETVRVLRGDPHAFTSILFLLLCPASGCLLLSAAALDGAVVLPLARRLLAAAATSGLPLTHFVGQLAHHLAATLVSAVVSLPALLTLLLAARAAVAYTVAAVYAGKPLAAGDITLLARRAWPRLAATYALGCAAVAVGLVAFLALLVTACSTLRAMLYPPDIVVCAGLFTVLAYSVVYAHTIIICNLGGVIAVLEEVAGINALRRSVQLMRGQTHVGLLIFLGSTIGLAFVEGLFEHRVKTLSYGDGSSRLWEGPLLVLMYSVVMLVDSMMSAVFYFTCRSSNLDFLDEQGGSVEELEMMRAGSLDAFR

SEQ ID NO: 16881 - protein, 690 aa, Zea mays
  VARIANT 104..690: note = Derived polymorphism lacks residues 104 to 690
MRRHGWQLPYHPLQVVAVSVFLALAFAFYVFFAPFVGRKVFQYVVMGLYTPLVLCVFFLYIWCAAANPADPGVFKSKKYLSLYGSGKHKHLKESRKTSSDARLQIEGTREKQEHEVAASSERSITQYKDNNPSCLSSTLSPSLLLFYPLSFVFSCCQPHESSSEQQATEEGMFFCSLCEVQVLKYSKHCRVCDKCVDGFDHHCRWLNNCIGRRNYRRFFILMSTAVILFYPSLIDCTDKDATKYFYHCVINTTKYFYHCLHGLCNLGQLILQSAIGVLVLVLCFVERKEFSMQIVSKLGSSFSVVPFVIVVASCTILAMVASLPVAQLLFFHILLIKKASSHTFPFCLILLLTDSCKKAFCGYVKLKHHDDNLMQGISTYDYIIALREQEQDDLSGQQSPQMSRVSSYTGLSSASSFGPLRRGSWCTPPRLFLEDQFDVIPSEAASSHNSATKRKEDQGKRKKGSGAVKISPWALARLNAEEVSRVAAEARNKSKVLVPIRKDDYSRGHETDSSYGGTSSGRIDLGPDSKRRTNRRGRQPSDLFLKPVAKISTDAIDSASSDMSNLAPLQLEARSAFHPSRAASSVNVGGSSPDSSLDSPDLHLYRVSAVSSSGAEDLQLTALTAPGSTSHQGIQLSRSTSDGYEASGGEDSDRIPSQIVHRSSNWASIILNSDQSASSSGILVPKNRLS

SEQ ID NO: 16882 - protein, 1699 aa, Zea mays
  VARIANT 456..1699: note = Derived polymorphism lacks residues 456 to 1699
  VARIANT 377..1699: note = Derived polymorphism lacks residues 377 to 1699
  VARIANT 373..1699: note = Derived polymorphism lacks residues 373 to 1699
MALFRKFFLKKTPDRLLEISDRVYGIMLALPVDLVRAVFDCCFSTDSMGEDEYRDYLSGIVAQLQEFFPDASFMVSNFWSGDKRSRISDILSEYDMTVMDYPQQYEGCPLLQLEMIHHFLKSCENWLSVEGQHNMLLMHCERGGWPVLAFMLAGLLLYRKTYTGEQKTLEMVYKQARRDFIQQFFPLNPQPSHLRYLHYITRQGGGSEWPPISRPLILDSVVLHVVPRFDVDGGCRPYLRVHGQDSSPGNKSAKVLYEMPKTSKHLPHYGQAEVPIKLSVFCRVYGDVVLEFIHIGDNIEHKETMFRIMFNTAFVQSNILALNRDDIDVAWNVNNQFPRDFRAEVHFSDPDSFKPAATVEEIADDGDETDVASVDTGEEFYEAEEDWHDARKDQETRSTDGGISLDDVADGGVATEERSSLEKHQFNEGVKIGVSQNLGSMNEKGASAPTPTFDNQEGLQQPREVLANGKLSSTNGQENSDVHDIQVVATSVDSEGHKFGSTCQEDMKGVIAQTLVTTVDPSCSDEIECQANEQTKISEYPDLDYTAFGSPRSLSRTNGDTHLRTTKNEGLQNGDIKIITENTISMDNDLVIYEEKTIVVNGNTVQEVKNIVNEKSIAAKIDKPIIESRNSLNNNNGKIQIAKPSDTSNGKLDGCRLESCLEEALPTKKTTVHDRIVVLPATDVGTEIKTKQEGLGDKQDFGIVLPQSRTVARARSPRLESDDRGQIPDKAVSSVLKKMAVGNAKMEEQPKLAKPKTIRRWISPKKESDATSVHRPSHPPSRYDSSPAALAIRSMPTDVKISAVNDAPLLSLKQPYGCNFTREVTSALSASSPPQQSLLPGAQIASRNQVSLPSLPPPPTNYSSSSTPMHRGLASTCLPNLPQGASPPRSSGAQKQAFAPPPPPPPPPPPPRSGVGGNTPPPPPPPPPPPPPPPPRITGGGITTPPPPPPPPPPRLNNNAIAPPPPPPPPSTITRSSAPPPPPPPPPPSMSRSAHPPHPPPPPSLYSNVPLPPLSCTLSSPPPPPPPPPPPPMARSAAPPPPPPPPLPGRGAPPPPPHPPGRGAPPPPPPPPGRGAPPPPPLPSGRGAPPPPPPPPGRGAPPPPPPPLASRAGPPPPPPPPGARSGPPPPPPPPGARPGAPPPPPPPGSRTGAPPPPPPPGAPPPPPPPGGGGRGPPPPPAPRGHLGGPPPPPPPSGRAPGVPPPPRAPGVPPPPGNNPSLGRGRGAVRPLGSAYGAAASRKSTLKPLHWVKVTRALQGSLWEELQRNDDSQSVSEFDISELESLFPAAVPKSDDSSKSERRKSLGSKPEKVHLIELRRANNTEIMLTKVKMPLSDLVSAALALDQSTLDVDQVENLIKFCPTKEEMELLKNYTGDKQNLGKCEQFFLELMKVPRMESKLRVFSFKIQFGSQVADLRRSLNIIDSSCNEIRTSLKLKEIMKKILLLGNTLNQGTARGAAVGFRLDSLLKLTDTRATNNKMTLMHYLCKVLAARSPQLLNFYVDLVSLDAASKIQLKMLAEEMQAVSKGLEKVHLEYDASERDGPVSEIFREKLKEFTDNAGADVQSLSSLFSEVGKKADALIKYFGEDPVRCPFEQVISTLLTFVTTFRKAHEENLKQAELEKKKAEKEAEAEKAKNAQLTGKNVVFHILCSFGLLRKLFIFTVSTYCPQDSKPSNPRRQAKQTLERTRSASRRGRDVG

SEQ ID NO: 16883 - protein, 749 aa, Zea mays
  VARIANT 144..749: note = Derived polymorphism lacks residues 144 to 749
  VARIANT 31..749: note = Derived polymorphism lacks residues 31 to 749
MGCVASKNAVSVTPAADSSGGLRDRSQPRAQGSAAPLPLPVPVPSLRSSSSAARRPEKVKDEAEEPGKAVVAVAAASRSFRLRSLRKSLEGEQVAAGWPPWLSAVAGEAIQGWIPLKADSFEKLEKVGQGTYSSVFRARDLDTGKIVALKKVRFDNFEPESVRFMAREIQILRRLDHPNVMKLEGLITSRLSCSLYLVFEYMEHDLAGLCSSPDIRFTEAQLKCYMNQLLSGLEHCHSRRVVHRDMKGANLLVNNEGVLKIADFGLANFFDPNKNHPLTSRVVTLWYRPPELLLGSTHYDAAVDLWSLGCVFAEMYRGKPILQGRTEVEQLHKIFKLCGSPADDYWKKSKLPHATVFKPHHPYPSTLRDVFKEVPENALSLLETLLSVEPYKRGTASSALSSEFFRTKPYACEPSSLPKYAPNKEMDAKLRDDALRRKASSRGHGAEASKKSSRISRAAREHTAVPKQINNAEEPKNNVNATRDGTILQDRTKLSLNGDARLFADIQPVPAAAQVKGSSRHAKNESREEMPFSGPLSVPSSSGFAWAAAQRPQEDRALARSRTRSSSRGQFPAEADRDCTRTQATTESAAAGLRDIPRVGSKVREREPHDAAKRAVLRKWSQLERPDSFDSCDTYHSQNFSHAMLVGVGGGALSSKNSFEGGHGHGHGQEEKAEYSGPLLPQSHKVDELLQKNERHIRQAVRTSWFRRGNCEEERWTSEEKLDGFLSMEVGVPMSDGPLVPVWEVDNWC

SEQ ID NO: 16884 - protein, 454 aa, Zea mays
  VARIANT 319: note = Ancestral polymorphism is G, Derived polymorphism is D
MAPPEPEMFDVVIFGASGFTGKYVIREALKFLNASSSASPLRSLAVAGRSRDRIAAALRWAAAPAPPPEDVPILVADTSDPASLAALASRARVVLSCAGPFRLHGHAVAAACAAAGADCLDISGEPEFMERVESELHEPAARSGSLIISACGFDSVPAELGFLFHSRQWEPPSAPATVEAYVSLQSTKRIVGNIGTYESAVLGVANAGQLQALRRSRPRRPRPNIPGPPPPKGSLIEGHNPLGMWAMKLPSADTVVVKRTLSTLTEHPEGLPGAEETPEYADHRKKLWSSVKPAHFGVKIASRSLLILVRFIFTGIFIGLLANFSFGRSLLLKYPEFFSAGLFSRAGPTEEEVKSASFKMWFVGHGYSNVDSSLELGRSKPDKEVITKVSGPEVGYVTTPIVLVQCALVLLSQRANLPKGGVYTPGTVFGPTDLQQRLQDNGLSFEVNTTRAMH

SEQ ID NO: 16885 - protein, 618 aa, Zea mays
  VARIANT 24: note = Ancestral polymorphism is R, Derived polymorphism is C
MAAAAAATSLLIRHNRNPHLLLLRAAISSSRALSQQPELSPDPTTGAPDPAGAAPLPPNPSTGSPLYSQNWRNPAAANPPSSLLPTVAAGSSFGAQHRMAAFYDKPDAAGLKETFAKYMAEQRWEDMKLLFDHWVRSLDAATGKPNHPDVDLFNHYLRANLMTGAVPHEMLDLADHMREFELEPNSASYNLVLKSMVADKESYGAEKLIERMLQTGTVPDEESYNLVVGLLIRQNLVDSSLKYLDLMLKSGYTPSLTVFTDYIQACVRSGRLDTLTSIIQKCKTADKIKVLCPQWAWCIDISEAAFEANNSKLALFALEFLARWIVRGENVKPPVQLSVNEGLVISALSAAGRTFSTDLLNAAWSLLRKSLRQKRAPTPETYLAKIYAHSSIGQLQRAFGTLHEFENAYGNSKDVDLELFSPFTSLHPLVVACCKDGFSTLDLVYVQLENLSHADPPYKSVAALNCVILGCANIWDINRAYETFVAIKEKFELSPDIHSYNALLCAFGKLKQTGEACNVFQHVLTLGVKPNATTYSRLVDAHLANKDPKAALAIIDEMVDAGFTPSKDTLRKVRRRCSRESDFDSDEKVQSLAKQFNYRMGGENRREMLYSIEYNPVY

SEQ ID NO: 16886 - protein, 237 aa, Zea mays
  VARIANT 154: note = Ancestral polymorphism is S, Derived polymorphism is Y
MPVNPPPPPPGSSSLAPAGASYFPLPFHLQQHQPPPPQVPPPMAASSYQQYQQQLHQAHQLFQRDAQTITPEALQSVKAALATSDVLDPVAAANARLSDPSTSKKPIPRRAAGQSWEDPTLTEWPENDYRLFCGDLGNEVNDDVLSKAFSRFPSFNMARVVRDKRTGKTKGYGFVSFSNPTDLAAAIKEMNGKYVGNRPIKLRKSNWKERTDVEALERQKNHVKRKPKIPKKTILHK

SEQ ID NO: 16887 - protein, 158 aa, Zea mays
  VARIANT 126: note = Ancestral polymorphism is D, Derived polymorphism is Y
  VARIANT 4: note = Ancestral polymorphism is R, Derived polymorphism is C
MARRALKNTCLAYLASLNEPDFVELALHEYKSAINMTEQFAALAALSQNPGQVRDDALLDFYNKWQHEYLVVSKWFALQATSEIPGNVANVQKLLSHPAFDLRNPNKVYSLIGGFCGSPVNFHTKDGSGYKFLGEIVLQLDKINPQVNAKYLFSWVFT

SEQ ID NO: 16888 - protein, 519 aa, Zea mays
  VARIANT 213: note = Ancestral polymorphism is A, Derived polymorphism is T
  VARIANT 98: note = Ancestral polymorphism is L, Derived polymorphism is P
  VARIANT 97: note = Ancestral polymorphism is T, Derived polymorphism is P
MPPRPRHRLLFFCCHLSTTPSPAPAPVPKPTDPALMLRLCTILYQQQHDPDDALRRRLSALPLPTAPADIRELFLQASSRFPLSWRPVHRLLSHLSTLHRGAGAGDGDGDSDSDSGGGGFPHSPATAARLLDVLAKSGNIDLLHSTLFSLPRSLLSAAALRAAVRGLAPAREVGKVAALVTLFPECHRARVLTFVTDVACSEPCRLPDVAEKAIKRAEHRHGVARTGRCCDLLVVAYCRAGSLADACRVWNGMERRGLEPGAAAYQEIVVTMFKNNRVADAMKLFDGMRRSGVRDNGGGCCRAVVSWLCKEGRVWGAYMVLAEMVKRGLEVDGEVLGDLVYGLMSRRRVREAYRVFHGVKEKEIALYHGLMKGLLRIKRAGEATEVFREMITRGCEPNMHTYIMLLQGHLGKRGRKGRDPLVNFESIFVGGLVKAGRTLEATKFVERTMWGGVDVPRFDYNKFLYYFSNDEGAVMFEEVSKRLKEVGVIDLADILSAYGERMTTRDRRRIAMNGLLKSV

SEQ ID NO: 16889 - protein, 270 aa, Zea mays
  VARIANT 240..270: note = Derived polymorphism lacks residues 240 to 270
MGDPGTSANPTVRHRLSPHLVGYEEYKSEYITTQKKAYFDLHKDEDWLRNKYHLTNLENVIESYHYNLVKHKKRTGKNYFKLFLPTTAKWKSGHAYFSFSCKEFDENILRKVFELYYENGLLDLSYAPDVGDYLVCEDTSFVPGNKDQAPIPECMMGTEVEKRLNGQTYFSFSCKEFDENLLRKVFELYYENGLLDLSYAPDVGDYLVCEDTSFVPGNKDQAPIPEGMMGTEVEKRLNGQVNFYIFVLLGSNKTQKVSLIGFSCLVAKRT

SEQ ID NO: 16890 - protein, 138 aa, Zea mays
  VARIANT 16: note = Ancestral polymorphism is S, Derived polymorphism is R
MMLSLVLLMALLLSCSSISGAARLLEEVAPKEEYPHPATLELPKPELPPHPTVPELPKPQPSDAVPELPMPEVEHPAVPELPKPDVPAHPAVPELPKPELPPHPTVPELPYPEVPEVPKHELPPKPAENHYPVPETKP

SEQ ID NO: 16891 - protein, 125 aa, Zea mays
  VARIANT 3: note = Ancestral polymorphism is P, Derived polymorphism is T
  VARIANT 10: note = Ancestral polymorphism is R, Derived polymorphism is G
  VARIANT 12: note = Ancestral polymorphism is A, Derived polymorphism is V
  VARIANT 18: note = Ancestral polymorphism is V, Derived polymorphism is I
  VARIANT 23: note = Ancestral polymorphism is T, Derived polymorphism is M
  VARIANT 28: note = Ancestral polymorphism is A, Derived polymorphism is V
  VARIANT 32: note = Ancestral polymorphism is G, Derived polymorphism is S
  VARIANT 34: note = Ancestral polymorphism is V, Derived polymorphism is I
  VARIANT 39: note = Ancestral polymorphism is A, Derived polymorphism is V
  VARIANT 40: note = Ancestral polymorphism is A, Derived polymorphism is E
  VARIANT 41: note = Ancestral polymorphism is R, Derived polymorphism is H
  VARIANT 43: note = Ancestral polymorphism is R, Derived polymorphism is C
  VARIANT 44: note = Ancestral polymorphism is V, Derived polymorphism is I
  VARIANT 50: note = Ancestral polymorphism is P, Derived polymorphism is S
  VARIANT 57: note = Ancestral polymorphism is E, Derived polymorphism is K
  VARIANT 61: note = Ancestral polymorphism is S, Derived polymorphism is L
  VARIANT 63: note = Ancestral polymorphism is A, Derived polymorphism is T
  VARIANT 67: note = Ancestral polymorphism is P, Derived polymorphism is L
  VARIANT 68: note = Ancestral polymorphism is E, Derived polymorphism is K
  VARIANT 70: note = Ancestral polymorphism is V, Derived polymorphism is I
  VARIANT 75: note = Ancestral polymorphism is K, Derived polymorphism is M
  VARIANT 81: note = Ancestral polymorphism is A, Derived polymorphism is T
  VARIANT 85: note = Ancestral polymorphism is E, Derived polymorphism is K
MITFLDLSKRLARRGHAVTFVSTPRNAAKLQGSIPLELAAHLCIVRLDLPGVDGLPEGAESTADVLPKKVGLLQKAFDGLAAPFERLAIGAVLPPARRPRSRGSSTGSSSTSLRTGSGQLLNSIR

SEQ ID NO: 16892 - protein, 105 aa, Zea mays
  VARIANT 23: note = Ancestral polymorphism is S, Derived polymorphism is R
  VARIANT 4: note = Ancestral polymorphism is R, Derived polymorphism is G
MASGTTASSLALLLLLSCAAVSSAARRLEEEATPKEGEPHLTVPDLPVPEHDLPPLPKVELPPFPEVELPPLPKVELPPFPEVELPPKPELPAIPGFHFPEPTTP

SEQ ID NO: 16893 - protein, 463 aa, Zea mays
  VARIANT 319: note = Ancestral polymorphism is S, Derived polymorphism is W
  VARIANT 228: note = Ancestral polymorphism is G, Derived polymorphism is S
  VARIANT 211: note = Ancestral polymorphism is P, Derived polymorphism is Q
  VARIANT 150: note = Ancestral polymorphism is R, Derived polymorphism is P
  VARIANT 136: note = Ancestral polymorphism is G, Derived polymorphism is A
  VARIANT 4: note = Ancestral polymorphism is S, Derived polymorphism is L
MAWSSKKVCVVGAGVSGLVSARELRREGHDVTVMEQSGGVGGQWLYDPRTDASDPLGVAGAHSSVYASLRLNTPRESMGFSDYPFVYPAGNDDDGAGGDARRYPGHAEFLRYIRRFCDAFGLMDAVRLNTKVLHVAPSAPRGHGDGSVTRWTVRCSSRHGDCDGEAVTTEETTFDAVVVAVGQFTQPRLPVINGMDKWSRRQLHSHSYRVPDSFQDEAVVVVGCHASGVDIALELRAVARDVHVSVKSVDDGVAIERLCEDGQVTFADGSRVVADSIVYCTGYGYSFPFLDTGGLVTVDDGSRVGPLYEHTFPPALAPSLSFVGVPKRVVVPRFYETQARWVAEVLSGRRALPSSEEMMRAAEGYHHPAREMMVAGVPKHLAHDIFDDYDYCDEFGEKHCGFPRLERWKKELRWSSIARQRGEGEGEGEDSESFRDVYRDSDLVREGLQAQGWPWPAGSHQHK

SEQ ID NO: 16894 - protein, 351 aa, Zea mays
  VARIANT 238: note = Ancestral polymorphism is A, Derived polymorphism is E
  VARIANT 137..351: note = Derived polymorphism lacks residues 137 to 351
  VARIANT 107: note = Ancestral polymorphism is A, Derived polymorphism is P
  VARIANT 46: note = Ancestral polymorphism is L, Derived polymorphism is R
MGGGTVVCVTGGSGYLGSWLVRKLLGRGCVVHATLRSLADEKKTGLLRALPGAAERLRLFEADMYDADTFEPAIAGCHFVFLVATPLTHDPTSTKYKNTTEAAVDAARIILRQCALSGTVKRVIHTASVTAASPLKEDGSGYKDFADESNWTPLNLSYEFTNAYLDDYVRSKTLSEKELLSYSSFSSSSSSSSSSKEDDRPQALEVVTLACGLVGGDSIQTYLWGSYAAIVAPLTGQAVSHNALLFLQALLGSVPLVHVEDVCEAHVFCMEQESMAGRFLCAAGYPNMRDMVDHFAAKHPDLKIQLTQVTGEGVRIQPNTSKLEDLGFRFKYGVEETLDCSVECAKRLGEL

SEQ ID NO: 16895 - protein, 1064 aa, Zea mays
  VARIANT 4..1064: note = Derived polymorphism lacks residues 4 to 1064
MAARTLLLVLLLLLLGDATSASVSGQREALMKFKAAVTADPGGLLRGWSPASGDHCRWPGVSCGASGEVVALNVTSSPGRALAGALSPAVAALRELRVLALPSHALSGPLPPAIWTLRRLRVLDLSGNRLQGGIPAVLVCVSLQTLDLAYNQLNGSVPAALGALPVLRRLSLACNRFGGAIPDELGGAGCRNLQFLDVSGNMLVGGIPRSLGNCTELQALLLSSNNLDDIIPPEIGRLKNLRALDVSRNSLSGPVPAELGGCIQLSVLVLSNPYAPTAGSDSSDYGELDDFNYFQGGIPDTIATLPKLRMLWAPRATLEGELPGNWSSCQSLEMINLGENLFSGGIPKGLVECENLKFLNLSMNKFTGSVDSSLPVPCMDVFDVSGNQLSGSLPVFMSKKNCLSSQAPRDDLVSEYSSFFTYQALAGFMSSPSPLDAHLTSYHSFSRNNFTGPVTSLPLATEKLGMQGSYAFLADGNHLGGQLQPSLFDKCNSSRGLVVEISNNLISGAIPTDIGSLCSSLLVLGVAGNQLSGMIPSSIGELSYLISLDLSRNRLGGVIPTSVKNLLHLQRLSLAQNLLNGTIPPDINQLHALKVLDLSSNLLMGMIPDALADLRNLTALLLDNNKLTGKIPSGFANSASLTTFNVSFNNLSGPVPTNGNTVRCDSVIGNPLLQSCHVYTLAVPSAAQQGRGLNSNDSNDTTPSNSQNEGANNSFNAIEIASITSATAIVSILLALIALFIYTRKCAPRMSARSSGRREVTLFQDIGVPITYETVVRATGSFNASNCIGSGGFGATYKAEIAPGVLVAIKRLSVGRFQGAQQFDAEIKTLGRLRHPNLVTLVGYHLGESEMFLIYNYLSGGNLERFIQERSKRPVDWKMLHKIALDVAKALAYLHDTCVPRILHRDVKPSNILLDTNYTAYLSDFGLARLLGNSETHATTGVAGTFGYVAPEYAMTCRVSDKADVYSYGVVLMELISDKKALDPSFSPYGNGFNIVAWACMLLRQGRAREFFIDGLWDVGPHDDLVETLHLAVICTADSLSIRPTMKQVVQRLKQLQPPIREHR

SEQ ID NO: 16896 - protein, 372 aa, Zea mays
  VARIANT 86: note = Ancestral polymorphism is G, Derived polymorphism is S
  VARIANT 14: note = Ancestral polymorphism is A, Derived polymorphism is E
MASLRVVSVLVLVAMAASAGGVAARPLVGGGGAWENRAPLQTSRPFNIAHRGSNGELPEETAAAYARAIDEGADFIEADIEATKDGHLVCFHDTTLDGTTDVADHPEFAGRRRTLEVQWANVTGYFVTDFTLVELKTLRAKQRWDFRDKSHNGVSPIITFDEFIDVALNAKRVVGIYPEMKNPVFMNKHVQWADGKKYEDKFIATLKKYGYGGKYMSPAWRARPVFVQSFAPTSLVRAAGLTDSPLVFLVDDVTVRTEDTNQPYDEITSGEHLDYMKRYVVGIGPWKDTVVPPTKDNRLATPSDLVAMAHARGLQVHPYTYRNENKFLHFDFRQDPYAEYDYWINDVGIDGLFTDFPASLRRFQEWTAKNKD

SEQ ID NO: 16897 - protein, 586 aa, Zea mays
  VARIANT 273..586: note = Derived polymorphism lacks residues 273 to 586
MALEDGSPATFTPQVIANAFVKQYYQTLRYAREDAYKFYNDKSILGRTDSNGKMICVTTIDDIKEQLVSTDCADCLIEIETVDAQPSHVDGVIILVAGYFTTAVVKQKFIQSFFLAPQENSGYYVLNDTFRLTGISFEVKVVAANHDNKSTQITTLPNEPEIDSFKESEVPGVPPAGNILVNDGVISTSANVVSPVKNDPVVETCVKVVNEDVVKIPVAAPASTPVTAEEVVNKDFVKIPESAPALPSSVEKAAPAPPASVEKAAAAPPASVEKGAPAPRTPVEKADPAPSAPVEKGAPALRAPVEKADPAPRAPVEKEVTRKTYASVVKIPREDTQPAPAARPSKPNLNIKMVQNTEKNVSSPSKPAHATVNALPGDKGVPKNKSPDEPGYSIFVKNLPFEATVEMVEQEFSKFGAIKSGGVQVKCQPDQFCFGFVEFESQQSMLAAIEASRVYFGTRESYVEEKRTKTRVVDGVITRGDDNGNGGGGRFHSGRGGGYYGDGYKRQWGGQNNGYYNGADNMRNDYSGRVRGPQGNGHPQNGHGYHQNGHGYYSGNGYQQRRPNSNGNGLRVERNNGFRQQGPASA

SEQ ID NO: 16898 - protein, 951 aa, Zea mays
  VARIANT 461..951: note = Derived polymorphism lacks residues 461 to 951
  VARIANT 374..951: note = Derived polymorphism lacks residues 374 to 951
  VARIANT 372..951: note = Derived polymorphism lacks residues 372 to 951
  VARIANT 363..951: note = Derived polymorphism lacks residues 363 to 951
  VARIANT 249..951: note = Derived polymorphism lacks residues 249 to 951
  VARIANT 230..951: note = Derived polymorphism lacks residues 230 to 951
  VARIANT 16..951: note = Derived polymorphism lacks residues 16 to 951
MHAGTTRGDGGTRGLQRRFGCMAGIFQIFDRHRLIAGAGRRAARQAQKRLPPPSSAPPGKTQHPKSSSDVLVQSSSASKIVLEKTLSKCTTENSSLSIESSSDSSSSSPCTSFSSLDGNKSVQQELPYTSEELFAQRPLKSSPSLREPDMNAKSGHPNAGFRDIVKDCINRDSGGLTVKTSVHEARRNGQHKDSPRPLLLSKSMDGTCIIGIDRTTNVPANVNGSRRCLQEQSRFSCDDRRLLRPTETQESKRSSSRPKELPRLSLDSRKESLSPGSRQKDLGYKRTDDILLDTLRPQDSPSHSRANSVIAKLMGLEEATNATGVLTADSCEPTRSPRPAQTTQYGHPSRSPRGTCQDSCSMQLKNESSVLKTKPSPRILTEAAPWRQQERSVTNICREAEGRPRIASVYADIERRVGGFDFLECNNKDFRALRILGALNVRDAKNKNDSSGRPMATHRTGYDLTTSGSFQAPIVVMKPAGTTEKHGVSLASVAPIAGLRSLRKLPARYSSFTGTNEASTNENIHLQMSRAQLKSEETVSSASSPRPTSSSNPRNVLKKAEPERRSRPPVSPKSPSKKSNEAVSPKGRTRSKPSQVKSHRDEVLHSTGNRISLAKQVDVSVIDCPKPPGGNSTFVPPSNAAATASHKAPSILDSDQNIHSLDNIPSPVSVLDTSFYHKRISDSFKDGETHSSEECWNPNSLPDTPQSKASSEANQIKPENLEVLIQKLEQLQSMNEEDASIKEVMASVTANKDHQYIYEILLASGLLHKEHSITALPAQLQTSNYPINPELFLILEQTKPDLVFAFQAVSGTKKTCKPYTGKLHRRLVFDLVNETIAQKMIICRSGSQPAKFLQSRKLSGWQLFKDLCTEVDRQIKCTGEEENGNMILDEDTVNGTKDWMSFDTMLHGIVWEIERSIFKGLIDEVIGGETIEKMQFGQRKLQRQLSFSSIN

SEQ ID NO: 16899 - protein, 385 aa, Zea mays
  VARIANT 139: note = Ancestral polymorphism is C, Derived polymorphism is R
  VARIANT 144: note = Ancestral polymorphism is L, Derived polymorphism is R
  VARIANT 146: note = Ancestral polymorphism is F, Derived polymorphism is S
  VARIANT 156: note = Ancestral polymorphism is T, Derived polymorphism is P
MGSLVSCLSDPCQSGNGSPPPQARRRSSTSSRGRGGGGGGRDSAKASVTIDEEALAAAAALVLGQRGGGAFERSASVRYAAKRHGQGPPLPRSCSTRPRSLADPELQPQQLLAKVCSDHVVSRICYILAFLTANSVVDCVLTTLVFLGLYNRNLVPYGSFLEQDLNTKDLETSVIVLVHGGGFGAWCWYKTISLLEDSGFRVNAIDLTGSGIHSYDTNKICSLSEYAEPLTSYLEGLGDAEKVILVAHDLGGACVSYAMEMFPTKVAKAVFLCAAMLTNGNSALDMFQQQDVSLASVSMRPIPFAPVLEKLVLTAENYGSVRRFYVETTEDNAIPLPLQQSMCGANPPEKVLRLKGADHAPFFSKPQALHKTLVEIAAMPPVGAS

SEQ ID NO: 16900 - protein, 139 aa, Zea mays
  VARIANT 133..139: note = Derived polymorphism lacks residues 133 to 139
  VARIANT 91..139: note = Derived polymorphism lacks residues 91 to 139
  VARIANT 45: note = Ancestral polymorphism is A, Derived polymorphism is V
MAPSPALTCTPPSRLRHRRLGLRPRPSSIRCRYPHSHTSLRPWDAAVAYFSVIFVIAVRPWGSNTSSSSIQEHTNMKMDDDGDDYTFGAAQPLHHLRFVGDAGIMGPPLLYQSSNGRNPFHGLLRRSRRRPSCHWDGSY

SEQ ID NO: 16901 - protein, 520 aa, Zea mays
  VARIANT 316..520: note = Derived polymorphism lacks residues 316 to 520
MVLTMASAQEDSLLLLLLPTTSPLPTLMAVFILAAVLLWLSPGGPAWALSRCRRPPPGPTGVVTALSSPVAHRTLAALSHAVDGGKALMAFSVGLTRLVVSSQPDTAREILASPAFGDRPIKDAARHLLFHHAMGFAPSGDAHWRGLRRLAANHLFGPRRVAGAAHHRASIGEAMVADVAAAMARHGEVPLKRVLHVASLNHVMATVFGKRYDMGSREGAVLDEMVAEGYDLLGTFNWADHLPLLKHLDPQGVRRRCNRLVQKVESFVGKIIMEHRTRRANGGVVGDECMGDFVDVLLGLEGEEKLSDEDMIAVLWEMIFRGADTVAILMEWVMARMALHPDIQAKAQAELDGVVGIGRGVADADVASLPYIQCIVKETLRMHPPGPLLSWARLAVHDAHVGGHLVPAGTTAMVNMWSIAHDPAIWAEPEKFRPERFQEEDVSVLGSDLRLAPFGAGRRACPGKILALATTHLWVAQLLHKFEWAAGGGVDLSERLSMSLEMATPLVCKAVPRVQGQAAS

SEQ ID NO: 16902 - protein, 230 aa, Zea mays
  VARIANT 116: note = Ancestral polymorphism is G, Derived polymorphism is D
  VARIANT 9: note = Ancestral polymorphism is C, Derived polymorphism is Y
MAGDLPAFCTEEMDREIFQRGVPIGAGITTAGHGRGAAATGHTATPADPGRAAAGLARSVSTAAPADPGRATAGLARSVSAAAPADPGRAAAELARSVSAAAPADPGRGIAAAELGRGASAADPAYTGRGVAAAGLGRGASSAAPAGPVRGVAAAELGRGASAADPAYPGRGVAVAVLGHGASAATPAGPSRGVATVGLGRGASATGHSAATAGIGRGGGIRHRPRRCSD

SEQ ID NO: 16903 - protein, 281 aa, Zea mays
  VARIANT 29: note = Ancestral polymorphism is D, Derived polymorphism is N
  VARIANT 170: note = Ancestral polymorphism is S, Derived polymorphism is L
  VARIANT 217: note = Ancestral polymorphism is T, Derived polymorphism is I
MEKESSATYEPKRNSEIRVFESSDEISTDLAEYISQVSEISVKERGYFAIALSGGPLVSFLGKLCEAPYNKTLDWSKWYIFWSDERAVAKNHAESNYRLTKEGFLAKVPILNGHVYSINDNATVEDAATDYEFMIRQLVKVRTIGVSERNDCPKFDLILLTMGSDGHVASLFPNHPAMELKDDWVTYITDSPQPPPERITFTLPVINSASNIAIVSTGDDKAKAVHIAVSDMAEGLDAPTSLPARMVQPTDGKLVWFLDKAAASFLDSKNDDDDACYDRHE

SEQ ID NO: 16904 - protein, 512 aa, Zea mays
  VARIANT 356: note = Ancestral polymorphism is R, Derived polymorphism is G
MLQLAARSLLLFLLLVSPAVASAGIAKLNSSSPLFGIEFPPFNTAVADTGCDSKLGAAEDAADEQKPASPSSSLKLHMTHRRGAEGGRTRKGSFLDLAEKDAVRVEAMHRRVASSSSSPRRGRALSESERVVATVESGVAVGSAEYLMDVYVGTPPRRFQMIMDTGSDLNWLQCAPCLDCFEQRGPVFDPAASSSYRNLTCGDPRCGHVAPPEAPAPRACRRPGEDPCPYYYWYGDQSNSTGDLALESFTVNLTAPGASSRVDGVVFGCGHRNRGLFHGAAGLLGLGRGPLSFASQLRAVYGGHTFSYCLVDHGSDVASKVVFGEDDALALAAHPRLKYTAFAPASSPADTFYYVRLTGVLVGGELLNISSDTWDASEGGSGGTIIDSGTTLSYFVEPAYQVIRRAFIDRMSGSYPPVPDFPVLSPCYNVSGVERPEVPELSLLFADGAVWDFPAENYFIRLDPDGIMCLAVLGTPRTGMSIIGNFQQQNFHVAYDLHNNRLGFAPRRCAEV

SEQ ID NO: 16905 - protein, 460 aa, Zea mays
  VARIANT 53: note = Ancestral polymorphism is T, Derived polymorphism is I
MAPPPLLPARFVAASVALLAVAFSSSLTRPSGAYDPLDPNGNITIKWDVIQWTADGYVAVVSLYNYQQYRHIQAPPGWRLGWVWAKKEVIWAMTGGQATEQGDCSRFKASVLPHCCRRDPEVVDLLPGTPYNTQTANCCRGGVLASWAQDPSDAVASFQVSVGQAGSTNRTVKVPRNFTLLAPGPGYTCGAAKLVKPTKFMSQDGRRSTQAHMTWNVTCTYSQFLAQRSPTCCVSLSSFYNDTIVSCPACSCGCQNNNSSSTAAPGSCVEGSRRSPYLASVVNDPSKNSLAPLVQCTSHMCPVRVHWHVKVSYKEYWRVKITVTNFNYRMNYSQWNLVAQHPNFDNLTTIFSFNYRPLNPYGVINDTAMLWGIKYYNDLLMTAGPDGNVQSELLFRKEPSTFTFHKGWAFPRRVYFNGDNCVMPPPDAYPWLPNAASPRLSPSLLLPLVAAAWTAFAVLS

SEQ ID NO: 16906 - protein, 361 aa, Zea mays
  VARIANT 52: note = Ancestral polymorphism is T, Derived polymorphism is I
MASASHAPTPLLKDELDIVIPTIRNLDFLEMWRPFFQPYHLIIVQDGDPSKIIRVPEGFDYELYNRNDINRMLGPKASCISFKDSACRCFGYMVSKKKYIYTIDDDCFVAKDPLGKDINALEQHIKNLLSPSTPFFFNTLYDPYRVGADFVRGYPFSLREGVPTAVSHGLWLNIPDYDAPTQLVKPLERNTRYVDAILTIPKGTLFPMCGMNLAFDRELIGPAMYFGLMGDGQPIGRYDDMWAGWCTKVITDHLGLGVKTGLPYIWHSKASNPFVNLKKEYNGIFWQEELIPFFQSVSLPKEATTVQKCYLELAKQVRAKLGKVDGYFNKLADSMVTWIEAWDELNPPKGGVPTANGPPKK

SEQ ID NO: 16907 - protein, 101 aa, Zea mays
  VARIANT 23: note = Ancestral polymorphism is E, Derived polymorphism is V
  VARIANT 25: note = Ancestral polymorphism is A, Derived polymorphism is V
  VARIANT 55: note = Ancestral polymorphism is A, Derived polymorphism is E
MATATTEAEVRESLGTKFGRLKEQAKDMASRHPVAGAAAVIAVSAVGAYFLWPVAAPAVAMMKAPGSGGVLVSRAAFLAKKELYFKLLRTGGVAAAVAALA

SEQ ID NO: 16908 - protein, 85 aa, Zea mays
  VARIANT 59: note = Ancestral polymorphism is P, Derived polymorphism is L
  VARIANT 52: note = Ancestral polymorphism is R, Derived polymorphism is H
  VARIANT 51: note = Ancestral polymorphism is C, Derived polymorphism is R
  VARIANT 41: note = Ancestral polymorphism is K, Derived polymorphism is N
MKDDEGIGAMGAAVAFAAMGVFGIYFLWPVVGPASAGMMMKAPGAAGWVICRAVFEANPQLYFTILRTAGAAAAAATFAACSIAS

SEQ ID NO: 16909 - protein, 332 aa, Zea mays
  VARIANT 138..332: note = Derived polymorphism lacks residues 138 to 332
  VARIANT 125..332: note = Derived polymorphism lacks residues 125 to 332
MDKQRCLEQILRDQERGSKIIIFCSTKKMCDQLACGIDRNFNALSIHDDKSQAERDNVLNQFRTGRAPILVATNVAARGLDIKDIKVVINYDFPTGIEDYVHRIGRTGRAGATGVSYTFFSEHDWKHAGDLAAGMSRWDGPGGSHFEPGAGGSVGYGGVREGPRGFGGREGPGGFGVRESPAMLWWSRSRSHNRSWSHNRSRSSSRSRSRSKSRDHGAAPERRPRARSSFDVLPPATGAAGPAPAPVPGPAAPPVPALAAQHSLADTSSMSPMSPGGIVQPAAAPLICGGNDNNFGGIPTGQPLQGTDAAFPSFPTSEKFPGATVQHAAPDV

SEQ ID NO: 16910 - protein, 343 aa, Zea mays
  VARIANT 28: note = Ancestral polymorphism is H, Derived polymorphism is Q
MAAAACNPVAPSGPVPFKDVDDGSVPEHTPKEEFGDLVAALPSRQQSILELRLYQGFWLPEHWVPGTIVFQRRFTPRPDDVILASYPKCGTTWLKALAFATAARTAYPPGGARHPLRRLNPHDCVPFIDEIFASGEEAKLEALPSPRLMNTHLPYALLPAPVTATATGCRVAYVCRDPKDMVVSLWHFLRRAKPDLLFADTFESVCDGTVVVGPVWDHVLSYWRASVAAPDRALFLRYEDMLRDPGGNVRRLAEFMGRPFSAAEEAAGDVAAVVELCSFDEMKGLEVNRPGSGTAGRYRPMPRDAFFRKGVAGDWANHMTPEMAARLDGIFREKLQGTGLIFS

SEQ ID NO: 16911 - protein, 422 aa, Zea mays
  VARIANT 108: note = Ancestral polymorphism is P, Derived polymorphism is L
MVSSSSPKEKEAMLPAVTTHEKQGADSSIPCPRNSTSTKSFPPPNRGSQPHGKQGTEVAEGINCDPSCFMDQHKMIIVGKSEVQVTVTSATMTVERFLRDVRGEEPKPLIVGLDTEWFENDRKKIALIQICVDKKCLLFKVNIAGDIPDNLKSFLADEDHVFVGVAIANDLDRLRESHQIELSNKVELQAMAPFIISDRQWNNVPSLATLAQELLGVAIGGKGTDVRYKHWDNKQLTENQIKYACTDAAVPYMVGDMIQKEYGCDLHVTQFPYPSTNFMDNNEDGEEVQRSQLHFVEDPQTKRIKTCPACPAGAKQKNRMWNEVISHVVSQAASEKGSEDNRKRHKCLLRNHGFHVDTSDDSGGSNPQERGEAVPRHPANQEKAMTMENSLSSTKSRLRVQAPKCIPMLWSIVPAMVNLNIN

SEQ ID NO: 16912 - protein, 757 aa, Zea mays
  VARIANT 422..757: note = Derived polymorphism lacks residues 422 to 757
MSNRPRHAAPRRLASSSTIRRLIQDGDLAVPGSSAEDVAHALRNHRPELRRKRLKPLTEAVRRVLSSDFDDDDDDDSASRGHQGAHATLSSTTSLSDESAHPPPPPYFDATKTMLRSQYASQTSKQNPGTNQQLEIEMTAEKARRLITSDCGGGGGDAKPEAPVSEGVVNGDKWPRFADLGGMDQVLDQLVVEVVVPLCHPELPDYLGVRPVAGLLLYGPPGCGKTTLAHAIANETGVPFYKISAPDIVSGVSGGSEENIRGLFQKAYRTAPSIVFIDEIDAIASKRENLQREMERRIVTQLMTCMDEFHQNIGGDGSDADSSEKKPGYVIVIGATNRPDAVDQALRRPGRFDREIYLGVPDVNSRKQILMMLARKLRLEGQFDFLKIARATPGFVGADLKALVNNAGYLAMKRIINKRRAQYCSEVKVKWWKQLSWDAGEMESVHVTMNDFEEATKLVQPSLRREGFSSIPDVTWDDVGGLDSLRKEFHRYIRCIKSPEDCDFCSMSKLFGVRMQDGFLLFGPPGCGKTLIAKAVAHEAGANFIHIKGPDILNKYVGESESEIRKIFNRARINAPCIVFFDEVDSLTTKRGKEGGWVVERLLNQLLIELDGAGQRKGVYVIGATNRIDMIDDAMLRPGRFGKKHYVPIPGARERVSILKALARRIPVSSTVDLDVLALREECSNFTGADLASLVDEAAMLAMAERWMYLDSRTSTSPSSLIEPSHFEEALSKVKPSISKKQKRLYEKMRKKHLSTT

SEQ ID NO: 16913 - protein, 1031 aa, Zea mays
  VARIANT 176..1031: note = Derived polymorphism lacks residues 176 to 1031
  VARIANT 336..1031: note = Derived polymorphism lacks residues 336 to 1031
MTAEQEWSEVQVRALDGRSTVVKLPLGASVRDLKAALRTSFLPAQVSPSFHLFLKGAKLRLDAEIGSLAIGDGDFIVLVPFTRTPQQHFSVSTASQDQGHCPPKQPEVSSAANSAWQDIMDDLSAMPASPQSDAASKDFYSSCDPCSGRFTEDMKAGQISTSGSSRKRRKTCKENGNGSPQMVSSSEANGTAEKHNISKKSGVAKSAAMLCHDMQPLKPAEMVEHLKQGLGKEGQIVHIQEISSREASFTELPCNLSEAMREALKSIGISRLYSHQSQAITSSISGRHIVVATSTSSGKSLCYNIPVLECLSQDLMACALYIFPMKALAQDQLRTLIKLKNASHIDVDVKIYDGDTPREDRLWIRDNARLLITNPDMLHVSILPYHGQFQRILSNLRYIVIDEAHSYKGAFGCHTALIIRRLKRICSNVYGSCPTFIFCTATSANPCEHVMELANLDEVELIQNDGSPCGSKYFLLWNPSLPMTEGRSKASSVHRRSRRILLVCNTVILDYYVMKYLFKKYYFMKCTNNIIFFASSIVEVSYLFSEMVQHGLRCIAFCKSRKLCELVLAYTREILQETAKELVDSICVYRAGYIAELGIDVGHIDATLHLGFPGSIASLWQQAGRSGRRAKQSLAIYVAFEGPLDQYFMKFPHKLFGRSIEHCQVDSHNLKVLEQHLPCAAYEHPLCVQYDECYFGSSLDSVMTTLKDKGYIINNRAGPFSSSMWNYIGPEKSPSQAVSIRAIEQDRYKVIDKLNSRLLEEIEESKAFFQVYEGAVYMHQGANYLVEELDLASRTAFCRKADLKYYTKTRDYTDINVLGGEFAYLPTSICRTNRVKTTAQANDCTVTTKWFGFYRISKSSNTISDSFELNLPPYSFTSQAVWVRIPHSVKMTVEESKLEFRGGSHAASHALLNIVPLHMMCSASDLGTECANPHESRGIPDRILLYDRHPGGIGIASQAQMLFEELLLAALEVVSTCNCTSAVGCPNCIQSLTCSEYNEVLDKEAAILILKGVIDYERSYFEAEDASQRSC

SEQ ID NO: 16914 - protein, 306 aa, Zea mays
  VARIANT 203: note = Ancestral polymorphism is Q, Derived polymorphism is L
MARADPVSFRQHRAINGVSFRHQQKVPRILGKQERGRGGQGHNREAKLIQSGPFCRPHLDDFTVPPPHRDHGEGAGWLALGPPKPAARRDKPTGSGSAYLMTMSGRSVPNCTIWMGGADVGQWMSDWYLWGDCKGSSKVLDATIFAFWVTIYVDIEPKRIRLKSSTYTSNTMIDNVIYFYLMYHWKVHFMKCERLSQQLDVSQVGHAGTLDPMATGLLIVCVGKATKIYYQGMVKGYSGVFRLGEATSTWDVDSPVVEEQVKKRVENKVRIFEQNATDSECKVNPKLLSKLYDQWVMPQTKDVCLD

SEQ ID NO: 16915 - protein, 309 aa, Zea mays
  VARIANT 19: note = Ancestral polymorphism is A, Derived polymorphism is G
  VARIANT 191: note = Ancestral polymorphism is W, Derived polymorphism is S
  VARIANT 234: note = Ancestral polymorphism is C, Derived polymorphism is R
MAASDQPPRPEKPPLPWRARLLVGAASALHAASLRRDGTVNRFLLSLFDRAAPPTPTAPLGGVASTDHAVSDHLRARLFVPETPGGGNELPVVVYFHGGGFVFHSAASAIPAVIASVDYRLAPEHRFPAPYDDGEAALRWALAGAAGALPYPPDAVAGLLAVQPFFSGEAPTGSEMRLRDAPFGSPERLAWLWRAFLPPGATRDHEAANVPAAIRRDAGAGADRWRAFPPTLVCVGGWDVHQDRQRAYADALRAVCSEEVTVAEYPDAIHAFYVLDDLADSKKFVGDVAEFVNRHAQQRKKPALDHAKD

SEQ ID NO: 16916 - protein, 366 aa, Zea mays
  VARIANT 79..366: note = Derived polymorphism lacks residues 79 to 366
MVAAAGRRRRRCAAAILLVLPVVAVLASSSAAADGSFITWDDLSTPSAAAVQGGVKAASGGGARELDTIVVAQDGTGHSRTVQGAVDMVPAGNSRRVKILVRPGVYREKVTVPITKPFVSLIGMGSGRTVITWNARASDMDRSGHQVGTFYSASVAVEADYFCASHITFENSAPAAPPGAVGQQAVALRLSGDKTMLYRCRILGTQDTLFDNIGRHFLYNCDIQGSIDFIFGNARSLYQGCTLHAVATSYGAIAASQRSSAEEDSGFSFVGCRLTGSGMLYLGRAWGRYARVVYSYCDLGGIVVPQGWSDWGDQSRTKTVLFGEYSCKGPGASTRNRVPWSRSLTYDEARPFLGPSFINGEQWLRL

SEQ ID NO: 16917 - protein, 213 aa, Zea mays
  VARIANT 126: note = Ancestral polymorphism is Q, Derived polymorphism is L
MAPQPLRAPRLSAPAGHAACRCSAAPLFGKRAPPVVAFPRARSGGAVASCSAVQESSTSTTVSKKKDAADGAKEATAEAAKPAAAAKPKKAAALPLPEMMQQEIIPPLKDALEAEDDVSQVQLAFQNNTLEGSFIKNDVPYYFWAFFPKGDLTGPKGFALSSYSNEVSTIEPFLIDEKRITAKYVVFWVYKRLAGQGILPVWKEEEGEEEAAK

SEQ ID NO: 16918 - protein, 301 aa, Zea mays
  VARIANT 11: note = Ancestral polymorphism is S, Derived polymorphism is Y
MCLLREMEDHYVHPKSKSNHGSLSGNGYEMKNPGHEVCDRDSSSESDRSHPEASAVSESSLDEHTSTQSDNDEDHGKDNQDTLKPVLSLGKEGSAFLAPKIDYNPSFAYIPYTADAYYGGVGVLTGYAPHTIVHPQQNDTTNSPVMLPAEPAEEEPIYVNAKQYHAILRRRQTRAKLEAQNKMVKGRKPYLHESRHRHAMKRARGSGGRFLNTKQQPQEQNQQYQASSGSMCSKTIGNSVISQSGPICTPSSDAAGASAASQDRGCLPSVGFRPTANFSEQGGGGSKLVVNGMQQRVSTIR

SEQ ID NO: 16919 - protein, 315 aa, Zea mays
  VARIANT 90: note = Ancestral polymorphism is T, Derived polymorphism is I
MDSGYNPRTVEEVFRDFKGRRAGIIRALTTDAEDFFKQCDPGRVGCMPAKIGAISISFLLCVCNVMEGCWQLNSEPMVGDDDDDLDMVFTVSLEEKENLCLYGFPNESWEVNLPAEEVPPDLPEPALGINFARDGMQEKEWLSMVAAHSDAWLLSVAFYFGARFGFNKNDRKRLYSLIDDLPMAFEIVSGKSETKAPAPPSSSNHSNIKPKSNNKKKPPEPKVKQPKPRAPAEEGEEEDGSASEGEHGETLCGACKESYGPDEFWICCDLCEKWFHGKCVKITAAKAEHIKQYKCPSCTGGGGVSNSGTKRARPS

SEQ ID NO: 16920 - protein, 232 aa, Zea mays
  VARIANT 205: note = Ancestral polymorphism is P, Derived polymorphism is H
  VARIANT 91: note = Ancestral polymorphism is E, Derived polymorphism is K
  VARIANT 86: note = Ancestral polymorphism is V, Derived polymorphism is A
  VARIANT 83: note = Ancestral polymorphism is E, Derived polymorphism is D
  VARIANT 62: note = Ancestral polymorphism is G, Derived polymorphism is D
  VARIANT 53: note = Ancestral polymorphism is R, Derived polymorphism is S
  VARIANT 47: note = Ancestral polymorphism is R, Derived polymorphism is P
  VARIANT 37: note = Ancestral polymorphism is S, Derived polymorphism is P
MASTHAISKKRKFVADGVFFAELNEMLTRELAEDGYSGVEVRVTPMRTEIIIRATRTQNVLGEKGRRIRELTSVVQKRFNFPEGGVELYAEKVNNRGLCAIAQAESLRYKLLGGLAVRRACYGVLRFVMESGAKGCEVIVSGKLRAQRAKSMKFKDGYMISSGHPVNLYIDSAVRHVLLRQGVLGIKVKIMLDWDPKGKQGPTMPLPDLVTIHVPKEEDEFLRPLAAEIQVA

SEQ ID NO: 16921 - protein, 256 aa, Zea mays
  VARIANT 89..256: note = Derived polymorphism lacks residues 89 to 256
MICLKAISSPLHLPTFRRLTPTSSLRAAAAMSSSSSAVAAPIEHFVLFKARPEAVASGAAAAMVSSLQALATLVPGLAYIHAGPVLRLRSPAAEALGPTHLLHTRYATKEDLASYAAHPAHVAAVQGHVLPNALDITAVDWVNAAPLPSPVAPGSAVRLTLAKVKEGVEVAQLVEKVAAATQAAGDAKVSFGENFSPARAKGYQFGMVAVFDSVEELDAVEGDGKVEEAKALVRPLLDEVMVLDFVVGDAPTPASL

SEQ ID NO: 16922 - protein, 142 aa, Zea mays
  VARIANT 1: note = Ancestral polymorphism is M, Derived polymorphism is I
  VARIANT 15: note = Ancestral polymorphism is R, Derived polymorphism is H
  VARIANT 31..142: note = Derived polymorphism lacks residues 31 to 142
  VARIANT 38: note = Ancestral polymorphism is P, Derived polymorphism is L
  VARIANT 65..142: note = Derived polymorphism lacks residues 65 to 142
  VARIANT 71: note = Ancestral polymorphism is N, Derived polymorphism is D
  VARIANT 73: note = Ancestral polymorphism is G, Derived polymorphism is E
  VARIANT 78: note = Ancestral polymorphism is C, Derived polymorphism is Y
  VARIANT 87: note = Ancestral polymorphism is G, Derived polymorphism is R
MYSFVEYICYWCLRHLLFCFRTGNLGDLGFQEESGDHPDDDARWKAHGFDLSGSEVLQHGDICQQIIILYDRGRIQRYFFTIWHRRGSSTYERPPNWKDEGIWFCQIFIASRGRESCQGNGWQGHFQINKNEGETGMELYLG

SEQ ID NO: 16923 - protein, 1036 aa, Zea mays
  VARIANT 38: note = Ancestral polymorphism is P, Derived polymorphism is L
MVLPRRTPELLEADEAQSFVHKLQLSVSGGLPHAVPVPGLRTEEHELVKAVFQVLQGFETSWFYWDSDVPWYREKAGIYVAHLSLTGLRSLLSPFLFTATCLKQVELFVGKVRMQHHKIPTLDAFASSVDSWLKRLRKAALKEEEQQFVSVNKTITLLGLTDSLSSLRSGAEHLSQVLHGAVPDGFWDSGAHMASSEVAVHILDHLFKKLNEVCLLEDGEGEPFHMLLVIFTGSLLPYLQCLDSWLYDGILDDPYEEVLKKQLLSFLFWIYFTSIHVMMFFYANNAVTIDQPSFWEMSYMLRVRGSRVDSSTTLTESESIKKKGSSNKESTTAGACLKVNNQGCVYILCPTFLKDVARAIVSAGKSFQLVEHVQDVHQIQTHKSTHRSNLYQDTNCSGQQKFWPDMSNLRIHDGPPRNKDALEVSTSQFGNDSREMGLLTLSEIFLICISGLLENGDHVYEYLRTLHADNVPNNNAFMENESNLKETEGTCTGNIIEKTWVKLLKDATSGRKCNGMEETIHAVIDKAGFASGCPKDASSNVVEGVFTLSCYENPAITACREVLMRNPASWSELNISESFHLPPLNDGNMRRAIFADGHSAGTSTDYKFGFQFDDLEHVRQEDDRRTLEDLYAFPTLLPCAKENALLSEILPMQKDSTLASRVLKFIQNMSMKDPLQPVGIIQECLSKCIKRQVDLIGNQILCKLMGEWRLMDELFVLRAIYLLGSGDMLQQFLITIFDKLDRGNSWDDDFELNNLLQESIRNSADKMLLTAPDSLVVSLAKYDTHNGEEGISTSKKGRALGFGIDALDMLNFTYKVSWPLDLIINTEALKKYNQVMGFLLKVKRAKFVLDETRKWMWKARGRTAHNFKQHLIVAQKLLHFVDAFHQYVMDRVYHSAWTELCDGMTAATTLDEVMEVHEAYLSSIQRQCFVASDKLWALIASRVKTILGLALDFHNVEQTLSTGGTASAVRTRCEMEIDRIEKQFDECVIFLLRILSFKLNVGHFPHLADLVTRINYNHYFMSDSGSFSAIPGSRPR

SEQ ID NO: 16924 - protein, 314 aa, Zea mays
  VARIANT 191: note = Ancestral polymorphism is R, Derived polymorphism is W
MPTLGISPLLDAYFRRRFAAAGLVEASVPLDGGATTVHCWRFPPGSADGEDDARPVLVLLHGFGPPATWQWRRQVGPLSRRFRLVVPDLLFFGGSSTSAGAGRVSEARQAEAVAKLVAALVAPPARVSVAGTSYGGFVAYHLARLLGPGAVDRVVIASSDLLKADADDRALLRRGGAERVEDVMLPRSPERMRRLMQLAYHRPRRFTPGFVLRDLAQYLYSDKVEEKKELIKGITLGNKDKFQLTPLPQEVLVLWGEHDQIFPVEKAFQVARKLGANARLEVLKDTGHMPQEEDPKRFNEAILNFLLPAPKSSL

SEQ ID NO: 16925 - protein, 582 aa, Zea mays
  VARIANT 300: note = Ancestral polymorphism is A, Derived polymorphism is T
MTPSVSCPVKCRPHPCLAPQPPAPSPELLAARGAPIAGELRACRSPPYLPLSRSADSLELRAACRGAPPASRARAAVALGGDGPSAALIAGAQSRHAIFRDELVRRAFTAAEAAHRGQVRASGDPYLQHCVETAALLAELGAGPAVVAAGLLHDTVDDAGLGYGFISEHFGAGVADLVKGVSNLSHLSKLARRNDTASRIDEADRLRIVFLAMEDARAVLIKLADRLHNMRTLDSLSKTKQQSVAKETLEIFAPLANQLGILNWKEQLENLCFKYLYPENFDELSTKLIEIYNIDMIAAATRRLEQALQVRGLSYYAIYGRHKSMYSIYRKMARKKLVMDKIYDIHGVRVILENKADCFATLEIIHHLWPRIPGKFKDYINSPKPNRYQSLHTVVLTEQTLPLEIQIRTRDMHLQAEFGIAAHWRYKEGERSCCTSVSEIVEWVRWVTWHCQTLNTGYPSSLACDASSKETHTIPSHSDACLLSYSKQCDHKGPVLVILLENEKMSVQEIPQNWTILDLLKRSSNYGMPLRLRLNCHAVHNWNQELKMGDVLELIPSTPCKSRGHTRELHQKFDHRLAVSQS

SEQ ID NO: 16926 - protein, 102 aa, Zea mays
  VARIANT 24: note = Ancestral polymorphism is Q, Derived polymorphism is P
  VARIANT 32: note = Ancestral polymorphism is E, Derived polymorphism is G
  VARIANT 59: note = Ancestral polymorphism is P, Derived polymorphism is L
  VARIANT 84: note = Ancestral polymorphism is T, Derived polymorphism is A
MVGASARPSAGRDGGPETALPKLQLLPCWLDGAVVKLVAADGDGDDLLAGSASSGKRRPTAQAAAGLARGVKALLSEVAEMIRTKFGRSIPAAKFGHVAYIR

SEQ ID NO: 16927 - protein, 293 aa, Zea mays
  VARIANT 10: note = Ancestral polymorphism is L, Derived polymorphism is I
  VARIANT 20..293: note = Derived polymorphism lacks residues 20 to 293
  VARIANT 24: note = Ancestral polymorphism is A, Derived polymorphism is D
  VARIANT 25: note = Ancestral polymorphism is A, Derived polymorphism is T
  VARIANT 59: note = Ancestral polymorphism is E, Derived polymorphism is G
  VARIANT 213: note = Ancestral polymorphism is R, Derived polymorphism is H
MQQGQIIVHLENLWLKMKQRLLQAALNHPHRPISVATASVCRVATHGNTTLHPGRLISGFDELLMHRRKARDSSRKTVITSNPTDLTVERYDGSVNVSVGLGRKRLKIMKYSTKPKELNKNRANMGISPEEDIVTLPPCIQLITKRDRCAKLMLPTDPYTCPGDLTLMSGAELFMREDVGLTDGEVEVLAGSMNVFMLASILAAGWVADHLGRRRTLVLANAFLMAGALAMSLGTSFAALMAARFVTSVGSGFARRRLGTDADEEGAGEEAVVEGEVQTMRATDASVWLHRIQ

SEQ ID NO: 16928 - protein, 155 aa, Zea mays
  VARIANT 21..155: note = Derived polymorphism lacks residues 21 to 155
MEREPAVEEEDDDEEEVACECCGFTEECTAPYIAGVRARFGGRWICGLCGDAVGEELGRAGTPPISPAEALDRHARACRGASAPPSPAGSPDGLIAALRLLLRRRLGSPPASRKARSTPSSPTRDAADPGVSALAAGASRSSLARTGSCFAALVE

SEQ ID NO: 16929 - protein, 318 aa, Zea mays
  VARIANT 187..318: note = Derived polymorphism lacks residues 187 to 318
  VARIANT 29: note = Ancestral polymorphism is T, Derived polymorphism is I
MPRAGVSSSESSRRGAGAFRTLSEDRRITVFCSDGRLYQVDYAWNATKLAGVTSVGVRGTDSVCVVGQRRANTHAPKDKLLDMTSVSRLFPITDRLGLLATGIAGDLTSACFSCHFCQNALQNNLLFKFEPTRITITSTAAWSTKDGEGRALAHEARNQTAEFRFNWGYEMPPDVLAQWIADRAQIWTQYVSKRPSGVVAMILGIDDEKGTPQLFTCDPAGYFFGHKHRDQIPDLVVRSNFDLFFSSRFQMAISALQFALKADLKASEVEVGVVRTDDPTFRVLTEAEIDEHLEAINPEPRHSEMLPGLFRDKLTLEN

SEQ ID NO: 16930 - protein, 288 aa, Zea mays
  VARIANT 176: note = Ancestral polymorphism is S, Derived polymorphism is G
MQDRFNGKHDKRRPEAINSGSARESCRQDDRAREGKSRNDGGDWPAPQHGLLSIGTLGDDDPPPPRASSQADDVLDFTIEEVKKLQDALNKLLRRAKSKSSSSSSSSRGSGASATDEDRRASHSQLPLDRFLNCPSSLEVDRRVSLIRHDGGGESGEFSPDTQIILSKARDLLVHSNGTAIRKKSFKFLLKKMFVCHGGFAPAPSLKDPVESRMEKLFRTMLQKKMNARPSNAAVSSRKYYLDDKPSGRMMTRDGRRRHDGEDDDEKGSDRIKWDKTDTDCKNIFIRC

SEQ ID NO: 16931 - protein, 156 aa, Zea mays
  VARIANT 43: note = Ancestral polymorphism is H, Derived polymorphism is Y
  VARIANT 87: note = Ancestral polymorphism is G, Derived polymorphism is V
  VARIANT 88..156: note = Derived polymorphism lacks residues 88 to 156
MRSLFPVLPVAVLNAVFVYWIFSSLSKTLNKLKVRINTVLAFHFGFLFLQYEKATFDVCSRKRMTTKLEMYRRLNNALIIAVAMSLVWITFESAARYAYLDDEDRDMEDTRPLIRPGPLSYVDNRAISVSKDTTTIILRTDSRVYAKAADDGGKWV

SEQ ID NO: 16932 - protein, 233 aa, Zea mays
  VARIANT 139: note = Ancestral polymorphism is P, Derived polymorphism is H
  VARIANT 178: note = Ancestral polymorphism is R, Derived polymorphism is T
MAASARPGERATSFAVACSLLSRFVRQNGVAAADLGLRIKGEVEQQRTPATTNSLPGAEGEEVERRKETMELFPQSVGFSIKDAAAPREEQGDKEKPKQLTIFYGGKVLVFDDFPADKAKDLMQLASKGSPVVQNVALPQPSAAAAVTTDKAVLDPVISLAAAKKPARTNASDMPIMRKASLHRFLEKRKDRLNAKTPYQTAPSDAAPVKKEPESQPWLGLGPNAVDSSLNLS

SEQ ID NO: 16933 - protein, 194 aa, Zea mays
  VARIANT 147: note = Ancestral polymorphism is R, Derived polymorphism is C
  VARIANT 140: note = Ancestral polymorphism is Q, Derived polymorphism is L
MFHWHAGSRWPTYQEPRIEKGTEGRKKSSRAAVAGRRESQDSGRGEATMSTLKFCRECNNMLYPREDKETRTLLYACQTCEHEEIATDTCVYKRVIRKPGGEPKDVLKDAATDPSLPRTRSVRCYNCNHPEAAFFQVCTQVLFTCCRLIFVALEFCAVTCNADTLSPQAPTKGEQAMTLYFICCNPSCGHRWRD

SEQ ID NO: 16934 - protein, 105 aa, Zea mays
  VARIANT 40: note = Ancestral polymorphism is P, Derived polymorphism is L
  VARIANT 33: note = Ancestral polymorphism is G, Derived polymorphism is C
MHPRGIDLKDRPLFAALTVKVQGKNVGIPVCGGAPTSKSPWNAHELLDLTHLEGESLREWLFFDTPRRTFESDNQKQRSLLDYNGCWWHFCTGSIGLAVHKAVYS

SEQ ID NO: 16935 - protein, 348 aa, Zea mays
  VARIANT 79: note = Ancestral polymorphism is P, Derived polymorphism is L
  VARIANT 42: note = Ancestral polymorphism is G, Derived polymorphism is S
  VARIANT 35: note = Ancestral polymorphism is Y, Derived polymorphism is S
  VARIANT 10: note = Ancestral polymorphism is D, Derived polymorphism is A
MAATPPLSWDASLQPRRSASSSGPAKRGGLLLGRYELGRLLGHDTFAKVYHARHADDTGETVAIKVLDKEKALRNGLVPHIKREIAILRHVRHPNIVRLFEVMATRSKIYFTMEFVRGGELFARVAKGRLKEDTARRYFQQLISAVGFCHAHGIFHRDLKPENLLVDERGDLKVSDFGLSAVADQFHPDGLLYTFCGTPSYVAPEVLARRGTKRIRLLRDALRPLVLAQRLLAAYARSGSLASRRRSRVLTIPSPPPSLDLTPPHVSAARADILVHGGRRGWVRHAEAFEALPKERATNRGKFAALQQSIQSYLGVCGPFLPSPPSHWDLVVADDGVVMVFVCLCRSR

SEQ ID NO: 16936 - protein, 58 aa, Zea mays
  VARIANT 33: note = Ancestral polymorphism is V, Derived polymorphism is I
  VARIANT 27: note = Ancestral polymorphism is I, Derived polymorphism is N
  VARIANT 24: note = Ancestral polymorphism is A, Derived polymorphism is T
  VARIANT 15: note = Ancestral polymorphism is N, Derived polymorphism is S
  VARIANT 9: note = Ancestral polymorphism is H, Derived polymorphism is L
  VARIANT 2: note = Ancestral polymorphism is A, Derived polymorphism is V
MARSSVLILINYAYNFTLSLDHGALQNNNSTFVYIIVIILKVSTLLTLARPVRSFSWH

SEQ ID NO: 16937 - protein, 462 aa, Zea mays
  VARIANT 364..462: note = Derived polymorphism lacks residues 364 to 462
MGTPNEMMAYSSLSKMDTSQNHGAALSNVVAGNNYPVQDYLYEQASEPDFPEYDSRDDLFAPTRASPKVNLNTVLGGLVSIVTGVNKSEDDASQHESFSTDISFLRSDKNGNVNVHPSVCVPSAPPLLEANALQYSAYKEVLLADPPEWLPDSSANVCLQCNLPFTALTRGRHHCRFCGGIFCKNCSKGRCLMPMKFRIRDPQRVCDACYERLDPLQGLLINYNSNCMQQAKHDVMDWTSTRSWLNMPVGVSMEYEIYKATNTMKKYCQVARLNPEKSIPSSILKGAKGLAILTVAKAGAVLTYKVGTGLVVARRSDGSWSAPSAILSVGLGWGVQIGGELTDFIIVLHDRKAVKAFSSRIHLSLGAGLSAAAGPIGRAFEADVRASEKGSGICYTYSCTKGAFVGVSLEGNVVTTRMETNLRFYGDAYLTATDILFGRVERPRAAQPLYSALDDLFSKMVC

SEQ ID NO: 16938 - protein, 371 aa, Zea mays
  VARIANT 273: note = Ancestral polymorphism is G, Derived polymorphism is E
  VARIANT 268: note = Ancestral polymorphism is D, Derived polymorphism is G
MSKNTVYSPCNLQIIGTGGPEAGHMSSIEALAPSVLNASPRPVFFVTTRETRLLNYSFRTGEEFALEFVQDRANTRKPLVSITSYNRNIKTTHTPWGEEANFSGDKPSKKLMKCPSISETSNQGTNKTYPEEIYTSGPTRMKFLCNFGGRFLLTEETSACLRSKGSQNIVTETSKKSRIPLHKFPPIIMEQMTNQDCAIQSDKGEASSYPTRKSRNANLSSSMPLESTDLSKWERNGSNSTSGQIPELHRTATDISKTGHAAQRDKVDVYSFGIIMCEKLTGQEPCAGIQHGGIIGGILSNTLRPPVPASCDPQWRELMERCWSNEPEKRPSFKEVEPTLINARSQPEQATKLTSMRTAIYVSFHVHGANG

SEQ ID NO: 16939 - protein, 415 aa, Zea mays
  VARIANT 179: note = Ancestral polymorphism is D, Derived polymorphism is E
  VARIANT 193: note = Ancestral polymorphism is G, Derived polymorphism is S
  VARIANT 208: note = Ancestral polymorphism is P, Derived polymorphism is L
  VARIANT 304: note = Ancestral polymorphism is G, Derived polymorphism is A
MAATLDGAAGCRKRKRAAPGLADLHDDMLERVLARLPPASYFRLRGVSRRWRAAAESRSFRAACARVTARDPWFLMLEDSDHQDQDQDERRPRPAAVFDSAERALARWRGAPVPLQPVAAASGLVLYRDPSTGGLTVVNPLTGASRALPPPARVAGALQAVAMYGSPYRVVLILGELPELSTVAYDSSTNAWSEQAALSRKPEVEGAPSRERVAEVGDGDGDDTVYFLSKSGDVVASTMQRSASRQYSSAVACGGCGGGDAVAYFLSRSGTVVACDLARRAFAELPRILPAYHEHSIDVVACGGAAYAVVLSEFLDAASLRVWEFAGGAWRQVAAMPPAMAHGFRGAKADVNCVGHGGRLMVCVSSSSAGAGGCFLCDVGTNRWEELPRRAAGDGDATTGFVSALSFEPRIEAAV

SEQ ID NO: 16940 - protein, 777 aa, Zea mays
  VARIANT 40: note = Ancestral polymorphism is G, Derived polymorphism is V
MRSNRRRLGGRGGGWGGQGGGVSVAASFAALLGCVVALVGGAAGQGPRPPSDYKTLSGAAPLVVAKGGFSGVFPDSSQGAYSFAMITSAPDTAMWCDVQLTKDGVGVCLRDINMKNCTSVDQAYPERKRTYVIDGVRKTGWFVSDFTIAELQSVSLTQAIWPRTRRFDGIYPIISITDFRSLVMPSPVWLNVQHDIFYKQHGLDMRNYILSIKKGVSMDYISSPELGFLKNMSGRVGRKTKLVFRFLEKALLDHSINQTYGSLSSNLPFIKSIASGIIVPKSYIWPVTKDNYLLPSTSIVTEAHNAGLEIYASDFANDRIIPYNYSYDPLAEYLNFINDGGFSVDGVLSEHPITASEAIGCFTKLNSNKTDHGEPLVISHNGASGDYPDCTDLAYHSAIDDGADIIDCPIQVTNDGVLMCMSSTNLLDTTNVQRTTYNSLVSVVPDIQPQPGIFTFNLTWSDINSNVLKPKISSPVSGYFLVRNPRYTNQGKFLKLSDFLAIAMDKDLSGVMIIIENAAFLVNSLGIDIVDSLTTALSAAGFDNHPTKEVLIKSKDSDVLVKLKQQKTKCKLVYTLPSGIGDASNSSLKDIKKFAEYVAVDSKSVFTLSSDFIIRQNSLVQDLQSAGLALYAEVFQNEFVAQPLDFFGDETVEINYYIQSFNLSGIITDFPKTVRRYKRNTCTVLGKDMPSYMQPPQAGSLAQFLQTFKTQPPSLPPMSTLNSSSVEEPPLPTVALRSVSDGSASGATKTPGTPSDAPTATVNAGMLLVMVFTALLI

SEQ ID NO: 16941 - protein, 247 aa, Zea mays
  VARIANT 7..247: note = Derived polymorphism lacks residues 7 to 247
  VARIANT 38..247: note = Derived polymorphism lacks residues 38 to 247
  VARIANT 40: note = Ancestral polymorphism is G, Derived polymorphism is R
  VARIANT 47: note = Ancestral polymorphism is R, Derived polymorphism is H
  VARIANT 53..247: note = Derived polymorphism lacks residues 53 to 247
  VARIANT 57: note = Ancestral polymorphism is G, Derived polymorphism is R
  VARIANT 145..247: note = Derived polymorphism lacks residues 145 to 247
MLSSYARGGRVGDAERLFAGMPDQSVVSWTAMVSGYAQNGRHEEAVRTFLDMWDGAGVRPNELTVSSVLPACAALGALALGRKVERYARGRGMLRNVYVANALVEMYAKCGSIHRAWKVFRGMGTQRDLCSWNSMIMAFVVHGLWTEALTLFHKLRMTGAKPDGITFVGVILACTHGGLVDEGKLLFNSMRGEFGLKPRIEHYGCMVDLLGRVGLLKEANSLIASMPMEPDAVIWGALLGACTSMAT

SEQ ID NO: 16942 - protein, 172 aa, Zea mays
  VARIANT 61: note = Ancestral polymorphism is F, Derived polymorphism is S
MSFNQSTVKGQARRERPRARPHGLTQQRRQEIKEAFDLFDTDNSGTIDAKELNVAMRALGFEMTEEQIRQMIADVDKDGSGAIDYEEFEHMMTAKIGERDSKEELSKAFRIIDQDGNGKISNIDIQRIAKELGVNLTLDEIQDMVQEADRNGDGEIDFDEFIRMMRRTSFGY

SEQ ID NO: 16943 - protein, 165 aa, Zea mays
  VARIANT 137: note = Ancestral polymorphism is A, Derived polymorphism is T
  VARIANT 123: note = Ancestral polymorphism is L, Derived polymorphism is Q
  VARIANT 121: note = Ancestral polymorphism is E, Derived polymorphism is K
  VARIANT 95: note = Ancestral polymorphism is G, Derived polymorphism is R
  VARIANT 67: note = Ancestral polymorphism is G, Derived polymorphism is D
  VARIANT 61: note = Ancestral polymorphism is R, Derived polymorphism is Q
  VARIANT 41..165: note = Derived polymorphism lacks residues 41 to 165
MMSPAFGSTMSFVSAMEDAKLVPFGHMPNFLLHHYHQHHPQPHATFFGSHPSLDAAPQPKRPHPMAGVYKAFSEVSPVLQFAHLTCVQAVLNELGAASRIHVTALVSPASHHPLELNLIHENLSGFARELGVFLQFAAYNVDALDPTKLVAITSGDAVAVHLPVG

SEQ ID NO: 16944 - protein, 347 aa, Zea mays
  VARIANT 8: note = Ancestral polymorphism is P, Derived polymorphism is Q
  VARIANT 11: note = Ancestral polymorphism is C, Derived polymorphism is R
MAGGDHLPAYCYFFSSAPTSPSRASCNCNPASSPPGGDEASTFDFTLGFSGQLQEATPTLAAADELFEGGRIRPLNAPHPSILRVANDASSGSADGTRCSPRRAGGADRQAEAAPLERGRSGCRPSSAAAAAPSSSRSRSRRATRSLSPFRGGSGLDAAAADDVDDESPPPSPRASSMIRGCGSGSGSRKWRLKDLFLFRSASEGRATGKDPLLKYTALSSASFWHPHGQPQRLSSASMSMRKGRGSAASAGDTPYATINRAAAAEDVRRRTTTATTTPLPFHRNSLFGYLRSNPAIHSISRKLGGSGHSGSSSSSSRGGRQAAGRHDDPYARTARRTAPHQESRRR

SEQ ID NO: 16945 - protein, 124 aa, Zea mays
  VARIANT 102: note = Ancestral polymorphism is H, Derived polymorphism is P
  VARIANT 79: note = Ancestral polymorphism is T, Derived polymorphism is A
  VARIANT 55: note = Ancestral polymorphism is K, Derived polymorphism is T
  VARIANT 47: note = Ancestral polymorphism is D, Derived polymorphism is Y
  VARIANT 41: note = Ancestral polymorphism is H, Derived polymorphism is Q
  VARIANT 10: note = Ancestral polymorphism is R, Derived polymorphism is Q
MGSVLLPTLRLKSEVDAAIRDTLDKVLVLRFGRATDATCLHLDDILDKSSWDISKFAMVALVDMDSEEIQVYIDYFDITLVPATIFFFNAHHMKMDSGTPDHTKWIGSFSSKQDFIDVVEVSKP

SEQ ID NO: 16946 - protein, 295 aa, Zea mays
  VARIANT 34: note = Ancestral polymorphism is A, Derived polymorphism is G
MEEGNNESAELPPGTTASVHNKALSGTREEVERGREAAVQAWLASMPLGEELERLRTELAAAKTRLAATAAEIPLLKSRIESTNAAVATRQEAAARKKAAAEDLRLRVDGARAELRRLRAEVAASRGAKDALERRVLVRRQAARALQLAERAIAAEAHALAWSAAAAAELAARARGDGEEDPHHDVVALPARKLQELRRLVDAEERKAEARVEEAEAARHAAKARRAAALARLNAARAKRRVAAEAEAELRRRADGDDARGTRASALARRSRSRSGRSCFAVKKLRRFLGNLTKA

SEQ ID NO: 16947 - protein, 442 aa, Zea mays
  VARIANT 57: note = Ancestral polymorphism is A, Derived polymorphism is V
  VARIANT 59: note = Ancestral polymorphism is A, Derived polymorphism is V
  VARIANT 72: note = Ancestral polymorphism is G, Derived polymorphism is S
  VARIANT 76: note = Ancestral polymorphism is P, Derived polymorphism is L
MDFSGGGGGGRSRAEPARWLEIARKLLAARDLVGCKRLAERAVEADPYLPGADELLAVADVLLASQRLLPSGRPDPVGVLQLQPAPGLDPAAAKRSFHRLSQLVSSPRNPRPAADTALHFIQEAFADLSSNASADPPPAPAPAAAPVPVPAPAPAAPPAPVPAPAAAPSLIPAPAPVSGDALASADGNAFWTVCPYCCHVYQYQRALVGRALRCQSAGCRRAFEATEIPNAPPIVPGTDMYYCAWGFFPMGFPKAADLSTNWRPFCPMFPGNSESPLQPAPAVTVNVDVQNLENNGGTDVQNVENNGIDDNSTPASVQPPGKSGDIDRAAGPSRGRMKKTTARKKVGAVSKKHSSSGVDSGIEPSMLGADSLNGNAGSGQTVGTREININEVAMPTDSATMLNFGGDEDIRFDLDVDATDAILGNLHNLPFLREDGNNRRMF

SEQ ID NO: 16948 - protein, 443 aa, Zea mays
  VARIANT 4..443: note = Derived polymorphism lacks residues 4 to 443
MRMRKNHCGGVKFCRVVTVHVLEQLKAEVAAASAVADRTMPRDIPLPVEGNEKRKRRGVSAIESSFNLDVRRQLDELIARMFYTGGLLFNLARNPYFRKAFMFATNNPIGGYVPPSYKLRTTLLVQERTHVERMLQPVKETWSSKGVSIVSDGWSDAQRRPLLNFLAVTEDGPMFLREINTEGISKTEYIAEKMLQFIAIKDALSVMVVSEKWSVYREDNPRQAQFVKEKIVNDLWWDKMWDTMIEKVKSVIYRHEMKETHEESIFYSVVHDILVSRWTKSNTPLHCLAHSLNPKYYTDAWINEVPNRQAPHNDEEISEMRNTCFRRYFSGEELKKIKLQYANFSLFGPGFNSFDSLEDRRLNPGRAEDLVFTHQNLCLLSRKSDEYHCGPSAMWDVGADTFEADFEGGADFLEQADLSLDEPELEERLFEDLEALGLTEDAE

SEQ ID NO: 16949 - protein, 72 aa, Zea mays
  VARIANT 4: note = Ancestral polymorphism is T, Derived polymorphism is M
  VARIANT 46: note = Ancestral polymorphism is A, Derived polymorphism is T
MLDTDTAIDVLRSLKRKAMATGRFFDCAGSRNTKKMFDDQDLGFFANFLGIFIFVLVIAYHFVMADPKYEGN

SEQ ID NO: 16950 - protein, 377 aa, Zea mays
  VARIANT 233: note = Ancestral polymorphism is A, Derived polymorphism is T
MGILCLGASSTLLCGEDRNNVLGLGCGNELVEVGSGHDGLDSVVGAVFPVDTDEAVRALLEKETDHKPQDGYAERLERGGLEYSWRRDAMDWICKVHSYYRFGPLSLYLAVNYLDRFLSSYDLPHDKPWMRQLLSVACLALAVKMEETVLPLPVDLQVCDVKFEFEARTIGRMELLVLATLKWRMQAVTPFTFISYFLDKFNGGKPPSLALASRCTDIIIGTLKGSIGSFRAAHRLFNSLACIADGAMFGCAYGFTGSTFLSFRPSEIAAASALAAVSENQVVGSSSALSASEVPINKVMIARCYELLQEQALVRKTGHVNGSPSVPQSPIGVLDATCFSFRSEDARLVSSQSNNISSSSSNDNQVSKRRRLSISPI

SEQ ID NO: 16951 - protein, 251 aa, Zea mays
  VARIANT 30..251: note = Derived polymorphism lacks residues 30 to 251
  VARIANT 65..251: note = Derived polymorphism lacks residues 65 to 251
  VARIANT 83: note = Ancestral polymorphism is C, Derived polymorphism is Y
MKFNIANPSTGCQKKLEIDDDQKLRAFYDRRISQEVSGDALGEEFKGYVFKIMGGCDKQGFPMKQGVLTSGRVRLLLHRGTPCFRGYGRRNGERRRKSVRGCIVSQDLSVINLVIVKKGENDLPGLTDTEKPRMRGPKRASKIRKLFNLNKDDDVRKYVNTYRRTFTTKNGKKVSKAPKIQRLVTPLTLQRKRARIADKKKRITKKKSEAAEYQKLLAQRLKEQRDRRSESLAKRRSKLSAAVKASAATSA

SEQ ID NO: 16952 - protein, 538 aa, Zea mays
  VARIANT 450: note = Ancestral polymorphism is R, Derived polymorphism is S
  VARIANT 416..538: note = Derived polymorphism lacks residues 416 to 538
  VARIANT 394: note = Ancestral polymorphism is T, Derived polymorphism is I
MALATNSAAAAAAAVSGGAASQPHRAATFLPLKRRTISAIHAADPSKNNGPAVPAAAAAKSSASAVATPEKNPAAPVKWAVDSWKSKKALQLPEYPNQEELDTVLKTIETFPPVVFAGEARHLEERMAEAAMGRAFILQGGDCAESFKEFHANNIRDTFRILLQMGAVLMFGGQVPVVKVGRMAGQFAKPRSEPLEERDGVKLPSYRGDNVNGDDFTEKSRVPDPQRMIRAYSQSVATLNLLRALATGGYAAMQRVTQWNLDFMDHSEQGDRYRELAHRVDEALGFMTAAGLTVDHPIMTTTDFWTSHECLLLPYEQSLTRKDSTSGLFYDCSAHMLWVGERTRQLDGAHVEFLRGVANPLGIKVSDKMNPSDLVKLIEILNPSNKPGRITIITRMGAENMRVKLPHLIRAVRNAGLIVTWITDPMHGNTIKAPCGLKTRPFDSILAEVRAFFDVHDQEGSHPGGIHLEMTGQNVTECIGGSRTVTFDDLSDRYHTHCDPRLNASQSLELAFIIAERLRKRRMRSGLNNSLPLPPLAF

SEQ ID NO: 16953 - protein, 392 aa, Zea mays
  VARIANT 283: note = Ancestral polymorphism is H, Derived polymorphism is L
MPPPPPPAACSRGRCSALSFAAARDRCFSHRFRRAGLRPLAVPLPGPGPDADPATTVHMWVPAGPPPRNPLLLLHGFGASATWQWAPYLRPLIAAGFDPIVPDLLFFGASCTRLPDRSDAFQASAIKAAMDAIGVPRFGLVGVSYGGFVAYRMAAMFPEAVHRVALVCAGVCLEERDLAEGLFPVAGIGEAAALLVPHRPEEVRRLVRLTFARPPLIMPSCFLWDYIKVMGSDHIQEKAELLYALINGRQLCTLPKLTQPTLIIWGEQDRVFPMELAHRLNGHLEGNSRLVVIKNAGHAVNIEKPKEVCRSIIEFFKEPVAGAANADDKVYYLADEPEVHFVWQPSQESSGLAMSRAFDDYYIKDCGVISAPEVTQRRTDNNDQFVILATVV

SEQ ID NO: 16954 - protein, 1098 aa, Zea mays
  VARIANT 682..1098: note = Derived polymorphism lacks residues 682 to 1098
MARSNSWYVLHFCSTSLKSWPSSATDHPHLFPQIRCRLLSLPFLRRGIHSSVPTSVGAATDATLLGRLTRLLLLHRFSAVARLLSSSAPLTPALLHAALRRVRLDADAAVHLFRLAPFPPSLLAHAQLLHILVRARRSADARAILASLLSARPPAPPLFPHLVEVYKEFSFSAASFDLLLRALANAGQLDGALQVFDEMRTLGCRLSMRSCNSILNRLAQTGDLGATVAVFEQMQRAGALPDKFTVAIMAKAYCKVKGVVHALEFVEEMTKMGVEVNLVAYHAVMNGYCEVGQTNDARRMLDSLPGRGFSPNIVTYTLLVKGYCNEKNMEEAEGVVQEIRKNKQLVVDEAVFGAVINGYCQMGRMEDAARLLNEMVDSRLQVNLFVYNIMINGYCKLGRMVEAHNILHEMTGVGVRPDTYSYNSLVDGYCKKGLMNKAFETYNTMLRNGFAATTLTYNALLKGFCSLGSIDDALRLWFLMLKKGIAPNEISCSTLLDGFFKSGKTEKALNLWKETLARGLAKNTTTFNTVINGLCKIERMPEAEELVDKMKQWRCPPDIITYRTLFSGYCKIGDMDRASRILNELENLGFAPTIEFFNSLITGHFIAKQHGKVNDILFEMSNRGLSPNTVAYGALIAGWCKEGDLHTAYNLYLEMIEKGLVPNLFICSSLVSCFYRKGKFDEANLVLQNLVGTDMIPDISAPRLEIGKVANFIDTVAGGNHHSAKIMWNIVIFGLCKLGRIEDAKNLLADLKDKGFVADNFTYSSLIHGCSASGFVDVAFDLRDTMLSVGLTPNIVTYNSLIYGLCKSGELSRAVSLFKKLWTKGISPNAITYNTLIDKHCKDGYITEAFKLKQRMIEEGIHPTVFTYSILINGLCTQGYMEEAIKLLDQMIENNVDPNYVTYWTLIQGYVRCESVDVPIMPLDQSTIVVKASPRRAVRRPGSVSRPARLTPAPKASGRDYVLNMQVSITFQQYNCLIVFCEGAWSYHEKCFQPPSHVSQVVSSNYRLDWLSKCRDLLLVTLPLLSGTRYIPSILQSVSYPRLFFMDQALSKVYPLFIPRKNVCTGGEETPLTESGSSYFGADSGFCQETVFWFQEKQ

SEQ ID NO: 16955 - protein, 1048 aa, Zea mays
  VARIANT 702..1048: note = Derived polymorphism lacks residues 702 to 1048
MAEIRKYAMSNQPPDIPQILLEAQSRWLRPTEICQILSNYKKFSIAPEPPNRPQSGSLFLFDRKILRYFRKDGHNWRKKKDGKTVKEAHEKLKVGSVDVLHCYYAHGEENENFQRRTYWLLEEGFMNIVLVHYLEIKGAKQSFNHAKEAEETAGLSNADSPACSNSFASQSQVASRSMDAESPISGQISEYEDAETDNSRASSRYHPFTEMQQPVDGTVMAAGYLGEMQPTGANFTSHFATRNDIASVFNDTGSELGGGPKTSIDSVLLGEPFPEYPGGFMESTLYSSVATLGNSLEDGLQTFMSEALYTNNLTQKEVDALGAAGITSSKVICYFLVFLNYLKNDAVGHWSLPISMSWYDVTLYFQTENDGYTDQSVRYPLLKQSSSDLFKMEPDGLKKFDSFSRWMSNELPEVVDLDIKSSSDAFWSTTETVNVADGSSIPINEPLDVFVVSPSLSQDQLFSIIDVSPSWAYNGTKTKVLITGTFLAKKEDVENCSWSCMFGDSEVSAEVLVDGSLRCYTPVHHSGRVPFYVTCSNRVACSEVREFEFRDSETHYMDISDKHTTGINEMHLRIRLDKLLSLEPEDYEKYVLSNGNKSELINTISSLMLDNNLSNLALPSDEKELCTVQDQNLEKQVKEKLYYWLIHKIHDDGKGPNVLGKEGQGAIHLVAALGYDWAIKPIVAAGVNINFRDIRGWTALHWAACCGRERTVGALIASGAASGALTDPTQQYPSGRTPADLASENGHKGIAGFLAESALTSHLSALTLKESPSGNVEEICGLTAAEGFAASSSSQLACVNSQEESLKDSLGAVRKSTQAAARIFQAFRVESFHRKKVIEYGDDDCGLSDERTLSLVSLRNPKSGHGDSHSAAVRIQNKFRGWKGRKEFMLIRQKIVKIQAHVRGHQVRKNYRKVVWSVGIVEKVILRWRRKGRGLRGFQPEKQLEGPSWQIQPAKAEAEDEYDFLKDGRKQATGRLDRALARVRSMNQYPEARDQYRRLQACVNSLRESQAMQDRMLADSAGTDGGDFMTELEELCRDDGDAPMSTIS

SEQ ID NO: 16956 - protein, 121 aa, Zea mays
  VARIANT 14: note = Ancestral polymorphism is S, Derived polymorphism is F
  VARIANT 32: note = Ancestral polymorphism is L, Derived polymorphism is F
  VARIANT 35: note = Ancestral polymorphism is S, Derived polymorphism is L
  VARIANT 41: note = Ancestral polymorphism is T, Derived polymorphism is M
  VARIANT 42: note = Ancestral polymorphism is A, Derived polymorphism is V
  VARIANT 46: note = Ancestral polymorphism is L, Derived polymorphism is P
  VARIANT 58: note = Ancestral polymorphism is P, Derived polymorphism is S
  VARIANT 59: note = Ancestral polymorphism is V, Derived polymorphism is M
  VARIANT 68..121: note = Derived polymorphism lacks residues 68 to 121
  VARIANT 70: note = Ancestral polymorphism is S, Derived polymorphism is N
  VARIANT 77: note = Ancestral polymorphism is A, Derived polymorphism is V
  VARIANT 78: note = Ancestral polymorphism is V, Derived polymorphism is M
  VARIANT 81: note = Ancestral polymorphism is A, Derived polymorphism is V
  VARIANT 82: note = Ancestral polymorphism is A, Derived polymorphism is T
  VARIANT 86: note = Ancestral polymorphism is A, Derived polymorphism is T
  VARIANT 95: note = Ancestral polymorphism is V, Derived polymorphism is M
  VARIANT 98: note = Ancestral polymorphism is P, Derived polymorphism is L
  VARIANT 99: note = Ancestral polymorphism is V, Derived polymorphism is I
  VARIANT 101: note = Ancestral polymorphism is T, Derived polymorphism is I
  VARIANT 105..121: note = Derived polymorphism lacks residues 105 to 121
MQALLDLLFAVEGSVSDATKILGLSTGALSRLILSDDSLRTAANELRASKCFFDCRAPMLYYVLLTLQDSVHKVFYAVVEAAAVRADNNHLGGLVRYPVSTTLPQIGSRLFLTWGVFWSFP

SEQ ID NO: 16957 - protein, 155 aa, Zea mays
  VARIANT 1: note = Ancestral polymorphism is M, Derived polymorphism is I
  VARIANT 30: note = Ancestral polymorphism is R, Derived polymorphism is T
  VARIANT 132..155: note = Derived polymorphism lacks residues 132 to 155
MESTALMTARLPLLTSGSRSKPLPFASFTRAACRLASAPFSGSGSVVLLSRRSRDYAGVGSLVSAAADPGDTADAGSESILLSVQGMMCDGCAASVKRILESQPEVTSATVDFKEASAVVWTTDEAKGTQGWQKQYGEKLAKHLGTCGFESRLQG

SEQ ID NO: 16958 - protein, 160 aa, Zea mays
  VARIANT 1: note = Ancestral polymorphism is M, Derived polymorphism is V
  VARIANT 8: note = Ancestral polymorphism is D, Derived polymorphism is G
  VARIANT 15: note = Ancestral polymorphism is A, Derived polymorphism is V
  VARIANT 28: note = Ancestral polymorphism is L, Derived polymorphism is V
  VARIANT 60: note = Ancestral polymorphism is R, Derived polymorphism is C
MKVCMLGDAQHVEEAEKMGLDYMDVEALKKMNKNKKLVKKLAKKYHAFLASETIIKQIPRLLGPGLNKAGKFPTLVTHQESLESKVNETKATVKFQLKKVLCMGVAVGNLSMEEKQIQQNIQMSVNFLVSLLTKNWQNVICLYIKSTMGNHSGCSKSAFL

SEQ ID NO: 16959 - protein, 370 aa, Zea mays
  VARIANT 245: note = Ancestral polymorphism is S, Derived polymorphism is L
MTKRTAFAADDAIIAAAAAVTSQPGRRFTSYPPARARGGCRLAPAVAAAARQATDDPGAAGSWPELVVPRHADFDDWMEKHPSALAAFESVLAAAKGKKIVMFLDYDGTLSPIVRDPDSAVMSEEMRDAVRGVAEHFPTAIVSGRCRDKVFNFVKLAELYYAGSHGMDIKGPTAQSKHTKAKAGAVLCQPARAFLPVIEEVYRALTASTAPIPGATVENNKFCLSVHFRCVQEEKWRALEEQVRSVLKEYPDLRLTKGRKVLEIRPSIKWDKGNALQFLLESLGFAGSNSVFPIYIGDDSTDEDAFKVLRNLGQGIGILVSKIPKETRASYSLREPSEVATLPTATSYYCTVEEFLRKLVSWSKESRQRD

SEQ ID NO: 16960 - protein, 194 aa, Zea mays
  VARIANT 17: note = Ancestral polymorphism is E, Derived polymorphism is G
  VARIANT 81: note = Ancestral polymorphism is R, Derived polymorphism is G
  VARIANT 90: note = Ancestral polymorphism is V, Derived polymorphism is A
  VARIANT 113: note = Ancestral polymorphism is A, Derived polymorphism is T
  VARIANT 125: note = Ancestral polymorphism is S, Derived polymorphism is L
MEAVVRKVQQRVRKAREEMDQWDDLNTRLLSQFSNAAAVISRLQALGEDKNYGPLRAVPNIRVDLIGNQMEVLELIFVKIRETLEKFNDVVKALNKALRDTKQMVRGGSALTAKQMQLQVGILPSIAECLDGFQTLCEMHHDEFTLKSSAISLLTWKTCSSDIAVLRQLLVDQPNIPKDEVQSIFDIIFADEIC

SEQ ID NO: 16961 - protein, 293 aa, Zea mays
  VARIANT 87: note = Ancestral polymorphism is S, Derived polymorphism is Y
  VARIANT 107: note = Ancestral polymorphism is A, Derived polymorphism is V
  VARIANT 111: note = Ancestral polymorphism is F, Derived polymorphism is V
  VARIANT 112..293: note = Derived polymorphism lacks residues 112 to 293
  VARIANT 115: note = Ancestral polymorphism is R, Derived polymorphism is K
  VARIANT 137..293: note = Derived polymorphism lacks residues 137 to 293
  VARIANT 141: note = Ancestral polymorphism is P, Derived polymorphism is L
MKKREVKFVQRPSGVRFNRYCVYRVRESRQLPLGLGLGAPSLYAAVLARVSAAFNGPLARAVVFGVHIDGSPSFFVCSQDGSAVLVSHTQWPRDFSGHLVVEGLLIAVIVFQLSRKSYKPPKKPLTEKEIDELCDEWEPELLCPPIKEGAKIDAPTLERNKVVMEGFMTAIIQFLEALESFYVVERDGSIILFLVTLGGCHSSDYIKKMTLSLGLRDMAFHSAQLDPSPEHRRKFKLCKVRSVQFGQKVIPYLNTYDDRTIRLRPSHQGQRHHQDRSGDQQDHGLHQVVFAIS

SEQ ID NO: 16962 - protein, 169 aa, Zea mays
  VARIANT 68: note = Ancestral polymorphism is A, Derived polymorphism is P
  VARIANT 50: note = Ancestral polymorphism is Q, Derived polymorphism is L
  VARIANT 47: note = Ancestral polymorphism is P, Derived polymorphism is L
  VARIANT 41: note = Ancestral polymorphism is G, Derived polymorphism is E
  VARIANT 40: note = Ancestral polymorphism is A, Derived polymorphism is G
  VARIANT 33: note = Ancestral polymorphism is V, Derived polymorphism is A
  VARIANT 6: note = Ancestral polymorphism is S, Derived polymorphism is I
MARLISLAVAVAVAVLALASGAASQAPGPASSVDCTSALAGLVGCLPYVQQGSTQGKPARECCAGVKAALKRHATVACLCAAFGRNYGMPLNLTRAAGLPAACGEDPAAFSRCNIKVPGAPASAPIASGTAPAAPTPGSSKSAAVIRSPVSAFAVLVGVAATLLSHCPL

SEQ ID NO: 16963 - protein, 160 aa, Zea mays
  VARIANT 86: note = Ancestral polymorphism is A, Derived polymorphism is T
  VARIANT 82: note = Ancestral polymorphism is A, Derived polymorphism is S
MPLFFSKFAPLVPRVRRLSIAAATAAGEDPKLSRIADELLALSPAELDDYAALLRLKLRLSLTSSAAAGASPAGAGDAAAAAVEAAAAVKTAFDLKIEKYEAAAKIKIIKEVRAMTDLGLKEAKELVEKAPVVVRAGLPKEEAEALAAKLKAAGAAVALE

SEQ ID NO: 16964 - protein, 478 aa, Zea mays
  VARIANT 381..478: note = Derived polymorphism lacks residues 381 to 478
  VARIANT 384..478: note = Derived polymorphism lacks residues 384 to 478
MASRRGSSSCALCEGSNLPSCCALCVNARLLEYHTKLRMMRSLRDSLHARIAARLEAKSKTDEQRIWRASKAHDIMELRDRLTELKSKTAVDKTKVEQASSGLKAKTASLNLALVTLKKRQADAVAMHTSAMEIAQMNLMTITSDCMKMQSKSVKQLCRLFPMRRVIKEGEKKDNYSGPYDSICGARLPRGLDPHSIPAEELSASLGYMLHFVNIAVRILSAPVLHVSGFKGSCSNIWQRSSYWSTRQSQSKVYPLFIPRKNACTGGEETSLSESGSSNFGVDSVDSVKKQSFGSTRSNSFNLSGASSHSMERHQYLQRGISLLKTSVTAITTYYYNSLGLDVPSNLSTFEAFSKLLHTLSSSKAFRTAFELNIASRSEKQAQQLNRSIWKSSSAVSSDSSFMDSMHTTIMPSTLDNLLLNSNQSFLYTAKLVKHGGVPDSIFNGWDLVEREVLPPPPSRFEDVAQWERAMYAGTKKK

SEQ ID NO: 16965 - protein, 286 aa, Zea mays
  VARIANT 28: note = Ancestral polymorphism is G, Derived polymorphism is S
  VARIANT 90: note = Ancestral polymorphism is C, Derived polymorphism is Y
MSSLRAISSLLHIYSTSAAARRGAGRLGFAPSPGGRFRVPSNSGPPAFVLDEVARAAGGVRRRASTRAASWDSEKSPYETLDEANVCSLCLMRFKELGRDADEETIKTAYRRLAKFYHPDVYDGKGTLEEGETAEARFIKIQAAYELLIDGERRRAYDREHHVNPMKASQAWMEWVMKKRKAFDQRGDMAVAAWAEQQQREMTLRARRLSRSKVDPEEERKLFAKEKKASMEFYSTTLKRHTLVLRKRDIMRKKAEEEKDKEISRLLAAEGLELDTDEDENKTFLG

SEQ ID NO: 16966 - protein, 1290 aa, Zea mays
  VARIANT 390: note = Ancestral polymorphism is R, Derived polymorphism is W
  VARIANT 789..1290: note = Ancestral polymorphism lacks residues 789 to 1290
MAEGSSSHRRSAFSPGLAVLLSGDEAKISSQKSHLVSYHDEIGHQAVERTIEHIFDLPHKSVVRPPGPVDTGFVHSVVRNQARKFDLDWENCIRGYHRSVFIVDKGAGQRKVVLDDSSICGSFRNVRGPSLVESSAPFSSARANACVWKGKWMYEVTLETSGVQQLGWATLSCPFTDQKGVGDADDSYSFDGRRVTKWNNDPKPYGQPWAVGDVIGCCINLDAGEISFYRNGTSLGVAFDGIRSVEPKKGYYAAVSLSEGERCHLNFGSHPFRYPVDGFDPLEAPPRSWSFVTYLLRCLFRLLEVHNLEKSESAYFEKLRRVKKFAPLQELFGPISEGICAEIFSAIEASQGCLEYIAWGSLITLLLDVFRTREPHDFSCLDQVLDLFLRFPGCTSLFQELIVALSCMCKVAPLVLTECPYSGSYPFLALVCHLLRHKDVMCLWWKAEDFVFSFEGFLTRKIPNKQDLQCLVPSVWWPGSSEDEVSMTLTMTTLSDAIKKVNFPFISADFAIEEMHRELCSLVICFIPPMSTPQPPGSVFRSFVQSLVLKARGGDHRMVVNGTFNNTVLVSLYTVILHLLSEGFSMDSAGSASSSKANFGNGVGFLHKGGKRKFPTQLFFRNDAYHSVIPRIGGPPSILMHHQFDAVENEVQWDEGCMNDEETRVTHTTAQKPCCCSVTDVAVGLRYKETAKYVPSTSKGSCKPMPERSPHVAAECNGRGLSDEIEDKPSTSAQSEIEYGYQSLHSLENMPMATQSSSETLKEEELLDVMLLLYHLGISPNFRQAILISISSLQAFYFMSQQSQSISLLEETDRQIREKSCSEQVRRLKEARNSYHEDLVDCVRHCVWYRATLFSQWKQRGMYATCMWVVELLLVLSNSNSMFHYVPEFYVESLVDCFHALRRSDPPFVSPALFLMQGLASFVTLVVKHFDDTRIVNPDLKDLLLQSISVLVQYKEFMLVFENNREAINKMPRSLLSAFDNRSWIPVTNILSRFCKGSGFASYKNGESASSATFQVLLRETCIHEQELFFSFLNRLFNTLSWTMTEFSMSIREMQDKNQVADLQQRKCSVIFDISCSLARILEFCTREIPCAFLMGPDMNLRRLTELVVFILNHIISVADAEFFDMTLRRPGQHQEKTNRTMILAPLVGIILSLMECSSTSERRELNDVIAVFASMDCPATIHFGLQYLLSYNWSNVLRGDSSLAKLAQLKEFSHYFRRITASVDGEEEDHSLNAGDEDDDHTCCICYNCDSDATFQPCHHRSCFGCISRHLLNNQRCFFCNAVVTSVTR

SEQ ID NO: 16967 - protein, 175 aa, Zea mays
  VARIANT 115: note = Ancestral polymorphism is L, Derived polymorphism is M
MPHRHHDAAAGDEAPSPRPSAAGCYAFLTRSHRSAGAYRRLDSARALEAEADAAVAAVRVEVGTAAKGRARSVFHVDPAVLEAGPVRRLLAAAGRRAPGGGVAVDVDALLFEHLMWLATKARDGGGVGGDGDGDEDEGSAPAADDDLSEIVEFYSQDDEDDEEEGRDHGLSSLSF

SEQ ID NO: 16968 - protein, 232 aa, Zea mays
  VARIANT 7: note = Ancestral polymorphism is S, Derived polymorphism is R
MQAPPERYGLAAMEFESAARRRQRRLSSPSLRTHLTPAFDAVAGGEGGVSGYSSSSSSSGLELGFDASLLRNRRSGFAAPSDLDSRVLLYSPQSVPPQMRAAYLAADDGVRAPGVNHYGSKYEAARLTGAPGFQGSENHISFASPPQTSSNIPTTVLGASTSTKLPAELQLPEGSVVATNAELKTPGPEATPSTLKPSANPEPRVDGDDITDALYGDHGHRRLPIFREICPD

SEQ ID NO: 16969 - protein, 527 aa, Zea mays
  VARIANT 184: note = Ancestral polymorphism is T, Derived polymorphism is I
  VARIANT 13: note = Ancestral polymorphism is G, Derived polymorphism is S
MYTNSSPTSLLLGILSILLSTHRHVIASQSPRDNGVRARSLSTCLLASGVRNFSMAGSPGYATIFDFSIQNLRFAAPGFRKPEAVVLPTSRRGLQRAVLCARSASLAIRVRSGGHSYEGQSYTVSGGVLDGKAPFVVIDLMNLNKVRVHAASATAWAESGATLGEVYHAVAHSSPSNRSSLALTAASCSTIGLGGHISGGGFGPVSRKFMLAADNVLDALLVDAVGRVLDRRAMGEDVFWAIRGGGGGSWGVVYAWKLRLVPVPDTVTVFTPRREGSVDAMAGLVYRWQFVGPALPDEFYLSASLTIGSSSSSSQEDRDLRNVAFTGLVLGPKEMAMSVLNERFPELGLAEAEVSEMSWVESAARLAGLSSVDELTSRVSKTKYYGKNKSDYVQRPISRDSLAAILRYLSDGPPAGYVTMDPYGGAMARLSATATPFPHRAGNLYALQYGVTWDSDAGEASVNYIDIDLMGFDESLGPVRLASSVSHARATWGAAYFTVENFDRLVRAKTLPMSFTMPKAYHCISGR

SEQ ID NO: 16970 - protein, 176 aa, Zea mays
  VARIANT 85: note = Ancestral polymorphism is L, Derived polymorphism is P
  VARIANT 80: note = Ancestral polymorphism is K, Derived polymorphism is T
MLAHMLSADKRLDAELKLVGEYGLRCKRELWRVQYALSRIRNAARELLTLDEKNPRRIFEGEALLRRMNRYGLLGEGQNKLDYVLALTVENFLQRRLQTIVFKNGMAKSIHHARVLIRVGRQPVNIPSFMVRVESEKHIDFSLTSPLGGGPAGRVKRKNQKASGGGGGGDGEEDDE

SEQ ID NO: 16971 - protein, 304 aa, Zea mays
  VARIANT 38: note = Ancestral polymorphism is S, Derived polymorphism is I
MVTLENLRRIYGHVVERATLARDLLAPAAGQLSGNLHSRCILAQQLDLSFPEKDDDLRADLEKFGAIEAIALCRHLFMAVIVFRDEASVPVAFRRQEEISSGLYSAVPPPHLALSTSFIHPNSIKVNLYSNTSTASSGDSTAKHSTEPTTTEAATSIGQSMMPLWMESRPATVFQNYLGDGSRFVPSRRSQIYGPTLGADGRLWMEGFNIVQCGNYAQSVPTAIPVAQVPQLLYQSEDELAARRTRSHITISSSVGSPINPLQRSPIRATPLRVGSYPRSTEVSVCTAVNIGSAFPAIMITTRK

SEQ ID NO: 16972 - protein, 106 aa, Zea mays
  VARIANT 10: note = Ancestral polymorphism is S, Derived polymorphism is R
  VARIANT 1: note = Ancestral polymorphism is M, Derived polymorphism is T
MVSLVRDRTSLIMCFALTVENFLQRRLQTIVFKNGMAKSIHHARVLIRVGRQPVNIPSFMVRVESEKHIDFSLTSPLGGGPAGRVKRKNQKASGGGGGGDGEEDDE

SEQ ID NO: 16973 - protein, 330 aa, Zea mays
  VARIANT 166: note = Ancestral polymorphism is P, Derived polymorphism is R
  VARIANT 122: note = Ancestral polymorphism is G, Derived polymorphism is R
  VARIANT 114: note = Ancestral polymorphism is R, Derived polymorphism is P
  VARIANT 68: note = Ancestral polymorphism is G, Derived polymorphism is A
  VARIANT 54: note = Ancestral polymorphism is R, Derived polymorphism is H
MVRPPCCDKEGVKKGPWTPEEDLVLVSYIQEHGPGNWRAVPARTGLMRCSKSCRLRWTNYLRPGIKRGNFTEQEEKLIVHLQALLGNRWAAIASYLPERTDNDIKNYWNTHLKRKLQSGGDGAAKPPAHRPPSSSKGQWERRLQTDINLARRALREALTPLDDLKPQLQRDAAADAPAAGAGTGGGDSPASSSSGASQSSPLAPAAFAAAAAGPYVLTAENISRMLDGWAGRKVRGGGTPGTPGGAESASTGSSDASEVSYGGAAVASAAPAPACGGPVFEYEAKPGVPTSHQQMPLSAIESWLFDDDSHLHHAVQSASLLDAAPMDYPF

SEQ ID NO: 16974 - protein, 259 aa, Zea mays
  VARIANT 17: note = Ancestral polymorphism is A, Derived polymorphism is P
  VARIANT 18: note = Ancestral polymorphism is D, Derived polymorphism is N
MMKLAIAFVVLLSSFLADSSTAEEFDFFYLVQQWPGSFCDTRQGCCFPDGAGKPAAAFGIHGLWPNYAKCRGRHHREGGGLARAVLGAGDAFLAAVGRRGKCWPEYCGGGGGGHQLSPWDIRDLVASLGRSWPTLSCKNRRSFEFWSYEWKKHGTCSNLDPHDYFARALQLRARHDLAAVLADAGIVPSDTDTYPVDRVRDAIAQGTGFAANLECNRDADGEAQLFQVYQCVDREAKDLIDCPLPMPTKCTDRVKLPVF

SEQ ID NO: 16975 - protein, 573 aa, Zea mays
  VARIANT 65: note = Ancestral polymorphism is Y, Derived polymorphism is D
  VARIANT 297: note = Ancestral polymorphism is T, Derived polymorphism is I
MEAGEIGGALVFILAAAAAVAAAVSVGAVDFSRPLTAGAPFDFQAAVSWLIGILDGTSSAAADVDGAWVAVRAGVIAPVLQVAVWACMVMSVMLVVEAVYNSVISLGVKAIGWRPEWRFKWKPLDSADEEKGTAHFPMVLVQIPMYNELEVYKLSIAAACELQWPKDRIVIQVLDDSTDPFIKNLVELECEHWVNKGVNIKYATRTSRKGFKAGALKKGMECDYAWQSEYIAIFDADFQPEPDFLLQTVPFLLHNPEVALVQARWSFVNDTTSLLTRVQKMFYDYHFKVEQEAGSATFAFFSFNGTAGVWRTGAIRDAGGWKDRTTVEDMDLAVRATLKGWKFVYVGDVRVKSELPSTYKAYCRQQFRWSSGGANLFRKMAKDVLFAKDISLVKKFYMLYSFFFVRRVVAPTAACILYNVIIPISVTIPELYLPVWGVAYIPMVLTVVTAIRHPKNLHILPFWILFESVMTLHRMRAAMTGLLELEGFNQWIVTKKVGNDLEDTEVPLLQKTRKRLRDRVNLPEIGFSVFLFLCASYNLVFHGKTSYYLYMYLQGLAFLLLGFNFTGNCSCYQ

SEQ ID NO: 16976 - protein, 203 aa, Zea mays
  VARIANT 143: note = Ancestral polymorphism is A, Derived polymorphism is S
  VARIANT 160: note = Ancestral polymorphism is G, Derived polymorphism is C
MAERTNAMAAPRPLLRRMLSFREPLLVIPYLLSFLGAAASALARSHSSLLHSLARALFPAAPAAANAKHAPPPAAAAAAAAAAPLDGEDAALSKAEVEAIMATIGLAAAGKGEGLAAAMGRDEVSALFDADEPSFAEVRGAFAVFDADRDGFIGAEDLQCALARLGVRQDAAACRAMVVAAGGGRDARMSLFQFVRFLENGLC

SEQ ID NO: 16977 - protein, 267 aa, Zea mays
  VARIANT 218: note = Ancestral polymorphism is R, Derived polymorphism is S
MAAALFSTSLSPRFLALSSPKPAAPAASAFLPFTLPLRAVSAPAPARRVFEPVAVAVSSEYGTEGAEQQDGEFSEDLKLFVGNLPFSVDSAQLAGLFEQAGSVEMVEVVYDRMTGRSRGFGFVTMSSAEEAGAAVEQFNGYTFQGRPLRVNCGPPPPRDGSAPRAPRGGGGGGGGGSFVDSGNKVYVGNLAWGVDNSTLENLFSEQGQVLDAKVIYDRDSGRSRGFGFVTYGSAEEVNNAISNLDGIDLDGRQIRVTVAESKPRREF

SEQ ID NO: 16978 - protein, 209 aa, Zea mays
  VARIANT 76: note = Ancestral polymorphism is E, Derived polymorphism is D
MRRGYSYSPSPPRGYRRRARSPSPHDHYGGRGRDLPTSLLVRNLRRDCRPEDLRRPFGQFGRVKDIYLPRDYYTGDPRGFGFVQYYDPADAADAKYYMDGQVVLGRQITVVFAEENRKKPQEMRARDRVRGHSYDDRRYSRSRSPRYYRGRSPSRSQSYSRSPPQNPRHRLRERSYSGSPVDSRSRSGSPYEDGYRKSSRRERSLSVSG

SEQ ID NO: 16979 - protein, 150 aa, Zea mays
  VARIANT 126: note = Ancestral polymorphism is E, Derived polymorphism is K
  VARIANT 101..150: note = Derived polymorphism lacks residues 101 to 150
  VARIANT 53: note = Ancestral polymorphism is S, Derived polymorphism is I
MHLRLETAGRPYRTVLKNFNPRMAMSWTRGLKHGVVPRHAAQLVESRSLAIASKAKKGGKADAGKTPALSQELKSTTVFGANIFKEGSDPKIQPDSEYPDWLWHLLDKRPVLSELRRKDPKTLSYEDLKRFVKLDNRSRIKIRNDLNAKN

SEQ ID NO: 16980 - protein, 520 aa, Zea mays
  VARIANT 405..520: note = Derived polymorphism lacks residues 405 to 520
  VARIANT 403..520: note = Ancestral polymorphism lacks residues 403 to 520
MEVDGEAQHFRLFSKRAKPKLKPEVQPQPEPEPPSRDPAAAEAYLDPAPTIVTETGQADDAADAAGTAPATFADLGLSQWLVDACEALGMRRPTAVQRRCIPRALAGADVLGIAETGSGKTAAFALPILHRLGEDPYGVAALALAPTRELAAQLAEQFRALGAPLGLRCLAAIGGFDSLAQAKGLSRRPHVVVATPGRIATLVKNDPDLAKVFSRTKFLVLDEADRILDVNFEEELRVIFGCLPKKRQTFLFSATMSDNLRSLLELSGNKSYFFEAYEGFKTVETLKQQYIHVPPQGKELHLWHLLSVMKGKTEDPIRSAIVFVSTCKDCQYLDLLLEELRYPAVALNSHKSQAQRLSALNRFKSGQVPVLLATDVGSRGLDIQTVDLVINYDMPMCVYTLYWIYMQYIKIVFLVFTCCRSPRDYIHRVGRTARASRGGLAISFVTQKDICLLHEIEDVVEKQLEAYECSDKEVTKDITKVFKAIRLSKMRRRDEGHDEKVEARKEQKRRDRARKRKHED

SEQ ID NO: 16981 - protein, 581 aa, Zea mays
  VARIANT 335: note = Ancestral polymorphism is R, Derived polymorphism is W
MSSSDPDDAPDGGEDSPLFRRSGGPSSGGTVGDVPVSQSLIKAASNVCFSLFVLAVLVVTVVAVTYQPPDPWLQSSAAITTSLSRVLPNSTFLVPDDSLLPTGEDFNSSTAVPAPVRDDDDAAAAVSAASAAAAGNRTCDPDAPLNCSDPRVLAAVKAFNARAFFRKSIVFLSYEAPVSGPKPGQCDVAWRFRNRREKSWRRYRDYRRFSLASGDGCALDIVSVGKFRSGTNAARRPYPKGSKSKRPRVSPPPVDAEINDTIPVVGSEAEFKKGKYLYYMRGGDHCKSMNQFVWSFLCGLGEAKFLNRTFVMDLNICLSGAHTVDGKDVDGKDFRYYFDFEHLKESVPVVEEGDFLKDWKRWDKKKGPGRITVRKVPSYKVTPMQLKRDKSNIIWRQFNGHEPENYWYRVCEGRAAKVIQRPWYAIWKSKRLMNIVTEIAGRMDWDYDGLHVVRGWKAQNKQMYPNLDSDTSPDALVDKVTKLVKPMRDLYIATNEPFYNYFDKLRSHFHVHLLDDYKELWSNTSEWYNETTTLSRGKPVPFDAYMRVIVDTEVFYRSKTQVETFNNLTRDCKDGINTCNL

SEQ ID NO: 16982 - protein, 156 aa, Zea mays
  VARIANT 14: note = Ancestral polymorphism is L, Derived polymorphism is Q
  VARIANT 98: note = Ancestral polymorphism is L, Derived polymorphism is V
MGLLEVLTARDRLLPRSACRYQRLRGGELGGSSPSTGASVRARRPLRLRLRRRACKAGGRWGATTTTANGGGKRLRLRLVRLLLLLPARRVAALVAEVVRRLLAAAVAAADCPAIVFSSQWGLPVLSPHCGSSSRSSRPRGFYLDRSLSGAGSGVL

SEQ ID NO: 16983 - protein, 334 aa, Zea mays
  VARIANT 26: note = Ancestral polymorphism is A, Derived polymorphism is G
  VARIANT 86: note = Ancestral polymorphism is D, Derived polymorphism is Y
  VARIANT 99: note = Ancestral polymorphism is L, Derived polymorphism is R
  VARIANT 125: note = Ancestral polymorphism is E, Derived polymorphism is Q
  VARIANT 127: note = Ancestral polymorphism is F, Derived polymorphism is S
  VARIANT 131: note = Ancestral polymorphism is N, Derived polymorphism is S
  VARIANT 225: note = Ancestral polymorphism is M, Derived polymorphism is T
MSDSVLISSCFTHKFKINYVETEKVAVEHSVRSEQILAGGHLWRIICFPRRIGGMKESNVEYLSIYLCHESESKDVKAVFEAFVMYKEGTPSLAHKKKLVHVFSPKAGGRHIHGWPCFVERSVLQSFYVTNSGSFVIVGAVKVLQEDPLDVPPSNLGIHLGGLLLGSTDGSDVSFVVGGERFAAHRAVLAARSPVFKAQFFGSMAEATMSSITLHGITAATFKAMLRFVYTDACPEEAPSEAFQDLLAAADRFQLDRLKILCASKLWNNVSVDTVSATLICAEIYNCPQLKRKCIGFFGEGKGFKTKAVLTDGFAQLSQQFPSILDELRKKVGA

SEQ ID NO: 16984 - protein, 264 aa, Zea mays
  VARIANT 121: note = Ancestral polymorphism is H, Derived polymorphism is N
  VARIANT 81: note = Ancestral polymorphism is F, Derived polymorphism is S
  VARIANT 68: note = Ancestral polymorphism is G, Derived polymorphism is A
  VARIANT 42: note = Ancestral polymorphism is N, Derived polymorphism is K
MEAYAAGAKFDCLLFDMDDTLYPLSLGINLACRKNIQEYMLNKLRIEESQVPRMCLDLYREYGTTMAGLKVLGYGFDYDDFHACVHGTLPYEKVKPDPVLRQLLLSLPQRKIIFTNSDKAHAARVLEKLGLQDCFQGIVCFETLNPRPPTETEKNSSGSAGTILCKPSLASMEAVIEIAKLDAERTVFFDDSARNIAAGKAAGFRTVIVGSSALVPGADVALESIHNIKEALPELWEVAAAAAAGDRVDAVLRSTTAVETTVIA

SEQ ID NO: 16985 - protein, 413 aa, Zea mays
  VARIANT 2: note = Ancestral polymorphism is A, Derived polymorphism is T
  VARIANT 163..413: note = Derived polymorphism lacks residues 163 to 413
MASSWVLALVLALSAGASLARGSEPWWNETQVYATTANSGGGNGVFVGLTLIQSAAAKGAVCLDGSLPGYHLHRGFGSGANSWLVNLEGGGWCNDRSSCVFRKGSRRGSSNHMERQLQFTGILSNKPEENPDFYNWNRVKVRYCDGGSFTGDGSDAAAGLYFRGQRIWQAAMDDLMAQGMRYANQALLSGCSAGGVSTILHCDEFHGLFPSNTRVKCLADAGMFLDTVDVSGRREMRSFFNGIVRLQGSGRSLPRSCTSHMDKTSCFFPQNVLPTIRTPTFVLNTAYDVWQLQQSVAPRTADPQGLWSKCRTNHAFCNSNQLQFLQGFRNQMLDAVRGFSASRQNGLFINSCFAHCQSERQDTWYANNSPRLGNKKIADAVGDWFFERGNAKYTDCPYPCDGTCHHLVFRGDH

SEQ ID NO: 16986 - protein, 349 aa, Zea mays
  VARIANT 28: note = Ancestral polymorphism is H, Derived polymorphism is Y
MARRTSGPKKKLRRGLWSPEEDDKLVNHIAKYGHGCWSSVPKLAGLERCGKSCRLRWINYLRPDLKRGAFSQEEEDLIIHLHSMMGNKWSQIASQLPGRTDNEVKNFWNSYVKKKLRQRGIDPATHKPLPLAAEGISSRTAVFSDAELILSSSAAAAAAGRHMPPPPVAASAAESYVYSYSHSSGGASDGSLQSLSGYNSNSKQTAADHLGAAAAAGYLQQEQDPAAAAAAADALHCGPSGAPAVVLPSVSSSSTLNSMAGLSPAATTTDEQCTNNCSSCSFHSGLEPWLELGSTSGYYGAALDELKWSDYVFDGGYGGQPGQGIYGDSKDAVQFVDANALSSSSWCLN

SEQ ID NO: 16987 - protein, 517 aa, Zea mays
  VARIANT 3: note = Ancestral polymorphism is L, Derived polymorphism is P
  VARIANT 132: note = Ancestral polymorphism is H, Derived polymorphism is Y
MGPAWMVASAVAAVLASWAFNALVRLVWRPYAVARRLRAQGVRGPAYRFLAGNLAEMKRLRAEGARATLDVGDHDFVPMVQPHHRKWISLYGRTFLYWNGATPNLCLADVNLVRQVLFDRTGLYPKNHINQYVTRLLGRGLLLTDGDEWKRHRKVVHPAFNMDKLKTMTATMSDCALSMISEWEAKLAKGGDAEVVELSSQFEELTADVISRTAFGSSYREGRQVFLAQRELQFLAFSTAFDVQIPALRYLPTRNNLRTRELDRRVRGMLMDIIKARLAVAGKDTAGGGYGHDLLGLMLEAAEHGGEAPTLSMDEIVDECKTFFFAGYDTTSHLLTWACFLLSTHPEWQGRLREEVRQECGADEVPTGDALNRLRLVNMFLLETLRLYGPVSLIQRKAGTDLDLGGVRVPEGAILTIPIATIHRDTEVWGDDAGEFRPERFQNGVTRAAKHPNALLAFSSGPRSCIGQNFAMIEAKAVVAIILQRFALELSPTYVHAPMDVITLRPRHGLPMLLRSL

SEQ ID NO: 16988 - protein, 731 aa, Zea mays
  VARIANT 23: note = Ancestral polymorphism is S, Derived polymorphism is T
  VARIANT 53: note = Ancestral polymorphism is R, Derived polymorphism is G
  VARIANT 102: note = Ancestral polymorphism is A, Derived polymorphism is V
MEQSRPTLQGRRGAMGHHRVVVSPLQRNSSPLENEASRRSRRRMRTICSAVKRRLRRCLPLGSPATAPRRGCSSYGPREAVALLLRLQSAPALTEVRRLHAALLVRGYHRSTVLAAQLVRAYARMRDGGLGHAVRVFDGMPTRNSFAWNAVIKGLVDAGRFSEALRWYWDMVRDGSVVADRFTYPPVLKACAALGEVEQGRKVQENVETDIARGIAKGNVFVQCALVDMFAKCGCLGEARNMFESMGVRDLASWTAMIGGAVRGGDWLEVMTLLKRMKSEGFRPDSMIFATVIPACGKVKELRTGMALHGYAVKCGVGDDICVPNALVDMYCKCARLDMAASLFWSIDHKDVFSWSTIIAGHSQNRIYNVSVSLFTEMVASGIKPNSTTIASILPSISELRLLRYGKEIHCFSLRNRLEHSEFLASALIDFYCRQGYIRDAQIVFEFKPKNDLVVLNSMIRGYVVNKDSESALRLLRALLKEGLRPDHVTVVSVLPLCNQPSRLLQGKELHAYAIRHNISSCFSVTNALTDMYCKCGCLEIANKIFLLMTERNTVTYNTLISSLGKHGHADQAFILFDLMKRDGVSPDKVTFVALLSCCSHGGLIDKGLCFYDSMLRDYNIPPDKEHYSCIVDLYSRSGKLDDAWSFIANLQEVPEIDVLGCLLSACRDHHRMDIAELVAERIFEQNPNDPGYHILLSNVYASAGMWSEVTRIRTMIEERSLKKRTGNSLI

SEQ ID NO: 16989 - protein, 583 aa, Zea mays
  VARIANT 141: note = Ancestral polymorphism is N, Derived polymorphism is Y
  VARIANT 121: note = Ancestral polymorphism is R, Derived polymorphism is S
  VARIANT 62..583: note = Derived polymorphism lacks residues 62 to 583
MSSTPPAVASPASEQTKSKKKKHKSKDLPATDPPSLAEAEEKTDGYLIKPQSLVPSLDTSTWPLLLKNYDRLNVRTGHYTPLPSGHSPLKRPLAEHLRYGVINLDKPSNPSSHEVVAWIKRILRAEKTGHSGTLDPKVTGNLIVCVDRATRLVKSQQGAGKEYVCVARFHAAVPDTARVARALEALTGAVFQRPPLISAVKRQLRVRTIYESKLLEHDPERHLAVFWISCEAGTYVRTLCVHLGLLLGVGAHMQELRRVRSGILGEQDNMVTMHDVMDAMWSLDNHKDESYLRRVVMPLEVLLTSYKRLVVKDSAVNAICYGAKLMIPGLLRFENDIETGEEVVLMTTKGEAIAIGIAEMTTAVMATCDHGAVAKIKRVVMDRDTYPRKWGLGPVALKKKKMVAEGLLDKHGKPNEKTPAEWLRNVVLPTGGDVSIASIAAAPEPEKVKVEQDAVAGEKVKEKKKKRQQDENNGDDASVPAKKIKVEEDAEVVEGEGDKSEKKKKKKEKVESESADAAEAKEVEKADDAADETGSEKKKKKKSKEGSAAAADAESAEHADGAGVEKSKKKREKKKKSGETEQA

SEQ ID NO: 16990 - protein, 374 aa, Zea mays
  VARIANT 325: note = Ancestral polymorphism is P, Derived polymorphism is H
MPPTGDDPPASAGISFPDADGGGDSEDGDFAGAHLLDPTDPGLPNPTTSSATGLPHAIPAAGSGGGPVTSGNGGERRPLFQRLWTEEDEIVILRGFAEFTAARGTAFASHQYDTDPFYEDMRRRLQLDFTKSQLVEKLRRLKRKYRNCVSRLRESGATFTFRSPHEQAIFEIARNIWRPTNKHGRDPSADSDDEDAAAATQIPANTSPNGEAKSPSSTRQRRRRRVMEFSPATGAAPATNMLQPPQPVQLSVSVPVKMDDSLPAQPQTPMPVMVAMDGSEPLRLPVVSPQSGVSDAEKTCLTPLFKEMLRAAINVGANPFGAKLPEPPLGLAMEGEKWRKQRILELEVYLKRIELLQDQAKATLEELKSSTPGS

SEQ ID NO: 16991 - protein, 767 aa, Zea mays
  VARIANT 367..767: note = Derived polymorphism lacks residues 367 to 767
  VARIANT 593..767: note = Derived polymorphism lacks residues 593 to 767
  VARIANT 627..767: note = Derived polymorphism lacks residues 627 to 767
  VARIANT 629..767: note = Derived polymorphism lacks residues 629 to 767
MAGLSGGGGGWGGYDDDDWGLSAEQLDQMERDAIRQLAERKASASAASTAPIPASPLGATSPLPSRATVPAAAVSSPLGGNHPATRASLEARFGKVEALSPSRNAVNNSQGSSPKISVHLFLHSSGMIAARFPYSQLLVDAFRKIPKASWNAKERVWMFPPSSLAIVEEVPRSVPGLTVEVHKLDPLVQRALAAALRSKDLRGLYDRIPPHLESKLMPFQREGIRFVLQHGGRALIADEMGLGKTLQAIAVASCLRDAWPVLVISPSSLRLHWASAIQSWLNIPVEDILVVLPHTGGSHKAGFRVAYSNSKGDFHLDGVFNVISYDVVPKIQSTLLDLDFKIVIADESHFMKNGQAKRTVASLPVLQKAQYVVLLSGTPALSRPIELFTQIQALYPTVYKSVSEYGNIYCKGGFFGLYQGASNHEELHNLMKATVMIRRLKKDVLSQLPVKRRQQVFLDLSEKDVKNVRALFIELETLKVKIESSDSKEMIDSLRFAYQNIVNKIYTDSAVAKIPAVLDFLGTMIEEGCKFLIFAHHQPMIDAIEKHLLKKKVKCIKIDGKTPLTTRQTLVTDFQNNDDVKAAVEGYCGSMLQRDRDIDEGLIWNKGKVKEFEGLKLYGKFSYVVLWNKGLSCYKSYKIPMELSIVLSIKAGGYGITLTAASTVIFAELSWTPGDIIQAEDRAHRIGQVSSVNVYYLLSNGTIDDLMWDVVQGKLENLGQMLDGQEKTLEVSQRDCRPSPSKKQKTLVGFLKRPSASTSAEEGMPST

SEQ ID NO: 16992 - protein, 293 aa, Zea mays
  VARIANT 7: note = Ancestral polymorphism is R, Derived polymorphism is W
  VARIANT 67..293: note = Derived polymorphism lacks residues 67 to 293
  VARIANT 100..293: note = Derived polymorphism lacks residues 100 to 293
  VARIANT 155: note = Ancestral polymorphism is A, Derived polymorphism is V
  VARIANT 239: note = Ancestral polymorphism is G, Derived polymorphism is V
MINILERREYCIHSMWYLYIQNIRLLFFYSPLYFEFEYLFSRSWACLPMSKKRKHLDPANSLKDSEQVVASDFIRGDDLDDLLSKLIRSVEIAKASRGRLPEKIWMKQQFAIGVNDVTRVLERMPHSVTAHPAQMSSEAPTVSGQRQAPLVPLQAVLVAADCNPKWLTKHIPTLAFTRQVPVLCMKDNKGGSVRLGHVVNVRTALAIGVKGVLPHTGGSHKAGFRVAYSNSKGDFHLDGVFNVISYDVVPKIQSTLLYLDFKIVIADESHFMKNGQAKRTVASLPVLQVWCFL

SEQ ID NO: 16993 - protein, 197 aa, Zea mays
  VARIANT 181: note = Ancestral polymorphism is L, Derived polymorphism is S
  VARIANT 95..197: note = Derived polymorphism lacks residues 95 to 197
  VARIANT 25: note = Ancestral polymorphism is L, Derived polymorphism is H
  VARIANT 15..197: note = Derived polymorphism lacks residues 15 to 197
MASLLCNNAGPHANLQAQLDQCRHHVACADRRRRRRPWPQEEARLELRRAVPADDGLLPRHPVRRHQHGERDVGGRGAADAAEPVGVRQRHLLRRGGGVQRRGDGGARAEGFYFYDRKESLSAWFAFSLVFNSTAHRGTLNLMGPDTIAAKTRDISVVGGTGDFFMARGIATLRTDTFQGSYYFRLQMDIKLYECYV

SEQ ID NO: 16994 - protein, 175 aa, Zea mays
  VARIANT 159: note = Ancestral polymorphism is L, Derived polymorphism is S
  VARIANT 18: note = Ancestral polymorphism is L, Derived polymorphism is M
  VARIANT 8: note = Ancestral polymorphism is Y, Derived polymorphism is N
MQGLTPTYKLSSISVVIMLLVLTGGGGVAHGRKKKLVSSYDEPCQQMTVYYHDILYDGTNTANATSAVAAQPTLLSRSVSVNDTYFGEGFYFYDRKESLSAWFAFSLVFNSTAHRGTLNLMGPDTIAAKTRDISVVGGTGDFFMARGIATLRTDTFQGSYYFRLQMDIKLYECYV

SEQ ID NO: 16995 - protein, 477 aa, Zea mays
  VARIANT 105: note = Ancestral polymorphism is L, Derived polymorphism is P
MRRAWTPADERAATTTSEHRRRRRMGKYEMGRTLGEGHFGKVRLARDAGTGRSFAIKILDRQRILAMKIDEQIKREIATLKLLKHPNVVRLYEVSASKTKIYMVLEYVNGGELFDKIALKGKLTEKEGRKLFQQLIDAVGYCHEKGVCHRDLKPENVLVDAKGNIKVSDFGLSALPQNQRKDGLLHTTCGSPNYIAPEVLLNKGYDGSVSDVWSCGVILYVMLTGSLPFDDQNMVVLYQKILKGNAHIPKWLSQGAQDLLRKILDPNPITRVDVDGIRAHDWFKQGYAPSAPFNDDEEDINVDEEDSLNMTENGIQDKIAINQINAFQLIGMSSCLDLSGFFEKEDASERKIRFASNYPPAYLFEKIESIVRKMGFQVHKSNGKGAESHCHVLQLKVIQDCKGLANLRGKESLLISAEVFEINESLYVVELKKSSGDCSLYRKLCETLSEDLGTCKSQQFLKQDSIRQEIGRHNSSF

SEQ ID NO: 16996 - protein, 650 aa, Zea mays
  VARIANT 613: note = Ancestral polymorphism is L, Derived polymorphism is Q
MGEYAAVKTSVWWDIENCHVPRSCEAHLIAQNMSSALAAAGYTGPITISAYGDTNCVPNHVQHALSSTGIALNHVPAGIKDASDKKILVDMLIWAIDNPPPANYLLISGDRDFSNALHKLVMRRYNILLAQPPNVSQVLTAAAKHVWLWKDLVAGEPPLAESPYISSIANGSVDHSNTSNNMGSDSSDAPHNSTQGQNSIPGDQQKGGNSKADKQYKVKQPRKNQSDNVSKPTRTDEASVDGVSDSSKGSTATEPNQSQSSSSSLPSSDLHDGGGAQVDELNTQKNQPSSQSKKPKKSTLSHQKSAPHDFYHGKKPGVSVESSSKNGAPDVTSNGRPKYQKPQSSHQPRQQNPVNHRPHGGSGNFQSSNSHRSNSCPAPAGHNGIPTAPLQFWPSGPPYHGPPINYPDMSRLNISEYPRGIHNNQGLHANYHPNHPGYNDYSYRPPTQPNMPSNMQNIGHWGANPGCSQPSSDPQGLVRYILGALEVLKTEKIPPTEQYIADCIWYGHGDANMPNFDVKKALQVAMQHQAVVKKKLGKMSFFLGKDENLWKCVNIMDDNAKYPKETLDAVHAFMSSAPGYSEIKSSQSRYQAATMLKKTCLKHLSLAEVLQVLNIIINTKKWFVPHSSGWQPLSFNIIVADATTATGGKA

SEQ ID NO: 16997 - protein, 181 aa, Zea mays
  VARIANT 2: note = Ancestral polymorphism is A, Derived polymorphism is V
  VARIANT 3: note = Ancestral polymorphism is S, Derived polymorphism is L
  VARIANT 20: note = Ancestral polymorphism is C, Derived polymorphism is Y
  VARIANT 26..181: note = Derived polymorphism lacks residues 26 to 181
  VARIANT 71..181: note = Derived polymorphism lacks residues 71 to 181
  VARIANT 111..181: note = Derived polymorphism lacks residues 111 to 181
  VARIANT 115..181: note = Derived polymorphism lacks residues 115 to 181
  VARIANT 129..181: note = Derived polymorphism lacks residues 129 to 181
  VARIANT 134: note = Ancestral polymorphism is T, Derived polymorphism is I
  VARIANT 164: note = Ancestral polymorphism is V, Derived polymorphism is L
  VARIANT 165: note = Ancestral polymorphism is I, Derived polymorphism is T
  VARIANT 167: note = Ancestral polymorphism is A, Derived polymorphism is V
MASPVVVAAALLVAALAPFCGMDPLQTGSMLDFPGFESHLVDLPDPAEMPTHADEWERLRGAEVRFHGEVQGPESVAFDPQGRTRASPMAESSSGTASGYRELIDLMAKHKSDLEGFKLDVYGSGADSQEVQSTARRYKVFKNLSISDVLCTTTADALAMGKFVICVEHPSNEFLRSLSGT

SEQ ID NO: 16998 - protein, 1921 aa, Zea mays
  VARIANT 1627..1921: note = Derived polymorphism lacks residues 1627 to 1921
MAAPGAGAGGRRASTSRTRRASTAAAESNENEDNAAAPSSSSSAFALPSAPHFSLPPRSPLSAIADPGRNPRSAPATPKSLAGTPRASAAGSGAKDRTCSVGAAKRVFDQRDVAAAEVPLEVPHFELDEDPAFWKDRNVQVLIRIRPISDAENATHGQKRCLLQDSSKTLSWTGHPETMFTFDHVACETISQEKLFRVVGLPMVENCMSGYNGCLFAYGQTGSGKTYTMMGELSKLGNELSKDAGLTPRIFEYLFRRINEEEERRREEKLKYICKCSFLEIYNEQITDLLEPSSTNLQIREDIKKGVYVENLMECYVSSVNDVMLLLLQGVANRKMAATNMNSESSRSHSVFTCVIESRWESDSMTHLRFGRLNLVDLAGSERQKSSGAEGERLKEAANINRSLSTLGLVIMTLVDVANGRSRHVPYRDSRLTFLLQDSLGGNSKTTIVSNVSPSICSSSETLSTLKFAQRAKLIQNNAKVNEDASGDVIALQRQIEELKDQLTCLKKQKDCPGSPSLLLNSYFANEFKTSCGVDEQLDCDLNILKQKVSHLEDVLVRSLRREKSAETKIGKLEAEIQHLNRLVNLMESDAHRLRKRLELRGEKQRLHSIGENAALSMEIQLLQEQINENPQLTHFALENKRLIEELTTLHNFYKQGERDMLLTEISLLRNHFLHILEQKYTTTRKEVEPQGDELIKELDSCRKELDACLENNVLLAREVNKLRCELIQYQKACTNQVAPEEKENVVATSTNAMQHDQAGKNFSYLSTDDVNRQFMQAEITTNISESFQLELPYEIDSEDPDSPHLHDPETHDFRDPRTASEYDGVLSQCLNLAMASSHDVLNKSTILTDLNFLEKDDTYHVHEKPPFRGIHLHDETLSCQEIETVNSSKHLSQDELENLKRTNEELKEKLFIMAEESNKLSEIIVAKDVEIASLSEEWEAAIFDLTSFLTDGCRSLDDAYQNIDNMISSFPHSNSSVSEHVEKAMKISIEKEKMIFKLQTELQTAQKIGREVKEKLHILKGATLAITEAQQLDNEENSQEELQLVGLLHQKDCIIQELRNNLKPEKFVFAERAKGHSRDDLLLPGSSVDMIEDHDENQPAASQASPDYQSKLDSVMHLVEDKSNKVLALFSNFEAAHETMEEAELMLSALLKANEGLKLERDNCRQAVELLLSEKSSLIGELKELEASSSCTSQKYDKLHQQINECVTEMTKLAATIRKSFQQIQSVSTVELFALCSEIITFGQDLKRYIIDSRSYIANMVSLIEEKSRSIEQFHHLSTHACGSARQQVESNSCQWGSRKLSQSDYSTDYASLRREFNRKSNVVEGLSFDLKLLQESASNAKDMKDKADEISIALSNTQRELDMKTSTMETMLKKQKVLEEELAENGARLINLRLELEQSQSLSSALLKENKGLRVMLEDETMKNSETKVLLEEKVKVIEGLESQILFLNRCEVGQLMSDIEELNNSIKIMSSDRDNLQAEIFKLRDKLEMALALAEENEAAAIEVRQTAEISKIYAEEKEEEVKILERSVEELEGTVTVLEEEVCNLKEEVRNYQIHKQSEAQFQAINDMLAEEKASKCDAAEESCQAKCHLEKRLQAEILAHQGVRKKIEGLKLEAKRKDDEIGQYKEHIAELVLHSEAQSLLFQEKYNEMEHMVSRQRFGPHESYSETVPKTEKPSGRARGSSSPFRCISSIIQQMNSERDQEILVARQRIEELEGLVSCKQKEICLLTSRLAAVDTMTHDIIRELLGVKLDMTNYANLVDQEELQKLLIASQQQIEQSKAKDTELEALKEQLGHLILERDSLLDDMDQRKTDLLEAQLLVEQLEQREQMLEAQIEMLQLEKDSLQQKTLEMDETIELLARSNQPDINPRMGDNHHRGSSEFSRRLAQSDMLLSHARHEHSRRHAAGSSRTHHGRHR

SEQ ID NO: 16999 - protein, 667 aa, Zea mays
  VARIANT 267: note = Ancestral polymorphism is G, Derived polymorphism is C
MEPAGTIVFASVGVTNFGFDVFSATVPAPTSAEAGVSAEDLDERRHTDGISVNFNAQFADDAGDAVAFVSERTGAASLFLSRPGSEPDPLPAAEGSLFHDRPTVRGGRVYFVSAHEKPDRPFRSWAAVYAAELGAGRERNPEPQPQRLTPRGVVDMSPAVSASGDLLAVASYGDRPWAFDFRALETEVAVFRASDPSRRAVVAARGGWPAWHGDAALFFHRAADDGWWSVFRVGVSPDTLQPTGPERRVTPPGLHCFTPAAPARGGGRWIAVATRRKGRAQRHVELFDLETQRFSPLTELLSPGLHHYNPFFTPSGGRVGYHRFRGAGAPGDSLVPHLQPVRSPVRSIRMLRVHGTFPSFSPDGAHIAVNGDFFSTPGVSVLRSDGSRRWTVSKEPDLFYTTWSPTERGVVFTSKGPIFETPKATVRIARVEFDPADLTDDGRGEGEVRATVRPLTRPEAGNDAFPAVSPCGRWLVFRSGRTGHKNLYVVDTARGEEGGVRRLTEGEWIDTMPSWSPDGSLIAFSSNRHDPANPAVFSIYLVRPDGSGLRRVYVAGAEGSAEADKERINHVCFSPDSQWLLFTANLGSVVAEPISGPNQFQPYGDLYVCRLDGSDLRRLTCNAYENGTPVWGPASAGLGLESLSMGPPSGEDALGQFDEPLWLTCDV

SEQ ID NO: 17000 - protein, 229 aa, Zea mays
  VARIANT 33: note = Ancestral polymorphism is A, Derived polymorphism is V
  VARIANT 35: note = Ancestral polymorphism is I, Derived polymorphism is L
  VARIANT 167: note = Ancestral polymorphism is A, Derived polymorphism is T
  VARIANT 193: note = Ancestral polymorphism is A, Derived polymorphism is V
MPGLTIGDTVPNLELDSTHGKIRIHDYVGDGYAIIFSHPADFTPVCTTEMAAMAGYAKEFEKRGVKLLGISCDDVESHRQWTKDVEAYGGKQQQQQHTTTKVTFPILADPARDAIRQLNMVDPDEKDAAGRSMPSRALHVVGPDKAVKLSFLYPATTGRNMDEVLRAVDSLLTAAKHGGKVATPANWKPGECAVIAPGVSDEEARKMFPQGFETADLPSKKGYLRFTKV

SEQ ID NO: 17001 - protein, 351 aa, Zea mays
  VARIANT 4: note = Ancestral polymorphism is K, Derived polymorphism is N
MATKLAVLGTLVLALLGPVSCQQQQAGYGYGAGSPTPTTSPPPPPPAAGAGLSVGYYKDKCAEAETIVQEAVRAADAGTKAGLLRLFFHDCFVQGCDASVLLKPDNDTNPQPEMLGVPNLSLRGFEVIDAAKAAVEARCPGVVSCADIVAFAGRDASAFLSGGAINFTMPAGRYDGTVSLANETLPNLPPPFADVRRLKAMFAAKGLDTVDMVALSGAHSIGRSHCSSFSSDRLPPSNTSDMDPAFAATLQASCASSANGAADNTVVQDYRTPDQLDNQYYRNVISHKVLFASDAALLKSSDTLGLVYVAAFSQKLWQDKFGEAMVKMGGVQVKTAANGEIRRMCGYVNKP

SEQ ID NO: 17002 - protein, 350 aa, Zea mays
  VARIANT 5: note = Ancestral polymorphism is K, Derived polymorphism is N
MTTSKLAVLTLFALLGSVSCQSGGYYFYPTPQQPSPTPSPPSSPQLMVGYYKDKCAAYVDVEAIVKKHVKATDAGMQAGLVRLLFHDCFVRGCDGSVLLDTFSNDTSLTPEKFGVPNFPSLRGFEVIDAAKAEIEAACPGTVSCADIVAFAGRDASYFLSGGGINFAMPAGRYDGNVSLANETLPNLPSPFTGFDQLVKVFADKGLDAFDMITLSGAHSIGRSHCSSFTRDRLPPSNTTDIDPAFAATLQASCASPNGTDNTVMQDFKTPDVLDNQYYKNVLAHKVLFTSDAALTTNFTSNNLVRAYADFVPYLWQQKFAKAMVKMAGVEIKTAANGEIRKTCRKVNSRS

SEQ ID NO: 17003 - protein, 391 aa, Zea mays
  VARIANT 114: note = Ancestral polymorphism is D, Derived polymorphism is Y
MMSPSKLAVLTVFAFALLGSVSCQAGTYYYTPPAPATPQPPACPPPVTPVPPPASPPTYPPPTPTSPPAPTPTPPPPPPPSSPGTQLMVGYYKNKCGAYVDVEAIVKKHVSATDAGMQAGLVRLFFHDCFVRGCDGSVLLDTFSNDTSLTPEKFGVPNFPSLRGFEVIDAAKAEMEAACPGTVSCADIVAFAARDASYFLSGGGISFAMPAGRYDGTVSLASETLPNLPPPFAGFDQLVKMFDDKGLDALDMITLSGAHSIGRSHCSSFTRDRLPPSNTTDMDPAFAATLQASCASANGTDNTVMQDFATPDVLDNQYYKNVLAHKVLFTSDAALTTNFTSNNLVRAYADFVPYLWQQKFAKAMVKMGGVEIKTAANGEIRKTCRKINSRP

SEQ ID NO: 17004 - protein, 380 aa, Zea mays
  VARIANT 119: note = Ancestral polymorphism is D, Derived polymorphism is Y
MATKLAVLATLVLALLGPVSCQQQQAGYGYGAGSPTPTSSPPPPAAYPPMTTSPTPSSPTAYPPPPPPTPSPPPPAAGAGLSVGYYKDKCAEAETIVQEAVRAADAGTKAGLVRLFFHDCFVQGCDASVLLKPDNDTNPQPEMLGVPNLSLRGFEVIDAAKAAVEARCPGVVSCADIVAFAGRDASAFLSGGAINFTMPAGRYDGTVSLANETLPNLPPPFADVRRLKAMFAAKGLDTVDMVALSGAHSIGRSHCSSFSSDRLPPSNTSDMDPAFAATLQASCASSANGAADNTVVQDYRTPDQLDNQYYRNVISHKVLFASDAALLKSSDTLGLVYVAAFSQKLWQDKFGQAMVKMGGVQVKTAANGEIRRMCGYVNKP

SEQ ID NO: 17005 - protein, 350 aa, Zea mays
  VARIANT 133..350: note = Derived polymorphism lacks residues 133 to 350
MTTSKLAVLTLFALLGSVSCQSGGYYFYPTPQQPSPTPSPPPSPQLMVGYYKDKCAAYVDVEAIVKKHVKATDAGMQAGLVRLLFHDCFVRGCDGSVLLDTFSNDTSLTPEKFGVPNFPSLRGFEVIDAAKAEIEAACPGTVSCADIVAFAARDASNFLSGGGISFAMPAGRYDGNVSLASETLPNLPSPFTGFDQLVKVFADKGLDAFDMITLSGAHSIGRSHCSSFTRDRLPPSNTSDIDPAFAATLQASCASPNGTDNTVMQDFKTPDVLDNQYYKNVLAHKVLFTSDAALTTNFTSNNLVRAYADFVPYLWQQKFAKAMVKMAGVEIKTAANGEIRKTCRKVNSRS

SEQ ID NO: 17006 - protein, 391 aa, Zea mays
  VARIANT 114: note = Ancestral polymorphism is D, Derived polymorphism is Y
MMSPSKLAVLTVFALLGSVSSQGGSYYYTPPAPATPQPPPCPPPVTPVPPPTSPPTYPPPTPTSPPAPTPTPPPPPPPPPSSPGTQLTVGHYKNKCGAYVDVEAIVKKHVSATDAGMQAGLVRLFFHDCFVRGCDGSVLLDTFSNDTSLTPEKFGVPNFPSLRGFEVIDAAKDEIEAACPGTVSCADIVAFAARDASYFLSGGGISFAMPAGRYDGTVSLASETLPNLPPPFAGFDQLVKMFDDKGLDAFDMITLSGAHSIGRSHCSSFTRDRLPPSNTSDMDPAFAATLQASCASANGTDNTVMQDFATPDVLDNQYYKNVLAHKVLFTSDAALTTNFTSNNLVRAYADFVPYLWQQKFAKAMVKMGGVEIKTAANGEIRKTCRKINSRP

SEQ ID NO: 17007 - protein, 361 aa, Zea mays
  VARIANT 185..361: note = Derived polymorphism lacks residues 185 to 361
MSKPAAALVMLLALVAAGPAAGDGGSTRLGCFVGWSPLKTVSSLLCLLQGSSTFPSPKPAPTGQGLSVGYYNKSGSCPKAEQLVREAVTSATNGANRGLNAGLIRLHFHDAFVRGCDASVLLDKTASNNTDTEKTGPPNKDSLRGFEVIDAAKAAVEKECPGIVSCADILAFAARDASYILSNEKIYYEVPAGRYDGRESFADETDQLPGPGSSVQDLKKSFAAQGLSLADAVTLSGAHSIGLARCLFFKDRLSAMDPGYAATLNATCNAGGDSYKVNQDYKSPDVLDNQYYKNIDKFVLFASDAALKSSETIDQVNANAGGYGKWEKDFGDAMVKMGKIGVITSPGYGAEIRKVCSQINY

SEQ ID NO: 17008 - protein, 353 aa, Zea mays
  VARIANT 65..353: note = Derived polymorphism lacks residues 65 to 353
  VARIANT 153..353: note = Derived polymorphism lacks residues 153 to 353
  VARIANT 179: note = Ancestral polymorphism is D, Derived polymorphism is Y
  VARIANT 208: note = Ancestral polymorphism is G, Derived polymorphism is S
  VARIANT 224: note = Ancestral polymorphism is R, Derived polymorphism is H
  VARIANT 303: note = Ancestral polymorphism is M, Derived polymorphism is K
MEDEISSIIACALAISDERHHLIDLKFENGMDYSKGEYAKAIEKSFSFLSESSFSSSPWSSTNFEASLSSLSSFSSDDFSGYDSSFLLSPMHPEMTVNGKVTLKDKYSVTVVYDNQFFALRKKCCPSELAYITSLSHCKKWNAQACLPFSGHWKPNLSANILGIYQVKQIKHGKKVKIYLMVMENLLFGHNISRIYDLKDQNYVEDMGFSPIYIGGRTKHLLQRAIWNDTSFLTSVNVMDYSLLVGVDKEKHELVFGIIDYLRQYTWDKQLETWVKTSLVVPKNVLPTVISPKEFKKRFRKFMAKYFLSVPDTWSLDNPSKPCKSLGQSNRKLAEVQIGDNLSELPNEVEGCA

SEQ ID NO: 17009 - protein, 168 aa, Zea mays
  VARIANT 27: note = Ancestral polymorphism is K, Derived polymorphism is M
  VARIANT 101: note = Ancestral polymorphism is R, Derived polymorphism is I
MPCKDVPQFSAQYQRGPSIKQCNFTTKIISRSTKLGEDGLVVHVQGVSRAELKQNANYPGAFLINRTASPLACLPFSASKFVCPPQMKEIIGDYDAIHVRRGDKLKNRKDRLYLSIWYRLAHSSNFSSILNPFVKTVKEFDKDLDLCDDPKKNTKDWQRQEPVRFIHD

SEQ ID NO: 17010 - protein, 323 aa, Zea mays
  VARIANT 37: note = Ancestral polymorphism is D, Derived polymorphism is E
MAFLVERCGEMVVSMESPHAKPVPAPFLTKTYQLVDDPCTDHIVSWGDDDTTFVVWRPPEFARDLLPNYFKHNNFSSFVRQLNTYGFRKIVADRWEFANEFFRKGAKHLLAEIHRRKSSQPLPTPLPPHQPYHHHHHHLHHHLSPFSPPPLAQPVPSYHHHHFQEEPIATATAPHGGAQAAAAGGNNEGSGAGSGGDFLAALSEDNRQLRRRNSLLLSELAHMKKLYNDIIYFLQNHVAPVTSPSSAAHASLPSAGGGGAAASSCRLMELDPADSPSPPRRPEADDGTDTVKLFGVALQGKKKKRAHQEDGDDGNHEQGSSDV

SEQ ID NO: 17011 - protein, 222 aa, Zea mays
  VARIANT 165: note = Ancestral polymorphism is E, Derived polymorphism is K
MSGNDDKPHAAADRIKAATLSVAKGLSRAQAERAAAAAARNVNAYGQKEEGPSRWQERKEAKRQMYLMSTEKAAKLGTVKLKASETSSVGAYTQCQKCFQHGHWTYECKNERVYISRPSRTQQLKNPKLKKSVPVSYQFENPDIIREREEELKLMKEKQKKEKAERKKGKTEDSRQVLAGNLSWDRKTRASKNQKMEEMPGKHGFRFQSSGSELILRIAIMG

SEQ ID NO: 17012 - protein, 136 aa, Zea mays
  VARIANT 70: note = Ancestral polymorphism is G, Derived polymorphism is S
  VARIANT 63..136: note = Derived polymorphism lacks residues 63 to 136
MGDNYDDEGEPIVNLDEREPSPEHQPYEDPDDDLDDGGDWTRDRSPTPVHGDNGGAGSSPKPRKHLLKKSGGGDMPSDDGLDDFGLADEDADPSAEERKRKGHASKEPLFPSPSARTAEELTTQIEQQKLEEQKTE

SEQ ID NO: 17013 - protein, 144 aa, Zea mays
  VARIANT 28: note = Ancestral polymorphism is I, Derived polymorphism is V
MRLEKCWFCSSTIYPGHGIQFVRNDAKVFRFCRSKCHKNFKMKRNPRKFERKRNRPERYDRNLTEQTLKAIPLIAKIRHDRMGKHISNRHKPGKRKEMEKDSKELEQDIGMLPKKLIINHLAAEKTKVKVEVVQQQTEDNAMEE

SEQ ID NO: 17014 - protein, 220 aa, Zea mays
  VARIANT 65: note = Ancestral polymorphism is T, Derived polymorphism is R
  VARIANT 78: note = Ancestral polymorphism is G, Derived polymorphism is R
  VARIANT 197: note = Ancestral polymorphism is L, Derived polymorphism is S
MGSEGPSVVTVHVTGFKKFHGVAENPTEKIVTNLKSFLEKRGLPKNLVLGSCTVLETAGEGALATLYKVLESAVADRGTGSSAQGQVIWIHFGVNSGAIRFALENQAVNEATFRCPDELGWKPQRVPIVPSDGSISRTRETTLPVNELTKSLRKIGYDVVPSGDAGRFVCNYVYYHSLRFAEQHGIKSLFVHVPLFLTIDEEVQMHFVASLLEVIAFSSN

SEQ ID NO: 17015 - protein, 349 aa, Zea mays
  VARIANT 208: note = Ancestral polymorphism is N, Derived polymorphism is I
  VARIANT 125..349: note = Derived polymorphism lacks residues 125 to 349
MAPDLVNGVLNWVGTPAMVASLLLFYPPYYLFKTCYSFLSWLFPEDLAGKVVLITGASSGIGEQLAYQYALNRASLALVARRESSLRHVADRALELGARDVVVLPGDVSTPDDCDRFVRTAISHYDRLDHLVCNAGVASVGAFEEIPDVTSYSSQLDVNFWGSVQTTFAALPHLKRSRGRIVVTASATGWNPVPRMSIYNAANAALINFFETLRTELGNQVGITVVTPGWVESEMSRGKFLKEHGQVEVDQEMRDAQIGLFPVEYAKNCAKAMVQAARQGERYLTVPAWFGAMYLWRLFAPEVVEACYRLLYMHGHGARQADAPSRTMAEAGGKQLLYPTSLRSDEIKE

SEQ ID NO: 17016 - protein, 596 aa, Zea mays
  VARIANT 526..596: note = Ancestral polymorphism lacks residues 526 to 596
  VARIANT 386..596: note = Derived polymorphism lacks residues 386 to 596
MGLCHGKPTQIPEAEAEEDPHVASGAGDGGDGATSPSAAAPAAKPGTPKQPKFPFYLPSPLPPSSYKGSPANSSVSSTPARGGLKRPFPPPSPAKHIRALLARRHGSVKPNEVSIPEGGEPELGLDKSFGFSKHFFAKYDLGEEIGRGHFGYTCSAKAKKGEHKGQDVAVKVIPKAKMTTAIAIEDVRREVRILSSLTGHSNLVQFYDAFEDEDNVYIVMELCKGGELLDRILARGGKYSEEDAKVVMVQILGVVSFCHLQGVVHRDLKPENFLFSSKDENSPLKVIDFGLSDFVKPDERLNDIVGSAYYVAPEVLHRSYGTEADMWSIGVIAYILLCGSRPFWARTESGIFRAVLKAEPSFDEAPWPTLTAEAKDFVKRLLNKDYRKRMTAAQALSHPWIRNAQQVKVPLDMIIYKLMRAYISSSSLRKSALRALAKTLTTNQLFYVREQFELLGPNKNGYISLQNLKSALVKNSTDAMKDSRVVDFVNTEAGLRRVRRFRHQRLPDGSLGDVGAARAACVRAVRQGRKPAHRDRRACIGTRAWPVGASPRCPPGLDPARRREAELPGVHKALARGVVALDPQGLALYPIPCHVD

SEQ ID NO: 17017 - protein, 200 aa, Zea mays
  VARIANT 183: note = Ancestral polymorphism is L, Derived polymorphism is P
  VARIANT 143: note = Ancestral polymorphism is L, Derived polymorphism is S
  VARIANT 102: note = Ancestral polymorphism is R, Derived polymorphism is H
  VARIANT 47: note = Ancestral polymorphism is L, Derived polymorphism is F
  VARIANT 26: note = Ancestral polymorphism is F, Derived polymorphism is L
  VARIANT 10: note = Ancestral polymorphism is R, Derived polymorphism is P
MADSGSLRKREEKEEEDDIVCLDPSFFVDRSYEMTTFTFGSHELRLLCLRAASTDFDLTGQLVWPGAVLMNNYLSQHPEIVKGCSVVELGSGIGITGILCSRFCKEVVLTDHNDEVLEARLTLQIIKKNIELQSCSENAHAVLTAEKLEWGNSDHLSGIIEKHPGGFDLVLGADIYILEIFLLNCFYFKALAFVFHSFDM

SEQ ID NO: 17018 - protein, 417 aa, Zea mays
  VARIANT 118: note = Ancestral polymorphism is S, Derived polymorphism is N
  VARIANT 126: note = Ancestral polymorphism is A, Derived polymorphism is T
  VARIANT 135: note = Ancestral polymorphism is E, Derived polymorphism is K
  VARIANT 141: note = Ancestral polymorphism is A, Derived polymorphism is V
  VARIANT 147: note = Ancestral polymorphism is C, Derived polymorphism is G
  VARIANT 273: note = Ancestral polymorphism is R, Derived polymorphism is H
  VARIANT 294: note = Ancestral polymorphism is A, Derived polymorphism is V
  VARIANT 334: note = Ancestral polymorphism is Y, Derived polymorphism is C
  VARIANT 358: note = Ancestral polymorphism is R, Derived polymorphism is W
MAPPHVTRKKGKGAGGKTDLRPDRKQFKRHHKEDAAAEQGDGNGEPGSDLEDNISNTCLEIANGTEANAKKSDKQLKKEARKQRELEISAMEERALQEDIPQTPDDFEKLVRSSPNSSFIWIKYMATLLDLADVKKARAVAERSVYCPKHLFLYFNIKKIFVYLNFFGCISLSSSSTTVSPVFRALKTIIPREEEEKLNVWVAYFNLENEYGSPREDAVKKVFQRALQYCDPKKLHLALLAMYERTEQYELADELLDRITKRFKTSCKIWLCRIQFALKQGKDVEYIKAIVNRALLSLPHRKRIKFLSQTAILEFKCGVPEEGRSRFELILREYPKRTDLWSVYLDQEIRLGDVEVIRALFERRVACLTLPPKKMQFLFKKYLNFEKSLGKDNERIQLVQQKAIEYVQSSLPSQDNS

SEQ ID NO: 17019 - protein, 110 aa, Zea mays
  VARIANT 89..110: note = Derived polymorphism lacks residues 89 to 110
  VARIANT 23: note = Ancestral polymorphism is L, Derived polymorphism is F
MGLPFDVYGSSITTGYCHNYLCLTIYLVSIVWLLHAATTLMVAIFLFVTIAIFVGIHLWPTLTIWQSSGTIFHGGLINYFVSHYGRLERQRQSSSARHSKKFMRNLFTES

SEQ ID NO: 17020 - protein, 334 aa, Zea mays
  VARIANT 172: note = Ancestral polymorphism is L, Derived polymorphism is Q
MVSTLEQLLIAAAFLVVAAAASTVPVSPAAAATRPYHGGGCYSHFFAFGDSLIDTGNFIRYSTARPSSTAPPAAGPTAASSLTSLVLERLGYPRWPPYLDGKSKDDFRHGANFAVASGTALNQLLFKKHGLNVNGITPYSLGVQIGWFKKVLAMLASNEHERREIMASSLFLVGEIGANDYNHPFFQNRTLDFVDSLVPLVIRSIGRSLESLIQLGAKTVYVPGIFPLGCLPRYIFLFRDSGAAGCLRWLNDLTSRHNALLRAKLAGLRRAYRDVSIVYVDYYAEVTGIVGAPARNGFAPATALDACCGGGGFHNANFTVHCSEPGAVQCADPS

SEQ ID NO: 17021 - protein, 274 aa, Zea mays
  VARIANT 241..274: note = Derived polymorphism lacks residues 241 to 274
  VARIANT 165: note = Ancestral polymorphism is V, Derived polymorphism is G
  VARIANT 148: note = Ancestral polymorphism is P, Derived polymorphism is L
  VARIANT 98..274: note = Derived polymorphism lacks residues 98 to 274
  VARIANT 94..274: note = Derived polymorphism lacks residues 94 to 274
MSASGGGSAGNRTVADVLMGNARAAASKTKKASPSLENPQAKTDRAKVELEVQAVPSPAKSPKLPVVITQFDDAKENSLSPKRLITTLFVSIPQEGISMVFYKGTPCFRGYGRRNVERRRNSVRGCIVSQDLSVINLVIVKKGENDLPGLTDTEKPRMREFKGYVFKIMGGCDKQGFPMKQGVLTSGRVRLLLHMSEIGAVGFTAWQVGESCYNPNRLIFSVTCTMLITTLFVSIPQEGISMVFYKEHKTMLKSKLILEDEFDWNLPLVVSGSD

SEQ ID NO: 17022 - protein, 118 aa, Zea mays
  VARIANT 48: note = Ancestral polymorphism is H, Derived polymorphism is R
  VARIANT 36: note = Ancestral polymorphism is R, Derived polymorphism is Q
MSSASCLVHPAPRFRVRLLPLPSSVAARPLLGFRPRCGAPAKGWALWHVSCFKNGQDGPTTSDEGDDFKYVAQSQSSGGAEVKKEEVSSLNGEQEQNLKDGDGFLQLQKASLICLNCL

SEQ ID NO: 17023 - protein, 183 aa, Zea mays
  VARIANT 147: note = Ancestral polymorphism is K, Derived polymorphism is N
  VARIANT 108: note = Ancestral polymorphism is L, Derived polymorphism is V
  VARIANT 103: note = Ancestral polymorphism is R, Derived polymorphism is C
  VARIANT 101..183: note = Derived polymorphism lacks residues 101 to 183
  VARIANT 97: note = Ancestral polymorphism is P, Derived polymorphism is L
  VARIANT 95: note = Ancestral polymorphism is T, Derived polymorphism is M
  VARIANT 94: note = Ancestral polymorphism is W, Derived polymorphism is R
  VARIANT 66..183: note = Derived polymorphism lacks residues 66 to 183
  VARIANT 65: note = Ancestral polymorphism is R, Derived polymorphism is C
  VARIANT 62: note = Ancestral polymorphism is P, Derived polymorphism is A
  VARIANT 57: note = Ancestral polymorphism is R, Derived polymorphism is W
  VARIANT 47: note = Ancestral polymorphism is P, Derived polymorphism is S
  VARIANT 26: note = Ancestral polymorphism is D, Derived polymorphism is G
  VARIANT 18..183: note = Derived polymorphism lacks residues 18 to 183
  VARIANT 1: note = Ancestral polymorphism is T, Derived polymorphism is M
MTTAPWMPPPPPDQREYLYREGRRHDGGEGDPLLLPAPMPPRWWDSPYHPSPPPHLRDHARPSPRRAPMSASSGERERELAMAGADDLKVLGMWTSPFVIRVRIVLNLKGLAYEYVEEDLGNKSALLLSSNPVHKTVPVLLHATKEKSKEIDRLAREQKAEERQKQRGKESDVEAGIEIPEER

SEQ ID NO: 17024 - protein, 824 aa, Zea mays
  VARIANT 70..824: note = Derived polymorphism lacks residues 70 to 824
  VARIANT 95..824: note = Derived polymorphism lacks residues 95 to 824
  VARIANT 667..824: note = Derived polymorphism lacks residues 667 to 824
MAASSSRGAAAAAVDDDDEPYLLGFIISKIVGMRYYRGKVHGRETVGLVRQPLNRYDNNAIAVFNARNDQVGHLPGALAAVLAPLLDSHLLAAAQGIVPRSGSKINPNAYSLPCQVHLFARPAAASVVEAALHEAGIDLIHVDHPEFALSQAAAVMEQFKKPDRDRDVDKLFSLVGKEGKNQTQPMDPPGDVVLSELFGHQKEALGWMVHREESADLPPFWQEGEDGGFENVLTNQKTEKRPPPLKGGIFADDMGLGKTLTLLSLIGRTKARNVGAKKARGGKRRKVEDGGEGSRTTLVVCPPSVFSSWVTQLEEHLKAGSLKVYMYHGERTRDKKELLKYDLVLTTYSILGTEFEQEDSPVKDIEWFRVILDEAHVIKNSAARQTKAVIALNAERRWVVTGTPIQNSSFDLYPLMAFLRFQPFSIKSYWQSLIQRPLEKGSKAGLSRLQNLLGAISLRRIKEMDDGNKSMVELPSKTVLACYIDLSAEEREYYDQMEQEGRNKMQEFGDRDSILSNYSTVLYFILRLRQLCDDVALCPLDMKAWFPASSIEDVSKHPELLKKLALLVDDGDDFDCPICLSPPTKTVITSCTHIYCQTCILKILKSSSSRCPICRRTLSKEDLFLAPEVKHPDEDGSGNLESDRPLSSKVQALLKLLTASQNEDPSSKSVVFSQFRKMLILLEAPLRKAGFKTLRLDGSMSAKKRLQVIQEFSHGGSDSPTVLLASLKAAGAGVNLTAASTVYLFDPWWNPGVEEQAMDRVHRIGQKKEVKVIRLIVKGSIEERILALQERKKRLISGAFGKKGGKNEKEMRVEELRMMLGLGK

SEQ ID NO: 17025 - protein, 494 aa, Zea mays
  VARIANT 363: note = Ancestral polymorphism is G, Derived polymorphism is S
MTRASTIDFGRRKQSELFGSGPLRPANIIRNKFPTYKNGSNGIVIKLADGPEMPSLKEAVAKEATDLLDRCQRPSVRELTMKFEKGFNTATLLSNEAKWRHAALLERDILLKDLKSVLESLRGRVGGKNKDEIVESLSMVDILAIELSKREDELLRQKTEVTKIADTLKLASTDAKRIIDEERANARLEIESAKASVQKIQSALKEQELFSQRTGKQDVDELKEEVQEARRVKMLHCPSKAMDIENEIQVLRDQLAEKSSDSLRLLKELELHRSYGENDMPLYELKGLETLGSTLRIVVHECASVDFSNSSIQWFRIQPEGSKKEIISGATKPVYAPEPHDVGRYIQAEVKSGGQISVAKTAGSIDPAAGLVEYVETLVRNPETDYNVVIIQVNGVAQAADSVHVLCIGRLRMRLAKEKTVVAKEFYSSSMQLCGVRGGGDAAPQSIFWQPRKGLSFVLAFETTRERNSALMLARRFAIDCNIILGGPGDKTSW

SEQ ID NO: 17026 - protein, 219 aa, Zea mays
  VARIANT 156: note = Ancestral polymorphism is D, Derived polymorphism is V
  VARIANT 117: note = Ancestral polymorphism is S, Derived polymorphism is N
MADLLGDPAWPQLHPRPYTDTLWPGLQCELAPDEAHVLRAIRLHLGPDVTTPPCRPGARLDPASLRGLPHLWTLSIFGCFGATHVVHAIVLARADRAQVQPRPHRPHTGDVDSYFGNLITLMEFVPPMSLYRIIYELSPPSSSGLFSNFSGVHLGVLSDPETLDYLQHAQAHQGGQQAATSWFLLVHPFHTSLFLFLISVFDCLIPPIGMDKFSANGQV

SEQ ID NO: 17027 - protein, 356 aa, Zea mays
  VARIANT 238: note = Ancestral polymorphism is L, Derived polymorphism is Q
MGSSSSKNPSHMSSLPWMVRIQAAAFQVAQRRDGSIWRPLLFLGDLKTAASRATPSPDTSEVRSTDITIDVSRGLWARVFCPTAIADDAPAPLPVFVYFHGGGFMLFSASFGPYDTFCRRLCRKLRAVVVSVNYRLAPEHRFPAAYDDGVATLRYLDETPTPLLADIVPAPVDLASCFLIGDSSGGNMVHHVAQRWASMSSATSLQPPLRIRRLRLAGAVLIQPFFGGEERTEAEVRLDKACRILSVARADRYWREFLPEGASRDHPAARVCGEGVELADTFPPAMVVTGGIDLLKDWHARYVETLRGKGKLVRVVDYPDAFHGFYVFPELADSGKLIEDIKLFVDDHRTKASGSD

SEQ ID NO: 17028 - protein, 333 aa, Zea mays
  VARIANT 27: note = Ancestral polymorphism is R, Derived polymorphism is W
  VARIANT 25..333: note = Derived polymorphism lacks residues 25 to 333
MDDASIGGHWWPLTPPQTSPSLRRQRRFGQRPPTGSQVLLTVRHRVEPDITTMTMRHRRSSRSHFCCPLPTPVNFVCLHAVKPHLRPLAMAVSTVSIHIFGDVPSSPLVGLLQDKINNWRETSLILTSILFAAVVFWFIGVSEAAQDALDHLFNQGHNLVTENEISDTFTRLVERLPQVVLGSEETTTLSHARMLLALTFYAGIAARFFDCLGLCIGHSSQFSGSMDKLIVSKPLSIGYLYSVAELKSGAYSKDTTNISLHATSTFAASKISVIHDNALPNSLLGTVEYELPHVPPWFIHAGIQKLYGVLAGIIRLVGLSTVSVGWCGLLSSR

SEQ ID NO: 17029 - protein, 532 aa, Zea mays
  VARIANT 426: note = Ancestral polymorphism is A, Derived polymorphism is V
MASGGNPNPTGAPSQPRPPHTQQQPPPGGSPAAPMTHLRPPSLSGSPFKGLFHTPPTHNPAFQIHMGASSSPQNPLMTATAGSAKRPPQKPPIRPPAPGSTSSAAAASAAAAYKAAAAAAAVANSGGVDLTPAARRNKKRKLPVKQLPDRVAALLPESALYTQLLEFEARVDAALARKKVDIQEALKTPPSLQRTLRIYVFNTFANQGPRTIPPPKNADPPTWSLKIIGRVLEDGAELDPASVVPKHNPVYPKFSQFFKRVTIALDPSLYPENPLIIWENARAAAQQEGFEVKRKGDKEFVANIRLEMNYSPEKFKLSQPLMEVLGVEVDTRARVIAALWQYIKAKKLQNPNDPSFFMCDPQLKKVFGEDKLKFAMLSQKISQHLSAPPPINLDHKIKLSGNGAHSSACYDVLVDVPFPLQKEMMAFLANTEKHKDIEACDEVISASIKKIHEHRRRRAFFLGFSQSPVEFINALIASQSKDLKLVAGEANRNIEKERRADFYNQPWVEDAVIRYLNRKPANEGPGGGAGGS

SEQ ID NO: 17030 - protein, 343 aa, Zea mays
  VARIANT 42: note = Ancestral polymorphism is L, Derived polymorphism is H
MGGSDDHARRKPSLPWTVRVQLAALALVHRRDGSVRRLLFSLGDLKSGTTSRPGASGVRSADVTIDASRGLWARVFSPSSGADADAAAAPVPVVVYFHGGGFVLFSAASRPYDAFCRRLCRGLRAVVVSVNYRLAPGHRFPAAYDDGVAALRYLDANADSLPAHVPVDLSSCFLAGDSAGGNITHHVAQRWAVAAVSPTNLRVAGAVLIQPFFGGEERTAAEVALDGASALSVAATDHFWKEFLPEGATRDHEAARVCGEGVKLADAFPPAMVVVGGFDLLKDWQARYVEALRGKGKPVWVVEYPDAVHGFHVFPELTDSGKFVEEMKLFVQEHKSTNTKRAV

SEQ ID NO: 17031 - protein, 341 aa, Zea mays
  VARIANT 289..341: note = Derived polymorphism lacks residues 289 to 341
MEAGAGEAAPSAPRRLTLPWKVRLLLLCLDVVAGLSMRRDGTINRSIFNLFDLRATASTRPDRQGVRSADVDASRGLWARVFWPSPESSAAPLPVVVYFHGGAFTLLSAASYVYDAMCRRFCRELGAVVVSVNYRLAPEHRWPAAYEDGVAMLRYLASAGLPDSVDVPVDLSRCFLAGDSAGANIAHHVAQRWTTASSPPRSIPVHLAGAILVQPYFGGEERTEAEVRLDGNVPVVTVRGSDWMWRAFLPEGADRNHSAAHVTDDNADLADGFPPVMVVIGGFDPLQEWQRRYADVLRRRGKEVRVVEFPDAIHTFFLFPELTDHGTLVEAMKAFIREQRI

SEQ ID NO: 17032 - protein, 172 aa, Zea mays
  VARIANT 137..172: note = Derived polymorphism lacks residues 137 to 172
MPLMKLACTALERVPLTRRKVIDNLMKKFHQDLVFCRSPADSELTIGVHQKQKEKIDPILEWVDTEFGFKPVVYTSFFGGKQDEGLAKAVETVLKKATDSAHSLVIPLAIFRERLGIEEAIELIRLEEDHQVSEFTQVDRWGLVEGGHDVDIADLKVQMSSAVVFLGLSRGL

SEQ ID NO: 17033 - protein, 304 aa, Zea mays
  VARIANT 241: note = Ancestral polymorphism is H, Derived polymorphism is L
  VARIANT 166: note = Ancestral polymorphism is F, Derived polymorphism is Y
MAAAGGGREATTSGCGLKRRYAPHDQEEETMNQDQPSKEDRCGRIWSGIDLLKDVTENKHVLPTGLEGIDRLLGGGLRQGQLTEVTGPSSSGKTQVCLHSASHAPVKHTGVVMYLDTSNSFSPSRIATIIDGTNDLSDQKGFDLLSKERLKTVMQSIICESVFDIFGMFEVLHQLEVSLLNEKVIGDGRRICLLIIDSISSLLAPIIGGKYPQGRSMMISLAMILKKLAYEHNLAVLVTNHMVSAGNGAVKPALGESWKSVPHVRLMISREHSSNICTGTVLKHTLLVFPLAIQLYFYLSLQQQ

SEQ ID NO: 17034 - protein, 94 aa, Zea mays
  VARIANT 4: note = Ancestral polymorphism is R, Derived polymorphism is Q
MYIRVKRNKSTYFIQCEPTETALSIKQKLHSLIDQPPSSQQLVLWPSSDVLEDSKTLADQKVDNDSIVALALRKDDGEFEEVFIARPEDFMSSS

SEQ ID NO: 17035 - protein, 934 aa, Zea mays
  VARIANT 477..934: note = Derived polymorphism lacks residues 477 to 934
MPSASGPVAVASAPAPVKSAPSLAVGISPDLYPTEDDLPYEEEILREPFKLKGWWRYLVARATAPFAKRAVIYERALKALPGSYKLWHAYLRDRLDHARPHPIDHPAYSSLNNTFERALATMHKMPRVWVLYLTSLLDQRLLTRARRAFDRALRALPVTQHDRIWPLYLRLASLPACPVETSLRVFRRYLQFDPSHAEDFINFLISANHWQEAANRLASVLNDDGFRSVKGKTRHQLWLELCEILTKHADEVAGLKVDAILRGGIRKFTDEVGKLWTSLADYYVRRGLFEKARDVFEEGVSSVVTVKEFSVVFEAYTQFEQSMLAAKLEAAEEEGAEDENEGGGRKSGMDKLSKKFLNEFWLNDEDDTDLRMARFERLLDRRPELLSSVLLRQNPHNVEEWHRRVKLFEKDPARQVATYVEAVKTVDPMKAVGKPHTLWVAFAKMYEKHSRLDSAEDIFKRATQVNYKAVDHLASIWCEWAEMELRHNNFDKAIELMRQATSEPSVENIHANNMIDAAAAEGDEPVQMKVHKSLKLWSFYVDLEESLGTLDSTRAVYERILDLRIATPQIILNYAYLLEEHKYFEDAFKVYERGVKIFKYPHVKAIWVTYLTKFVHRYKRSKLERARELFHEAVQQAPAEEKKPLYLQWAKLEEDYGLAKRAMNVYDEAVRAVPNSEKMAMYEIYIARAAELFGVPRTRQIYEQAIESGLPDRDVLTMCMKFAELERSLGEIDRSRAIYVHASNYADPNNPDFWKKWNDFEIQHGNEDTFREMLRIKRTVAASRSQTHFILPEYLMQRDQKLNLDEAVDTLKRAGVPEDEMAALERQLATGPSTAPPAAPSTAPASANRMMNFVSAGVEAQVESSRQQAANNEDIELPDESDDEEPDVQIAEKSVPAAVFGELGKRAAENNEESSGAQGNEQLGALERIKRRRQ

SEQ ID NO: 17036 - protein, 256 aa, Zea mays
  VARIANT 202: note = Ancestral polymorphism is A, Derived polymorphism is T
  VARIANT 207: note = Ancestral polymorphism is A, Derived polymorphism is V
MVGLLRPLSAAATLLLAPATPLTGSSVSASSVGGRRWRSVRADAGGGWLSGLLGGKGGGASTAMMVTPGTVKAGDPVLHEPAQEVAPGDVLSEKVQGVIDRMVDVMRRAPGVGLAAPQIGVPLRIIVLEDTQEYISYAPKKDIEAQDRRPFDLLVIINPKIKSTSKRTALFFEGCLSVDGYRAVVERHLDVEVSGLDRNGSTMKVRASGWQARILQHECDHLEGTLYVDKMVARTFRVVENLDLPLPTGCPQLGAR

SEQ ID NO: 17037 - protein, 245 aa, Zea mays
  VARIANT 1: note = Ancestral polymorphism is M, Derived polymorphism is I
  VARIANT 23: note = Ancestral polymorphism is P, Derived polymorphism is L
  VARIANT 41: note = Ancestral polymorphism is Y, Derived polymorphism is H
  VARIANT 44..245: note = Derived polymorphism lacks residues 44 to 245
  VARIANT 45..245: note = Derived polymorphism lacks residues 45 to 245
  VARIANT 46: note = Ancestral polymorphism is T, Derived polymorphism is I
  VARIANT 51: note = Ancestral polymorphism is S, Derived polymorphism is C
  VARIANT 52: note = Ancestral polymorphism is N, Derived polymorphism is D
MAQICRAERRVLLYLDHDMVFIPINIREMHCSSCGLFLLNYIEYWTGDELSDNFTQRMVGYGKLPKYHQDPTTEELAKTLDCWPSMNYYITRCRYVLMPWKFNGCYTLFVINHVKKQVTFIDFTPTQDWYKHMPYKRFVEAIIMASNKYKIAYNKKRSGWAKDIFKWEHTIRNGVPIDLRGLNTSYLVLQAMTMWGNDRRMQFIRDAKNLRRNFMTDLLSYEDNLCRYVIPPNIQHRLIDIAKND

SEQ ID NO: 17038 - protein, 105 aa, Zea mays
  VARIANT 80: note = Ancestral polymorphism is T, Derived polymorphism is I
  VARIANT 70: note = Ancestral polymorphism is C, Derived polymorphism is Y
  VARIANT 27: note = Ancestral polymorphism is C, Derived polymorphism is S
  VARIANT 23: note = Ancestral polymorphism is S, Derived polymorphism is P
  VARIANT 12: note = Ancestral polymorphism is H, Derived polymorphism is Q
  VARIANT 6: note = Ancestral polymorphism is L, Derived polymorphism is R
MEQEHLHLAMVHSLYSSLSQLDSTNGCSCCWMENDNPSLHHALFCLSKIFLFAPSGLNPYKCTWHWLPICRFITSHEKDTLFDNGTSICSLGNDQKVGGHRNTEN

SEQ ID NO: 17039 - protein, 504 aa, Zea mays
  VARIANT 31..504: note = Derived polymorphism lacks residues 31 to 504
MALRRALLRSAEISFERKAAIEYIHSLSRAQPARSLNGAGLCPASRSLSTQAATTSSTPQPPPPPPPPEKTHFGGLKDEDRIFTNLYGLHDPFLKGAMKRGDWYRTKDLVIKGADWIVNEMKKSGLRGRGGAGFPSGLKWSFMPKVSDGRPSYLVVNADESEPGTCKDREIMRHDPHKLLEGCLIAGVGMRASAAYIYIRGEYVNERLNLEKARQEAYAAGLLGKNACGSGYDFDVHIHFGAGAYICGEETALLESLEGKQGKPRLKPPFPANAGLYGCPTTVTNVETVAVSPTILRRGPEWFASFGRKNNSGTKLYCISGHVNKPCTVEEEMSIPLKELLERHCGGVRGGWDNLLAVIPGGSSVPLLPKHICDDVLMDYDALKAVQSGLGTAAVIVMDKSTDVVDAIARLSYFYKHESCGQCTPCREGTPWLWMIMERLKVGDAKLEEIDMLHEVTKQIEGHTICALGDAAAWPVQGLIRHFRPELERRIRERAERELLAASA

SEQ ID NO: 17040 - protein, 1813 aa, Zea mays
  VARIANT 840..1813: note = Derived polymorphism lacks residues 840 to 1813
MAASGFGREAGPSIRGPSSALPVFGVAAATPTGTTPSPAIPSFPSAGPATSSFPSARPTTPSFPSARPATPSFPSTRPATPPPPSARPGNPSFPSVRPAAPRFPSHQPQLAAADTASRSMPIPVPSARPTAGASPRFPSSRPALDPGVTAATGRHVARHLQPQPRPAIPSVSRSFNPLISSRNRAPSPVSNMRTDSPADYDNGMEQRRLVHFADPLFENGSLQSSEQLRMRPSENMRSQTSTKSPSNIASKFRHPSDFQDHHHVQIVDPRANVYNRFTGSMQNQSSDHNISKRSRSPTLSYEDADGTKAHVNTGGNSRRLVDYSDTINDENVEASKRMRSPASEFTRMVKSPPSDTRGNIRSSSVDFGSNNSVQNLHAYADVQKSDASFSKFRNQIQSRIGGACSPSQQMSHLSDSNELNTLAISPPKPSTLSATRRTGISSLDATADDHLTPSTELEREEQAKAKRLARFHVELSRPVENTNDFVKTVKSSADKSKQATSVGRTPLRTNDDTDDNTLVDMDSTALAAIVGLCPDMCPGSSLDRLHTILFSYSHCLFYIPSSKHTELIYLLHIYPCFRLEPERAERERKGDLDRYERLDGDRNLTTELLAVKKYNRTAERDADLIRPLPILQKTMEYLLSLLDHTYDDSFLGLYNFLWDRMRAIRMDLRMQHFFNQEAISMLEQMIRLHIIAMHELCEYNKGEGFSEGFDAHLNIEQMNKTSVELFQMYDDHRREGVLFSTEKEFRGYYALLKLDKHPGYKVEPAELSLDLAKMSREIRGSPEILFAREVARACRMGNFISFFRLARKATYLQACLMHAHFAKLRRQALASLHSGLQNGQGIPISQVVVWLAMEGEDVENLLEYHGFGLRQYEELYLVKEGPFLNSESDFPSGCSQLVHSKKSQRVVDDVSSGPDCAPTSKEKTVFPYTGQPVAGKRDLFLPQNAPAIPPDGRMDLDPSFPGPISITPDRQISPLFSDPFSPRAASKLFSSTHPKPLSPTEGRKDRFSSVLTAVSPRTGKRDILSKTPKVASPKAEAKTKLVNDLIAEDQDSGVAEIPQKVEMQTDILWSQANTQNANALAEPIISHPLADSMSLNYSSMYGAEDDFRAHVSGIGADMDEGTPPDHECLVIGAGLPISSPLSYHEEYEDHSISNSTNDDWLPIVMPAKKLISDENLKAILRKWRQHAADKRLLREQKNALAVAALCSLSLGPPVHKSTTVSKLAVEELDIGHAFKERQARKQRSWSRLNVSELSGPILNENNPDARCLCWKLLVLVPPGMESQTNSFVSKWLLRKLMGYGIGDIGLVVSSAGLSIWTEWISFPNACCLSVVRASDQQVIDNDIANSTSCIVFVVSESISWEMQKERFNSLLACIPDESNLPLLIFSGDTYNEGYEYASKYIINRLGLNGLNRGKIGSSLVIFLVENYTEDHANGFFDDDKLREGLKWLVSSLPVQPDVTLVKTHELLLEYLNPQLELLNTHVAPGAGPGDCISVFNNAVNQLAEEILAAANANCSQWPAPEIDLLERTSNERIYAEMFLPSIGWSSPSRIQPLLAAINSCKIPEFSYDLSWLNHGSHMGKQIQDQKKLLEECLARYLTESARLLDESQVVTEVNVMVQNCVGLELQDSSYYLAPRWVAIFRRIYNWRLAKLSTGKLSEAYVLTQHLYQAPAAAGSNGTTQGLTANTASSDAVDHIMMPAVSTGITLDEIIEISCDLNVVDAQPVTLPPRLPVHVHEEPQALADTNGVLGVDEMYIPRRVELGEVMPISDDKLSRLRVELGEAMPIKTDDKLSRLLEQCTKLQDRIDETLSIYF

SEQ ID NO: 17041 - protein, 1216 aa, Zea mays
  VARIANT 242..1216: note = Derived polymorphism lacks residues 242 to 1216
  VARIANT 672..1216: note = Derived polymorphism lacks residues 672 to 1216
  VARIANT 720..1216: note = Derived polymorphism lacks residues 720 to 1216
MVKSPPSDTRGNIRSSSVDFGSNNSVQNLHAYADVQKSDASFSKFRNQIQSRIGGACSPSQQMSHLSDSNELNTLAISPPKPSILSATRRTGISSLDATDDDHLTPSTELEREEQAKAKRLARFHVELSRPVQNTNDFVKTVKSSADKSKQATSVGRTPLRTNDDTDDNTLVDMDSTALAAIVGLCPDMCPEPERAERERKGDLDRYERLDGDRNLTTELLAVKKLRRQALASLHSGLQNGQGIPISQVVVWLAMEDEDVENLLEYHGFGLRQYEELYLVKEGPFLNSESDFPSGCSHLVHSKKSQRVVDDVSSGPDCAPTSKEKTVFPYTGQPVAGKRDLFLPQNAPAIPPDGRMDLDPSFPGPISITPDRQISPLFSDPFSPRAASKLFSSTHPKPLSPTDGRKDRFSSVLTAVSPRTGKRDILSKTPKVASPKAEGKTKLVNDLIAEDQDSGVAEIPQKVEMQTDILWSQANTQNANALAEPIISHPLADSMSLNYSSMYGAEDDFRAHVSGIGADMDEGTPPDHECLVIGAGLPISSPLSYHEEYEDHSISNGTNDDWLPIVMPAKKLISDENLKAILRKWRQHAADKRLLREQKNALAVAALCSLSLGPPVHKSTTVSKLAVEELDIGHAFKERQARKQRSWSRLNVSELSGPILNENNPDARCLCWKLLVLVPPGMESQTNSFVSKWLLRKLMGYGIGDIGLVVSSAGLSIWTEWISFPNACCLSVVRASDQQVIDNDIANSTSCIVFVVSESISWEMQKERFNSLLAYIPDESNLPLLIFSGDTYNEGYEYASKYIINMLGLNGLNRGKIGLSLVIFLVENYTEDHANGFFDDDKLREGLKWLVSSLPVQPDVTLVKTHELLLEYLNPQLELLNTHVAPGAGPGDCISVFNNAVNQLAEEILAAANANRSQWPAPEIDLLERTSNERIYAEMFLPSIGWSSPSRIQPLLAAINSCKIPEFSYDLSWLNHGSHMGKQIQDQKKLLEECLARYLTESARLLDESQVVTEVNVMVQNCVGLELRDSSYYLAPRWVAIFRRIYNWRLAKLSTGKFSEAYVLTQHLYQAPAAAGSNGTTQGLTANTASSDAVDHIMMPAVSTGITLDEIIEISCDLDAVDAQPVTLAPRLPVHVHEEPQALADNNGVHGVDEMYIPRRVELGEVMPIETDDKLSQLRVELGEVMPIETDDKLSRLLEQCTKLQDRIDETLSIYF

SEQ ID NO: 17042 - protein, 462 aa, Zea mays
  VARIANT 326: note = Ancestral polymorphism is I, Derived polymorphism is T
MGCAQGKCCLRRHPRRGSAAAAVGGGATLGRAAVPGAGLVLEYAALAVAGLYPDSTARESQDAHLVATRFAGDPDLHLFAVFDGHGTAGTACAGFARDALPRLLASLSLASAADPTAAFREAMLGANAEMHAAPEVDDSMSGTTAVAALVSGGALHVANVGDSRAVAGVWRAGRVVAEDLSWDQTPFRADERERVRACGARVMSVEQVEGMRDPEAERWAPDEGDPPRVWARDGLYPGTAFTRSLGDLAAEAIGVIAEPEVKSVEITPSHLFFVVASDGVFEFLSSQEVVDRVATYQDPRDACSAIAAESYKLWLEHENRTDDITIIIVHIRDMESVGPAGSDKADYGSVGASIAVHAIQSENIRCFQARAKRAASCITTGANLASNGRGYWIGLCSKASHLQPPDESGEWKLNDKRRPRNNPPPSSRATNRTMDVMSASSKSRVAALVLVEHLLLPTMQGF

SEQ ID NO: 17043 - protein, 153 aa, Zea mays
  VARIANT 23: note = Ancestral polymorphism is C, Derived polymorphism is R
  VARIANT 51: note = Ancestral polymorphism is R, Derived polymorphism is Q
  VARIANT 57: note = Ancestral polymorphism is C, Derived polymorphism is R
  VARIANT 81: note = Ancestral polymorphism is E, Derived polymorphism is K
  VARIANT 84: note = Ancestral polymorphism is Y, Derived polymorphism is N
  VARIANT 106: note = Ancestral polymorphism is V, Derived polymorphism is E
  VARIANT 110..153: note = Derived polymorphism lacks residues 110 to 153
  VARIANT 123: note = Ancestral polymorphism is L, Derived polymorphism is V
  VARIANT 127: note = Ancestral polymorphism is P, Derived polymorphism is R
  VARIANT 135: note = Ancestral polymorphism is H, Derived polymorphism is Q
MTGAAARSYKVNHDSEMTLGLTCSPHDLLTKHEDQVSEFLSSNYEQGTKMRCFKALRCMPVSFRVSVRGPKCSIVKSFIFEVRYLNIMVGLLKVLEYLLPIQTNLERLSQVLADNHRELLKLLHNLPTSKGTLSHLKVLKTSCVMCCPNSLQE

SEQ ID NO: 17044 - protein, 526 aa, Zea mays
  VARIANT 270: note = Ancestral polymorphism is W, Derived polymorphism is C
MTTAWCWPWPWQATLLAAAAWLCLHAAVARLMEALWWRPRRLERHFARHGVRGPGYRLYLGSSIELSRLMEDASSRPAPRDEPHRVLPRVLAFHHHWDKLYGPMHLIWFGTTPRLVVSSPELIREVLLSRSQHFDRYEAHPLIRQFEGLGLSNIHGDEWARRRKILAPAFHAENLKLLAPFVAGTVQRMLEERVLLPGGPGEVELDVADWYRRLPQEVITVATFGRNNSDEGSAVFRLQAEHASYATEAHSKVFFPGYRFLPTRRNRRVWQLDREIRRLLAKLVAGLQSGGSGDHRHQGRDHGRAGGGMRDFMSFMAPAMAADEIIEESKNFFFAGQETLTSLLTWATVALAMHQEWQDRAREEVMEVCGSRAVPTKDHIPRLKTLGMVINETLRLYPPAVAMIRKAKRDVELGGCVVPAGTEIMIPIMAVHHDAGVWGDDATEFDPARFADDGDRRPRQQMAFFPFGGGARVCIGQYLALMEAKIALATVLQRCKFRLSPAYVHAPRVLMILNPQHGAPVIFRPL

SEQ ID NO: 17045 - protein, 266 aa, Zea mays
  VARIANT 32: note = Ancestral polymorphism is P, Derived polymorphism is S
MDLCNREREDSYTRFHFGFRDYHASVSRPFAPTHTGVCVRGFASLTYNASSMIGHNLEGPLPVHIVKVLDLVVHMNHARPMSTAAASKVPVGARKVWFTLSGWRRTKEDIILEMKNAYAVSRLRKKTGYTKNQFYDQALKIYKEMTYNDFVVYHFLFSFWLKTIKNELKRRQSMWNSVHWELVEPAVSIRTLRARMIGLDKNDLDKAFIQLTLEFVTKQKFEAYNSKGAVVSGDKSKEVLVKDIWVFERSLFHPGAYWRVCGRITL

SEQ ID NO: 17046 - protein, 452 aa, Zea mays
  VARIANT 64: note = Ancestral polymorphism is R, Derived polymorphism is C
  VARIANT 107..452: note = Derived polymorphism lacks residues 107 to 452
MDFFKSILAEPDPDPASPPPEQEPEPEPEPAGSASSSSGGGWGFGGLLKTLTSQSETVLEAYRRDLAEFGTGLRRETEVLREAAARAARDLPSSAHALDGLADIVAQGKEALSQAAAAAGGGPQASDGGDSDPSSASGTHVRYSRFEAQLRALQADPATFTSDPEDAEDFAAWSKGFILDEREEEIEALCYDSDALEAMADRLVPDAVPREVFWPRYFYRVHKLKQQEDARAKLVQRVIAQEEDEDLSWEVDDDEEEEEEQQKDSTEELAEQRQEPIKEEVRQDMAEKENVERIVEESGVETVEEAPGLVKEEKNAAEPQPIVLGSSLVVVDKEEEREKAVLGSSFGVVGEGENAEPSKSNVEESGAKKEGAKHETSDSSKDSDYSIVSRQRTAEEEDLEWDEIEDLGEHEEKKGGIQTSSPALKEELRKRLSIAEDDEDLSWDIEDDDDNA

SEQ ID NO: 17047 - protein, 67 aa, Zea mays
  VARIANT 11: note = Ancestral polymorphism is R, Derived polymorphism is K
  VARIANT 17: note = Ancestral polymorphism is H, Derived polymorphism is R
MTEAPFLPRERLFKQQHYFQNLTKHTYLKGRYDVITSVAIPLALAASSMFMIGRGVYNMSHGVGKKE

SEQ ID NO: 17048 - protein, 523 aa, Zea mays
  VARIANT 206: note = Ancestral polymorphism is H, Derived polymorphism is R
MQSSVKLAVLALLLAAAAHHGLLPLPTARCYWLNPEIYDAGGLSRRAFPDGFVFGTAASAYQVEGMAKHGGRGPSIWDAFIEVPGTIPNNATADVTVDEYHRYKEDVNIMKNMGFDAYRFSISWSRIFPDGTGKVNQEGVDYYNRLIDYMLQQGIAPYANLYHYDLPLALHEQYLGWLSPKIVLTQLHAVPNRREAFADYAEFCFHAFGDRVKNWFTFNEPRCVAALGYDNGLHAPGRCSGCPAGGNSTTEPYLVAHHLILSHAAAVRRYRDKYQLHQKGKIGILLDFVWYEPFSDSNADQAAAQRARDFHLGWFLDPIVHGRYPYSMQEIAKDRLPLFSDEEARMVKGSIDYVGINHYTSFYMKDPGTWNLTPVSYQDDWHVGFVYERNGVPIGAHANSYWLYIVPWGINKAVSYVKETYKNPTMILAENGMDQPGDVSITQGVHDTVRIRYYRDYITELKKAIDDGARVIGYFAWSLLDNFEWRLGYTSRFGLVYVDYKTLKRYPKDSAFWFKHMLSKKRS

SEQ ID NO: 17049 - protein, 235 aa, Zea mays
  VARIANT 205: note = Ancestral polymorphism is L, Derived polymorphism is S
  VARIANT 189: note = Ancestral polymorphism is A, Derived polymorphism is T
  VARIANT 176..235: note = Derived polymorphism lacks residues 176 to 235
  VARIANT 173: note = Ancestral polymorphism is W, Derived polymorphism is C
  VARIANT 172..235: note = Derived polymorphism lacks residues 172 to 235
  VARIANT 167: note = Ancestral polymorphism is A, Derived polymorphism is T
  VARIANT 166: note = Ancestral polymorphism is R, Derived polymorphism is W
  VARIANT 163: note = Ancestral polymorphism is G, Derived polymorphism is E
  VARIANT 154: note = Ancestral polymorphism is R, Derived polymorphism is W
  VARIANT 115: note = Ancestral polymorphism is G, Derived polymorphism is S
  VARIANT 111: note = Ancestral polymorphism is E, Derived polymorphism is K
  VARIANT 105: note = Ancestral polymorphism is R, Derived polymorphism is W
  VARIANT 101: note = Ancestral polymorphism is A, Derived polymorphism is V
MGTEYPTFADVSGARALLFLADSTPRLAPPSRPPALSEEFYCYSGSSSSYSGASTRSCVSDSAQRGRPVDPLRVLSVVASLRRIDPKVLAEATSALFHTDAEKKRKGVWIEIDSGGDDGQSERSSAVASEGSTVTAAASAGSTATSGRCRGAPRVGCAAGGKGPRRAEVIMQWFSQTQAGPATENDIRAAVGDNSGTSKAIRWLLKQEGGLRRAGNGGALDPYVYMVADRSDEVN

SEQ ID NO: 17050 - protein, 736 aa, Zea mays
  VARIANT 308: note = Ancestral polymorphism is P, Derived polymorphism is L
MPPRALPTTSTPASRRVVYVLLAALATAPFLLLLLYGGASPSALCPTSYRTPRRLPYPSVLWSKVPPLPALSTSPHPDLRGSRWIVFTASPHAPRHRPLRAVPGWQVLAVADEATPADWSHPGAVLLTLTDQGRLGFRSVAFLPARGPARKAAAYLFAVQRGARVIYDADARNAVLGGNLTRHFDVDLDQRHGGAVLLQYSHANPNRTIVNPFVHFGQPSIWPRGLPLEKAGELDAEEFYTEIFSGGQFMQQGMCNGLPDVDSVFYFTRKSLEMEAFDFQFDADAPKVALPQGMMTPVNSVNTLFHSPAFWGLALPVSVSPMASDVIRGYWAQRILWEIGGYLVVYPPTVHRIDNVRGHPFDEEKDLHVNVGKLIKFLMEWRSSKLTLFERILDLSYAMTEEGFWSEKDLHFMTAWLQDLVAIGYRQPRLMSLEIDRPRATIGHGDKKGFGPKKLPSVHLGVEEIGEVSTDIGNLIKWRKHFGDIVLIVHCTELVDRTALEWRLLYGRIFRAVVVLSEQSNSDLAVEFSNLTQAYKYLPKVFDRFGGAQGFLFLQDRMVFNYWNLLNADKAKLWITNQVKESWSDVPLHGNNIEWFVNQGDMIKKAVSNFPSQYQDNYRRSVGENNLIRCSSEIFYVPQRYTRDFSDLVKVIGSLDIHHSFAVPMLFLAIDSPSNFESKALTKLVYRADLPSDTTLSTIYTTEAHAVYPVKVQNEMDFVKLIRAMALGDPFLMELV

SEQ ID NO: 17051 - protein, 266 aa, Zea mays
  VARIANT 33: note = Ancestral polymorphism is R, Derived polymorphism is Q
MALLLLRGCAAPPAVHAAPAGSRLLPPALPRRRLVAVASSASPAPSGEVASSSQDGRGYGTVGGPNGHAIAPATVTKSTAVETTVERVIFDFRFLALLAVAGSLAGSVLCFLNGCVFIKEAYQVYWSSCVKGVHTGQMVLKVVEAIDVYLAGTVMLIFGMGLYGLFISNAPASVAPESDRALSGSSLFGMFALKERPKWMNITSLDELKTKVGHVIVMILLVKMFEKSKMVTIATGLDLLSYSICIFLSSASLYILHNLHKGDHEE

SEQ ID NO: 17052 - protein, 246 aa, Zea mays
  VARIANT 77: note = Ancestral polymorphism is H, Derived polymorphism is P
  VARIANT 122: note = Ancestral polymorphism is A, Derived polymorphism is E
  VARIANT 159: note = Ancestral polymorphism is A, Derived polymorphism is T
  VARIANT 196: note = Ancestral polymorphism is V, Derived polymorphism is E
  VARIANT 208: note = Ancestral polymorphism is A, Derived polymorphism is V
MEAGAGGGEPSTPRSRTLPCKVRLQLFCLEVVAGGLSARRPVHRHGRGRVARPVGARVFWPSTEASSSPLPIVVYFPGGAFALLSAASYVYDAMCRRFCRELGAVVVSVNYRLAPEHRYPAAYKDGVDVLRHLASAGLPDGVDDVPVDLSRGFLAGDSTGANIARLVAQRWTTASVESSSSPPRSSPVCPAGAVLVQPYLGGEERTEAEVRLDGEGAGGDRQGLGLDVAAVPARRRRPERPSCARD

SEQ ID NO: 17053 - protein, 163 aa, Zea mays
  VARIANT 106: note = Ancestral polymorphism is R, Derived polymorphism is C
  VARIANT 131: note = Ancestral polymorphism is D, Derived polymorphism is Y
  VARIANT 135..163: note = Derived polymorphism lacks residues 135 to 163
MPMLLPPPPLPSSSSPNYYLPSHPRPPSVLSHPLRSQPLPLPPAMSSSSPPPRPDDDDGAQEVGASDGRSLGYGEAEYWDARYVEEGGAPYDWYQRYDALRPFVRCFAPPASRILMVGCGSALMSEDMVTDGYVEIVNIDISSVVIEMMRKKYFDVPQLQCIL

SEQ ID NO: 17054 - protein, 524 aa, Zea mays
  VARIANT 21: note = Ancestral polymorphism is P, Derived polymorphism is R
MKPTTSSTLLLAAAVLCLALPLLPGATAKAARARQGDYLARLRGSSPWPAESASLAVAATDRASRHAASPGVGRKEDDRVDRLPGQPSGVDFEQYAGYVTVDAAAGRALFYYLAEAVGGGSASAAKPLLLWLNGGPGCSSLGYGAMEELGPFRVKSDGKTLYRNPYAWNNAANVLFLESPAGVGFSYSNTTADYSRSGDNKTAEDALRFLLNWMEKFPEYKGRDLYLAGESYAGHYVPQLAHAILGHAAAGKPSSSSPLNLRGIMIGNAVINDWTDTKGMYDFFWTHALISDATADAIGRHCNFSAAADADAAASNDKCNEATSEADEALQDIDIYNIYAPNCQSPGLVSPPITPSMDRFDPCSDYYVNAYLNDPDVQRALHANVTRLDHPWSACSDVLRRWTDSATTVLPILTELLNNDIRVWVYSGDTDGRVPVTSSRYSVNQLQLPVAAKWRAWFSSTQGAGEVGGYTVQYKGKEKGSLSLVTVRGAGHEVPSYQPRRALVLVQGFLAGKTLPGCKTCESA

SEQ ID NO: 17055 - protein, 217 aa, Zea mays
  VARIANT 78: note = Ancestral polymorphism is A, Derived polymorphism is V
  VARIANT 36: note = Ancestral polymorphism is P, Derived polymorphism is R
MGEACRDAAAAGRQLLQDEAGGGGGRHAEKELVGDPTHDSAVSAKLYEDVPATPMMALNHISRLCESVDASVRFYVKALGFVLIQRPPALDFSGAWLFNYGVGIHLVQRDDARRAPDVRPEEAELDPMDNHVSFQCEDMGAMERRLREMRVRYMKRTINEEEGSPIDQLFFRDPDGFMIEICNCENLELVPAGAFGRLRLPRDRHNPPVRMVAGSDE

SEQ ID NO: 17056 - protein, 553 aa, Zea mays
  VARIANT 280..553: note = Derived polymorphism lacks residues 280 to 553
MAVTRVAVAAALSAAPLSSRRHRVALPSACRLLPASATCCNSRAPMSLQAAAAAPAAGAVDEETPASSPPSDASKGVENLVIIGSGPAGYTAAIYAARANLKPVVFEGCQMGGVPGGQLMTTTEVENFPGFPDGITGPDLMDRMRKQAERWGAELYQEDVEFVNVKSSPFVIRSSDREVKCHSLIIATGATAKRLRLPREDEFWSRGISACAICDGASPLFKGQVLAVVGGGDVATEEAVYLTKYARHVHLLVRKDQLRASKAMQDRWHCKMLYLANKLQFVGCELVIMVDYGECFRVLNNPNITVHFNTEAMDVVSNDKGQMSGVHLKRRDTGEESVLTVKGLFYGIGHTPNSQLLQGQIELDSAGYILVKEGSAKTSVDGVFAAGDVQDHEWRQAITAAGSGCIAALSVERYLVANDLLVEFHQPVQEETKKDITDKDVQMGFDISHRKHKGQYALRKLYHESPRLICVLYTSPTCGPCRTLKPILSKVIDEYGEFVHLVEIDIEEDPEIAEAAGIMGTPCVQFFKNKEMLRTVSGVKRKKEYREFIEANK

SEQ ID NO: 17057 - protein, 167 aa, Zea mays
  VARIANT 51: note = Ancestral polymorphism is P, Derived polymorphism is S
  VARIANT 31: note = Ancestral polymorphism is P, Derived polymorphism is T
  VARIANT 12: note = Ancestral polymorphism is M, Derived polymorphism is V
MAAPTVVSLLAMAVVAIAALQATAAGPPPPPPYGRPTNCVQTLYEVSSCAPFLSTGTVISGPPASCCAPLRAVLRTPASICLCHAIGGEINELLRINIDPIRLALLPVACWAIVPPQLPAMCFVGPVPPIFNIPTMSPSPPVTPPPPMPPASPMRPPPWASTPPGHI

SEQ ID NO: 17058 - protein, 70 aa, Zea mays
  VARIANT 11: note = Ancestral polymorphism is G, Derived polymorphism is C
  VARIANT 18: note = Ancestral polymorphism is A, Derived polymorphism is V
MESYAMWVATGVASAFFASLERCSCIHLHTAEDDGDEEEENLEEARRSFSRPIPEYYYDRSGSSASIAKM

SEQ ID NO: 17059 - protein, 153 aa, Zea mays
  VARIANT 124: note = Ancestral polymorphism is D, Derived polymorphism is Y
MGVELAQPTAAAAAVTTAEQAQDLIDAARYDDLEDVVALFSAGVSLDSTDSQGRTALHMASANGHLAVVEYLIQNGANVNATNMEKNTPLHWACLNGRIEVIRALISAGASVSALNSHEKTPMDEAVTTGKMDVIDAIGAAVAQAELDAVTVS

SEQ ID NO: 17060 - protein, 609 aa, Zea mays
  VARIANT 22: note = Ancestral polymorphism is S, Derived polymorphism is P
  VARIANT 52: note = Ancestral polymorphism is S, Derived polymorphism is Y
MHSAASTNTTAFAAAALSTLLSRCRSLASVKQLHAHILARSNSPFPYNHFLSKLLSLSCSASASAANYALLLLSSHPAPTAFTYNVTIRLFASSRPDTSLRLFLSMLRAEVRVRPDAYTLPFLLLAAARCPAPALARSAHALLEKIGLGDHDHTVHSLITMYSCLDDHLAARRVFDGISHRDVVSWNSMVKAYERAGMVAEVEGMLRSMVTEGAVAPNGVTLAVVLTACRDAGNLVLGRWVEEWVRSAGMEVDSLIGSALVGMYEKCGEMAEARRVFDGIRHKDVVAWNAMITGYAQNGMSNEAIALFHSMREAGLCPDKITLVGVLSSCAAVGALKLGVELDTYAMRRGLYNNVYVGTALVDMYAKCGDLEKATHVFGKMPFKNEASWNALICGLAFNGRGYDAIQQFELMRDEKGLQPDDITFIGVLSACVHAGLLEYGRQLFNSLTPVFKIIPRIEHYSCIVDLLARAGHLEEAWDFIEEMPGKVDAVMLGALLAACRKCKNTEVGERVINRIMKLEPSNSWNYVVSSKIYATSDKMDESARMIGLMRERGVNKTPGCSWVEVNGKVLEFYASTEPQHGAEDMYQLMGVLVNEMRLKGYVPNLDLV

SEQ ID NO: 17061 - protein, 280 aa, Zea mays
  VARIANT 134: note = Ancestral polymorphism is Y, Derived polymorphism is H
MAVARLRAVAAAVLQPALAAGGRGERRPLGTAAEVAAGAGPGAARWELLGAREYYDYRRAMYGDITHKAILVDAAGTLLAPTEPMAQVYRTIGQKYGVNYSEDEILMRYRLAYAQPWGRSRLRYVDDGRPFWQHIVSSSTGCSDLQYFEELYQYYTTEKAWRLCDPDAGRVFEALRRAGVKTAIVSNFDTRLRPLLQALKCDGWFDAVAVSAEVAAEKPNPTIFLKACELLGVKPEEAVHIGDDRRNDLWGARDAGCDAWLWGSDVYSFKEIAERIGVEV

SEQ ID NO: 17062 - protein, 344 aa, Zea mays
  VARIANT 124..344: note = Derived polymorphism lacks residues 124 to 344
  VARIANT 36..344: note = Derived polymorphism lacks residues 36 to 344
MVEETVVGDGEASTSAASAHASIAARAGDGGTRRAWGSEERRPGAGDGEQSRYAPLDSCLFTTAITTSDERYNWPVPWPERLDVSYASVPDDSASNIEKFEADTKYWKQLVSEREYFKQGKIEQFRQILEEGSGPEIDEYYADVKYERIAILTALGAFHTFLGKVDRAPQKESHFKDATQYYNRASRIDETEPSTWIGRGQLCIAKGELQMASDSFKIVLDEDENNFPALLGQASVYFLMGEAEQQHKKSLEHYRNSLDLYKKALRVYCNCPAAVRLGIAFCRYKLGQVEKARQAFQRVLELDPQNVDAPGVSSRYGRSRLAEGRTRGGSLPLRALIGSIYIYI

SEQ ID NO: 17063 - protein, 179 aa, Zea mays
  VARIANT 59: note = Ancestral polymorphism is R, Derived polymorphism is C
  VARIANT 16: note = Ancestral polymorphism is S, Derived polymorphism is G
  VARIANT 13: note = Ancestral polymorphism is G, Derived polymorphism is S
  VARIANT 3: note = Ancestral polymorphism is M, Derived polymorphism is L
MCMRQPSSRLFIGEISSSTTGANSWRRRFAIPFAPALSLLPETGVVNDAIEMLERMAHRGACSCEKNTGDGAGIMVALPHDFFKEVAKDAGFELPPPCEYDVGMFFMPTDEKCHEKGKAEFKKVAESLGHVILGWRLVPIDNSDLGESALETEPVIEQVFVTKSSRSEAEFEQQVIPYH

SEQ ID NO: 17064 - protein, 254 aa, Zea mays
  VARIANT 16: note = Ancestral polymorphism is L, Derived polymorphism is P
  VARIANT 19: note = Ancestral polymorphism is P, Derived polymorphism is L
  VARIANT 29: note = Ancestral polymorphism is M, Derived polymorphism is K
  VARIANT 98: note = Ancestral polymorphism is G, Derived polymorphism is S
  VARIANT 150: note = Ancestral polymorphism is R, Derived polymorphism is K
  VARIANT 228: note = Ancestral polymorphism is R, Derived polymorphism is C
  VARIANT 231: note = Ancestral polymorphism is R, Derived polymorphism is L
MAKRRRHELAPVVEELISPMNSLDDGCLMHIFSFLSPIPDRYNTALVCHRWRFLACHPRLWLRVERPIRDAMEPGVYPDLEAAVSAARPGDTILIAAGGSHVACNIQIKKPICIIGGGDLPDDTVLTCSRGFDNALEFLSTCKIANLTIRAELGCCLLHRGGRLTIQECLLQCEQNPLDHLSFPIISTAIEYDPFSSLKEQGHGVTVVRTRIEGGARAVRTNGTLALRHVRAIYSRSSVFFWFEVGEKVEAPVH

SEQ ID NO: 17065 - protein, 203 aa, Zea mays
  VARIANT 55: note = Ancestral polymorphism is A, Derived polymorphism is V
MDDCGGGGGKRPFQLARSLTYHHHPGHRPAAASRWRRQHQQHQLADEPRAPRPQAVVLYTTSLRGVRRTFADCAAVRAILRGFRVAVDERDVSMDAALRREVQALLAARGRAFALPQLLIGGRLVGGADEVRQLNETGQLRRLLDGAAGQDPAFVCDACGGVRFVPCAGCGGGRKVFVEEEGRVVRCVECNENGLVRCLNCCS

SEQ ID NO: 17066 - protein, 422 aa, Zea mays
  VARIANT 140..422: note = Derived polymorphism lacks residues 140 to 422
MAVRRRTAAAAAGDPPPQAPPADEAAAVAPDEPVLRAPNLRVAAVAAALFLAPFSYLAFVHYSLTADLQRSILKCGAMSLVGFCVALKLIPIAARYHLRRRMFGYDINKKGLPTGQIKVPEALGLVVGIVYLVIAIIFQQFHYAPDSIWLVEYNAALTSICFMILLGFVDDVLDVPWRVKLALPTFAALPLLMAYAGGTSIIIPKPLTPYVGLTVLELGLFYKLFMLLLAVFCTNSINIHAGLNGLEVGQTVVISAAVLIHNVMRIASSTDIETQQAHEFSIYLVLPFLTISLALLAFNWYPSIVFVGDTYTYFAGMALAVIGILGHFSETLLLFFLPQVLNFLCSVPQLFHFVPCPRHRLPRFDPGAGLLTGTKDGNLVNIFLRLFGKCSERALCIRLLIFQALCCVFCFWLRHMLTGWYK

SEQ ID NO: 17067 - protein, 143 aa, Zea mays
  VARIANT 15..143: note = Derived polymorphism lacks residues 15 to 143
  VARIANT 21: note = Ancestral polymorphism is P, Derived polymorphism is R
  VARIANT 35: note = Ancestral polymorphism is R, Derived polymorphism is P
  VARIANT 71: note = Ancestral polymorphism is V, Derived polymorphism is A
  VARIANT 113..143: note = Derived polymorphism lacks residues 113 to 143
MSRLLLARLADGPGGAEAQRREHVEDIVPGQQRRRWLVVDDVGRVEEVVGVEEVVGEERGDVVAGGLVELALPEAVVPEPGGGVDELPPLGREVLHLPVRRRDEERRVGVQRRRRCGAHPLLPASARSWISLLFLSLEHRQAR

SEQ ID NO: 17068 - protein, 113 aa, Zea mays
  VARIANT 99: note = Ancestral polymorphism is G, Derived polymorphism is A
  VARIANT 85: note = Ancestral polymorphism is A, Derived polymorphism is G
  VARIANT 49: note = Ancestral polymorphism is H, Derived polymorphism is R
  VARIANT 29: note = Ancestral polymorphism is P, Derived polymorphism is A
MSTTTASSLNPNAPLFIPAAYRQVEDFSPEWWELVNTTAWFRDHCFRQRQLHEAACDDVAALLPDDLLDTNDLFYAPDVVHHQPATALLPGYDVLDVLAALSLSSPRAIRQPR

SEQ ID NO: 17069 - protein, 1736 aa, Zea mays
  VARIANT 588..1736: note = Derived polymorphism lacks residues 588 to 1736
  VARIANT 560..1736: note = Derived polymorphism lacks residues 560 to 1736
  VARIANT 552..1736: note = Derived polymorphism lacks residues 552 to 1736
  VARIANT 355..1736: note = Derived polymorphism lacks residues 355 to 1736
  VARIANT 344..1736: note = Derived polymorphism lacks residues 344 to 1736
MEALVGRAVRKAFPGFGTYAGVVESYDPGAGYFRVLYEDGDSEEVDADEMAQILVGPAMPRAQQQRTSPQDAAGRRPKKRRRGNEDDPSPTSTPDGVVLAVAAAAGEETEPATPVMEAVAEKKPRVSPGPESSRPLRRSARQAKAAEHAAEMEAAVAVAAAAEAEEEAAAAAAASTPQQSGRKRPRAIGSGRYRSVSRDLEEAAPKKPLPPPPKPELPPSSQGLDLGGLPVLDVFQVYSCLRSFSKQLFLSPFSLETFVAALRSTYVNPLIDWVHFTLLRALKSHLEDSANEGDPSAVHCIRNLNWELLDLATWPIYLAEYLLTRGSELRYGMKLTDLSLLSTEYYRQPAGVKLELLRSLSDDVLEIGAIRSRLSESDGNDEGFRSTGVRRKKRGRGSSAKVAVGSSQFPEGSAEVDDGNSDECYLCGMDGNLLCCDGCPAAFHSKCVGVVEDLLPEGDWYCPECLIRKDGSRNIANPMRGAEILGTDPHGRLYFFTCGYLLVVDSCDGYSPCYYYGQIDLHHLVAVLNSCHPSYSSMVNTISSFCDTAIKSPNLNSRYQSSRECSTSDAEIDSKHLSLLKQPSDHDQFKVEQRSSFEHLNSGKISTSNSDDLDQDLSQHSIKLRYSLMSRSGIVAEGDLNQIPENRSSSAKNDNCNSPKDIVYSRANGSLAKNQKDSPPKEKPRDWQLHSDPARYINYYSFGQIAASAAEELKHKLSENKDVKKPVQDVLSFHLRTICKKYANFFALTDQKLSAELLKEKCGWCNSCQISGGVDCIFRLTDIKYMEGPKPHTLDLGAENNMESHIILAMYNILSVEERLNGLLSGPWQNPQYSICWRNAVLKASDVSSLKQPLLMLESSLRRVAITTEWQKAADSVEVVGSAAHILVRSSNKSLSHVSATARKPGRKPSPNGELKVDSRDVGVYWWRGGKLSRQVFHWKRLPQSLVNKAARQAGRRRIPTISYTDGSQFARRFKYIAWRAAVEMAENAAQLILQIKELEWNIKWTEILSTLPSSLMTKETQKIARLFKKVIIRRKRIEGTNVEYLLDFGKRENIPPVISKHGTKLEESSSERNRYWLSEVHVPLNLLKAYEAKTFARLLKKKETDELSKKTKKLCGSKPEMPRKTGFDYLFEKAEKRSTMPCGHCHKEVIARYAKVYFISNILLDTTFHTSCEHYSEAVNCQYCAALFHRKHFKVPRGATNAVYVCNKCLDEKVLKVESPQKKTAPKKLSPKKKQKKQKKQSRKIETRRNQIVLKCKTKIGKKGKRGRPRKNPTDLSKNEPSKIHESEPSNVSKNEPVKRISKRLHDKYMKSNSNVSENAASSSKRKRTVSQYSYWLNGLRWSQNPHDERARSFRKERVVFPSEDAEISEVNPVCCLCEKCYNEEDIYIACEKCEDWFHGDIYSVNIENVNNLIGFKCHRCRRRSLPVCPYAETVTVVKGQSDEDHCIKLVDQCVGKFVEDEDPNCPKDLGAPGSLQELHDHEIEQGLNVHITEIEFSYDNCLEELNDHGCSKEFDAHSTEKDLEDDKSLRKVDIHNELRALDDLGSEKEPGDHCNPKDLNSHINLKDPGNCRSDKEMKDNNCLNELDGDNNWKALDSYNSWKLLDSHNSQEELDCTTNSKFSPKEIPCPMELDGFSSLKLVSHNILEELDNHNCLKENGNENSSKELDNNGSPKDSGDCLADHFNSSRISGNEALVLTPETDSVNESLGLQSKDDPGKSVPTEHEIDLQVVVTL

SEQ ID NO: 17070 - protein, 638 aa, Zea mays
  VARIANT 71..638: note = Derived polymorphism lacks residues 71 to 638
  VARIANT 58..638: note = Derived polymorphism lacks residues 58 to 638
MAADGGPATSALEEALKPFQERASEAEIRIAKLEALLYNKDGPSGGSEATSSAVKDLQSKLDVVTAECLTEKEKEVKDIYRMAKIRERKTRDVNQVKCIKDEANQLLVKSEEIKNRWKEYFNKLFNGGNESATIELDEPFDDNNRGFVRRIQEYEVKEALKRMKVGKAMGPDGIPIEVWRCLGDIAIVWLTKLFNTIFRANRMPDEWRRSTLVPIFKNKGDVQSCTNYRGIKLMSHTMKLWERVIEHRLRKMTSVTQNQFGFMPGRSTMEAIFLLRQLMERFREQKKDLHMVFIDLEKAYDKVPRSVMWWALEKHKVATKYINLIKDMYTNVVTSVRTSDGDTDDFPINIGLHQGSALSPYLFALVIDEVTRDIQGVLPWCMLFADDVVLIEESRSGVSQKLELWRQTLEAKGFRLSRSKTEYMKCDFSAMGYEDGDVSLDGQVVPKKDTFRYLGSMLQKEGDIDEDVSHRIKAGWLKWRQAAGVLCDHRVPRKLKGKFYRTAIRPAMLYGAECWPTKRRHVQQLSVAEMRMLRWICGHTRRDRVRNDDIRERVGVAPIEEKLMQHRLRWFGHIQRRPEEAPVHIGIIRRPENVKRGRGRPTLTWTESVKRDLKEWNIDKELAADRKGWKCAIHVPEP

SEQ ID NO: 17071 - protein, 172 aa, Zea mays
  VARIANT 20: note = Ancestral polymorphism is S, Derived polymorphism is L
  VARIANT 28..172: note = Derived polymorphism lacks residues 28 to 172
  VARIANT 33: note = Ancestral polymorphism is A, Derived polymorphism is E
  VARIANT 67: note = Ancestral polymorphism is S, Derived polymorphism is L
  VARIANT 71: note = Ancestral polymorphism is K, Derived polymorphism is T
MGKFVICAEHPSNEFFMSFLKCLTYKTSEEFVARVKEAMDREPQPLTPEQRYNLSWETATERFMEYLDLEKVLNNEAAQPEQGRKRKNKRTSQPNLSSVFRAHLREIKNEEGKTVDLYVPRKCLATNRIITAKDHASVQINIGHLDANGLYDGDADSLLDRSWQKKKAEIKQ

SEQ ID NO: 17072 - protein, 205 aa, Zea mays
  VARIANT 176..205: note = Derived polymorphism lacks residues 176 to 205
  VARIANT 149: note = Ancestral polymorphism is R, Derived polymorphism is S
  VARIANT 72: note = Ancestral polymorphism is D, Derived polymorphism is E
MDGGYYGGRDQRYSGGYYGGGGIATPGYAPAVPYGMSQVNIEGNGCGRALPPQPTVKVYCRANPNYAMSVRDGKVVLAPANPKDEYQHWIKDMRWSTSIKDEEGYPAFALVNKATGEAIKHSLGQSHPVRLVPYNPDFLDESVLWTESRDVGNGFRCVRMVNNIYLNFDALHGDKWHGGVRDGTDVVLWKWCEGDNQRWKIQPYY

SEQ ID NO: 17073 - protein, 394 aa, Zea mays
  VARIANT 236..394: note = Derived polymorphism lacks residues 236 to 394
MSWFGHHHHNQPAPPASGPNQVFKIFCRANENYCLAVRDGAVVLAPVNPKDDHQHWYKDMRFSTRVKDEEGMPAFALVNKATGLAIKHSLGQSHPVKLAPFSPDQEDASVLWTESKDVGKGFRCIRMVNNTRLNFDAFHGDKDHGGVHDGTAVVLWEWCKGENQSWKILPWGPEANSSAAHAGGPHAVRVFCKAGGEDYSLTVRNGTACLAPTNPRDEYQHWVKDMRHSTRVRDEEGYPAFALVNKVTGEALKHSTGQGHPVKLVPYNPDYQDESVLWTESRDVGNGFRCVRMVNNIYLNFDAFHGDKAHGGVHDGTEIVLWKWCEGDNQRWKILPWCKSTTHCAFAERTKETTSWYPNNNSAGCGDPKIKEAGCDASRTSRVVFASDSQPLWG

SEQ ID NO: 17074 - protein, 257 aa, Zea mays
  VARIANT 212..257: note = Derived polymorphism lacks residues 212 to 257
  VARIANT 99: note = Ancestral polymorphism is E, Derived polymorphism is V
  VARIANT 92: note = Ancestral polymorphism is S, Derived polymorphism is N
  VARIANT 90: note = Ancestral polymorphism is S, Derived polymorphism is N
  VARIANT 30..257: note = Derived polymorphism lacks residues 30 to 257
  VARIANT 16..257: note = Derived polymorphism lacks residues 16 to 257
MQHNQVMKHELYISFQVPSSVTLNILSNVWRPRSLGLPVARRSVMAQDDPVVSAQWMHEHLVMPDVKVLDASWYMPVENRESWKEYQVFSISYLIFLFEIIVGAKVFWYPQVAHIPGALFFDLDGIVDRTTDARQIVGSAVLVKARDRPEIEDDEFYSLDLYCQGKLVGTVGQGFNFGGGDLLQVIMGSSEGTTVDPDSENQDSISSREHVWTPFAEDIVPDVDMGSREMRITPPKGLLELNSRSDKRSKKERHAMP

SEQ ID NO: 17075 - protein, 330 aa, Zea mays
  VARIANT 50: note = Ancestral polymorphism is A, Derived polymorphism is T
  VARIANT 52: note = Ancestral polymorphism is G, Derived polymorphism is S
MAAKALYGDGEYYFFSPRDRKYPNGIRPNRAAGSGYWKATGTDKPIHDAATGEGVGVKKALVFYKGRPPRGSKTNWIMHEYRLAAVAGCTSPLAAYRPPSKFRNVSMRLDDWVLCRIYKKSGHASPMVPPLADYEHLDRDGPSPGGFFDDYFCGSTSLYAAAAPAIGGGAAAAGTTNTTTTPAVVMQQHQQPAALPRLPKIPSISELLWDEYALAQILDPPADVAADHASFAVHPSLNQLLAVGDDGSDLMMFSPPPAAAAGGKRKAMVAMNMSPADECAATAHQHQSPAAKRLNGGSCFDDAPQPASGLPATMSSVLGGGLNHHMLPQF

SEQ ID NO: 17076 - protein, 467 aa, Zea mays
  VARIANT 102: note = Ancestral polymorphism is Q, Derived polymorphism is L
  VARIANT 45: note = Ancestral polymorphism is P, Derived polymorphism is L
  VARIANT 22: note = Ancestral polymorphism is R, Derived polymorphism is H
  VARIANT 21: note = Ancestral polymorphism is H, Derived polymorphism is R
  VARIANT 13..467: note = Derived polymorphism lacks residues 13 to 467
MRRYSALPNGGRQETLADRAHRYRGVVLVILAPLALVSLVLLLMPRSPAGTMGGARRSGPAGADRYAVIFDAGSSGSRVHVFRFDANLDLVRIGSEIELFVQIKPGLSHYANDPREAAESLVSLLDDAKRVVPAELRDQTPVRVGATAGLRNLGAQKSEAILQAVRDLLREKSSFKNQPDWVTVLDGTQEGAYEWVTINYLLGNLGKTYADTVGVVDLGGGSVQMAYAIAEKDAEKAPKPSDGEDAYVKKLFLKGTTYYLYVHSYLHYGLLAARAEVLKAGNGNGYSNCMLEGFQGQYKYGDNSFEASASPSGASYSKCKDDAVKALKVDEACTHMKCSFGGIWNGGGGAGQNNLFVASFFFDRAAEAGFVNANAPVAKVKPSDFRQAAERACSLSVKNAEATFPGVQKDNIPYICMDLVYQYTLLVHGFGVDPDHEMTLVKKVPYSGAYVEAAWPLGSAIEVASSS

SEQ ID NO: 17077 - protein, 648 aa, Zea mays
  VARIANT 431: note = Ancestral polymorphism is P, Derived polymorphism is S
  VARIANT 170..648: note = Derived polymorphism lacks residues 170 to 648
MKAQPLLLPALKRRRGPRVAVLALVLCSLLVPLAFLFDRAPSGYVTTEERHRQEVVLPLLDHVAEKRRPSGSGADTRQDALEKKVPGSSAGVIHQQTPDKNISKVIRQQTPEKTISKGSAGVVHQYKQIGSHSTSDGAKPKVSPAPKVEPSDAVSDSTKVARDTSQEGEKADEVEKSKSCQLEFGSYCLWSIEHKEVMKDYTVKRLKDQLFVARSYYPSIAKLQGQEALTQEMKQNIQDHEKILSVSTVDADLPSSINRRMKQMEQTIVRAKSCTVDCRSVDRKLRQILYMTEDEAHFHMQQSAFLYNLGAQTLPKSHHCLSMRLTLEYFKSSSLDSDDSPGRFSSPEYRHFVILSRNVLAASVAINSTVSSCKEPGYFAFHILTDAQNFYAMKHWFARNSYKNAAIRVINYEAIILEKLPKYTIRQLFLPEEFRVLIRSIKRPTENTRMKYLSLFSHSHFVIPEIFKYLNKVVVLDDDVVVQRDLSFLWNIDMGDKVNGAVELCGLKLGEMKNVLGKTAYDPKSCAWMSGVNLINLDKWREHNVTENYLRLMKKFEVKDELSLRAAAFPLSLLSFQHLIYPLDEKLTLAGLGYDYGIDEEVARRSASLHYNGNMKPWLELGIPEYKKYWKRFLVRGDRFMDECNVNP

SEQ ID NO: 17078 - protein, 257 aa, Zea mays
  VARIANT 218: note = Ancestral polymorphism is A, Derived polymorphism is V
  VARIANT 164: note = Ancestral polymorphism is R, Derived polymorphism is K
  VARIANT 128: note = Ancestral polymorphism is Y, Derived polymorphism is D
  VARIANT 127: note = Ancestral polymorphism is Y, Derived polymorphism is D
  VARIANT 123: note = Ancestral polymorphism is S, Derived polymorphism is C
  VARIANT 80: note = Ancestral polymorphism is G, Derived polymorphism is A
  VARIANT 72: note = Ancestral polymorphism is R, Derived polymorphism is S
  VARIANT 61: note = Ancestral polymorphism is V, Derived polymorphism is L
  VARIANT 46: note = Ancestral polymorphism is Q, Derived polymorphism is E
  VARIANT 42: note = Ancestral polymorphism is F, Derived polymorphism is L
  VARIANT 40: note = Ancestral polymorphism is P, Derived polymorphism is A
  VARIANT 34: note = Ancestral polymorphism is E, Derived polymorphism is K
MTTTTSARLRPLAVGVALFVFLPWLSYVLEAAEEGRAAAPWFWPPQIGGDDPYYYCLSWRLMVEAGNAKGWRAVPAQCVGYVRVYMAWGQYHRDVGAVAELAAAGADGLIDAWVLDVDDTCLSNQPYYQVKQFGAYDPVAFRAWASWATCPGIPAMQWLFQTLRGRGFRVFLVTGRDEETLGSSTAANLAAAGFSGYDRLIMRSAAYRGQSAVAFKSAVRRKLAEEEGGLSKLLNLRASLERKLQFAALNKNIREVM

SEQ ID NO: 17079 - protein, 322 aa, Zea mays
  VARIANT 51: note = Ancestral polymorphism is R, Derived polymorphism is Q
  VARIANT 267: note = Ancestral polymorphism is K, Derived polymorphism is M
MELQFHPQQHHSYQQQQQPPPPATKEPKPKPRTRTKCGGGGGGSSKFVGVRQRPSGRWVAEIKDTTQKVRVWLGTFETAEAAARAYDEAACLLRGANTRTNFAAAPPPDSPLAARIRGILDHNNNNGRTPPKKTLPHRPTAARFFPAAAASTASTCSSTASPTSSSPSSSISFATSTHARAPIPTLPDPRSQSATEEAYYAPYSATGGGEEFQLAATTHQYEQQSWALNAASSPLTPPPPPDARDVGSVNARRLAVAAETGRDRMIKLEKKSSSASLSLSPHGVIDRGPDKDLAFDVGNDASDSLWDLPPICPLSSCRSMMF

SEQ ID NO: 17080 - protein, 486 aa, Zea mays
  VARIANT 168..486: note = Derived polymorphism lacks residues 168 to 486
MVSSQPSSLTAILAQGPNHCPVNILLPTGPPDVVSSDNVEYDFSDVFGSTPVQTPTNLCGFGPESPAPTVESNEEFYSDPVVIINRSHSLVGPTSLVSRSLRLSKLSLGKNEGSSELVKCLSEEKEGDQGQLSDEDLGNAMTEDEGIGLDDLEILKLVGQGAFGKVFQVRKKNTSEIYAMKVMRKDRILEKNHSEYMKAEREILTKVDHPFIVQLRYSFQTKYRLYLVLDFINGGHLFFQLYKQGLFREELARIYTAEIVSAVAHLHANGIMHRDLKPENILLDADGHAMLTDFGLAKEFCENTRSNSMCGTLEYMAPEIVLGRGHDKAADWWSVGILLFEMLTGKPPFVGNREKVQQKIIKDKLKLPSFLSSEAHSLLRGLLHKEPNKRLGSCPGGSNEIKNHKWFKPINWRKLEARQIQPSFRPNVAGLTCIANFDECWTKTPVLDSPVSTPAGGGHSNFAGFTYVRPAPILEEVNASGSRLKD

SEQ ID NO: 17081 - protein, 633 aa, Zea mays
  VARIANT 302..633: note = Derived polymorphism lacks residues 302 to 633
MASTAARRLLLPLLLVALIAAHRAAARFVVEKNSLRVTSPAVLRGVYECAIGNFGMPQYGGTMHGVVVYPKADAKACRPFADSGLSFKPRSGGLPVFLLVDRGDCYFTTKGWNAQNAGAAAVLVADDRVEPLITMDSPESSGTEHIENITIPSALVTKRFGEDLRKALQSGDMVNVLLDWRESLPHPDERVEYELWTNSNDECGAKCDMQMSFVRSFRGIAQALEKRGYTQFTPHYITWYCPEAFVLSKQCRSQCINHGRYCAPDPEQDFSTGYDGRDVVLQNLVQICVFRVANGTRRPWMWWDYVHDFAVRCPMKEKKYTRECANGVINSLGLDIEKINKCVGDPEADKENPVLKAEQDAQIGHGSRGDVTILPTLVVNNRQYRGKLEKTSVLKAVCSGFEETTEPDVCLREDIETNECLENNGGCWLDKATNVSACKDTFRGRVCECPIVNGVKFIGDGYNHCEASGLGRCQINNGGCWNETRNGKSVSACSNQEAKGCKCPAGFKGDGANSCEDVDECKEKLFCQCKDCACENTWGSYECSCGGGNSLYIREHDTCISKHSSSTPSWGFLWVVFLGLALAGAGAYAVYKYRLRSYMDSEIRAIMAQYMPLESQDMPSQQHHLVPVDRADV

SEQ ID NO: 17082 - protein, 963 aa, Zea mays
  VARIANT 224..963: note = Derived polymorphism lacks residues 224 to 963
  VARIANT 556..963: note = Derived polymorphism lacks residues 556 to 963
MAMAGAGAAAAAAKRCMNPACGALPASSVVVGAGGDWRKGWPLRSGGFALLCDKCGLAYEQFVFCDIFHQKESGWRDCSFCGKRLHCGCVASKNSYDLLDSGGIQCVTCMKNSAAQSASGQVVPKLFPCPNNLLFFGKSDELLSSRKFEQPPSLMLDSRNDDIAIVNKSSHLFMVSGIEAGQSSNILRQKEIENGPRQIKWEQPTLNIGDMGRPLLTRSQSALESPQCTRRDDNKDPTTDSTTSESFPEACLSMNLGIANNGNRMEATSTAERPMLSPTTAIAEGRELTTALSPFQHAQRARHFLTRPPRVGEGAAFDPTRDMFPHLRVARPPAEGRGRNQLLPRYWPRITDQELQQISGDSNSTIVPLFEKVLSASDAGRIGRLVLPKACAEAYFPPISQPEGRPLTIQDARGKEWHFQFRFWPNNNSRMYVLEGVTPCIQSLQLQAGDTVTFSRIDPGGKLVMGFRKATNTVSLPDSQISAIANGSLLSETLFSTANESIGVVSGYPGFLHSIKGAADFHPSSLYDHHINSADGDVSWNKADKFGSRPDEGSLQFLQKRSRNIGSKSRRFLIDAEDAMELKLTWEEAQELLRPAPTAKPTVVMIEDYEFEEYDEPPVFAKRSIFTIRATGEQDQWIQCDECSKWRRLPLNVIVASKWTCTDNSWDPKCCSCSAPEELTPKELQSVMQQYEEMRRRKGSYGLKLNVAEMDASSFDALATGAVFGEVGNQGTASVATTTRHPRHRPGCTCIVCIQPPSGKGPKHNPACTCNVCMTVRRRFKTLMMRKKQRQSEREEAEASKKIAWVNRDEPEGSSLSRSPQTLDTTRDSSDVTMFDKVAADVNKGHIDLNFHPAAPAVRGAGDQGQNGAQQPRAVSMMGLLEVASRPLDNYMKQNGLTSLAGEQGGGSSSTATVPPAPVESEDRTSDEGRVASAEREADAMAIDEAGENQQDKPADSAAAAAT

SEQ ID NO: 17083 - protein, 114 aa, Zea mays
  VARIANT 21: note = Ancestral polymorphism is C, Derived polymorphism is Y
  VARIANT 26: note = Ancestral polymorphism is R, Derived polymorphism is M
  VARIANT 81: note = Ancestral polymorphism is R, Derived polymorphism is T
MDLQKKVRSDISAEYWLHKECAYRERQLFDFWGLMWIRHPLSMYGIGYILSMDADDVHRKKRFTERMSRLEEEEKNQANIRKRKFFAEILNASREQQVQLGTTFKQIKQRNDEV

SEQ ID NO: 17084 - protein, 404 aa, Zea mays
  VARIANT 37: note = Ancestral polymorphism is A, Derived polymorphism is V
  VARIANT 66: note = Ancestral polymorphism is G, Derived polymorphism is D
  VARIANT 67: note = Ancestral polymorphism is S, Derived polymorphism is I
  VARIANT 88: note = Ancestral polymorphism is R, Derived polymorphism is W
  VARIANT 193: note = Ancestral polymorphism is A, Derived polymorphism is T
  VARIANT 211..404: note = Derived polymorphism lacks residues 211 to 404
  VARIANT 218: note = Ancestral polymorphism is G, Derived polymorphism is E
  VARIANT 277: note = Ancestral polymorphism is T, Derived polymorphism is K
  VARIANT 289: note = Ancestral polymorphism is A, Derived polymorphism is V
  VARIANT 299: note = Ancestral polymorphism is V, Derived polymorphism is A
  VARIANT 303: note = Ancestral polymorphism is R, Derived polymorphism is W
  VARIANT 315: note = Ancestral polymorphism is H, Derived polymorphism is Y
  VARIANT 345: note = Ancestral polymorphism is P, Derived polymorphism is L
MAETTLLTRRSKRIALRVSLAGAKPSWRDWAGLAPLAVEKIADRLRDEDVADFMRFRLVCKLWMDGSGIRKPRELGARVIDHSFHPRRWILLTDEKKEADEATPTRRMLLNLTTRKTIQVDLPELAGHSVVPGPAAAPEGMLVVRDERSLVVRLLNPLTRHVVDLPTLLTLRPGNRRRGPVPSSFAEDHEVTAAGFADASTIVVYLGNANQLVVARPGDARWTLVGGLDPEFPLRSTATFQSRFYCVDRCQLLVVDMERGPRAQLVVAANLERRYRTVGMVDDGGRLMAVCSRDQVVRADARWMSSLETRVELFHVDLQEEKLSRIEDLGERAVFAGLRGAVLLPSTKYYFSVDRGTVFFRFGSSQRHFGAFHVRRRHTCYIASVWGKLPQRVASYVTTLRYLY

SEQ ID NO: 17085 - protein, 217 aa, Zea mays
  VARIANT 14..217: note = Derived polymorphism lacks residues 14 to 217
  VARIANT 43: note = Ancestral polymorphism is G, Derived polymorphism is A
  VARIANT 161: note = Ancestral polymorphism is E, Derived polymorphism is V
  VARIANT 173: note = Ancestral polymorphism is C, Derived polymorphism is W
MPLCCVECKPCNGQTGQCLPRGLFKSRRPAQQLRRALGKMKAGGTRRRRGHRPGSFSSVRAVFWPLMSMRSEADARPPADADSPDGTVSGGGARALPPPPSAQDDGGGATVAAARVLAAAAAGDEEKAMVRVGHGHGHDDVEAACRSFERHLMETLVEEREVVDLTDVEELLCCWEKLRCPALVRLVGRFYGELCMDLFSPAQDADVWSSHSGDTSI

SEQ ID NO: 17086 - protein, 437 aa, Zea mays
  VARIANT 378: note = Ancestral polymorphism is A, Derived polymorphism is V
MPPATGAVADTAPAAGTVLLGRYELGGLLGRGASAKVYLARDLLTGRSVAIKSFPNPRAGGGAGVGVNAAIEREACILRRLRHRHVVRLHEILATRKKVHFVLDLAGGGELFSLVDASGRMTEDLARHYFRQLVSAVRYCHARGVYHRDIKPENLLLDEGGALKVADFGLGAVGGGGGGGGGEGLRHTMCGTPAYVAPEILSRKGYEPGKVDIWSCGVVLFVLAAGYLPFNDASLVNMYRKIYAGRFRCPGWFSPALRDLLRRVLDPDPSARIDADGIVAHPWFRHGGEEDLGGLVHGGYEEVEEEEEEAKADEDREPTAFDILSFSPGSDLSALFVGAGGGGKERVFVGEPAAAVLGRVEAAARKGGYRARRDGKRATVYVEEEEEEGGGGVLAKVSVFRLADAVSVVEVVKGDGADAALVWTELLEPAVKPPALS

SEQ ID NO: 17087 - protein, 324 aa, Zea mays
  VARIANT 14: note = Ancestral polymorphism is A, Derived polymorphism is V
  VARIANT 26: note = Ancestral polymorphism is A, Derived polymorphism is V
MAASSRMGLSVYLAIMAAVLASALGAELTADYYSETCPQALTTIKLLVGAAILREPRMGASLVRLHFHDCFVNGCDGSILLDDTDDMVGEKTAKPNNNSVRGYDVIDTIKSAVNTICLGNVVSCADILAVAARDSIVALGGTSYDVLLGRRDATTASMDDANNDIPTPFMDLPALQDSFESHGLSLHDLVVLSGGHTLGYSRCLFFRGRLYNETGTLDPAYAGSLDERCPLTGDDDALSALDDTPTTVDADYYQGLMQGRALLHSDQQLYQAGGAAGDLVEYYAENPTKFWEDFGAAMLKLGSLSPLTADEGEVRENCRVVNQV

SEQ ID NO: 17088 - protein, 130 aa, Zea mays
  VARIANT 15..130: note = Derived polymorphism lacks residues 15 to 130
  VARIANT 36..130: note = Derived polymorphism lacks residues 36 to 130
  VARIANT 69..130: note = Derived polymorphism lacks residues 69 to 130
  VARIANT 77: note = Ancestral polymorphism is L, Derived polymorphism is S
  VARIANT 89..130: note = Derived polymorphism lacks residues 89 to 130
MDGESKLLASGGHKSSLLVSCSKDSKVKVWDTVAPSSGSSPCVGSAHLNSNRPPIAMKCHESLCYIAAGAQVTAIDLRTMKKASVLALQNHRILSCDIFYDAQNDFLTPEWDSENLQVVPSVIQTITNPF

SEQ ID NO: 17089 - protein, 281 aa, Zea mays
  VARIANT 85: note = Ancestral polymorphism is D, Derived polymorphism is V
  VARIANT 126: note = Ancestral polymorphism is A, Derived polymorphism is G
  VARIANT 127: note = Ancestral polymorphism is A, Derived polymorphism is V
  VARIANT 129: note = Ancestral polymorphism is A, Derived polymorphism is V
  VARIANT 144: note = Ancestral polymorphism is P, Derived polymorphism is L
  VARIANT 150: note = Ancestral polymorphism is V, Derived polymorphism is M
  VARIANT 155: note = Ancestral polymorphism is K, Derived polymorphism is M
  VARIANT 170..281: note = Derived polymorphism lacks residues 170 to 281
  VARIANT 241..281: note = Derived polymorphism lacks residues 241 to 281
MSAAAPPKPTPFNLATTVGINMVTCYDARKIGGELVRWNTTRFDTIFIFLQSFLDRKDKFKLWMASADWEHCKWAGEEDHDFTYDCLTKNKWWTDMAKINKNLCDRLMQVINRRLEYMLNDTLMLGVVALNPEALYTSKMARKPKFQYVVTMAIKKLSNSSSKVLAVVDQYTFFRKQTGLFGGEEAKDSALNGRASAGGGDDEDGDPSGPSSVARPPTHVAIDQYNAPGQDEQPTPLRPRSKRQNKLSVKGMYMFEKVNDMIFKHKHKNMSYAWIDSMARF

SEQ ID NO: 17090 - protein, 254 aa, Zea mays
  VARIANT 45: note = Ancestral polymorphism is A, Derived polymorphism is T
MVKFLVVHQGCDASILLNDTSGEQTQPPNLTLNPRAFDVVNSIKAQVEAACPGVVSCADILAVAARDGVVALGGPSWTVLLGRRDSTGSFPSQTSDLPPPTSSLQALLAAYSKKNLDATDMVALSGAHTIGQAQCSSFNGHIYNDTNINAAFATSLKANCPMSGGSSLAPLDTMTPTVFDNDYYKNLLSQKGLLHSDQELFNNGSTDSTVSNFASSSAAFTSAFTAAMVKMGNLGPLTGTSGQIRLTCWKLNSS

SEQ ID NO: 17091 - protein, 341 aa, Zea mays
  VARIANT 3: note = Ancestral polymorphism is S, Derived polymorphism is Y
MASSSVSSCLLLLLCLAAVASAQLSPTFYDSSCPNALSTIKSAVNAAVQKENRMGASLLRLHFHDCFVQASSAHSFIHSLASIASLCSLSGCDASVLLADNAATGFTGEQGAAPNAGSLRGFDVIANIKAQVEAVCKQTVSCADILAVAARDSVVALGGPSWTVPLGRRDSTTASLSLANSDLPPPFFNLGQLITAFGNKGFTATEMATLSGAHTIGQAQCKNFRDHIYNDTNINQGFASSLKANCPRPTGSGDGNLAPLDTTTPYSFDNAYYSNLLSQKGLLHSDQELFNGGSTDNTVRNFASNSAAFSSAFAAAMVKMGNLSPLTGSQGQIRLTCSTVN

SEQ ID NO: 17092 - protein, 256 aa, Zea mays
  VARIANT 134..256: note = Derived polymorphism lacks residues 134 to 256
MATARALRLVLTSSSVPAAKDGFLVAARRRLLSASTEAGGAGDAAVQSGDAPSDDYTDRPPRFSGAEEATSAGGRVGKHPGGKAAERVPPFAPSGKKPPLAGSEHELADPAGAASFTQKRRLSCSSSSSSREREPREAATPGGPESAARKVREEDREYYRTHKPSPLAEVEFADTRKPITRATDGSAADRYADAQGRTVEDTVDDSLARAEAMFREAAARGNPEWPHSRALAEMLARRELGKDAAATASGHPCWGS

SEQ ID NO: 17093 - protein, 235 aa, Zea mays
  VARIANT 191: note = Ancestral polymorphism is P, Derived polymorphism is R
MCGGAIISEFIPHRGAKRGLCAEDIWPHAAADFDDLLHAHAHAHGHDDDDFAAAASFHPDQEPPARKRERKTMYRGIRRRPWGKWAAEIRDPAKGARVWLGTFATAEAAARAYDRAARRIRGAKAKVNFPNEDPPPEYDDDDDGHAHAHAAAAQGMLAMSAGGGRDDHLVDYDVVDVMGMGGFFQHHAYVPDAVAQQEQVPTVAYVHHQPPPQQPQGAAGMDMWTFDAINTPVPM

SEQ ID NO: 17094 - protein, 187 aa, Zea mays
  VARIANT 75: note = Ancestral polymorphism is G, Derived polymorphism is R
  VARIANT 57: note = Ancestral polymorphism is T, Derived polymorphism is S
MGIDLVAGGRNKKTKRTAPKSDDVYLKLLVKLYRFLVRRTKSNFNAVILKRLFMSKTNRPPLSMRRLVRFMEGKGDQIAVIVGTVTDDKRISEVPAMKVCALRFTETARARIINAGGECLTFDQLALRAPLGQNTVLLRGPKNAREAVRHFGPAPGVPHSHTKPYVRSKGRKFEKARGRRNSRGFKV

SEQ ID NO: 17095 - protein, 130 aa, Zea mays
  VARIANT 117: note = Ancestral polymorphism is R, Derived polymorphism is S
  VARIANT 73: note = Ancestral polymorphism is T, Derived polymorphism is N
  VARIANT 70: note = Ancestral polymorphism is T, Derived polymorphism is I
  VARIANT 67: note = Ancestral polymorphism is R, Derived polymorphism is C
  VARIANT 60: note = Ancestral polymorphism is G, Derived polymorphism is S
  VARIANT 56: note = Ancestral polymorphism is A, Derived polymorphism is T
  VARIANT 54: note = Ancestral polymorphism is G, Derived polymorphism is S
  VARIANT 52: note = Ancestral polymorphism is A, Derived polymorphism is T
  VARIANT 42: note = Ancestral polymorphism is E, Derived polymorphism is K
  VARIANT 34: note = Ancestral polymorphism is K, Derived polymorphism is E
MARGVVSAKGGAVAGKKKGSVSFTIDCTKPVEDKIMEVASLEKFLQERIKVAGGKAGNLGDSVTISREKTKVTVTSDGPFSKRYLKYLTKKYLKKHNVRDWLRVVAANKDRNVYELRYFNIAENEGEEED

SEQ ID NO: 17096 - protein, 372 aa, Zea mays
  VARIANT 103..372: note = Derived polymorphism lacks residues 103 to 372
  VARIANT 140: note = Ancestral polymorphism is T, Derived polymorphism is I
MSDEGGAGEPLSDRQKREIATCSPSDPCSNDVAWRPCADVRALLGNDAVYEAAAAEAFPEYNKARLVSIELPDRSGDIWRRLGFLEHLGTAYLFVYTRTWNIWIMGNKLSTLALMTECKEIGSMCDADINTELKAIVPVIIDIIISTYGEIDKNNYLDPRTAQVATIDHMKQTCTKLRPAEDEELPSAYIEEFRCALDVELSKYVSEAYPKGACAVYCTSGKDIEGPGADFSFAAVISAAKRSPQNFCNGSWCSVWTIEFNYELQFVDIKGKIQVDAHYFEEGNVQLDTNIDRKDSTRMQSPDDCAVSISGIIRHHESEYLSSLEESYLNLSDATFKDLRRKLPVTRTLFPWHNTLVFGLTRDLAKELALGK

SEQ ID NO: 17097 - protein, 260 aa, Zea mays
  VARIANT 48..260: note = Derived polymorphism lacks residues 48 to 260
  VARIANT 131..260: note = Derived polymorphism lacks residues 131 to 260
MPQGDHIELHQKRHGKRLDHEERKRKREAREVHRRSKDARNLIGAKGKRFAKKRYAEKAQMKKTLKMHDESNKRQKVDDDVQEGALPPYLLDRDQTQRAKVLSNTIKQKRKEKAGKWDVPLPKVRPVAEEEMFKVLRTGKRKTKQWKRMVTKATFVGAGFTRKPPKYERFIRPTGLRFTKAHVTHPELKCTFNLDIISVKKNPNGPMYTSLGVMTRGTIIEVNVSELGLVTPAGKVVWGKYAQVTNNPENDGCINAVLLV

SEQ ID NO: 17098 - protein, 480 aa, Zea mays
  VARIANT 14: note = Ancestral polymorphism is F, Derived polymorphism is L
MAQMEREHLSVVMFPWLAHGHVTPYLELARRLTSANDADIDVTVHLVSTPVNLSAIARHQTPRIRFAELHLPAAPDLPPELHTTKHLPARLMPALKRACDLAAPRFGALLDEIRPDLLLFDFLYPWAPLEAAARGVPAAHLSTFSAAATSFVVHCLGRGRREGCAFPFRGVGFGSAEEEAKYMAQYILREELPDALVPERNRLLLSLARSSAFVAVKTCADVERPYMDYLSELVGGNKEMVPVGPLLVDADAAAAAAGGGTSSESESDRVMRWLDAQTPASVVLVCFGSEYFMSEQQLARMARGLELSGERFVWVVRFPRETEEGDEAARALPRGFAPAPGRGLVVEGWAPQRRILAHPACGAFLSHCGWSSVLESLAAGVPIVALPLHIDQPLDANLATELGAAVRVQQERFGEFRAEDVARAVRRAMRGEESHALRRRAAELREVVARNDADDAQVAALVQRMARLCGKGQQRVAVPN

SEQ ID NO: 17099 - protein, 963 aa, Zea mays
  VARIANT 106..963: note = Derived polymorphism lacks residues 106 to 963
MDGDDEADPPISHVTSHVTDTWAFTPRRKFSIVTTHKNAALARQQRKRALDQWRLLTRGPAKSIRTPMNCGYFPEEYIAALKASYRGRSYHGTLDYECEHCHALFWYGEKSSINRETGRPQYHTCCKSGKIYIPSFRDRPEPLASLAIFNGDSRSKKFMRSIRQYNCLFAFTSMGARIDNSINDGRGPPLFKICGQVHHRVGSLLPLDDSAPQFLQLYVYDTANEVSNRLKCLDADHRPVESLDPSIVHDLISMLDQHNPFAKKFRMARDRLADHNNEDFIIRIVGAKKGDPVQYNLPTTDELAMLVVGDFSLDTYKRDIIIETHNRELKRISSLHPAYMPLQYPLLFPYGERGFQLGIHYTNRNPIGATTGRHMTMQEYYCYQFHYRKNQPNPYLCYGLLSSQAKVDARAAIEESRLHYIAQNQRNLRMESIQGIADAVSRGCINGDEMGKRVVLPASHIGGRRYMIQNYHDGLAICGKYGPPDFFVTFTCNPSWPEITESIFQHGQTAPDRSDVVTRVFHLKLHELLQDIRSGTIFGPLLAVYILNKPIMYSIHVQKMLSAPYSTPGSLNAEVQIQVHRKWEFRGAVDNGPILHIDMILTDCTGNAIHCQIPSFLAATRGDEFQVGKIYKMTRFSVARAKSTYKPVDGDLMLYVKPYTTLELCHTSPSGFPLYVYHLTSYDKIDPDGSNARNFHGEVLLSGGAACHWYFNPSIEEAEAFYSRIESEKINIELPSLDKQEITPPSFPQREHHNLKYILSLNPHDVPDQGYECTVTITCIPEGKTWYYIACNTCPNKPSIDPVIRQCSTCRSTNYCFRYKLTFKASDGTEEAEMFAFDNVARTIIGKPCPTVVASFPDASAIPPEIAAIVSRKYTFIIEFNSQSFRFLEKTLLIKGIVASYGRMTSLPIVQEKDDVQLPLTPTKNKLITTAAESPSTPMSRLSTADSPSMPQKLTYSPAKNKP

SEQ ID NO: 17100 - protein, 1066 aa, Zea mays
  VARIANT 626..1066: note = Ancestral polymorphism lacks residues 626 to 1066
  VARIANT 386..1066: note = Derived polymorphism lacks residues 386 to 1066
MASSPDLFPNVAFSDVSAAAPAAEATAAFGLGATTGAPRLCLVKSGKDEAEPTVDIDLADAQVVAVIPVNVFKLGPMEWLCVCDESEAKAGVEEYILNGFMLTLSSLRQKSFSRAIKVVLRTEAESKAFSLAFQQWKHQVISGKAGERLENGSIIASKSKFDTKIEASSAKMYFHYYGQLLHQQNMLQDFVRTGTYYAAVMENRSDFEGRVVVDVGAGSGILSLFAAQAGARHVYAVEASEMAENAQRLMSGNPSLGQRITVIRGKVEEVELPEKADILISEPMGTLLVNERMLESYVIARDRFLAPDGKMFPTTGRGDCEQISREGEKDESRDSGSKGRQWRVIHMAPFSDEYLYVEIANKALFWQQHNFFGVDLTPLHGSAFQGYFSQPVVDAFDPRLLISPPIYHTLDFTSMKEEELYEIDIPLSFVASVGTRVHGLACWFDVLFNGSTVQRWLTTAPGSPTTHWYQLRCVLSQPLYVMAGQEITGRLHLVAHSAQSYTIYLTMSAKMWGVGAEQGGILQTSTGKLELKEPYYRLSQPQSYMLPQDQQQQQQLSSLQPHSSWLKPGSDLNLPGVRSVGKQQESYTRESRAGRSARSRSASNGAAGNGISRPSQPACFHQLWKRFPCVPCRLVVAKKLSSTGSIDLSTVVPKSVDRTCRQIFCCLTSKQNCEGCHASSFLPTVVPKTVDDISYVCSLIKIVLHSHPKFLEPGFDARHHRLWPTSGSALQFEPLAHRSIRAIREKKRHRPVTPLATCPSRSGYVSVPLQSVLAQPGRFLLLFPQPGLPTRFHRSRVAKRIPCLVRAMAEEQSNPQHQQAEEREVMVEQQQPRRAPKLRYLDFVQVAAAQAAVCLAGLYGLAKDHAGPLRPSVDAVESAVKGVVSPVYDRFGGLPLDVLAFVDRKVDDTVHEVDKHLPGALKAASAHVYAVVRGVPEVARELAAEAQRSGVRGAARAALAMTEPVARDVYGRVEPVAKDLYVRYEPAAEHLAVSAWRSLNGLPVFPHVAEIVVPTAAHWADKYNRAVAAAAEHGYAGAKYLPAIPTERIAKVFSSAPEAEPLAEGQ

SEQ ID NO: 17101 - protein, 71 aa, Zea mays
  VARIANT 40: note = Ancestral polymorphism is T, Derived polymorphism is P
  VARIANT 37..71: note = Derived polymorphism lacks residues 37 to 71
  VARIANT 26: note = Ancestral polymorphism is R, Derived polymorphism is I
MELKDMSAPLEKFFCNYDLFPQSGTIVLIVKIGALIEVVTLLYGSRQDGKGDFEMLKKKVIECGALFHPAS

SEQ ID NO: 17102 - protein, 159 aa, Zea mays
  VARIANT 48: note = Ancestral polymorphism is R, Derived polymorphism is H
  VARIANT 35: note = Ancestral polymorphism is G, Derived polymorphism is S
  VARIANT 29: note = Ancestral polymorphism is G, Derived polymorphism is R
  VARIANT 12: note = Ancestral polymorphism is Q, Derived polymorphism is R
MVTRKTRTWKRQAIFSDPNNLTADWVSPRVYNYTGVYCVPLPSSPDRRGALAVAEVNLNHGDIAGFLPSELGLLADLALLHLNSNQFCGVLPRALRRLRLLHELDLSNNHFVGPFPDVVLDLPALCFLDLRFNDFKGVVPPRLFDRPLDAIFLNHNRLI

SEQ ID NO: 17103 - protein, 595 aa, Zea mays
  VARIANT 102: note = Ancestral polymorphism is R, Derived polymorphism is Q
  VARIANT 119: note = Ancestral polymorphism is T, Derived polymorphism is M
  VARIANT 322: note = Ancestral polymorphism is P, Derived polymorphism is L
MDAHKLGYTGNDVLQELEILTINAKAAQEVILSKILEKNQATEYLNKFMNGSVDISAFKSQVPVVTYDVVQPYIARIAAGERSSILCGEQIVELLRSSGTSQGEPRLMPSISEDIYRRMYLYSLIMPIMSKYIRGLGEGKAMYLLFVKAETLTNAGIPVRSVLTSYYKSPQFLQRKHDLYNSYTSPDEVILCPDSQQSMYCQLLCGLVERQNVVRLGAVFASAFLRSISFLEKHWHDLVTDIRTGRINPSITNAACRVATESFLAQPNPELADEVEAICSSESWKGVLGRLWPNVKYIEAVLTGTMAQYVPMLEFYSDGRIPLVCTMYASSESYFGVNLRPLCSPKDVSYTILPNMAYFEFVPLDDGLRLAEDGEAVEKEKLVGLVDVKVGCYYELVVTTFAGLYRYRVGDVLQVTGFYNRAPQFKFICRRNVILSVDADKTNEEDLHGSVSRAKKILEDRGHILLEYTSFTDTSTVPGHYVLFWEVKATPTSGSGGARLDAQVLESCCVAVEESLDCVYRRCRAHDRSVGPLEIRLVEAGAFDALMDLLVSQGGSINQYKTPRCIEPGGAALELLDSKATASFFSPRDPEATGV

SEQ ID NO: 17104 - protein, 151 aa, Zea mays
  VARIANT 109..151: note = Derived polymorphism lacks residues 109 to 151
  VARIANT 107..151: note = Derived polymorphism lacks residues 107 to 151
  VARIANT 97: note = Ancestral polymorphism is R, Derived polymorphism is W
  VARIANT 95: note = Ancestral polymorphism is L, Derived polymorphism is R
  VARIANT 89: note = Ancestral polymorphism is G, Derived polymorphism is R
  VARIANT 82..151: note = Derived polymorphism lacks residues 82 to 151
  VARIANT 51: note = Ancestral polymorphism is V, Derived polymorphism is A
  VARIANT 45: note = Ancestral polymorphism is F, Derived polymorphism is S
  VARIANT 39..151: note = Derived polymorphism lacks residues 39 to 151
  VARIANT 33: note = Ancestral polymorphism is S, Derived polymorphism is L
  VARIANT 32: note = Ancestral polymorphism is K, Derived polymorphism is E
  VARIANT 17: note = Ancestral polymorphism is E, Derived polymorphism is D
  VARIANT 2: note = Ancestral polymorphism is A, Derived polymorphism is T
  VARIANT 1: note = Ancestral polymorphism is M, Derived polymorphism is L
MASVKLRTNTLDKLDGDPYVNIRMGKMLCVHKSSTVTIWTFLAMFERCDGVWISLKNAGNVNLNTLMNMFSVLGAGGGLGGRNASNGSGPPCLRRTRDVHAAIAREQLRQPHRRVAPALVSQARVTVGADTEEGMIHAEQPKARCHLRCHA

SEQ ID NO: 17105 - protein, 314 aa, Zea mays
  VARIANT 79: note = Ancestral polymorphism is R, Derived polymorphism is C
  VARIANT 7: note = Ancestral polymorphism is E, Derived polymorphism is A
MAYRALEVTLLSAKDLKRVNLISRMEVYAVVSISGDPLTRQCTQPDPYGGRHPSWNTSFRFNVPPTAATATGCLHVLLRTERALGDRDVGEVIVPLADILATAGGASDPGPRPPQLASYQVRKVHRCEPRGVLNVSYRLGPIVGQQAAPLARADEAAAAFVGYPVVPRQYYPAPYAYLPSPLSLAPGPSPPAQAAGGRDTLALHPPSPYSLPAATYPPAASAYPQQAAAGPGRNALPAPASEESNGKLDFGVGLGAGLVSGAIGGMLVASDVMMSDAAAYNSGYRAGLADGGAAAVYRSSYRVPDKVEAKRAAV

SEQ ID NO: 17106 - protein, 125 aa, Zea mays
  VARIANT 51..125: note = Derived polymorphism lacks residues 51 to 125
  VARIANT 11: note = Ancestral polymorphism is A, Derived polymorphism is V
MACGWLHPVPAGAATVAALWPCFLSPVRQSFTKELNQFQRWKLPLNAAKSQRESWNLADRSSSGSSEGVAAASRPADAPTAQSALPMTRSVDAVPGAPIVISGYWTGPGVDDGCGSVEAVLQRIA

SEQ ID NO: 17107 - protein, 174 aa, Zea mays
  VARIANT 145: note = Ancestral polymorphism is Q, Derived polymorphism is L
  VARIANT 144: note = Ancestral polymorphism is E, Derived polymorphism is K
  VARIANT 136: note = Ancestral polymorphism is R, Derived polymorphism is W
  VARIANT 124: note = Ancestral polymorphism is F, Derived polymorphism is V
  VARIANT 122: note = Ancestral polymorphism is S, Derived polymorphism is P
  VARIANT 114: note = Ancestral polymorphism is D, Derived polymorphism is N
  VARIANT 112: note = Ancestral polymorphism is V, Derived polymorphism is M
  VARIANT 110: note = Ancestral polymorphism is S, Derived polymorphism is L
  VARIANT 107: note = Ancestral polymorphism is V, Derived polymorphism is I
  VARIANT 101: note = Ancestral polymorphism is P, Derived polymorphism is L
  VARIANT 86: note = Ancestral polymorphism is I, Derived polymorphism is T
  VARIANT 29: note = Ancestral polymorphism is R, Derived polymorphism is Q
  VARIANT 11: note = Ancestral polymorphism is T, Derived polymorphism is A
MLQSKSFVKKTKQGRIQKVTARANAVVSRGAPPNPTPLPDAVVASSQVVREHYLRDDIYCSFIPCTACAAAAERKLSAAAAAILVIDTNVVLHQIDLLENPAIEDVVLLSVVLDEVKNKNLSVFNRIKALCINKARRFYVFANEQHSFSMIVFFLRKGECNRVRGNLQRPESVS

SEQ ID NO: 17108 - protein, 789 aa, Zea mays
  VARIANT 11..789: note = Derived polymorphism lacks residues 11 to 789
MDEEVGAAGRQQVQWKSYCSTLSLLAFQSFGVVYGDLSTSPLYVYRNSLSGRLNGYLDETTIFGLFSLVFWTFTLVPLLKYVIIVLSADDNGEGGAFALYSLLCRHAKFSLLPNQQAADEELSTYYHPGTDRAVVSSPFKRFLEKHRKLRTCLLLFVLFGACMVIGDGVFTPTISVLSAISGLQDPATSGLGDGWIVFIACVMLVGLFALQHRGTHKVAFLFAPIIVLWLLSIGIIGLYNIIRWNPRIFVALSPHYIVKFFKKTGKDGWISLGGVLLAITGTEAMFADLGHFSAASIRLAFVSVIYPCLVLQYMGQAAFLSKNIPAVYNSFYLSIPSPLFWPVFVIATLAAILGSQAIISATFSIVKQCLALGCFPRVKVVHTSRWIRGQIYIPEINWILMVLCLAVTLGFRDITVIGNAYGLACITVMFVTTCLMSLVIIFVWQKNLLISLLFFVFFGALEGAYLSAAVMKVPQGGWAPIALSAVFMFIMYVWHYGTRRKYLFDLQNKVSMRWILNLGPSLGIVRVPGIGLIYTELVTGVPAIFSHFVTNLPAFHQVLVFVCVKSVPVPYVPMDERYLIGRIGPREYRMYRCIVRYGYKDVQKDDENFENNLVMSIARFIQMEAEESASSGTGRSYESSTEGRMAVVHTTGTTGTGLVMMASAEDAEGTSLSRSSKSETLRSLQSIYEQESAGTVSRRRRRVRFQIDEEERIEPQVRDELSDLLEAKEAGAAYIIGHSYVKARKNSNFLKTFAINYAYSFLRKNCRGPSVTLHIPHISLIEVGMIYYV

SEQ ID NO: 17109 - protein, 139 aa, Zea mays
  VARIANT 11..139: note = Derived polymorphism lacks residues 11 to 139
  VARIANT 12: note = Ancestral polymorphism is C, Derived polymorphism is Y
  VARIANT 22: note = Ancestral polymorphism is R, Derived polymorphism is I
MSKKHAIQCKYCDKVIHGGITRVKYHLANIGGFNVTKCKKVPTHVKQEMEALLTKKTGEKEQRKKKKQRERDEIDLDKSDGSDGEENEHENDVIVLKSTREITLPSFGHMLEVIGAFGRGLRGPSAYEMSGPFLKRAKQ

SEQ ID NO: 17110 - protein, 494 aa, Zea mays
  VARIANT 236..494: note = Derived polymorphism lacks residues 236 to 494
  VARIANT 284..494: note = Derived polymorphism lacks residues 284 to 494
  VARIANT 337..494: note = Derived polymorphism lacks residues 337 to 494
  VARIANT 364..494: note = Derived polymorphism lacks residues 364 to 494
  VARIANT 368..494: note = Derived polymorphism lacks residues 368 to 494
  VARIANT 413: note = Ancestral polymorphism is A, Derived polymorphism is V
MKGCSERLLFLLLLLASSSLLSAVIAAQQTCPADLDSKCDGGASDDDWEGEFFPGVPKIKYEGPTSKNPLAYKWYNKEEVILGKKMKDWMRFSVAFWHTFRGTGADPFGAPTKTWPWEDGTNSLAMAKRRMRAHFEFMEKLGVDKWCFHDRDIAPDGKTLEETNSNLDEIVQLAKQLQGETNIKPLWGTAQLFMHPRYMHGAATSPEVKVYAYAAAQVKKALEVTHYLGGENYVFWGGREGYQTLLNTDMKRELDHLANFLQAAVDYKKKIGFNGTLLIEPKPQEPTKHQYDWDVATTFAFLQKYGLTVHLFTVSHDIGEFKINVECNHATLSGHSCHHELETARINGLLGNIDANTGDPQVGWDTDQFMTDIAEATLVMSSVVKNGGLAPGGFNFDAKLRRESTDVEDMFLAHISGMDTLARGLRNVAKLIGDGSLDDLVRKRYQSFDSEIGALIEAGKGDFETLEKKVLEWGEPTVASGKQELAEILFQSAL

SEQ ID NO: 17111 - protein, 1792 aa, Zea mays
  VARIANT 1380..1792: note = Derived polymorphism lacks residues 1380 to 1792
MSSSQSPEPCTPGTPSPVLSVRIVSLDYYMAPPLPGFGFSRSPFHGEEVEEVPVVRIYGSTPAGQKTCLHIHRVLPYFYIPCSEELLCNLEKGDSYITGLLSDLEKALQARGPSKRKHVHGCNLVRAKKLYGYHSSEELFMKIYLYPLFTRFYKPNIASTNSGAVSNRSFQPYESHIPYLLHFLVDYNLYGMGHIHVKNFKFRPPLPVDFHPKSSLRRKAQSDNLEINSPTVWISSTVSHSSILGSSAPSHHLGGTNLSFAIRQSSSMLEADSRVEGILNEKYKMYTSLSQTTEDTKMVQSLVAVWEELERLRLLEETKYADLGRPLREEVLKDFLHGIKYESALSVLFSQEGPHHKVSTIEESERLERCLKSLTDIIGTVTFSQDNYCGNIDVGNSADVQNDKPDASLCSGSLEQNMQIISPERNSEYPVSSSVHQRTLSQLSDKGEKHLDAEALGLLSWLASSQAAEESTDDELTNEVILSPLFANKSIEVAVESAQLDFDSASQQECQDILDSVDPIRAVEEPNIHTSYLDSVKSNSAASLGNSIPQLDGSSDENPKVSQEYDRSKVTRKSVVSASYTSTKKPSKSASKYSGTEHLWGSLPLSSRKKRQHGDADDSCSAMSPQKDLSASKKSTIDKDYHDTIGSTDSESSSFLGVHDSVCHSVRDLMRRRRSFRREQLEFGCSGAATCTMDKESETVNSGGLEFHDFTSDIPNLALTRMAFVQKPPLKDDACSGLESPSDCEQRGSEKSGLADLLPFFNQNMEENKQNESFQDMESTGDVLGVPTHFQNDGSALYLLTHALSPPSAGAVGHWLTQQSSSSIFSGYTNYDGVAADKEEAHSSTLSRNSPTRFTKENSANKMHGDVMGSALSYKESKHLDEWHDFSQISAGNEKDRLTPLSQIGFRDPASIGGGQQLTILSVEVLTESRGELRPDPRFDAINAVSLAIEDDADNTVDVHVFIRGNNVKSHRRNLDGIAGCNINVFPEEKDVLNNLISAICSIDPDILVGWEIQLGSLGFLAERAAYLGIGLLKRISRTPHELNHPPKIPVDNSSQVLSETSSADDIIDDVSENDWSHTHASGIHVGGRIVLNLWRLMRAEVKLNNYSLEAVADEVLRRKIPLIPSRILNRWFATGPGRGRHRCIEYISNRARINLEIMNQMDLVNRTSELARVFGIDFFSVLSRGSQYRVESMLLRLAHTQNYLAISPGNQQVASQPAMECLPLVMEPESAFYPDPVVVLDFQSLYPSMIIAYNLCYSTCLGKVFPSKSDVLGVSSYSADPHTLVDLKNQLLLTPNGVLYVQPEIRKGVLPRLLEEILSTRIMVKQAMKKLSPSQQVLHRIFNARQLALKLIANVTYGYTAAGFSGRMPCAELADSIVQCGRRTLETAISFVNQHPLWKARVVYGDTDSMFVLLKGRSREEAFRIGKEIASSITAMNPDPVTLKFEKVYQPCFLLTKKRYVGYSYESPEQNEPVFDAKGIETVRRDTCPAVAKILERSIRIMFEEQDLTKVRTYLERQWTHILSGKVSILDFIFAKEVRLGTYSARASTLPPAAIVATKAMLSDPRAEPRYAERVPYVVIHGEPGARLADMVIDPYGLLEVGSPYRLNEQYYITKQIIPALQRVFGLLGADLNKWFNEMPRPIRSTLAKRQFAAAHGSFSRDGSFIRLGLNNKTSAKGGRIDTYYMSSHCSICGDMIQGSESFCNNCLKSEAVVATVVAGRTSKLEREIQHLAAICGHCGGADWIVESGVKCISLACPVFYERRKVQRELVVVSESAGEAGYYPFCCAELF

SEQ ID NO: 17112 - protein, 463 aa, Zea mays
  VARIANT 426..463: note = Derived polymorphism lacks residues 426 to 463
MSCLPCSGSSGKEDKSLAALSPSPRPAAKAAPVRSNSRASSSRKEDSVPVRRGGNAAHGPAQIFSFRELAVATKNFRRDCLLGEGGFGRVYKGHMENGQVIAVKQLDRNGFQGNREFLVEVLMLSLLHHPNLVRLIGYCADGDQRLLVYEYMLLGSLENRLFGPAGKEPLDWNTRMKIAAGAAKGLEYLHDKANPPVIYRDFKSSNILLGEDYYPKLSDFGLAKLGPVGDKTHVSTRVMGTYGYCAPEYAMTGQLTLKSDVYSFGVVFLELITGRKAIDHTQPSGEQNLVAWARPLFRDRRKFCQLADPLLHGGYPKRGLYQALAVAAMCLQEQAASRPLIGDVVTALSYLAAHPYDPNAPSTKDSKTCPSTPRAKTHRRTTSVPDAQHAAESLILNFPDMRKETVRGGEFEKDRTEGSGSSSSSGRNDCLDVPRLLSVPNGKVCGEGNNIQKSTVKVGAREN

SEQ ID NO: 17113 - protein, 417 aa, Zea mays
  VARIANT 7: note = Ancestral polymorphism is R, Derived polymorphism is H
  VARIANT 115: note = Ancestral polymorphism is Q, Derived polymorphism is P
  VARIANT 205: note = Ancestral polymorphism is T, Derived polymorphism is M
  VARIANT 294: note = Ancestral polymorphism is S, Derived polymorphism is C
  VARIANT 296: note = Ancestral polymorphism is W, Derived polymorphism is C
MQVAAARARRLLALPAASGIPGILSGPIPGRASCAEGVLLYRLNGAPASPSSPQHTRGFSSSCFASRSHCNLPSPTIASQWLNEKSVHCHMTTAHFSTEASDMDHPTEAVEEMYQKMLKSVEAETMPPNAWLWSMIDSCSNKEDIKLLFQILQKLRVFRLSNLRISANFNEHLCRKVTEACARVGAVDYGLKALWKHNVYGITPTIGSAHYLLQHAKEQNDNKLMENVIHVLSKNFLPLQPGTADIVFSICYNADRWDLLSKYAERFVKAGVKLHRAAFDIWMDFAAKVGDSQSIWHINSLRGRSVKHYTLATGFACAKGSLLDRKPENAADKIKLLYEVWHRHLPDQKKPFVKDELEKLIAGWPTEVVKRQKKDKRKELEEALMKDIPTMVDCLTKSGLDIPVELDKLATPQLQVA

SEQ ID NO: 17114 - protein, 181 aa, Zea mays
  VARIANT 64: note = Ancestral polymorphism is R, Derived polymorphism is P
MEQLTPWPSPELAAITGQYADFGALDADTAWHDDAAAIAAAVVPSTEEEQQAWIAAGCDVGACRTEEKARENDAALAEPCLSSFVEMSEICPASVVVTLSHGGDEGVDSSGKTAPRPQLAAPTPAKGGYDVAYPDRGTVISRYKEKRKNRRFDKQIRYESRKARADGRMRIKGRFAKSGEV

SEQ ID NO: 17115 - protein, 539 aa, Zea mays
  VARIANT 483..539: note = Derived polymorphism lacks residues 483 to 539
MGLGVVAELVRLGVLSSTSDHASVVSINLFVALLCACIVLGHLLEENRWVNESITALIIGLCTGVVILLTTKGKSSHILVFSEDLFFIYLLPPIIFNAGFQVKKKQFFRNFMTITLFGAVGTMISFFTISLGAIAIFSRMNIGTLDVGDFLAIGAIFSATDSVCTLQVLHQDETPFLYSLVFGEGVVNDATSVVLFNALQNFDLNHIDVAVVLNFLGNFCYLFVSSTLLGVFTGLLSAYIIKKLYIGRHSTDREVALMMLMAYLSYMLAELLDLSGILTVFFCGIVMSHYTWHNVTESSRVTTKHAFATLSFIAETFLFLYVGMDALDIEKWEFASDSPGKSIGISSILLGLVLVGRAAFVFPLSFLSNLTKKSPLEKITFRQQIVIWWAGLMRGAVSIALAYNKFTRSGHTELHGNAIMITSTITVVLFSTMVFGMMTKPLIRLLLPACSNTATSEPSSPKSLHSPLLTSMQGSDIETGSAQIVRPSSLRMLLSKPTHTVHYYWRKFDDALMRPMFGGRGFVPFSPGSPTEQSVHDGR

SEQ ID NO: 17116 - protein, 258 aa, Zea mays
  VARIANT 204..258: note = Derived polymorphism lacks residues 204 to 258
  VARIANT 217: note = Ancestral polymorphism is P, Derived polymorphism is H
MRSFVYAGYEIDQERRQIYAFFGPGNETVWDFVGKITETMVKAVAVLAGTDVKGTIFFSQEGDGNSRHMFLTYNEDLCGLTRISASWVGPTTVTGSISGLKPGLHGFHVHALGDTTNGCMSTGPHFNPVGKEHGAPEDEDRHAGDLGNVTAGEDGVVNVNITDSQIPLAGPHSIIGRAVVVHADPDDLGKGGHELSKSTGNAGGRVACGKLYRGVFPVSWYHWAPRLKQLTSEANTIEGRSEHLRMLLFHFPCIGNTI

SEQ ID NO: 17117 - protein, 270 aa, Zea mays
  VARIANT 171: note = Ancestral polymorphism is G, Derived polymorphism is R
  VARIANT 153: note = Ancestral polymorphism is P, Derived polymorphism is A
  VARIANT 84: note = Ancestral polymorphism is M, Derived polymorphism is I
  VARIANT 9: note = Ancestral polymorphism is V, Derived polymorphism is L
MFRSAVQRLVRASGKSTADPAAAASAFFLSRFSAAAGPPSPQSLPGGPGPAAAVHYTRCDVTDEAQVAAAVDLAVELHGRLDVMLSNAGISGSLAPAPVAALDLADFDRVMAVNARAAVAGVKHAARVMVPRRAGSIVCTASVAGVLGGVALPPYSVSKAAVLGLVRAVAGQLARSGVRVNAISPTYIPTPLVMGAMAEWFPGATAEERRRIVEKDMNEMDGPVLQVEDVASAALYLASDESKCVNGHNLVVDGGFTVGKAPNMPPPGNY

SEQ ID NO: 17118 - protein, 170 aa, Zea mays
  VARIANT 113: note = Ancestral polymorphism is A, Derived polymorphism is T
MASAVHSPLALLPRPRAVADGGMEDSDSESVAESCPHPRGAATDSSSCCGSSACCHDDEEEEEMDEDDDGCSSCVEGDECSSYHQGQEGAAGGGGGGGDGDVEEVGRRNRAGARGSGAWWEQMAVAGARGTTLPLPRAPEAAVAEDPKRAAERQEEDRKFWEDCLASGYP

SEQ ID NO: 17119 - protein, 955 aa, Zea mays
  VARIANT 321: note = Ancestral polymorphism is P, Derived polymorphism is S
  VARIANT 286: note = Ancestral polymorphism is D, Derived polymorphism is A
MATSGKKHLNSVTLLFKLPYYTQWGQSLLIAGSEPALGSWNVKQGVSLSPVHQDSELIWCGSVSVVAGFTSEYKYYVVDDKKNVLRWEAGEKRKLVLPEGVKEGDVIEIRDWWQDASEALFFRSAFKNVIFNATEGVKKESQSVSLNKSLDPEDIVVQFVISCPRLVSGSTVIVTGSNPQLGRWQTQDGLKLSYVGDSLWKASCALRKSEFPIKYKYCQISQAGNSTLELGPNREVNVDLSSPKQSRYIVLSDGALRDAPWRGAGVAVPMFSIRSDEDLGVGEFLDLKLLVDWAVNSGFHLVQLLPINDTSVHGMWWDSYPYSSLSVFALHPLYLRVQALSDAIPVDVKEEIQQAKKQLDKKDVDYEAALSTKLSIARKIFNLEKEKVLNSSSFKQFLSENEEWLKPYAAFCFLRDFFETSDHSQWGRFSQFSKDKLDKLICEGTLHHDIIRFHYYVQYHLYIQLSEAATYARKKNVILKGDLPIGVDRNSVDTWVYPTLFRMNTATGAPPDYFDKNGQNWGFPTYNWEEMSKDNYGWWRARLTQYSYPTSMLQMAKYFTAYRIDHILGFFRIWELPDHAATGLVGKFRPSIPLSQEELLSEGLWDFNRMSQPYIRQEILEEKFGSFWTVIAANFLNEYQKQCYEFKEDCNTEKKIIVKIKTSAEKSLWVEKEDNIRRGLFDLLQNIVLIRDPEDSTKFYPRFNLEDTSSFRDLDEHSKNILRRLYYNYYFVRQENLWRQNALKTLPVLLNSSDMLACGEDLGLIPACVHPVMQELGLIGLRIQRMPSEPNLEFGIPSQYSYMTVCAPSCHDCSTLRAWWEEDEGRRSRFYKTVVGSDEEPPSRCTPEVVHFIVQQHFDAPSMWAIFPLQDLLALKDKYTTRPAPEETINDPTNPKHYWRFRVHVTLESLLNDKDIQATIKDLVTSSGRSFPGKKAEGADESGEKLSKVQLNGKA

SEQ ID NO: 17120 - protein, 413 aa, Zea mays
  VARIANT 83: note = Ancestral polymorphism is G, Derived polymorphism is V
MASLAIPALRPAGAKLTGNITPTNPWRPARQCACASGGHVGELSALAPEAEAEQAVVSEVKPRFRWDAFGSDLTGPQQRAVRVLSPKLPNRCKALVARVVCLSPGDERLGALLAYWVKAMKPKRADWLLVLKELKAMESPLLAEVLEHALLENSFEANVRDYTKLIHIYGKQKRLQKAEDAFAAMKGRGFPCDQVMLTALMDMHSKAGDLARAKEIFGEIVLLGLPLDKRAYGSMVMAYVRADMLPEAEDLIKETEEQQVFAGKEVYKALLRAYSYRGDPDGAQRVFDAVQFAGIVPDTKLCALLVNAYCLSDRIEEAVCVIRNMRSAGVEPCDKCVALVLGACEKVNMLETALGFLTELEENGVSIGQEPSQLLAAWFRKLGVVREVDQVLKDLSSEDMTSRPSFAVSLEQQ

SEQ ID NO: 17121 - protein, 264 aa, Zea mays
  VARIANT 208: note = Ancestral polymorphism is R, Derived polymorphism is S
MHHQWGSWGRREQPAAPYKSAGPAVALSASGPLDHQSPEELLIEVSEVEKQAANKGTIVMDGGYYGGRDQRYSGGYYGGGGIATPGYAPAVPYGMSQVNIEGNGCGRALPPQPTVKVYCRANPNYAMSVRDGKVVLAPANPKDEYQHWIKDMRWSTSIKDEEGYPAFALVNKATGEAIKHSLGQSHPVRLVPYNPDFLDESVLWTESRDVGNGFRCVRMVNNIYLNFDALHGDKWHGGVRDGTNVVLWKWCEGDNQRWKIQPYY

SEQ ID NO: 17122 - protein, 272 aa, Zea mays
  VARIANT 14..272: note = Derived polymorphism lacks residues 14 to 272
MADALCNGVVASPCGRDVAGRARGAARAALAESLQVAGHASKTSFSAGRMSVKDSKPRPLSRSLEAAAPGQMNLSFPKAMRWWKKGLHPNMREVESAQDLADSLLSAGDKLVVVDFFSPGCGGCRALHPKIAQFAEKNPGVQFLQVNYETHKSMCYSLRVHVLPFFRFYRGAEGRVSSFSCTNATINKFKDALAKHGAERCSLGPARGLDESELMALAENRDLHFTYDKPGGLVPLAEAIAKEAAAPGGPWLPLPASLLGQGSDNSLLPSGR

SEQ ID NO: 17123 - protein, 146 aa, Zea mays
  VARIANT 122: note = Ancestral polymorphism is V, Derived polymorphism is A
MKKIQGLLELRTVTNEMVRLIETATARVLAVDIAGNINGWNKKAAELTGLPVMEAIGRPLIDLVVADSVEVVKQILDSALQGIEEQNLEIKLKTFHEQECCGPVILMINSNALSFNRTNGLAISHLLVLWYIMARICRLTFSKSTL

SEQ ID NO: 17124 - protein, 259 aa, Zea mays
  VARIANT 139: note = Ancestral polymorphism is C, Derived polymorphism is F
MEGGLSPERHAAAEPVRSRWTPKPEQILILESIFNSGMVNPPKDETVRIRKLLERFGAVGDANVFYWFQNRRSRSRRRQRQLQAQAAAAAAASSSSSGSPPTSGLAPGHATASSTAGMFAHGATYGSSASASWPPPPSCEGMMGDLDYGGGDDLFAISRQMGYASGGGSGSASSAAIAHHEQQQQQLYYSPCQPAASMTVFINGVATEVPRGPIDLRSMFGQDVMLVHSTAGLLPVNEYGVLTQSLQMGESYFLVTRGY

SEQ ID NO: 17125 - protein, 367 aa, Zea mays
  VARIANT 93: note = Ancestral polymorphism is Y, Derived polymorphism is H
  VARIANT 77: note = Ancestral polymorphism is T, Derived polymorphism is K
MYHQQQLHTHNQHLSSSRPGLPPEKQFLLHGAGGGGGGGDAGLVLSTDAKPRLKWTPELHERFVEAVHQLGGPDKATPKTIMRLMGIPGLTLYHLKSHLQKYRLSKNLQAQAHTASAKNALVGCRTGADNALCQGSASPPPPPPPPHLNLEPPQINRSMHISEALQMQIEVQRRLHEQLEVQRHLQLRIEAQGKYLQSVLEKAQEALAKQSGGADETTTTTQQQQQLLLPDLISRATATRRGNVQQEHLHQQHHLGGDGSVDSCLTACEGSRCQRERDQDLLSIGLSSAPPPTPTPSRGYNDRGGGGSASCEEFLQFLDEPSRRGAGGGGSSDEQQELDLSISGGRSNPRPRGSQSQRIDLNGSSWN

SEQ ID NO: 17126 - protein, 1756 aa, Zea mays
  VARIANT 836..1756: note = Derived polymorphism lacks residues 836 to 1756
  VARIANT 831..1756: note = Derived polymorphism lacks residues 831 to 1756
  VARIANT 826..1756: note = Derived polymorphism lacks residues 826 to 1756
MGAPRELELSDEVEGEEDGTTDFVFRLAGDPIPLLPTDSNPLPLFDLLSPPARPLAVSDRHATVFLAHPSGFIAVRTKELIEASKEAREKGKSSTRCAQDCCVADVPLPGVSLIALSHDESVLAACTHTEIQFFSLASLLTHKDVVPSSSCSLERAVTVKDFKWLNHASAAYIVLSNGGLLCHGNLGEGLKDVMENVDAVDCCKEGNHIAVARGNKLTILSPDFTETCSMSLLFQLWSDGSDSKGTTIKVDSIGWVHGDSIVIGCVRLNEDDNEEGYLVQVIRTEESTFCESPGKTDVYTYNDFFHGIMDDVLPPGAGPNLLLGYLHRWGLMVASNKKSVDEHIALLKWPSAHDDEKTVTYLEMLEDKYSPRIDLQENGDDNVILGFGVENVSLFQKITVPVGPEQKEVAPQHILLCLTGEGKVAVYYLARISDPSDLPHATVSTNEDYGEKHISPATVSEKELTPSVAGSVYKSTLTEHGAEPSSAQTGSNQQESINVKNSSSASKEQETTDNSLFISSNKKPLDTKQVNVTGPPAALRSLALTGNTKPTIFSSFSTEGMNPTGGNAPNELASSLQPSSRSFGNNQTGKEGLDSVQSVGIFGGSQNSNKDGNVYGFKSSLFTSSGSVPAKIGERNEVGFGVPSLQTSYTADRKVFGAPVALSSVPSSSISPAKPSPIGYSSSGFRTANSEAPQSLRGSPPSQQSMGKSHNSRTQAPAEYSRNSKKGTGFDSEQDLSKKFYSINEMTKELDALLAYIEKDGGFRDACITIQQRPLSMFEDGLQNFLQLLQVFKGKVEEQCSKIEDLRNNMFQVSARQTYMKGIVSQSSDNQYWDIWNRQKLSPEFEVKRQNILRANQDLTNQLVELERHFNNLEMNRSSETGRVASNRRAVYSNKTSSSQTQLSSVYSALNSQLAAAEQLSECLSKQISVLNIGSPSRKQGMVTKKLFESIGLAHTTDATKFSGSTPKPVKRFPSVNEHSKGILGSSKGGEPETARRRRESLDMSLASLEPQKTTVKRITQQQRLKISSDLPFRSNKKIFDSQMAAISQEKSSDSSNSSIVESYVSRLRSLSEDVNDKLSGPQQNPLFKWVKESTGSSQTSEQKHFELPGQMKSTAQSSKLTPSSPPSFSYTRMGAQDSINPSSVPSFGTKHTVSKPNTLTFKTTISPKSNANTEPNILPSITAPKTSLSPLSVKTAGESGDLPTLTMKNRQDGQSMPSLGNIKGPGASLQNKGGIFRDLDKSSFNSEHSKPAALHEKTDQLSGVGDAVQNTVKDTSKMAPQPSAFLPAPVTQTNSYSLRPTVSSSATSGAKTSDVLSSSMQKVSPIVPGGTVSSSVPTPAKDSSTGLSQNASKPETLISKVTSTIVSASSTSVISVTESKPSVPPTTGASLPSTHVSAPQTAPTTSESVFTSTGKNVGPNTDTISTDEDDMEEEAPSASAELNLGALGGFGLGSQPSSSPQKSNPFGASFGTSGNKSSGTPFTLTTSPGQLFRPASLSIPSAQPAQPSQSTSSSSFSNSFSSGLTGFGQPAQIGSGQQSAFGKPAQIGAGQHAGFGQTAQIQSGFGQPAQIQSGFGQSAQIGTGQQSGFGKPAQIGAVQSGFGQPAQFAAQQTLGSVLGSFGQPPQLGGIGSGGFGGFSSASTSAGFSSLSSGNAGFAGAASGGGFSAPTASAGGGFAAAATGGGFAALASKSGGFVGAASSGGGFGGASQGGGFGSGGGGGFGSFGGNQGAGFSAFGASGAGRPAADFLTQMRK

SEQ ID NO: 17127 - protein, 281 aa, Zea mays
  VARIANT 223: note = Ancestral polymorphism is E, Derived polymorphism is K
  VARIANT 230: note = Ancestral polymorphism is E, Derived polymorphism is D
  VARIANT 233..281: note = Derived polymorphism lacks residues 233 to 281
  VARIANT 254..281: note = Derived polymorphism lacks residues 254 to 281
MDIGHHVNGLRKHPSNEVRQLVKLLVRKWKEILDDWVRLHNSGGDGSGSIICDGDSPDKVQSKYHQNTHALGIPPTFFAIGTWYSSEHGFNDGNCDQARRPHRVVVESREAMPLSFDNSTTEDSAAAVKPKPKVRVRKNPMKQSCFDFTKVDVVLLPIVFLLVRPNVGKSALFNRIIASLRANQLCERLPSPNGESTVDCHQISKMPNLAFTIANKTFTLTPEQYIVKLEQAGQTICISGFMAFDVPPPRGPLWILGDVFMSVYHTVFDFGENMIGFAKSA

SEQ ID NO: 17128 - protein, 517 aa, Zea mays
  VARIANT 262: note = Ancestral polymorphism is E, Derived polymorphism is V
  VARIANT 307: note = Ancestral polymorphism is T, Derived polymorphism is M
MPTFPRAGRWSTSSTWPRKTAGAASTALAAVVFAVLDVADVILCFAYALLDGVLEDSPVRCYCHRSYDDGIREAAAGASVDGGGHEEVSDTLYACGRRSTVRDALLGLVRRVVPRTRRTRAPPDETVAPCKWRSPRWSDCACKSCVAWRCGEEGGGRLHVVVKEPGPKGNYDTVRSLFLTLVGRSADAAAAGTTTRAPDPENAIFVHGFASSSSFWSETVFRESSCILDGCRLFAVDLLGFGRSPKPANCMYRVRDHVEAIERTLILAGDGESQSLMSSFHLVSHSMGCTIALALAAKHPTRVKSITLVAPPYFLPCEQRASQVALNRLAEKKLWPPLLFGSAVMSWYEHVGRTVCFLVCKNHLLWEWLFSLLNLNRGVDFRVRDLTKHTHHSAWHTMHNVICGGAALQDANLEAVAAAGIPVQVLHGADDQVVPVECGRHVKAKIPRAKLRVMERRDHSTVVLGRERGFAEELKAFWCASRSPVHVQDAEVRRGRSGPASAFMGQALKGYPTVKRD

SEQ ID NO: 17129 - protein, 334 aa, Zea mays
  VARIANT 119: note = Ancestral polymorphism is F, Derived polymorphism is S
  VARIANT 1: note = Ancestral polymorphism is V, Derived polymorphism is M
MLRSQSRMDSTTAAATAAAAAAPAPVLLVTNDDGIDAPGLRFLVDRLVAAGRYRVLVCAPDTDKSGVSHCITWRPALRCKRVDIIGATAFGVSGTPADCASLGISGKLFDGLVPDLVSFEVLSGINIGNNCGYHVIYSGTVAGAREAFLYGIPAIAMSYDWVAGRSSVNDLKVSAEVCMPLINAIVTEIKNGTYPQGSFLNVDVPTDAAHPKGYKITKQGTYMARISWEQTVYKKPAVESYQTANMDVDGEKDSELVTSENDLLFKRVIVGRSSNGVEGEETDHNSLVDGYITVTPLGALSRTEPDAIPYFKACVSRLVDNFSSPGSSFSRSRG

SEQ ID NO: 17130 - protein, 454 aa, Zea mays
  VARIANT 35: note = Ancestral polymorphism is E, Derived polymorphism is D
MMEVCNAQGFVYGIIPENGKPVTGASDNLRAWWKEKVRFDRNGPAAAAKYQADTAAAGGGAADGCGGADAEGQHHSLHELQDTTLGSLLSALMQHCDPPQRRFPLEKGVPPPWWPLAAVPGDLGPPPYKKPHDLKKAWKVAVLTAVIKHMSPDVDKARRLVRQSKCLQDKMTAREIVAWLAVLRQEEELYIQLHPGARPAPSSAAMFPFCASSGEYDVDGEDDTGRNQQPTSNPAAAAFLDLSSSFMDDAGHNKFVVAEPAPPIKQEAADAVFFQKRSAPAAAVEPELMLGGSFRRAYTCGNVQCSHSSSAHGFLDRNTRNAHQYSCMFNNSVGQTAALGGLDLDLPLDGQRSLGELMDMYEANVGNVDTAAPGPEVQLPGPFPTPCRFGDIISNVIQQSAAAAVYVRDDDAQFGGDIAAASPGLRFGSGLDVAGGGGLQQPHKSTGSNGSWFY

SEQ ID NO: 17131 - protein, 214 aa, Zea mays
  VARIANT 202: note = Ancestral polymorphism is S, Derived polymorphism is G
  VARIANT 141: note = Ancestral polymorphism is A, Derived polymorphism is D
  VARIANT 134: note = Ancestral polymorphism is G, Derived polymorphism is D
  VARIANT 75: note = Ancestral polymorphism is P, Derived polymorphism is A
  VARIANT 24: note = Ancestral polymorphism is P, Derived polymorphism is A
MEVEIKLRLPDAAAHRRLSAFLAPRLRRTHAQRNLFFDDAARTLGAATAALRVRLYDGPDDRGPSRAVLALKRRPRIEAGVSRVEEIEEPLEPALAVACADDPARLGGLDSPIIRLVAAEYGVGGDAAPFLCLGGFGNTRAVYEYELEDGGGGLVLELDETRFDFGTRYELECETAEPDRVKEVLERLLTVAGVPYEYCRNSKFACFMTGKLLP

SEQ ID NO: 17132 - protein, 515 aa, Zea mays
  VARIANT 79: note = Ancestral polymorphism is V, Derived polymorphism is D
  VARIANT 78: note = Ancestral polymorphism is I, Derived polymorphism is N
MCRVVLVAKHKRDRRDDDDDASVSLPLPPGPPKLPLIGNAFYFFAALRHNPHRALADLAEKYGPIVSFRQGTATSRIIVVVSSPAAAREALGKNDIAVAARMVPDSARGLAHDAGSVFFLPSSSPLWKQHRATIGARMSSGPSRLGMTRHIRDRHARQLAELSRAYSGQPMAVGEAVYGTMVNNVSNILFSRDLADLSMPHPHDDDEQGRSRRWGQVYRAITRAINQDWATPNISDAFPFLAPLDLFGLRRSGSRYMAELYKVFDQEMESRLARGRRTDEEEDMLGVLLARHARSEITRADISKLLADIFLAGTDTTRIAVEWAMRRLLRHPDKLEKVRAELAASLGSKEFVEESDLEELPYLHAVVKEVMRLHPSLPMLPREVVTDDGMSLGGFWVPKGTCIMVNLLALGRDATSWPEPEEFVPERFLGGGGRPLSFRGSDFSYIPFGAGRRVCPGMDLAARFVPLVLASLLYRVEWKLCGDDAMTPVDDVLREKSSILLEPAMPLRAIPLFTP

SEQ ID NO: 17133 - protein, 536 aa, Zea mays
  VARIANT 299: note = Ancestral polymorphism is R, Derived polymorphism is Q
  VARIANT 87..536: note = Derived polymorphism lacks residues 87 to 536
  VARIANT 68..536: note = Derived polymorphism lacks residues 68 to 536
MAYMTAVAPVPWWPPPPELAHAGLLVASSPAGYPEPQTLPFLFAPLPPPPPAGCPLLPPPAPIVIQLQPHPSLLAEVDHRRSSSLVQFLKDEGAVLSPEDENKREKVIRELKKIVMHWANAVAYEQSVPQGLATATVLTYGSYTLGAHGPESDIDLLCLGPCIATLQYHFFVVLRQILQGRPEVSEVHTVEKAKVPLMRFRFTGIAVDLTYAQLPVIDALKAINTFSPQLLQKIDTRSWRSLSGVRVNEQIVQLVPNAEKFQTLLRCIKLWARKRGLHCHYLGFFAGIHLAILAAYVCRKFPDASVSGLFAVFFQTFAHWPWQVPVSLHDELTTCLHSEGRLMPIVMPCTPPEFCASTVTKGSLKKIREELTRGYVLTRDPLRHDFQWSWLFEPFPYDQKYQQFLRIALRAPTIAELGDWAGWVKSRFRFLILKLERAGIECDPCPSEEVDHTDNDPNVVFYWGLIPKRIIQVDTSSLKGDFMEDLTNDVYGTVKCTHSDVTISVVGLPQLPKSMCSRVYPPAVHAALYDGLRGHR

SEQ ID NO: 17134 - protein, 568 aa, Zea mays
  VARIANT 409: note = Ancestral polymorphism is P, Derived polymorphism is L
  VARIANT 418: note = Ancestral polymorphism is A, Derived polymorphism is G
MPRAPRRQSDEARRGAYKPRVDFSRSRRRREDGLLALRRLNRDTGLFKRRRDEPAPAVPASDLTPTRAEAAPFAGITRPAFTPSSPPDVAAPRDAAESELEGLSELVDKLCSDDTTSQLEATIQFRKLLSDEKNSTVIKIIRADVLPRFAEFLSRHGLPQLQMEAAWVLTNIAASDYTLLVAECGAVPRLVELLGSLNANIRHQAIWCLGNIAADLPSCRGILFDHGALTPLLSQFREGMKIPVLRTAMWALSNLCFGKLPAEVQVKPILEIISQLIHSADEKILADACWTVYYICGDKGDAVQDVLDAGVCPQLVNLLMHASANVLLPVIMALARISAGDDKQVEVLIENDILNCLGQLVARNYPKNIKKQACLIVSNIAAGSKDQIQAVIDADIITSLIVLLRTSEPDVKKEAAWAISTAASGGSSDQIQYLVSRGCLEPLCSVLTHNDPDLVYTCLEGLENILHAGEAGKKGEESGTNPYAEFILECGGLEKLEDLQDVDSDRIYELAMKLLQSYWEEEVSESDDPNIPGSNDSSDTVEATSEDAAAAVQPPPVPPPPSAADEAE

SEQ ID NO: 17135 - protein, 646 aa, Zea mays
  VARIANT 68: note = Ancestral polymorphism is A, Derived polymorphism is G
  VARIANT 105: note = Ancestral polymorphism is R, Derived polymorphism is Q
MHVADVIGRVLERGQSLDSVELELERLHVDLDPFVVNRVLRSISDSEMAVRFYWWAESRPGFDHTQFAIAYVVSLLFVDSNFFLLSEFLERVRSQGVALHRSLYRILLSGYVRAGKFDSVIHTFDEMVTSGCREFGVDYNRFIGVLVKNCCFDLVEKYYSVALDKGFCLTSFTYSRWISALCQSERIELVERLLADMDKFGCFPDIWACNIYVDCLCKHNRLHDALKTLENMWIRGTNPDVVTYTTVVGCLCDNKQFAEAVELWEEMVRRGLKPDIVACGVLIFGLCKSDKVDEAFELALRMLSLNLELNVCIYNALISGFLRSGSINKAFKIISVMRTNGCEPDVVTYNIRLNHYCNTGMIKEAEKLIEEMEMSGIVNPDRYSYNQMLKGLCKAHQLDRAFGFVSDHMEVGGFCDIVSCNILIDAFCKAKKVSSALKLFKEMGYKGIQADAVTYGTLINGLYGVGYYYLAEEIFEQMLKARVVPNVNLYNIMLHNLCKAGQFEQAQKIFLQMIQKEVSPDIITFNTLIYWLGKCSRAIEAIDLFRDMTARGIEPDSLTFRYLISGLLEEGKATQAYEVWEYMLENGIILDRDVSDRLISTHPRFLVDKFDVAKKACLNFLDKFKASVVTGEQLLGQSCIKDWLIR

SEQ ID NO: 17136 - protein, 271 aa, Zea mays
  VARIANT 96: note = Ancestral polymorphism is Y, Derived polymorphism is N
  VARIANT 221: note = Ancestral polymorphism is K, Derived polymorphism is R
MGPALRKQQQQQQAAEAVAPKQAYVTFLAGDGDYWKGVVGLAKGLRRVRAAYPLVVAVLPDVPEEHRRSLRDQGCVVREFVEYERMVYLDADMQVYENIDHLFDLDKGKFHAVMDCFCEKTWSHTPQYKIGYCQQSPDRVAWPEQELDLPPQPPPLYFNAGMFVHEPSLRTARALLDALAATPPTPFAEQDFLNLFFRDAYAPLPPTYNLVLAMLWRHPDKVALHEVKVVHYCAAGAKPWRYTGKEPNMEREDVRALVAKCSFITLLFVSI

SEQ ID NO: 17137 - protein, 136 aa, Zea mays
  VARIANT 33: note = Ancestral polymorphism is S, Derived polymorphism is P
  VARIANT 81: note = Ancestral polymorphism is F, Derived polymorphism is L
  VARIANT 82: note = Ancestral polymorphism is M, Derived polymorphism is V
  VARIANT 95: note = Ancestral polymorphism is S, Derived polymorphism is G
  VARIANT 107: note = Ancestral polymorphism is I, Derived polymorphism is T
MASTACFVIIVSKNDIPIYEAEVGSAPKKEDLSYHHQFILHAALDVVQDLAWTTNAMSLKSVDRFNDLVVSVYVTAGHTRFMLLHDSRSEDGIKSFFQEVHELYIKIFLNPLYLPGSRITSSHFDTKVRALARKYL

SEQ ID NO: 17138 - protein, 333 aa, Zea mays
  VARIANT 173: note = Ancestral polymorphism is D, Derived polymorphism is Y
MADASSRTDTSIVLDDNDKNHRMENGSGAVVPSNSSDRSDRSDKPLDQKTMRRLAQNREAARKSRLRKKAYVQQLESSKLKLAQLEQELQKARQQGIFISSSGDQTHAMSGNGALTFDIEYARWLEDQNKQINELRTAVNAHASDSDLRLIVDGIMAHYDEIFKVKGVAAKADVFHILSGMWKTPAERCFLWLGGFRPSELLKLLANHLEPLTEQQMLGLTNLQQSSQQAEDALSQGMEALQQSLAETLAGSLGPAGSSGNVANYMGQMAMAMGKLGTLENFLRQADNLRQQTLHQMQRILTIRQASRALLAIHDYFSRLRALSSLWLARPRE

SEQ ID NO: 17139 - protein, 306 aa, Zea mays
  VARIANT 154..306: note = Derived polymorphism lacks residues 154 to 306
  VARIANT 152..306: note = Derived polymorphism lacks residues 152 to 306
  VARIANT 109..306: note = Derived polymorphism lacks residues 109 to 306
  VARIANT 107: note = Ancestral polymorphism is V, Derived polymorphism is L
  VARIANT 103..306: note = Derived polymorphism lacks residues 103 to 306
  VARIANT 50..306: note = Derived polymorphism lacks residues 50 to 306
MFGLRARAAAQLQRPTPSPSSASSASFSLARLGCASPLAALAPLASAPPSPSARETQPTSLSARWPAAPMRPWGTRGHPRPTTRVLCTAAGSVQREGKELLVQHLLVGEKDVRLLVDLEKNIIAEGADLSDLAVEHSLCPSKENGGMLGWVRRGQMVPEFEEAAFSAPLNKVVRCKTKFGWHLVQVLAERDQCVLQDIDPEELHAKLQDPSFLEEAQLIDVREPDEVEKASLPGFKVLPLRQFGTWGPVMTDEFNPQKDTYVLCHHGMRSMQVAKWLQSQGFKKVYNVAGGIHAYAVKADSSIPTY

SEQ ID NO: 17140 - protein, 278 aa, Zea mays
  VARIANT 94: note = Ancestral polymorphism is K, Derived polymorphism is N
  VARIANT 110: note = Ancestral polymorphism is V, Derived polymorphism is I
MGNASGRAEDLADADMDDGNNVRRASSSSAGYVRGGGSSSSPPASPPRPHSPRMFVPQSPVTPLQRATEVPPPVFNQILMNQQQEDSDGPPQKKIPTLLMWTLGGRNIYVEGSWDNWTSKKLVEKSGKDHTILLMLSSGVHRYRFIVDGERRFIPDLPCETDNMGQIVNLVDVHDFVPDSVESVSELMAPPSPDSSYGFHVPGEKEFSKEPPQLPSQLYLGVLNSRSTEEGCARPRHVVLDHLYIEKGWGAQPLVALGYTHRFRSKYVTCVLYKAIER

SEQ ID NO: 17141 - protein, 398 aa, Zea mays
  VARIANT 66..398: note = Derived polymorphism lacks residues 66 to 398
  VARIANT 152: note = Ancestral polymorphism is K, Derived polymorphism is E
MRSLGQNPTEAELQDMINEVDADGNGTIDFPEFLNLMARKMKDTDSEEELKEAFRVFDKDQNGFISAAELRHVMTNLGEKLTDEEVDEMIREADVDGDGQINYEEFVKVMMAKYQLPHAHQVFLRPEVSCVCLNLRCAFGRVELMEQDKRAKVLCLHGFRTSGSFLKKQISKWHPSIFQQFEMVFPDGLFPAGGKSEIEGIFPPPYFEWFQFNKEFTEYTNLDECISYLCDYMVKNGPFDGLLGFSQGATLSALLIGYQAQGKLLSNHPPIKFMVSISGSKFRDPIICDVAYKDPIKVKSVHFIGEKDWLKVPSEELASAFDEPLIIRHPQGHTVPRLGSHSSQISLFDDVSVKQLSEWSSHVLEDLKSADVPEALDSGKPSDKEAAGAEFTENLVKA

SEQ ID NO: 17142 - protein, 407 aa, Zea mays
  VARIANT 23: note = Ancestral polymorphism is G, Derived polymorphism is E
MYRAKRAASLRAKRRRLGKYELGRTIGEGTFAKVRVAKNMDTGDHVAIKILDKAKVHKNKLAEQIRREICTMKLIQHPNVVRLYEVMGSKARIYIVLEFVMGGELHDIIATSGRLKEDEARRYFQQLINAVDYCHSRGVYHRDLKLENLLLDVAGNLKISDFGLSALSDQVKNDGLLHTTCGTPNYVAPEISGAQFTCPSWFSAGAKRLINRILDPNPSTRITIPQVLKDPWFRKGYKPPVFDEKCQTSLDDVDAAFGDEEEHHVVEETEGQPASMNAFELISMNKGLNLDNFFESDKKYRRETRFTSQCHPKEIINRIEEAAKPLGFYIQKKNYKMLMENSKAGRKGNLNVETEVFQVAPSLHVVELKKAKGDTLEFQNFYKTLSTELKDVVWARDDEVQDRSSSP

SEQ ID NO: 17143 - protein, 285 aa, Zea mays
  VARIANT 185..285: note = Derived polymorphism lacks residues 185 to 285
MGVQTMSSHSHGDDGRRGLPRQGSVYGLTLTEVETQLGEPLRTMNLDDLLRTVLPASAAAAAGPPPPPAPAAKKTVDEVWRDIQSAGGGGGGRQPSMGEMTLEDFLSRAGVAVDAAPHWMHQYPQQQQYALPRPLPLPGPALDAAYHGDRPGVFLSHSQVAGRKRAATGAVAGDGVVERTVERRQKRMIKNRESAARSRARKQAYTNELENKVARLEEENKRLIELKVLKPLEPLEPPPAEQNKKQPPPQPKRKQPQPPPPPPPPIQQLPPKHRHDLRRTNSATF

SEQ ID NO: 17144 - protein, 900 aa, Zea mays
  VARIANT 208..900: note = Derived polymorphism lacks residues 208 to 900
  VARIANT 682..900: note = Derived polymorphism lacks residues 682 to 900
MAGVPPPPRQLDVRRFAAARASELRSLYAAVSSRLDDAGGRHQPRSARRRTTGHLPSKRRRRGAGEVGPGDDDGLPARKQSRRVRRRRELAANPAEGFSVAGDGARRLRTHLWYAKRFSMERRWTFILPVGAQGRGKGSRSVLKRLKNGTTIHDAGYFIPIELDGPEDALLSVLRMVLRPSPAEKTPDLKHLQDQVMRGVCYENAMLWDVRSMHSQIVGPVTYMWRPFSRADDKSGIEGDQCTSHCIHDESGNSSRRQLWIWIHPAALDDGISAIQFACERQLQVVSFLVILFLLSSHPIKSCPSLQIQDSGGVVKCCSLEGKIGRLEVNGCKAMQSLKKILHPTSSSKINTISTSDISASTDTLLDSCIAPHLLKASVISNAEILQPGAILSMVVHDPREVSVKGIDSSKIVSHDKQSEVLEEDVAPNANEASSEVANILPLMWMHPGKHDILLSDCRELWDSRQTINPPVSDEVLCKEKHSERIKFFCLDSGNDQEQTTQEKDNFIRSCPVILLKHAREGIPSLGWSIILPLSWVKPFWLFLVSHGAHAIGLRERRWIAAKLRMPCFPYDYPDSKAYASYMSKEAAGFDKVVERRPVAKRPPRVPVPPLWHCIMTCFRKDYDGILGVLEVDDLVRANMVLPKNSSAHCESGDAEPSQANVASLQLHVPRTTQMLRQYVEEFDRKYLSSSSDMKVDSDEPNLASDNTVGMTRFASELCLTRVLIRAFKEGSFEEGAVVCAPLPAELSAWKIRKQNTYMCLKILMGSFDAWNRSKEEEEECVEKWELQLPQSHVSSYFSWFDPSTSSLQLPTDGVAREAFRWPIGFVTSGFIHGSNGQDAVAVAFCEAKLLAALRRQQWTHGNLQSREVCVLVRNARSAAYRRALATTVLEHQESDLAFL

SEQ ID NO: 17145 - protein, 348 aa, Zea mays
  VARIANT 77: note = Ancestral polymorphism is G, Derived polymorphism is R
  VARIANT 39: note = Ancestral polymorphism is G, Derived polymorphism is S
MGKHVWAAALMALAVIVGLGVPPGRIAEARTLEKDDLLGGGGDFGAGEGGGFGGGAGGGLGGGFGGGGGLGGGGGAGGGFGGGAGHGGGLGGGFGGGKGGGAGGGGGLGGGVGGGFGGGKGGGLGGGGGLGGGGGAGEGGGLGVGAGGGGGLGGGAGGGFGGGAGGGVGGGGGLGDGAGGGAGAGSGLGGGAGGGGGLGGGAGGGFGGGAGGGVGGGAGGGAGGGAGAGGGLGGGAGSGVGGGFGGGKGGGFGGGIGGGGGAGGGAGGGFGGGKGGGFGGGKGGGFGGGAGGGFGGGKGGGFGGGKGGGFGGGAGGGFGGGKGGGFGGGAGGGFGGGGGSGGGIGGGL

SEQ ID NO: 17146 - protein, 599 aa, Zea mays
  VARIANT 159..599: note = Derived polymorphism lacks residues 159 to 599
  VARIANT 155..599: note = Derived polymorphism lacks residues 155 to 599
  VARIANT 151..599: note = Derived polymorphism lacks residues 151 to 599
MAFWWPLLVLAAAYALCRLLLFLIPPTVPSIDVDASDVLAKEDSFIYIPRRGKSTQTDKVQCYEPATMKYLGYFPVVTPDEVKEHVAQSRKAQRIWAKSSFKQRRQFLRILLKYILEHQDLICEVSSRDTGKTMVDASLGEIMTTCEKITWLLDEGEKWLKPEYRSTGRSMLHKRAKVEFYPLGVIGAIVSWNYPFHNVFNPVLAAVFSGNAAVIKVSEHATWSGCFYFRIIQAALSAVGAPENLVHIITGFAETGQALVSSVDKIIFVGSPGVGKMFYMLLQIMKRASETLIPVTLELGGKDSFIVCEDVDLPSVVQVATRAALQSSGQNCAGAERFYVHDDIYSAFVSQIVKTVKSISVGPPLSGRYDMGAICMIEHSEKLQNLVNDALDKGAEIAVRGSFGNLGEDAVDQFFPPTVLVNVDHTMKIMQEETFGPIIPIMKFSSDEEAIKLANDSKYGLGCAVFSGNQKRAIRIASQLHCGVAAINDFASSYMCQSLPFGGVKDSGFGRFAGVEGLRACCLVKSVVEDRLWPYIRTVIPKPIQYPVSEHGFEFQQLLVETLYGYSVWDRLRSLVNLIKMVTEQNFAPTSNATTKKRR

SEQ ID NO: 17147 - protein, 373 aa, Zea mays
  VARIANT 255..373: note = Derived polymorphism lacks residues 255 to 373
MEKSRVLVVGGTGYIGRWLVRASLAQGHPTLVLLRAEIGLDIDKLQMLLSFKAQGARLVEASLEDHAGLLAAVAHANVVVSAMSGAHIRSHNSPKGDTGRELADALARVAFQERVGVKGDVRQVDFQKDIVRAAEGLVSIGNKHIEVGTKFSEDCYRYGSENNASDEALRKAASLYGGALINIEKEYEDFNRILSSQTIDPLRAMAIGGPLEDARGLAQRYSRMRHEAEILSTEIARRKARVREAPIAEHTTKLQQSEARMIEHKASMAVLGKEAAAALAAVESQQQRMSSEKQRRESAPPIISSHKRAEKAQYFLAEVMHNFNGTTEKELSLIVGDYVVVRQETGQNGRHQLYRKTHNDSEILEVGRAVQQA

SEQ ID NO: 17148 - protein, 363 aa, Zea mays
  VARIANT 90: note = Ancestral polymorphism is R, Derived polymorphism is L
  VARIANT 64: note = Ancestral polymorphism is S, Derived polymorphism is R
MVVMGKEQQHEEEEVQGKVVQEEVQVVQETVVPVPSEEDKEAEAALVHKISSLAAAIAKLPSLSPSPEVNALFTELVTACIPRSSVDVERLGPELQEMRGGLIRLCADAEALLEAHYSDLLASFDNPLEHLSLFPYINNYILLSQLEHGLLARHVPGPAPARVAFVGSGPLPLSSLVLAARHLPGASFDNYDICGEANDRARRLVRGDGALQARMAFRTSDVADVTRELASYDAVFLAALVGMAAEEKARVVAHLGRHMAPGAALVVRSAHGARGFLYPVVDPEEIRRGGFDVLAVHHPEGEVINSVIIARKPVAVDAHATGGVGHAHAHAHGAVLNRPCLCCEMEARAHQKMEEVAVEQLPS

SEQ ID NO: 17149 - protein, 389 aa, Zea mays
  VARIANT 340: note = Ancestral polymorphism is R, Derived polymorphism is S
  VARIANT 286: note = Ancestral polymorphism is M, Derived polymorphism is T
  VARIANT 203: note = Ancestral polymorphism is K, Derived polymorphism is N
MESRNVVVCDNGTGYVKCGFAGENFPTSVFPCVVGRPLLRYEESLQEQELTDIVVGAACADLRHQLDVSYPVTNGIVQNWDDMGHIWDHAFYSELKVDPSECKILLTDPPLNPVKNREKMIETMFEKYNFAGVFIQIQAVLSLYAQGLLTGLVIDSGDGVTHVVPVVDGYSYPHLTKRMNVAGRHITSYLVDLLSRRGYAMNKSADFETVREIKEKLCYISYDYKREYQLGLETTILVKSYTLPDGRVIKVGTERFQAPEALFTPELIDVEGDGMADMAFRCIQEMDIDNRMTLYQHIVLSGGSTMYPGLPSRLEKEILDRYLDVVLKGNKDGLKKLRLRIEDPPRRKHMVYLGGAVLAGIMKDAPEFWITRQEYQEEGVACLRKCGQS

SEQ ID NO: 17150 - protein, 189 aa, Zea mays
  VARIANT 23: note = Ancestral polymorphism is T, Derived polymorphism is I
  VARIANT 27: note = Ancestral polymorphism is P, Derived polymorphism is L
  VARIANT 36..189: note = Derived polymorphism lacks residues 36 to 189
  VARIANT 114: note = Ancestral polymorphism is R, Derived polymorphism is W
MLFKGWKRLIQDMIRREGPFLETACVPFAGLAILLWPFVVVGVVLTSILSSVPLGAYAAVVAYQSWSLILFMSHESSLILGIAYVFSSMSIFNEYTNDVLDMAPGSCFPRFKYWKGKDESSHGHNVPLLRPASFNREKQEGKRPPSRVTSFKNNIDDFNPFKVILLLINCQTAMPLLRLVLMGVSWGIK

SEQ ID NO: 17151 - protein, 980 aa, Zea mays
  VARIANT 132..980: note = Derived polymorphism lacks residues 132 to 980
  VARIANT 226..980: note = Derived polymorphism lacks residues 226 to 980
MLRAAAAAAAIFPARFAAAPAVAAAEELRSPLLRVIGTLRDGRGSVLLGRRVRFCSNSSASDTEAAVAEAEAKAEDASAAEGEADSKASSAIVPTSTNIDDCLSVIALPLPHRPLFPGFYMPINVKDQKLLQALIENRKRSAPYAGAFLVKDEEGTDPNIVTGSDSAKSIDDLKGKDLLKRLHEVGTLAQITSIQGDHVVLLGHRRLRITEMVEEDPLTVKVDHLKEKPYNKDDDVMKATSFEVISTLREVLRTSSLWKDHVQTYTQHIGDFNYQRLADFGAAISGANKLLCQEVLEELDVYKRLKLTLELVKKEMEISKLQQSIAKAIEEKISGDQRRYLLNEQLKAIKKELGLETDDKTALSAKFRERIESKKDKCPPHVLQVIEEELTKLQLLEASSSEFSVTRNYLDWLTVLPWGNYSDENFDVHHAQKILDEDHYGLSDVKERILEFIAVGKLRGTSQGKIICLSGPPGVGKTSIGRSIARALNRQFYRFSVGGLADVAEIKGHRRTYVGAMPGKMVQCLKSVGTANPLVLIDEIDKLGKGHSGDPASALLELLDPEQNVNFLDHYLDVPIDLSKVLFVCTANVIEMIPNPLLDRMEIIAIAGYITDEKMHIARDYLEKNTRQACGIKPEQVEVTDTALLALIENYCREAGVRNLQKQIEKIYRKIALQLVRQGVSNEPDHESVSASVTEESGNGDNTTTKDEILKDPAVEDASVTNNVTNPASEEANEENLTSEAAKEDSTSKGNKGTDGAADKAIEKVVVDSSNLGDFVGKPVFQAERIYEHTPVGVVMGLAWTAMGGSTLYIETKKVEEREGKGALVLTGQLGDVMKESAQIAHTVGRAVLLEKEPDNHFFANSKVHLHVPAGSTPKDGPSAGCTMITSMLSLAMGKPVKKDLAMTGEVTLTGRILPIGGVKEKTIAARRSAIKTLIFPAANKRDFDELASNVKEGLEVHFVDTYSEIYDLAFQSDAGTETS

SEQ ID NO: 17152 - protein, 149 aa, Zea mays
  VARIANT 34..149: note = Derived polymorphism lacks residues 34 to 149
  VARIANT 103: note = Ancestral polymorphism is S, Derived polymorphism is Y
  VARIANT 105: note = Ancestral polymorphism is D, Derived polymorphism is Y
MHTSSLSLSLSLSLSLSLSLLPGSRVNCSLVVEQQEPRRTAAAAARRDGRRQQQLIGVGGHGTGGAGCNVDHLRLAFVENKYGGMVPKKPLISKDQERAYFDSADWVLGKQAANSGTARAATAIEFLKPKLKRTPHHQLPPRKPTCASS

SEQ ID NO: 17153 - protein, 373 aa, Zea mays
  VARIANT 329..373: note = Derived polymorphism lacks residues 329 to 373
MASRDAASSPKSAPRRHGPAAPKNGADLLSPRFRSAAALAGWDEESVLLAAMVVDDTPVRDSRRKRRASTSSVGGSAGSSTRKRRPRRLSPAKIPPVVFALDDEKSDTAADSKSEVKAAKEEEKPVLVGDKEASGSGEKAVAAANMPCMDRLREELSCAICLDICFEPTTTPCGHSFCMRCLRHAAAKCGKRCPKCRQFISSSSKSCTINTVLWNTIQLLFPSEVEARKGSSSSPSPCDKDDVRANRFSQGGPGMRTRSRSSGSGFISSEGRTRSSFIEPGASANFIVSTYGSARSSNSRRGFVPASQLLLTRLEQSEDAAALAYRLQQEEFVNAFEEPEQERQPRDAVSTARDTLRAMASRAIRLRARGWPV

SEQ ID NO: 17154 - protein, 553 aa, Zea mays
  VARIANT 65: note = Ancestral polymorphism is R, Derived polymorphism is W
  VARIANT 73: note = Ancestral polymorphism is R, Derived polymorphism is W
  VARIANT 76: note = Ancestral polymorphism is A, Derived polymorphism is T
  VARIANT 250: note = Ancestral polymorphism is G, Derived polymorphism is E
MAPPSPSSAPAKKRINWLRGNNKVFDTYLSEARAALAAAAQDTDDAAAAAAALGLVTAALEMSPRAEAALELRARALLALRRYRDVADMLRDYIPSYARSCSGDDDATCASSSSSCSSASGDRDRSDACAGAARFLCCLHVSDLKRRLVASFCRSSSTEAQWRYLVLGRACFHLGLMEDAVVLLQTARRLATAAFRRESVCWSEDSFSPSNPLTANSAAASEAESVSQLLAHVKLLLRRRAAAVAALDAGLPGEAVRHFNKVLDTRRSVLPHPFATACLVGRAAAFRSAGRPADAIADCNRALALDPASIPALRARADLLESVGALPDCLRDLDHLKLLYDAALRGGKLRPQGGVQFGEIAGAHRTLTARIQLLRGRVAAGEGCGVDYYALLGVRRGCTRSELERAHLVLTLKLKPERSASFAERLELVDEHRDLEAVRDQARMSALFLYRMLQKGYSCIMSAVLDAERQRAKDAAAAIAEQEEEVATVQENATRKDGGNVVVTTKPEAIPMPRTAVAAATPLSQPFVFCRDTLLSRGGFDRPIPVKCEAMSC

SEQ ID NO: 17155 - protein, 1342 aa, Zea mays
  VARIANT 956..1342: note = Derived polymorphism lacks residues 956 to 1342
MPPHGPEEDAADAHLFAGVRFALHGFDQISASQFRLEIERCGGVHAGGWDADCTHVIVSNTLYDDPVCVAARKAGKKVVVDQWVEDSFDLGELADADRVLYAPVRDFKGIPGCDKLHICLTGYQKNWRDDIMKMVSLMGANFSKSLAANIITHLICYKFEGEKYELAKRVNIKLVNHRWLEECLKAWEILPVDHYTKSGWEVEIMGAQAKDSEDETEYAGTCSLSSRRIDRRTPIREISTKSHVDSALHAPSGGPTVSASNVVGATGKHLSTPEQFMKAHDASTKSSDIRTDSGTAPDTKCAAMSVDNDTLKPTRSHIYHNENDEVPADKASRDEAKDDHRRELDTRDSTLRTPSVHKSIAPTIPGDNIENTNRNCFHGFSQINVNSDLQLNSSEENFSKKILHSTNLSRKVDQKDDGHVPDPKPNISQSSVEENLNMCEFNPRSEGNSASRNDQPLGYSRRRSSKSGSLNVHRKKSILSSVSSKAPNEAPDSGSGISSATASDVGRSPTEPTKVDGHVNSGPTMNSTENQMSGCKSNLLSYRRTSLKLVSSAEVEKLPENSVNDKNMVEPDVVKTPALHEATTEEPSPSVCSEVRKESLGVHQNRDAEMTDAQLLSKTEDAAPCSKPDKVVSCQNSGLEGCKDVPVNKITDEHGIFPSKISTSRVKKVGAKRSRNAGSKAASEFTNSRSEVAALKPKHDKVASHENVEAQQGEGCCSPNAAECTPPSPAEALNNKSTNEVLTSSQGPNHKTNESLVASKAESVNMTLQRNKKGNRRKLPNTSNADENQRSSSRTVPNSKSGNLVAKGSRTADFNISDSPTVDETETVPSNSSFNEAVPPGNGEEKHKRLSSSANADDPEACTANKVPNNRVRKVVAKRKLSDVQSHKSGSEPCKTAKVLVSEVKVVSPARVAQSSRNANKVTVVQDLQNTNTGRTNDTVGSFCKDVTEDCSKDMQSSKTRSSRRQKIADLVDGSTDHDKENILVDSNFTSNTKRGNNSMSSKSNTKTLQSSKAVLDESSVIKRNGYGTLDVPEPTWFILSGHRLLRKEYRAILRRLRGRVCRDSHHWSFQATHLVTTEMRRTEKFFAAAAAGRWILKPDYLTASNEAGKFLEEEPFEWHGEGLNIGDTISLDAPRKWRQLRQRTGYGAFYGMQVIIYGECIAPTLDTLKRAIRCGDGTILATSPPYTRFFKSSVDFAVVSAGMPSADAWVQEFMRHSIPCISADYLVEYVCKPGHPLGKHVLFNMHDLAERSLQKLMKNQEDAPGSCSACGSDNREVPMLVCGGDGRSQSSGCGVRTHADCCNPPVEGCDGGEWLCGRCDQQKSAKKAKKTAAKPRVLKQR

SEQ ID NO: 17156 - protein, 429 aa, Zea mays
  VARIANT 141: note = Ancestral polymorphism is D, Derived polymorphism is E
  VARIANT 218: note = Ancestral polymorphism is G, Derived polymorphism is W
  VARIANT 225..429: note = Derived polymorphism lacks residues 225 to 429
  VARIANT 248: note = Ancestral polymorphism is S, Derived polymorphism is F
MTTAARERRLPPTLPLATLIGRELRAGGSERPALRYGHAGFAKRGEDYFLVKPDCVRVPGDPASAFSVFAVFDGHNGVSAAVYSKEHLLEHVMSALPPDIGRDDWLQALPRALVAGFVKADIDFQRKGEVSGTTATLVVIDGFTVTVASVGDSRCILDTQGGELQLLTVDHRLEENAEERERVTASGGEVGRLNLFGGQEVGPLRCWPGGLCLSRSIGDMDVGEYIVPIPHVKQVKLSNAGGRLIIASDGIWDALSNEAAAKACRGLPAELAAKLVVKQALKTSGLKDDTTCVVVDIIPSDHLTSPQLSPKKNHNKLKSLFRRRSHSSVGKLGGKSASIGSVEELFEEGSAMLEERLGRNLSLKAVSAPFRCAICQVDQEPFEDLMRDNGGGYCSSPCAPWGGPYLCLDCRKKKDAMEGKRSSCSTACR

SEQ ID NO: 17157 - protein, 124 aa, Zea mays
  VARIANT 119..124: note = Derived polymorphism lacks residues 119 to 124
MHRTSRTYLPERCSLEEEPPWSVQSALAAPFAEEALVAPSAGPEEMLFEATQSAKAASYAKSAQSARVALAALFAEDALVAPSAGPEEMLAEAAQSARDALVAPFTCAHGDICKAGYKRRSISL

SEQ ID NO: 17158 - protein, 243 aa, Zea mays
  VARIANT 127: note = Ancestral polymorphism is D, Derived polymorphism is G
MNLPAANLPVGMTFAPHAEDPSVERQSATTIELASCDAESPFASPAPLFALAAMANGAEAAGGETERIDLLAASKLEKGGATAEGDEIGIDPAAETPEQRNKFLVLRLYEALNARDHAAVQSLLAPDLEWWFHGPPKHQQHMMRLLTTTTTTTTTGSFRFVPRSVDALAASSGTVIAEGHERGCYWVHAWTVGPDGVITQLREYFNTDLTVTRLAAAVAAKCVWQSRRPDSATNSLPGLLLAL

SEQ ID NO: 17159 - protein, 204 aa, Zea mays
  VARIANT 4: note = Ancestral polymorphism is K, Derived polymorphism is E
MQIKGEAKRYVVKEDLKVRTKKTTDSIYKRVDEVWSEAEETSKKICFFLCSWIYEGTLFPLVGYCKYQRKKMFAAKEEVKESFGVRKEESTSCMDGSPEASKHEKTEASSHSNDTSEYATNIHTLFSKLKSTITSASPVVSGAFAKLKDTNLPKQGYGVIRGHPVYKRVDEYTKPVVTKGQEVADDVRERWETSDNPVVQKIQE

SEQ ID NO: 17160 - protein, 228 aa, Zea mays
  VARIANT 155: note = Ancestral polymorphism is A, Derived polymorphism is S
  VARIANT 154: note = Ancestral polymorphism is A, Derived polymorphism is T
MDLDIMAMPTTPKATTSSPAAYYVAKPPPPPPLGYAVHNKAAAAAYDSYDGRHGGMVATTTTTRSSSSAARHHHHHHHHQQPAGARALDGVLLLLRAAASVMAFVAVALVASCRHGDWMEFARYPEYRGLLGASALACAYSAAQATRGFRRMRASGRAGGGLADFAGDQVVAYLLITASAAALPITLRMRSAVLNVFTDAMTAAISLAFIAFAALALSAVLSAAAQPY

SEQ ID NO: 17161 - protein, 1334 aa, Zea mays
  VARIANT 128..1334: note = Derived polymorphism lacks residues 128 to 1334
  VARIANT 340..1334: note = Derived polymorphism lacks residues 340 to 1334
MMIKKKSGRCHLLAGHLELEDLTVDSTPLPFLPQGPNGQPIFFTVQRPGILRQPPAAGRRPPHCPSTAAVQSIVFLLLVSGTFVCVHVPQVILLSTWSRDPQATTATPSLQSVSDSFSTCISCASGQKLRIYPLLAAFEAFHNGSWHGANSIMIRDGGLLVKFVSSGYAVAVQHDIDGSYLRVRSRKATCSDCSHVLKPGADVCVWQAVYRGETKDSVLLCCRDARLIKIKRNHQSDRCLCLFAVIFYKDQCPGSKEKVISGTIADVVTIDDICILQNLQPEELQDGSVRWNSAVDCFHHNRSKLLSARFSLEVAYLIVLSSLRRMEFNIKMVDGNIIYQIIKGDQARDSIDSMSIPPGFGKNMDIISFKPRGEALRPITRTVPVTQVEEGNLTEDGCIAVKGESDSAQDVEILYAHVDIRRSKRMKTQPDRFTSYDARNFNRTYNKKEADGPSTKYEDSESGLSCDSSEQRESSDEEALENPRSMAAEHKYPVKRNQCSLPVKEKQISMEIKKNTTDQGCSDSYIPHTPAKNTERPRFRLKPFASSRSLDGNSEPAFCQKRGRKRKKHMCQIEYKRMIDQCIGNIQCEVERDSDFKFGDQILDGCVRAYQEVDFTWPSSADSQEEKDELDELWKEMDYALATVAILEQKQMTDSEVVHESNTDLGKGGEHCHHDCMLDEQLGLTCRLCNVVCIEAKDIFPPMFTGKDHERPERNHFGQDGHVLDLSFFEICAPEFSKIKESGNVWASITDLEPKLLAHQRKAFEFIWKNLAGSLQLEEMDGSTSRGGCVVAHTPGAGKTLLLISFLVSYLKVHPRSRPLVLTPKAAIHTWRTEFQKWGILLPLHVLHHSNRTSKLMGGLSSKLQAVLKSFHQPSWKTMRIMHCLDKLCKWHEEPSILLMTYSSFLSLTKEDSKLRHQAFITKVLMNNPGLLILDEGHNPRSNKSKLRKLLMKVKTEFRILLSGTVFQNNFEEYFNTLSLARPRFVNDVMTTLVTESEKRTRSRTGKHQEALARHVFVERVGHKIESSSKHDRMDGISLLNELTQGFIDSFEGTKLNILPGIRVYTLFMKPTDVQEEVLAKLLMPLSGNARYPLEYELLITIASIHPWLINTTKCASTYFTPAEVASVDKYKRNFAAGCKAKFVIDLLHKSSFRGERVLVFCHNVAPIAFLVTLIEIVFGWRLGQEVLVLQGDQELHVRSDVMDKFNSDRRGKRKVLIASTTACAEGISLTGASRLVMLDSEWNHSKTRQAIARAFRPGQERMVFVYLLVASGTWEEDKYNSNRRKAWIAKMVFFGRHFDDPLQNRVTEIDDEVLKELADEDETNTFHMIVKQD

SEQ ID NO: 17162 - protein, 1063 aa, Zea mays
  VARIANT 723..1063: note = Derived polymorphism lacks residues 723 to 1063
MRCLRFLRRGFLAMLPSKRSASADGGEPKRAKLGESPSAARVGTSNGTRNGAAPEIDEDLHSRQLAVYGRETMRRLFAADVLVSGLDGLGAEIAKNLALAGVKSVTIHDVKMVEMWDLSGNFFLSEQDIGKNRALACVSKLQELNNAVLVSALTEELTIEHLSKFQAVVFTDISLEKAYEFDDYCHSHQPPISFIKAQVCGLFGSVFCDFGPEFTVLDVDGEDPHTGIIASISNDTPAIVSCVDDERLEFQDGDLVVFSEVQGMTELNDGKPRKVKNARPFSFSVEEDTSSYGVYTKGGIVTQVKEPKVLRFKALRDAMRDPGDFLLSDFSKFEHSPVLHLAFEALDKFKKEHVRYPTAGCEQDAQSFLKFAADINEASVGSKLENIDEKLLRHFASGSRAVLNPMAAMFGGIVGQEVVKACSGKFHPLYQFFYFDSVESLPTYQLDPQDLKPSNSRYDAQISVFGSKLQKKLLDANVFIVGSGALGCEFLKNLALMGVSCSSKGKVTITDDDVIEKSNLSRQFLFRDWNIGQAKSTVAAAAAIAINPSLQIDALQNRASPDTENVFHDTFWDGLDVVINALDNVNARMYMDMRCLYFQKPLLESGTLGAKCNTQMVIPHLTENYGASRDPPEKQAPMCTVHSFPHNIDHCLTWARSEFEGLLEKTPNEVNSFLSNPAQYAAVMRKAGDAQARELLERVSECLDKERCNTFEDCITWARLRFEDYFSNRVKQLTFTFPEDAATSTGTPFWSAPKRFPRPLQFSATDSSHINFLMAASILRAESFGIAIPEWAKNTSKLADAVNKVAVPKFEPKKGVNIVTDEKATNLSSASVDDVAVINDLLAKLEEYAKGLPPGFQMKPIQFEKDDDTNFHMDLIAGLANMRARNYSIPEVDKLKAKFIAGRIIPAIATSTAMATGLVCLELYKVIAGEHPMEDYRNTFANLAIPLLSMAEPVGAKLMKHQDMRWTVWDRWTIRGNLTVAELLQWFSDKGLSAYSMSCGTCLLYNSMFARHKERLQRKVVDVAREVAKVEVPEYRRHIDVVVACEDDDGNDIDIPLVSVYFR

SEQ ID NO: 17163 - protein, 609 aa, Zea mays
  VARIANT 400..609: note = Derived polymorphism lacks residues 400 to 609
  VARIANT 431: note = Ancestral polymorphism is A, Derived polymorphism is V
MDTSGIVGSVDGHRPAASGAVACPASGVSGFITSTGGGGEPPPRDATLGRHLARRLVQVGVSDVFAVPGDFNLTLLDHLIAEPGLRVVGCCNELNAGYAADGYARARGVGACVVTFTVGGLSVLNAIAGAYSENLPVVCVVGGPNSNDYGTNRVLHHTIGLPDFSQELRCFQPVTCHQAVVNNLEDAHEQIDGAISTALRESKPVYMSVSCNLPGLPHPTFATDPVPYLLAPRPSNLTGLAAAVEATVSFLDKAVKPVVVAGPKIRVAKAAAAFVELAEASGYAVAAMPSAKGLVPETLPRFLGTYWGAVSTAFCAEIVESADAYLLAGPIFNDYSSVGYSILLRKDKAVVVQPDRVTVGNGPTFGCVMMRDFLSALAKRVRPNTTAYDNYRRIFVPGGQPPECEAGEPLRVNVLFKHIQRMLSGGSAVIAETGDSWFNCQKLRLPDGCGYEFQMQYGSIGWSVGALLGYAQGAPDKRVIACIGDGSFQVTAQDVSTMLRCEQRSIIFLINNGGYTIEVEIHDGPYNVIKNWDYTGLVDAIHNGQGRCWTARVATEEELTAAIATATGDDRKDCLCFIEVVVHKDDTSKELLEWGSRVSAANSRPPNPQ

SEQ ID NO: 17164 - protein, 700 aa, Zea mays
  VARIANT 636: note = Ancestral polymorphism is T, Derived polymorphism is M
  VARIANT 401..700: note = Derived polymorphism lacks residues 401 to 700
MFPIQFTMTKANSNPWQPAALDAEFSPQVAEMLRADQGRRELSSRVRSRDEDLRTAVKKHLLELGWTIVSMPNAAMLTRLRYKAPGDGGKSYYSLPDLVVDRAAAPHLILKSSGREELRYKAPTGRSYISLHTACQAFMAKASASNGNKIDGRVHATPATVLRAVRPTGKKRELSELIGDDAVKDVTMNRCTTIRKKEMVRADGTQVTKKSITTTTLTRSRREDQAPVLRPNSTGTGTASVCQPQHRSRTLLSVLIDSGILAPRGNVTYWAVRDGQPACKYGFITGEGIIRCKCCNKTFTVAELEAHATGGIGTDDRREAWARVFVEDGRSLSLCLMELMRRDDVGAAAANRNRNGSVMRVKEKCSEEEGDSVCSVCIDSGELLLCDKCPSAFHHACVGLQATPEGDWCCPLCRCGVCGGSDLDDDTAEGFTDKTIIYCEQCEREYHVGCMRRGGSEEESAAEWCRRLSESEGPEEEWRPWLCSPECGEVFQHLQALVASSRARSIPTTVEGVSLSTLRRRRYMSTVTRITRWQHEEEDAADHGQLCAALDVLHECFDDMVEPRTQTDLAADIVFNQESGLRRLNFRGYYVVGLEKAGELINVGTLRVFGNQVAELPLVGTRFAHRRQGMCRLLVTELEKMLRQVGVRRLVLPAVPELMPMWTASLGFHAMTRSDVMEMAVEHAILSFKGTTMCQKTLLA

SEQ ID NO: 17165 - protein, 1156 aa, Zea mays
  VARIANT 133..1156: note = Derived polymorphism lacks residues 133 to 1156
  VARIANT 556..1156: note = Derived polymorphism lacks residues 556 to 1156
  VARIANT 594: note = Ancestral polymorphism is N, Derived polymorphism is I
  VARIANT 619: note = Ancestral polymorphism is R, Derived polymorphism is C
MVHPSSSRCFLTAVLRSSSLLRTREDSSLRPWSARSISATCGENSASSAAGCHGFEFAFVMGVGRGGGGGASAPAASPADAIQMDAQISTHCGVPYTASLLAFDPVQRLLAVATLDGRIKIFGGDNIEGLLISPKSVPYKFLQFITNQGLLVAISNENEIQVWNLEFRQLFYSSQWDVNITAFAVIERTFMMYLGDENGLLSVLKYDVDDGKLQIMPYNVHIHSLIERSGVSLQDPQPIVGILIQPDTFGTRLLIAYERGLLVLWDVSEDRAVSVRGYGDLRMKGQINGAQGDSGEDQLNTTIDDSEEEREICSLCWASREGSTVAVGYITGDILLWDMTTKSSRQEKQSDVSSNVVKLQLASGSRRLPVIVLHWSAGSAVHSNKGGHLFVYGGDDMGSEEVLTVLSLESTAGLESVRCMSRTDLKLDGSFADMILIPDTGVPDKSRTSALFILTNPGQLNFYDGGSLFSVQNSKEGTPLPEAQKFPVAIPTLDPNITVTGLYSLTESEFPNISLKKFCARKNAGHFISENMKWPLTGGVPNEMSLDEDHAVERIYIAGYQDGSVRIWDATFPVLMPMFVLDGNVADVNLDGANASVSSLAFCSLSMTLAVGTTSGLVRIYKLREHTGGSSFHFVSEFKQEGGLLAAGYQNGQVAMLDPSQLSILFTVDGASGTNSPVVSLGIYSVAASAAKADQSKKDNPQNATLSRDVLLSLTKDARVTVLDCTTDAESDETQTQLSEDKIPSQGQTGKDGNDLDKIQTQGIEKHLKNASQLSQNAVFKNMDDKVCGLILAYQTGTIEMRFGPDLAIVAETSLMSLLRWSYKTGMEKSTSSSNGQVTLKTVTILWPSPSLNPTLAVALHTLLIYTMLPTLPAPSEAELATARAQEEAAQHREDAAAAEEMADLVNGSEFAIISLMASENDLRIPESLPCLHDKVLAAAAEAAMSFSTDQRRKQNPAAGIIGGFIKGMKGKAEENAKMRESLTLRAPSEQLESIFSKEPFAEPSIPDLDDPMEELSIDDIEIDDEVAVALAQAASSTSQGNKRTAVEEERAKLFEGSNSADKPRMRTQQEILTKYRFGGSMGWGAKCSRSIALQDAAAAAAHAKDKLMQRQEKLEVHIWLRISQQTAELQNGAENFASLAQELAKTMENKKWWKL

SEQ ID NO: 17166 - protein, 241 aa, Zea mays
  VARIANT 87: note = Ancestral polymorphism is C, Derived polymorphism is R
  VARIANT 28: note = Ancestral polymorphism is I, Derived polymorphism is T
MAGQSDPHLSIFSPSEVEFVAEDEIVEIVPNIRMDALNMICGDFGPFFPQIPTKVPLWLAVALKKRSKCTIRTPDWMTVGQCFLVACSPFIPAQAYTAITICCLLLFLLDRLTQVLEAERESPREFQPLPFHYIEISKLLFDHARDDISDAYLVRSLIEDIRDVRFHKVETGLETISGRTHAVKLKNLSAMEVNIVRPFMVRTLQAFYKHDSAQMIQQADNIGSRATLVTDRGPRRDLRRR

SEQ ID NO: 17167 - protein, 1286 aa, Zea mays
  VARIANT 246..1286: note = Derived polymorphism lacks residues 246 to 1286
  VARIANT 271..1286: note = Derived polymorphism lacks residues 271 to 1286
MLAARNPPPPPHDIAARLHHLRDLRRVPLPNRVARIADLHTDEASPVRKLVAEIIGELGSKHMRYLPDMIPCLLHLLNDETPAVVRQAVKTGTNLFAKVLQKLAIQGLFSNGGIDDALKSSWEWLLKFKSGVSHMAFQASPSFLFVTNNPIFSASSCLMWNLNVRPPAMKVSGYWLLSLLKKQFLCTHQILMSHLIRQLKQQKVWLIFPFIWKWTLFSMFRNFWVHVDLGICKTFADMAFNVAWLRGGHPLLNVGDLAMEASQSLGLLLEQLKSPKVKSLSTSMIIVFVTSLSAIAQRRPSFYGRILPVLLSLDPASSIIKLRVPGAFHALKSAFSACLKCTHSSAEPWRARLLEAQNIINQGGSIEDAANAAKNFGDTSNREESWPLMERSTDGSNKRSLAEDMNHVTEDDVHSTKRARQSIDANEHSEEANKTNFESMSVDISSSQPSSIRTGNSEAVYQLIGMFAALAAQGDRAAGSLQILSYSIASDLLAEVVMVNMQHLPISRPEVDQQQLPSTSSGDGLPLSSFSSLLGILLKGANQIDQDEVSPAKEPALVSSVADDRMILPANSPVPSSVNLPIEENSNSPTVPLCIETTEAKVTSAGGNSSIDIPESSEASHASTEPQGTQEHASTFAGPFPADNFSVGFSLAQSSETRSPSSSTLEANHSQLSSLSSQYVLPKLVVNNIDLSDEAKDLLQKEAFVRILESDKKEASGGSIARLPLLAHLGVEFPLEFDPWVILQKHILSDYANNEGHELTICILNRLYHEAEQDHDFLSSRTATSVYESFLLNIAENLRDMFPASDKSLGKLLCEIPYLPEGVLKLLESLCSPGSNERQDKDIQSGDRVTQGLSAVWNLIMLRPSNRDRCLEIALQSSTHHLEEVRMKAIRLVANKLFPMTSISKKIEDFANEKLNSVLEMTPSGDCVTTEMATPEAHKDIGLENLTASVTGMQTLMSLYFALCTKKHSLLRHVFAIYGNLPQAAKQAVHQQVPILIRTIGSSSDLLGIISDPPADCRDLLMQVLQTLTDAAVPSKDLISSIKILYSKTKVLPVFPSIVNLPIDKFQSAISRILQGSPRNGPSLDPSEILIAIHVIAPDKEGIPLKKVMDACSSCFEQRTIFTQQVLAKALNQLVEQIPLPLLFMRTVMQAIGVFPALVDFVMEIMSRLVSKQIWKYPKLWVGFLKCAILTKPQSYGVLLQLPAPQLENALSKNPTLKTPLAEHAEQPNIRSTLPRSTLVVLGLAEDQPQQPAVTQVQSSQNQAAETSSSAADTATEVTQESSGAS

SEQ ID NO: 17168 - protein, 445 aa, Zea mays
  VARIANT 271: note = Ancestral polymorphism is H, Derived polymorphism is L
  VARIANT 64: note = Ancestral polymorphism is A, Derived polymorphism is T
  VARIANT 59: note = Ancestral polymorphism is E, Derived polymorphism is V
  VARIANT 7: note = Ancestral polymorphism is S, Derived polymorphism is N
MEVKVQSSKLVKPAFIAAPPREHDDEYVPLSVFDTVTYQMQMAIIYAFPPPAPSTAAIEKGLAAVLAEYRTFAGQIRVPRDGGTAAVLLNDHGARIVEATVDANFVDLAPAKPTPELLLLHPDIEQELQEVVLLQLTRFRCGSLAIGFTSNHVAADGHATSNFLVAWGRATRGLPTGLPPPVYYQPGQFKPRPSPGPGRVVDDDFDHRSREYYHLPSPAADNNHGYGDEDVIDSIVIHKAHFTKEFIAGLRSRASEGRGRPFSRFETILAHLWRTLTRARALSPDETSQIRLSVDGRHRLGLPAEYFGNLVLWAFPTATVADLLAQPLKHAAQVIHDEVARVDGNYFRSFIDFATSGAVEKEGLAPSAVCKDVLCPNVSVDSWLTFPFCELDFGTGSPTYFMPSYYPSEGTLYLVPSFGDGSVDAFVPVFKHNLEAFKECCYHVE

SEQ ID NO: 17169 - protein, 885 aa, Zea mays
  VARIANT 353..885: note = Ancestral polymorphism lacks residues 353 to 885
  VARIANT 327: note = Ancestral polymorphism is M, Derived polymorphism is T
MASPAGGESPAKPVLLHGDLDLWILEARLLPNMDMFSEHVRRCFAACRPPSSCGTKHPPPAAAGRRHHHHHRNIITSDPYVTLSVSGAVVARTAVIPNSQDPVWEERFAVPLAHRAADLEFQVKDNDTFGAQLIGTVAVPADRVVSGDEVEDWFPVIGTNGKPYKPDTALRLRFKFQPIADNPAYRHGIAGDPDHRGIQDSYFPLRHGGQLTLYQDAHVREGDLPEIELDNGKTFQHNACWEDICHAILEAHHMIYIVGWSVYDKVRLVREPSPSRPLPEGGDLTLGDLLKFKSQEGVRVCLLVWDDKTSHDKFFIKTVRVGLWQLMMKKLGSFSNIPQSSVFSLLDMLAISSAFSNSRQVLGRNLWFSFFHGYWTELEEGTFLGWQVVGTLFTHHQKCVLVDTQARGNKRKITAFIGGLDLCDGRYDTPEHRLFKDLDTVFQNDYHNPTFSAGAKGPRQPWHDLHCRIDGPAAYDVLTNFEQRWRKATKWRDRFRRVSHWKDDALIKLERISWILSPSPNVPNNHPSLWVSKEEDHENWHVQVFRSIDSGSLKGFPSDCKAASKLNLVCRKNLVIDKSIHTAYVRAIRSAQHFIYIENQYFLGSSYAWPSYVNSGADNLVPIELALKIASKIKAGERFAVYVVIPMWPEGVPTAASVQEILFFQAQTMEMMYKIIADELKATDNKDMHPEDYLNFFCLGNREEPPSNGSPESEKSTDKSAAALASKYRRFMIYVHAKGMIVDDEYVILGSANINQRSLAGSRDTEIAMGAYQPHYAWSTKNGHPHGQVYGYRTSLWAEHLGTVDDRFKDPSSLECVRFVNQIAVENWQRFTAEEMSTLQGHLLKYPVKVEADGKISPLSDQECFPDVGGKILGAPTSLPDSLTM

SEQ ID NO: 17170 - protein, 220 aa, Zea mays
  VARIANT 33: note = Ancestral polymorphism is S, Derived polymorphism is L
MEKKQKQKKHARSRSFTGGGLASFLKSTVAFFSFTFPSASVGTRSSFNHRNGFSGPIVSIVPPEARGGGGRNRSGYMTPEPSSPKVSCIGQIKRSNSRRQRKVNPCGKNGGGACPLPPAPAEGKPRGSLVKRLSFFRRGRSRPRSRADGLVGNGKECDGGATAAAAAPAPAGLGQMRRFTSGRAAFQDLDWRQEWRRAGRVSDEEDEGILFFLIEITALR

SEQ ID NO: 17171 - protein, 894 aa, Zea mays
  VARIANT 612..894: note = Derived polymorphism lacks residues 612 to 894
  VARIANT 712..894: note = Derived polymorphism lacks residues 712 to 894
MALVSTATVASSSYHCDPHLFPGARRSWREPRWSRGGAGARLAVLQRAGGGGLAVLERAGAGAGSAVLERAGGAAAAAARREELVPSGNARNSYEVESLIDRLSNLPPRGSIARCLETARHRLTLQDFAAVYREFSRRGDWQRSLRLFKYMQRQSWCRPDEHIHAIVIGVLGRQGPALLDKCLEVFHDLPAESRTALSYTSLIAAYARNALHEEARALLDQMKATGVAPTAATYNTVLAACARATDPPVPFDMLLGLFAEMRHDASPSVRPDLTTYNTLLAAAAVRSLADQSEMLLHTMLEAGVSPDTVSYRHIVDAFASAGNLSRAAELFSEMAATGHTADASAYLGLMEAHTRVGATADAVAVLRQMQADGCAPTAATYRVLLDLYGRQGRFDGVRQLFREMRTAVPPDTATYNVLFRVFGDGGFFKEVVELFHDMLKTGVQPDMVTCENVMAACGHGGLHGDAREVLEYMTREGMVPTADAYTGLVEALGHAAMYEEAYVAFNMMTEIGSLPTLETYNALAFAYARGGLFQEAEAIFSRMSNNAGIQKSKDSFDALIEAYCQGSRLDDAVKAYMEMRKSRFNPDERSLEGVLNAYCIAGVIDESKEQFEELQSSVTMPSVIAYCMMLSLYARNDRWTDAYDLLEEMKTNRASSTHQVIASLIKGEYDDSSNWQMVEYVLENSTMEGCDYSFRFFNALLGVLWWFGQKGRAARVLDQAVKFGLFPELYRDTKLVWSLDVHSLHFRMSMGGALVAVSVWLNKLYDRLVEDEDLPQLASVVVLRGEMEKSTVTRGLPIAKVVYSFLNDTLSASFHFPKWNKGRIICLKSQLKRLQSAVDSSNGSLAAGFVDMTNSRLPAPGSKIYTSEDQLDNGSRHLPDEPLAEEKESELLAL

SEQ ID NO: 17172 - protein, 196 aa, Zea mays
  VARIANT 152: note = Ancestral polymorphism is A, Derived polymorphism is V
MAFASSLLPVPPYRVCATPASEVAAFSPAKKSVSLAAARQRRGSRHGVRAEVNESGSVLAVDALSQVKHVLLPVLDRNPYLSEGTRQAAATTASLAKKYGADITVVVIDDKPKESVPEHDTQMSSIRWHLSEGGFSEFRLMERLGEGQKPTVIIGEVADEWDLDLVVLSMEAIHSKHVDGNLLAEFIPCPVLLLPL

SEQ ID NO: 17173 - protein, 148 aa, Zea mays
  VARIANT 2: note = Ancestral polymorphism is A, Derived polymorphism is V
  VARIANT 9: note = Ancestral polymorphism is E, Derived polymorphism is G
  VARIANT 16: note = Ancestral polymorphism is K, Derived polymorphism is R
  VARIANT 52: note = Ancestral polymorphism is I, Derived polymorphism is T
MAFSGRIQELVRKYGKVAICVHLSVSCASIAGLYVAINNNVDVEAVFRRFGISPGVTVGGEASPAPVSRDEHLRDVPLPPMANEVLQEETERERQPRNRTMELVASSGGAFALAVVCNKALFPVRVPITIALTPPVARALSRWRLVKS

SEQ ID NO: 17174 - protein, 170 aa, Zea mays
  VARIANT 58: note = Ancestral polymorphism is S, Derived polymorphism is F
  VARIANT 109: note = Ancestral polymorphism is F, Derived polymorphism is S
  VARIANT 112: note = Ancestral polymorphism is V, Derived polymorphism is A
  VARIANT 121: note = Ancestral polymorphism is A, Derived polymorphism is V
  VARIANT 160: note = Ancestral polymorphism is T, Derived polymorphism is I
MIVCVAVVGHQNNPLYLQSFTEADDALKLHHIVHCSLDVIDERVLLGYCFFFSSERHSVVFLSASTFVLLTVSNPKRSAPTLNETFLGLLYPTENYKVYGYLTNTKVKFIMVTTDLDVKDADARNFFRKFHAAYVDAVSNPFHVPGKKIASRSFGARVSTIVKSFGSGTS

SEQ ID NO: 17175 - protein, 133 aa, Zea mays
  VARIANT 37..133: note = Derived polymorphism lacks residues 37 to 133
MSVGCASLAGGREIGPGLGLGDLFTEAELAVADHLVQLSGSGEGDETASGPESPRSVNTCAGVAAWEERAEVAGLGLGTMELDRRARKRCRLLSDVYAATRPVIGADAGNARKRKRGRRSATRRSVLLGSLAF

SEQ ID NO: 17176 - protein, 208 aa, Zea mays
  VARIANT 39..208: note = Derived polymorphism lacks residues 39 to 208
MENVYKATVGAIAQNGYYVAYDGWGNREEGNLVQPSMVSEYDLGGEGDLFKAPEAIIKEPLLLNCLSDSVHLLLSKKLQVNAEESSHDLANPPKVEEKLGVVPHGLSTDSEEQELLESLVKADTRRQERAKKMEEKKVYLQLYEAMEALVKIDLETNKIMDFIKFDVGNVVMVTGRRNTGRVGVIKNREKHKGSFETIHVLLGAFCYV

SEQ ID NO: 17177 - protein, 185 aa, Zea mays
  VARIANT 8: note = Ancestral polymorphism is S, Derived polymorphism is F
  VARIANT 16: note = Ancestral polymorphism is H, Derived polymorphism is R
MGATSFSFTTAAAILHLALLLAAARRHGATDYTVGDSAGWAIGPNYLIWSQKYNFTAGDTLVFNYVKEQHNVYQVTQDEFRTCEPPANQSTRVWATGHDLVNLTVPGDYYFLCNVAGHCLGGMKFSIAVAAPPPPPPPPPPPPALTPPPPPPPSSGCVPLISRRRAWAEVGRIPFLAAIGLLVLT

SEQ ID NO: 17178 - protein, 288 aa, Zea mays
  VARIANT 37: note = Ancestral polymorphism is K, Derived polymorphism is T
MSKGDVVIETAAEAEATAKAPYWDPPPAPLLDTSELKKWSLYRALIAEFMATLIFLYVSVATVIGYKSQSQAEACTGVGFLGVAWSFGATIFILVYCTGGISGGHINPAVTFGLFVGRKLSLVRTLLYIAAQCLGAVCGVGIVKAIMKHPYNSLGGGANEVATGYSVGGALAAEIVGTFILVYTVFSATDPKRTARDSFIPVLVPLPIGFAVFVVHLATIPITGTGINPARSLGAAVLYNQHDAWKDHWIFWVGPLIGATVAALYHKLVLRGEAVKALGSFRSTSATV

SEQ ID NO: 17179 - protein, 403 aa, Zea mays
  VARIANT 135: note = Ancestral polymorphism is T, Derived polymorphism is I
  VARIANT 47: note = Ancestral polymorphism is P, Derived polymorphism is L
  VARIANT 38: note = Ancestral polymorphism is L, Derived polymorphism is F
  VARIANT 35: note = Ancestral polymorphism is L, Derived polymorphism is P
MDGGSSTPASPPPTVSASAANMEEYRNWKKNAAVLYDLVISHPLEWPSLTVQWLPSESSARSHRLVVGTHTSDEAPNNLMVLDAVLPLPPRLAAAVAASGGAVPFPSVSVSRVAPHRGEVNRARCMPQRPYTVATKTCVDEVHVYHLGDDDGSGKSGAEVVLKGHEAEGYGLSWSPMKEGWLLSGSYDKKICLWDISSGSGAPVLDAQQVFVAHEDLVEDVAWHLKDEHIFGSVGDDCKLMMWDLRTNKPEQSILAHRKEVNSLSFNPFNEWILATASGDTTINLFDMRKLSRSLHTFDSHEAEVFQVEWNPNLATVLASSAADKRVMIWDINRIGDEQSEEDADDGPPELLFVHGGHTDKISELSWNPSEKWAIASVSEDNILQIWEMAESIYCDDLSMQVN

SEQ ID NO: 17180 - protein, 190 aa, Zea mays
  VARIANT 22: note = Ancestral polymorphism is I, Derived polymorphism is S
  VARIANT 24: note = Ancestral polymorphism is S, Derived polymorphism is A
  VARIANT 25: note = Ancestral polymorphism is G, Derived polymorphism is A
MARPREEELVEAALVAAAAALIVSGVKRLVAPPEPVAPWWWPASLSVPSPALFLLLNVIIASIVVASVQPRRGGAAASASSGGAIDDEREARGDAAKRRRSKSKSKSKKRTAAEAAIPDGCYMALVVTGEPIETAAVMEEVAAADEDAAAEVNKRAEEFISAFRHHLRVDSFSSTTTRRSNARAAAPCSI

SEQ ID NO: 17181 - protein, 373 aa, Zea mays
  VARIANT 243: note = Ancestral polymorphism is V, Derived polymorphism is L
  VARIANT 219: note = Ancestral polymorphism is G, Derived polymorphism is S
  VARIANT 218: note = Ancestral polymorphism is R, Derived polymorphism is H
  VARIANT 155: note = Ancestral polymorphism is A, Derived polymorphism is T
  VARIANT 132..373: note = Derived polymorphism lacks residues 132 to 373
  VARIANT 110: note = Ancestral polymorphism is S, Derived polymorphism is L
  VARIANT 72: note = Ancestral polymorphism is A, Derived polymorphism is V
MMHDFAVTENHAIIPDQQIVFKLQEMVLGGSPVVYDRNKTARFGVLPKRATDVSRLRWVDVPDCFCFHLWNAWEDEATGEIVVIGSCMTPADAVFNESAAGEESFRSVLSEIRLDPRTGTSSRRAVLSDADQVNLEAGMVNRQLLGRRTRYAYLAIAEPWPKVSGFAKVDLEAGTVEKFIYGDGRYGGEPCFVPHLNAPAGAAEDDGYVLCYVHDEGRGASEMLVVNARDMRAEAAVKLSGRVSYGLHGTFIASKNICSLQSGTALRVDAIKDVVKALKKRIGHRNPKVQLLALSIYSSILKDSYICPLPESVVPFDVYGVEDFKIEDTNVHNPTTHKFQEDPKSDPRHCKLQHEYEVFDLKTVPQNSRFTIN

SEQ ID NO: 17182 - protein, 639 aa, Zea mays
  VARIANT 240: note = Ancestral polymorphism is P, Derived polymorphism is L
MQQRNISSEVAVSDLRRTLESDEGTFSPRLLEMTDDRVLVSPVKAKQLKVYFRQRFKNVLNLEEAGAPNSVTVLPPSPTDVAAADTAPSEYPVSDVDVLEGSKMGVISTVLGFFGFGFGLSAGIVIGYFFFIYVQPTDVKDVKVRPLVEYDSKSLEGILPEIPLWVKNPDYDRIDWLNRFLELMWPYLNKAICRTAQDIAKPIIAENTAKYNIDTVEFETLTLGSLPPTFQEEQELIMEPSLKWAANPNITVVVKAYGLKATIQIVDLQVFASPRITLKPLVPTFPCFAKILVSLMEKPHVDFGLKLLGADVMAIPGLYIFVQETIKEQVASMYLWPKTLEVPIMDPSKASKRPVGILLVKVVRAQNLRKKDLLGKSDPYVKLKMSDDKLPSKKTTVKRSNLNPEWNEDFKFVVTDPENQALEVDVFDWEQAWLPVGKHEKMGMNMITLRELPPEETKVTTLNLLKTMDPNDVQNEKSRGELTLELIYKPFKEEDIEKEDTESADVIEKAPDGTPAGGGLLYVIVHEAQDLEGKHHTNPYAKIIFKGEEKKTKVIKKNRDPRWEDEFEFVCEEPPVNDKLHVDVLSKASKKGLIHGKETLGYIDISLADVISNKRINEKYHLIDSKNGQIQIELQWRTS

SEQ ID NO: 17183 - protein, 422 aa, Zea mays
  VARIANT 154..422: note = Derived polymorphism lacks residues 154 to 422
MARARGGAAWWVLAAAWVLWAAAAAAEAEARSPSARRVHRHLKRLNKPAVKSIEKPLTLQSPDGDIIDCVHISHQPAFDHPLLKNHTIQFRPAYHPEGLYDDTKSSIGSNNAGERPMLQMWHRNGRCPEGTVPIRRTKKDDLLRASSVRRYGRKRHTAPNPLSVDPNMLSEGGHQHAIAYVQGDKYYGAKATINVWEPKIQQANEFSLSQLWILGGSFGEDLNSIEAGWQVSPDLYGDNNTRLFTYWTSDAYQATGCYNMLCSGFIQINSEVAMGASIFPISNYAGSQYDISILIWKDPKEGNWWMQFGKEYVLGYWPSFLFSYLADSASMIEWGGEVVNSEPDGTHTSTQMGSGHFPEEGFSKASYFKNVQVVDSSNQLSAPKGVGTFTEQSNCYDVQNGNNGDWGTYFYYGGPGKNSNCP

SEQ ID NO: 17184 - protein, 218 aa, Zea mays
  VARIANT 58: note = Ancestral polymorphism is I, Derived polymorphism is T
MGRSPCCEKAHTNKGAWTKEEDDRLVAYIKAHGEGCWRSLPKAAGLVRCGKSCRLRWINYLRPDLKRGNFTEEEDELIIKLHSLLGNKWSLIAGRLPGRTDNEIKNYWNTHIRRKLLSRGIDPVTHRPINEHTSNITISFEDWGQGKALKCPDLNLDLCISPPCQEEEEAMLLRPVKREEAGLCFSCSLGLPKSADCKCSNFLGLRTAMLDFRRLEMK

SEQ ID NO: 17185 - protein, 249 aa, Zea mays
  VARIANT 183: note = Ancestral polymorphism is G, Derived polymorphism is R
  VARIANT 113: note = Ancestral polymorphism is A, Derived polymorphism is S
  VARIANT 108: note = Ancestral polymorphism is I, Derived polymorphism is L
  VARIANT 107: note = Ancestral polymorphism is Y, Derived polymorphism is C
  VARIANT 100: note = Ancestral polymorphism is E, Derived polymorphism is K
MARYDRAITVFSPDGHLFQVEYALEAVRKGNAAVGVRGTDTVVLGVEKKSTPKLQDSRSVRKIACLDTHIALACAGLKADARVLINRARVECQSHRLTVEDPVTVEYITRYIAGLQQKYTQSGGVRPFGLSTLIVGFDPYTDKPALYQTDPSGTFSAWKANATGRNSNSMREFLEKNYKETSGKETIKLAIRALLEVVESGGKNIEVAVMTKKDGLRELEEAEIDEYVAEIEAEKAAAEAAKKGGPRDT

SEQ ID NO: 17186 - protein, 252 aa, Zea mays
  VARIANT 37..252: note = Derived polymorphism lacks residues 37 to 252
  VARIANT 42: note = Ancestral polymorphism is C, Derived polymorphism is W
  VARIANT 64: note = Ancestral polymorphism is I, Derived polymorphism is T
  VARIANT 116..252: note = Derived polymorphism lacks residues 116 to 252
  VARIANT 169: note = Ancestral polymorphism is N, Derived polymorphism is T
  VARIANT 178: note = Ancestral polymorphism is A, Derived polymorphism is V
  VARIANT 185: note = Ancestral polymorphism is S, Derived polymorphism is N
  VARIANT 192: note = Ancestral polymorphism is Y, Derived polymorphism is F
  VARIANT 195: note = Ancestral polymorphism is Y, Derived polymorphism is F
  VARIANT 197: note = Ancestral polymorphism is L, Derived polymorphism is I
MASCRMALLLGLLLLVVASPAIADDDSGIYYQLALMWPGAYCEQTSAGCCKPTTGVSPARDFYITGFTVLNATTDAAVTGCSNKVPYDPNLITGIQGLNQYWSNIRCPSNNGQSSWKNAWKKAGACSGLSEKDYFETALSFRSRINPLVRLKAKGIEPDFGLYGLKAITKVFKSGINATPVIQCSKGPFDKYMLFQLYFCAAGNGTFIDCPAPQQYTCSKEILFHPFKKWMLKQQLNQDDDPFQLPGVAMDN

SEQ ID NO: 17187 - protein, 216 aa, Zea mays
  VARIANT 198: note = Ancestral polymorphism is A, Derived polymorphism is V
  VARIANT 188: note = Ancestral polymorphism is G, Derived polymorphism is R
  VARIANT 161: note = Ancestral polymorphism is S, Derived polymorphism is G
  VARIANT 84: note = Ancestral polymorphism is G, Derived polymorphism is D
  VARIANT 46: note = Ancestral polymorphism is I, Derived polymorphism is F
MLRKAVVAFIACTAFFLAFSAYSRRQGVAEVQLPAVTHRVYLDVEIDGQHIGRIVIGLYGEVVPKTVENFRALCTGEKGVGSNGKPLHYKGTPFHRIIPGFMIQGGDIVRGDGKGSESIYGGIFPDENFTVKHTHPGVVAMANSGLDSNGSQFYITTIKTSWLDGEHVVFGRVIQGMDTVYAIEGGAGTYNGKPRKKAVITDAGEIPKEKWGDQEA

SEQ ID NO: 17188 - protein, 533 aa, Zea mays
  VARIANT 8: note = Ancestral polymorphism is R, Derived polymorphism is W
  VARIANT 87..533: note = Derived polymorphism lacks residues 87 to 533
  VARIANT 90..533: note = Derived polymorphism lacks residues 90 to 533
  VARIANT 304..533: note = Derived polymorphism lacks residues 304 to 533
  VARIANT 312..533: note = Derived polymorphism lacks residues 312 to 533
  VARIANT 354..533: note = Derived polymorphism lacks residues 354 to 533
MAGTRWGRWLGLVTAVWVQCISGNNYTFSNYSHALKTLMGLTQLQLNGLSVAKDVGKAFGLLAGLASDRVPTWLLLAVGSLEGLLGYGAQWMVVSGAVAPLPYWQMCVFLCLGGNSTTWMNTAVLVTCIRNFRRSRGPVSGLLKGYVGLSTAIFTDTCSALFADDPASFLVMLAVVPAAVCALAMVFLREGAAAADEDDDGRCFAAINSLAVAIALYLLAADLTGLGGGGGVVFVAVLLVLLASPAAVPAILAWKSWAETRKAANADLEEADSLAAAAPLLLVAKEARAPGERPRLGEEHTIAQTLTSLDFWLMFASFLMGVGTGLAVMNNLGQMGVAMGYVDVSLFVSMTSIWGFFGRIASGTISEHFINAQDTRYSPPAVERSLAGPDGRRIHRDGAGDARLPLHRLGGRRHLLRRAAGGHRAHGVGAVRPQVLRSRLQRPHPQPAARLLPLLGPAGGPPLRRGSHRGARRRQHLRRRTLLPPRLPDHGARLRRRVRPRRPALRPDEEGVRQDPREQAVEQVSRGGEGGLA

SEQ ID NO: 17189 - protein, 200 aa, Zea mays
  VARIANT 93..200: note = Derived polymorphism lacks residues 93 to 200
MVSDLLHDVPNTSEAVPSSGARHAEEACTSEGWGKIPFGPLRSDAIIVEPPIAGLPRSAEVANLTSRCKGLKEEGVADRKEACRLRAEVLGLKAEADHREEVLRWAQEGLQAVTEERNSLAKSLEDDWSSGQALAAQIEGLEKSLEGMAWTVEQQGAEAVADLFQDLDVVGMPRVGPMRPCMQALGDFVWGELRRAVHLG

SEQ ID NO: 17190 - protein, 84 aa, Zea mays
  VARIANT 26: note = Ancestral polymorphism is A, Derived polymorphism is D
  VARIANT 34: note = Ancestral polymorphism is P, Derived polymorphism is S
  VARIANT 39: note = Ancestral polymorphism is R, Derived polymorphism is W
  VARIANT 43..84: note = Derived polymorphism lacks residues 43 to 84
  VARIANT 45..84: note = Derived polymorphism lacks residues 45 to 84
  VARIANT 51: note = Ancestral polymorphism is E, Derived polymorphism is K
  VARIANT 62: note = Ancestral polymorphism is E, Derived polymorphism is K
  VARIANT 63: note = Ancestral polymorphism is L, Derived polymorphism is H
  VARIANT 71: note = Ancestral polymorphism is Y, Derived polymorphism is C
MNPVGLGETRVAFKLQKDMFHYMALADDRQRIMPMPNDRLPPRGQPLAYPEAVLLVDPINPELRGEVDDKYQYSCEDQYNNVHG

SEQ ID NO: 17191 - protein, 160 aa, Zea mays
  VARIANT 7..160: note = Derived polymorphism lacks residues 7 to 160
  VARIANT 9: note = Ancestral polymorphism is S, Derived polymorphism is L
  VARIANT 18: note = Ancestral polymorphism is S, Derived polymorphism is F
  VARIANT 20: note = Ancestral polymorphism is R, Derived polymorphism is H
  VARIANT 71..160: note = Derived polymorphism lacks residues 71 to 160
  VARIANT 109: note = Ancestral polymorphism is A, Derived polymorphism is T
  VARIANT 147: note = Ancestral polymorphism is G, Derived polymorphism is R
MPPHATSSSTPRGLGFYSVRRSISFHAGAPALNKPTTSLSSAAVGGAGGSREQIRTGHPCAASRRNRPHPWPRSWLPTNVLGTVGDLIKSGAFRQVYLGMDLDSSEILAIKQAVLFDQRYIGTAWEENTLNILLEFVPGGSIQSLLRRLGSFPEVVLSLE

SEQ ID NO: 17192 - protein, 306 aa, Zea mays
  VARIANT 128..306: note = Derived polymorphism lacks residues 128 to 306
  VARIANT 134..306: note = Derived polymorphism lacks residues 134 to 306
  VARIANT 138..306: note = Derived polymorphism lacks residues 138 to 306
  VARIANT 143..306: note = Derived polymorphism lacks residues 143 to 306
  VARIANT 178: note = Ancestral polymorphism is G, Derived polymorphism is D
  VARIANT 236..306: note = Derived polymorphism lacks residues 236 to 306
MGSRSGRAGAARDGAQAQAPRRPPPRRAKVSPAPERTASAPHRSVAPISSSDVSLPTSSLDLPDVADLFAPPADNASRKRESNRSALHDSRNKFPMLGRKKISERMKLLQDLVPECSKITGKAVMLDEIINYVQSLQRQVEFLSTKLATVNPELGFDIEQIISKQVKPPTRSPYLPLGVIFKYALFSHVIVKSMTYQIHYWFPSILKEKSIVSLTVISAWLTEAHSDKITPHVVSWFTREATQDEEFEVMYGEDDDEDKDDEDDDDYDTKTKGAAGGGRAAENDLLSASRSECCTLNIDMHWLWSN

SEQ ID NO: 17193 - protein, 246 aa, Zea mays
  VARIANT 7..246: note = Derived polymorphism lacks residues 7 to 246
  VARIANT 10: note = Ancestral polymorphism is C, Derived polymorphism is R
  VARIANT 20..246: note = Derived polymorphism lacks residues 20 to 246
  VARIANT 47: note = Ancestral polymorphism is R, Derived polymorphism is W
  VARIANT 59: note = Ancestral polymorphism is N, Derived polymorphism is K
  VARIANT 71: note = Ancestral polymorphism is P, Derived polymorphism is L
  VARIANT 90..246: note = Derived polymorphism lacks residues 90 to 246
  VARIANT 105: note = Ancestral polymorphism is G, Derived polymorphism is D
  VARIANT 111: note = Ancestral polymorphism is Y, Derived polymorphism is C
  VARIANT 115: note = Ancestral polymorphism is H, Derived polymorphism is R
  VARIANT 126: note = Ancestral polymorphism is S, Derived polymorphism is L
  VARIANT 138: note = Ancestral polymorphism is P, Derived polymorphism is L
  VARIANT 140..246: note = Derived polymorphism lacks residues 140 to 246
  VARIANT 168..246: note = Derived polymorphism lacks residues 168 to 246
MYKSRLQELCQKRRWASSLYEPTREGPAHAPLFHATVIVNGERFSSRDEGEKSLKEAYNLTAMAAFDNLIPLPAVALAPAAPAPPPSETQLPYKSQLQIYAQKRGKLLPSYRLIRVGSLGAPLFKSEVTIDGQTFESPEYCHTIKEAETVAAKVALMSLPQEANPTQQLLVGLDVSNYSAGFVSTVEIQGVTFHGKRGNTKKQAEMNAAKSAFEHLKTDAGLVSLSRGDGKRRHNMRAAAQAALGA

SEQ ID NO: 17194 - protein, 143 aa, Zea mays
  VARIANT 90: note = Ancestral polymorphism is P, Derived polymorphism is H
  VARIANT 75: note = Ancestral polymorphism is A, Derived polymorphism is T
  VARIANT 69: note = Ancestral polymorphism is L, Derived polymorphism is W
  VARIANT 68: note = Ancestral polymorphism is G, Derived polymorphism is S
  VARIANT 66..143: note = Derived polymorphism lacks residues 66 to 143
  VARIANT 60: note = Ancestral polymorphism is L, Derived polymorphism is S
  VARIANT 59..143: note = Derived polymorphism lacks residues 59 to 143
  VARIANT 42: note = Ancestral polymorphism is P, Derived polymorphism is H
  VARIANT 34: note = Ancestral polymorphism is M, Derived polymorphism is I
  VARIANT 28: note = Ancestral polymorphism is C, Derived polymorphism is Y
  VARIANT 25: note = Ancestral polymorphism is A, Derived polymorphism is V
MTELQGLTSSLLPQDEGEVVSNAVADLCSQFVVMLILRGVKPVISGQVLLDNVDVKTLQLKQLRDQISLMNQELALFASTILENILDGKPDATISLKEKIQLHSTSLLFMEQIGADELMWSWDLTQHAAGEFSFAMVQANDML

SEQ ID NO: 17195 - protein, 119 aa, Zea mays
  VARIANT 70: note = Ancestral polymorphism is C, Derived polymorphism is F
  VARIANT 67: note = Ancestral polymorphism is A, Derived polymorphism is T
  VARIANT 45: note = Ancestral polymorphism is A, Derived polymorphism is V
  VARIANT 41: note = Ancestral polymorphism is A, Derived polymorphism is V
  VARIANT 38..119: note = Derived polymorphism lacks residues 38 to 119
  VARIANT 35: note = Ancestral polymorphism is A, Derived polymorphism is V
  VARIANT 33: note = Ancestral polymorphism is T, Derived polymorphism is M
  VARIANT 19: note = Ancestral polymorphism is R, Derived polymorphism is Q
  VARIANT 16: note = Ancestral polymorphism is R, Derived polymorphism is Q
  VARIANT 12: note = Ancestral polymorphism is L, Derived polymorphism is P
MVHLFLQGLDALLLLRLERPLEEGAAAVEAAVTVAGQQLDARVAALVRMLVAKGRAGMLAKALAEFAAICMLWTRGWSGCSSMAFVHHGCMLCTLLQANSATWRLAFVFWLRPCTTTEI

SEQ ID NO: 17196 - protein, 154 aa, Zea mays
  VARIANT 35..154: note = Derived polymorphism lacks residues 35 to 154
  VARIANT 65: note = Ancestral polymorphism is V, Derived polymorphism is M
  VARIANT 69: note = Ancestral polymorphism is S, Derived polymorphism is Y
  VARIANT 72..154: note = Derived polymorphism lacks residues 72 to 154
  VARIANT 101: note = Ancestral polymorphism is R, Derived polymorphism is W
MSKLDKWSELHGRPSTSDVPVEIEEPTNENSREEEHVDINADDNNEYFLGFLNVNDTSGLGLFSVLLDSMKSFGLNINDIRGQGYDNGSNMKGKHQGVQKWLLDINILGLRHGPDSYGRQQWGIFRNGGKPDGVMPRGGGRPTGRQLLFSEKKQ

SEQ ID NO: 17197 - protein, 513 aa, Zea mays
  VARIANT 201: note = Ancestral polymorphism is W, Derived polymorphism is S
  VARIANT 153..513: note = Derived polymorphism lacks residues 153 to 513
MAGGFAVSKSGADGREFKGRITWYVWMCGIVAATSGLMFGYDVGISGGVTAMDDFLELFFPSVYARKHRARENNYCKFDDQRLQLFTSSLYLAALVASFVASRACSRFGRKRTMQAASVFFLAGTALCASATNIAMLIVGRVCLGVGVGFGNQAAPLFLSEIAPAHVRGALNILFQLNVTVGILIASVVNYFASRAHPLGWRYALGGAAAPAAVLFLGSLAITETPTSLVERGRTDAGRRTLEKIRGTADVGAEFDEIRAACDLARALGEEEKPYRRLMRPESRPPLVIAIAMQVFQQFTGINALMFYAPVLFQTMGFETDGSLLSAVVTGSVNVVSTVVSIVLVDRVGRRKLLLEACAQMLVAQTAVGAIMLVHVRANNNPSQSWAVAIVVLICVYVSSFAWSWGPLGWLIPSETFPLETRTAGFSFAVSSNMLFTFLIAQAFLSMMCSMRAFIFFFFAAWIVVMAIFVLTLLPETKGVSIDEMVDRVWRRHWFWKRCFADDYDAARVYDNC

SEQ ID NO: 17198 - protein, 477 aa, Zea mays
  VARIANT 232: note = Ancestral polymorphism is V, Derived polymorphism is L
  VARIANT 226: note = Ancestral polymorphism is A, Derived polymorphism is T
  VARIANT 118: note = Ancestral polymorphism is D, Derived polymorphism is A
  VARIANT 83: note = Ancestral polymorphism is P, Derived polymorphism is S
MVSSKKVCVVGAGVSGLACARELLREGHDVTVMEQSGGVGGQWLYDPRADGGDPLGAAGAHSSMYASVRLISPRELTGFSDFPFFPRDDGTGDSRRYPGHAEFLRYIRDFCDAFGLMDVVRLNTKVLRVGLAAPRAADDGDGIKRWTVSWSRHRGCDGEVVTTEEEVFDAVVVAVGQYTQPRLPTIRGMDKWSRRQLHSHSYRVPDSFHGEVVVIVGFRHSGVDIALELSKLAREVHVSVKSMEALTPAVSKAVARHSDLHLHLQERKPCSYKSMLQYSLIECLREDGQVTFADGSRVAADSIIYCTGYDCSFPFLDTGGLVTVDDSRVGPLYEHTFPPALAPSLSFVGLPRMVLVPRFYEAQARWVAQALSGWRPLPPSEEMARSAEEYHRAREAAGVPRRLSHALFFDMDYCDEFGAKHCGFPPVEGWKRDLLSLSLASASDGAVESYRDSYHDSDLVREGLRSEGWWPWLPDPQ

SEQ ID NO: 17199 - protein, 258 aa, Zea mays
  VARIANT 243..258: note = Derived polymorphism lacks residues 243 to 258
  VARIANT 132: note = Ancestral polymorphism is A, Derived polymorphism is V
  VARIANT 80: note = Ancestral polymorphism is R, Derived polymorphism is C
  VARIANT 75: note = Ancestral polymorphism is R, Derived polymorphism is C
MASAAAATGDGEKAHAHLGQPLLVPPQPPQQPYYAYPAASYVQPAPPPPPAPTLVFVPSPCSPMLVRLRRLRPRRASCLRRFCARALPLLLFLALLAGLAFLLYPSAPAARVADLRVDSFRAQPPVLGLGLALRLRVSNPGFVLPLRYRAVSAAVSYRGHLLGAAKAWPGSGELAARNEVYADAEVWVDAGKVLDDVIELIGDVAAGSVPLEIVSEVVGSIKVFRFHIPVKVIGYSRLLAVDCYGLCYPPVTNSLELG

SEQ ID NO: 17200 - protein, 402 aa, Zea mays
  VARIANT 127: note = Ancestral polymorphism is T, Derived polymorphism is A
  VARIANT 172..402: note = Derived polymorphism lacks residues 172 to 402
  VARIANT 311..402: note = Derived polymorphism lacks residues 311 to 402
  VARIANT 346..402: note = Derived polymorphism lacks residues 346 to 402
  VARIANT 382: note = Ancestral polymorphism is S, Derived polymorphism is F
MNPPLTSPQTVPAEASTTSGVLMNPTFPSSTAPPAPSLVPPSPSVWITLLLRRPSPSLSLLNPKPVRSCLLPLAAWLVGSADHVFDGAANNEWIYGTVVRELVGTIGGGFNDTAFTYGQTSCGKTFAMNGSDADPGIIRTVRQADDREFLTRVFYMEIYNEEINNLLTLEGQKLRIHESLDVATLGNKVEKEMEDMAFFFAELALMQYGYGLVTRLPSLVAASAVYAIRLTVKRAPSGPTPSSTTLLCTRCRGGYSGYLSTMAAASSSSAGSFDGLMNTVIKKKLGIIPKDLKWGEQSDDVFDALAGDFMKPRIQEVDQLLKLGVNVTVYSGQLDLICATKGTMDWVQKLKWDDLNSFLSSPRTPIYCNKEGQSGTQAFVKFYKNLNFYWILEAGHMVINEW

SEQ ID NO: 17201 - protein, 904 aa, Zea mays
  VARIANT 115..904: note = Derived polymorphism lacks residues 115 to 904
MPSSTPCYRRSFLFLALLSACSSAPGTVDGAGTAGGGGDAAAMQALRRDLAPPGWGPGADHCAWRGVTCAGGGGAVTAIDLPRRGLRGDFAAAAELRELARLDLSANSLSGGVPQALGALTRLEFLDLSMNALAGAVPPALGGASRLRFLNLSNNALSGAIPDELRGLKGLQELQISGNNLTGALPGWLAGLPGLRVLSAYENALSGPIPPGLGLSSELQVLNLHSNSLEGSIPSSLFERGNLQVLILTLNRLNGTIPDTIGRCRGLSNVRIGDNLLSGAIPASVGDAASLTYFEASTNDLSGGIPAQLAQCANLTLLNLAYNRLAGEVPDVLGELRSLQELIVSGNGLGGEFPRSILRCRNLSKLDLSYNAFRGDLPENICNGSRLQFLVLDHNEFSGGIPAGIGGCTRLLELQLGSNNLSGEIPAEIGKVKSLQIALNLSSNHFTGPLPRELGRLDKLVVLDLSRNEISGQIPGDMRGMLSLIEVNLSNNRLAGAIPVFGPFQKSAASSFSGNAELCGDPLTVDCGSSIYGSSYGTETDHRGISYRVALAVVGSCVLIFSLVSLLVALFMWRERQEKEEEEAKKKAAEVAVAAAAPQVVASAVFVESLQQAIDFQSCVKATFKDENEVGDGTFSTTYRAVMPSGTVVSVKKLKSVDRAVVQQRTKVVRELERLAHIGHENLVRPIGYVLYDDVALLLHQHLANGTLLQLLHDNGERRKADWPRLLSIAVDVAQGLAFLHQVATVHLDVCSGNVFLDSRYNALLGEVEISRLLDPTKGTASISAVAGSFGYIPPEYAYTMRVTVPGNVYSFGVVLLEILTSKLPAVDEAFGEGVDLVKWVHAAPARGETPEQIMDPRLSAVSFAWRRQMLAVLRVAMLCTERAPAKRPRMKKVVEMLQEARDS

SEQ ID NO: 17202 - protein, 1077 aa, Zea mays
  VARIANT 573..1077: note = Derived polymorphism lacks residues 573 to 1077
  VARIANT 555..1077: note = Derived polymorphism lacks residues 555 to 1077
  VARIANT 532..1077: note = Derived polymorphism lacks residues 532 to 1077
MEGDADGVKSGRRGGGQVCQICGDGVGTTAEGDVFAACDVCGFPVCRPCYEYERKDGTQACPQCKTKYKRHKGSPAIRGEEGDDTDADSDFNYPASGNEDQKQKIADRMRSWRMNAGGSGDVGRPKYDSGEIGLTKYDSGEIPRGYIPSVTNSQISGEIPGASPDHHMMSPTGNIGKRAPFPYVNHSPNPSREFSGSIGNVAWKERVDGWKMKQDKGTIPMTNGTSIAPSEGRGVGDIDASTDYNMEDALLNDETRQPLSRKVPLPSSRINPYRMVIVLRLIVLSIFLHYRITNPVRNAYPLWLLSVICEIWFALSWILDQFPKWFPINRETYLDRLALRYDREGEPSQLAAVDIFVSTVDPMKEPPLVTANTVLSILAVDYPVDKVSCYVSDDGAAMLTFDALAETSEFARKWVPFVKKYNIEPRAPEWYFSQKIDYLKDKVHPSFVKDRRAMKREYEEFKVRVNGLVAKAQKVPEEGWIMQDGTPWPGNNTRDHPGMIQVFLGHSGGLDTEGNELPRLVYVSREKRPGFQHHKKAGAMNALVRVSAVLTNGQYMLNLDCDHYINNSKALREAMCFLMDPNLGRSVCYVQFPQRFDGIDRNDRYANRNTVFFDINLRGLDGIQGPVYVGTGCVFNRTALYGYEPPIKQKKGGFLSSLCGGRKKASKSKKGSDKKKSQKHVDSSVPVFNLEDIEEGVEGAGFDDEKSLLMSQMSLEKRFGQSAAFVASTLMEYGGVPQSATPESLLKEAIHVISCGYEDKTEWGTEIGWIYGSVTEDILTGFKMHARGWRSIYCMPKRPAFKGSAPINLSDRLNQVLRWALGSVEILFSRHCPLWYGYGGRLKFLERFAYINTTIYPLTSIPLLIYCILPAICLLTGKFIIPEISNFASIWFISLFISIFATGILEMRWSGVGIDEWWRNEQFWVIGGISAHLFAVFQGLLKVLAGIDTNFTVTSKASDEDGDFAELYMFKWTTLLIPPTTILIINLVGVVAGISYAINSGYQSWGPLFGKLFFAFWVIVHLYPFLKGLMGRQNRTPTIVVVWAILLASIFSLLWVRIDPFTTRVTGPDTQTCGINC

SEQ ID NO: 17203 - protein, 295 aa, Zea mays
  VARIANT 3: note = Ancestral polymorphism is R, Derived polymorphism is T
MNRPRCAPGLAALAVASSFLCFLSPPGAESAGVFTIINRCKTTIWPAATPGDSFGGGGFALRPGQSAVFKAPAGGWSGRIWGRTGCSFDASGNGTCATGSCGTSLRCGASGATPVSLAEFTLASDRDFYDVSLVDGFNLPVTVRPVNGRGGNCSAAGCDGDLRQTCPPELAVRAGDAVVACRSACDVFDTDQYCCRGKFGSQPTCPPTPYSKRFKDACPTAYSYAYDDASSLFTCSGADYIITFCASSRKQQACSYHNNRLVCSDASRRSWPTITSKLLLLLLPPIIFSALQFPV

SEQ ID NO: 17204 - protein, 94 aa, Zea mays
  VARIANT 83..94: note = Derived polymorphism lacks residues 83 to 94
  VARIANT 71: note = Ancestral polymorphism is R, Derived polymorphism is M
  VARIANT 48: note = Ancestral polymorphism is L, Derived polymorphism is P
MTAPKIGLVIVETPRVIKVCCLLRLLVGAYRVEELGFHILKLSLMEGLAIVETTRVIKVCCLLRLLVGAYRAEELGFHILKLSLMEGMGEEGKL

SEQ ID NO: 17205 - protein, 240 aa, Zea mays
  VARIANT 43: note = Ancestral polymorphism is M, Derived polymorphism is I
  VARIANT 79: note = Ancestral polymorphism is A, Derived polymorphism is D
  VARIANT 84..240: note = Derived polymorphism lacks residues 84 to 240
  VARIANT 122: note = Ancestral polymorphism is P, Derived polymorphism is T
MATKIFSLLMLLALSACVANATIFPQCSQAPIASLLPPYLPSMIASVCENPALQPYRLQQAIAASNIPLSPLLFQQSPALSLVQSLVQTIRAQQLQQLVLPVINQVALANLSPYSQQQQFLPFNQLSTLNPAAYLQQQLLPFSQLATAYSQQQQLLPFNQLAALNPAAYLQQQILLPFSQLAAANRASFLTQQQLLPFYQQFAANPATLLQLQQLLPFVQLALTDRAASYQQHIIGGALF

SEQ ID NO: 17206 - protein, 102 aa, Zea mays
  VARIANT 1: note = Ancestral polymorphism is M, Derived polymorphism is I
  VARIANT 29..102: note = Derived polymorphism lacks residues 29 to 102
  VARIANT 30: note = Ancestral polymorphism is A, Derived polymorphism is V
  VARIANT 43: note = Ancestral polymorphism is M, Derived polymorphism is I
  VARIANT 55..102: note = Derived polymorphism lacks residues 55 to 102
  VARIANT 62..102: note = Derived polymorphism lacks residues 62 to 102
  VARIANT 64: note = Ancestral polymorphism is Q, Derived polymorphism is R
  VARIANT 73: note = Ancestral polymorphism is A, Derived polymorphism is V
  VARIANT 78: note = Ancestral polymorphism is A, Derived polymorphism is G
  VARIANT 82..102: note = Derived polymorphism lacks residues 82 to 102
  VARIANT 87: note = Ancestral polymorphism is L, Derived polymorphism is V
  VARIANT 90: note = Ancestral polymorphism is S, Derived polymorphism is R
  VARIANT 91..102: note = Derived polymorphism lacks residues 91 to 102
MTTKIFSLLMLHALSACVANATIFPQRSQAPIAALLHPYLPSMIDSHQQLLPFSQLATAYSQLRQLLPFNQLAALNLAAYLQQQILLPFSQLAAASHASFLT

SEQ ID NO: 17207 - protein, 107 aa, Zea mays
  VARIANT 70: note = Ancestral polymorphism is T, Derived polymorphism is I
  VARIANT 64: note = Ancestral polymorphism is E, Derived polymorphism is V
  VARIANT 63..107: note = Derived polymorphism lacks residues 63 to 107
  VARIANT 58: note = Ancestral polymorphism is S, Derived polymorphism is L
  VARIANT 53: note = Ancestral polymorphism is R, Derived polymorphism is H
  VARIANT 47: note = Ancestral polymorphism is Y, Derived polymorphism is H
  VARIANT 32..107: note = Derived polymorphism lacks residues 32 to 107
MQGSYVYDINGNKYLDSLAGLWCTALGGSEPRLVKAATEQLNKLPFYHSFWNRTTKPSLDLAQEILSMFTAREMGKVFFTNSGSEANDSQVSLFYSPSVPSMITESV

SEQ ID NO: 17208 - protein, 121 aa, Zea mays
  VARIANT 2: note = Ancestral polymorphism is A, Derived polymorphism is V
  VARIANT 21: note = Ancestral polymorphism is A, Derived polymorphism is T
  VARIANT 90: note = Ancestral polymorphism is R, Derived polymorphism is G
  VARIANT 92: note = Ancestral polymorphism is Q, Derived polymorphism is R
MATKIFSLLMLLALSTCVANATIFPQCSQAPIASLLPPFLPSMIDSVCENSALQPYRLQQAIAASNLPLSPLFQQSPALSLVHSLVQTIGARQLQQLVLPVISQVALANLSPYSQQVVLPS

SEQ ID NO: 17209 - protein, 453 aa, Zea mays
  VARIANT 151: note = Ancestral polymorphism is D, Derived polymorphism is V
  VARIANT 79: note = Ancestral polymorphism is G, Derived polymorphism is D
MATRCHVLLLLAAAFASLLALVAAEGGEEGPRGRRLLVLLDDLAVRSSHSAFFGSLQARGFDLDFRLADDPKLSLHRYGQYLYDGLVLFAPSTPRFGGSVDQNAVLEFIDAGHDMILAADSSASDLIRGIATECGDPEAMVIDHMNYAVTDVEGDHTLIAGDDLIHSDVILGSEKIEAPVLFRGIGHMANPSNSLVLKVLSASPSAYSANPKTKLASPPSLTGSAISLVSVMQNPCMLPFILSDKFYVFLKARNNARVLLSGSLDLFSNRFLKSGVQKADSKTRYERAGNEQFVAEISKWVFHERGHLKAVNVRHHKVGETNEPGMYRINDDLEYSVEIYEWSGTSWKPYVADDVQLQFFMMSPYVLKTMSTDNKGLYSTTFKVPDVYGVFQFKVEYQRLGYTGLSFTKQIPVRPYRHNEYERFITSAYPYYTASFSTMGAFFVFSFVYLYHK

SEQ ID NO: 17210 - protein, 487 aa, Zea mays
  VARIANT 33: note = Ancestral polymorphism is L, Derived polymorphism is P
MAMRHRARSSPTSPLTPSSSARTNKILGFSVSLILINLASIMERADENLLPAVYKEVSAAFNAGPADLGYLTFVMNFLKSIASPLAGILALHYDRPIVLAIGTVFWALSTGAVGVSQRFGQVAFWRAVNGLGLAIVIPALQSFIADSYKDGTRGAGFGLLSLIGAVGGIGGSILATIMAGKDYWGFPGWRVAFMMVALVSLIIGILVYLYATDPRRIPGNRLLDEDEYERLHLSSKDVLPPPSIWRDSWVATRSVMKVKTFQIIVLQGIIGSLPWTAIVFFTMWFELIGFDNNSSAALNSLFAIGCASGAFIGGVIADHLSKYFPDSARVMCAQFSAFMGIPFSWILLTVIPQSVDYWYAFAVTLFFMGITISWCATSANNPMFAEVVPPKHRTMIYAFDRAFEGSFASLAAPAVGLITEKIYGYDTKTVNLANGSAEGAYALSRGLLTMMIVPFGVCVLFYSPLYLVFKHDRENAKFASFKEQELV

SEQ ID NO: 17211 - protein, 388 aa, Zea mays
  VARIANT 168..388: note = Derived polymorphism lacks residues 168 to 388
MASSSDEQSKPPEPPAAAAVVTAAAPPQTHAEWVASLQAYYAAAGHPYAWPAQHLMAAAAAGAHFGTPVPFPVYHPGAAAAYYAHASMAAASTCALPSELGFDLEAFLGVPYPTCEAVPAVALPTVPEGKGKGKGGGASPEKGSSGAPSGEDASRSDDSGSDESSETRDDDTDHKDSSAPKKRKSGNTSAEGEPSQATVVRYAAVESPYPAKGRSASKLPVSAPGRAALPSATPNLNIGMDIWNASPALAVPAVQGEDEREIKRERRKQSNRESARRSRLRKQQECEELARKVADLTTENSALRAELDNLKKACQDMEAENSRLLGGVADAQVPSVTTTLGMSIEPPKLQLQLQQHHDEEGQLHKKSSNNSNGNCAGGSHKPEANTTR

SEQ ID NO: 17212 - protein, 674 aa, Zea mays
  VARIANT 606: note = Ancestral polymorphism is V, Derived polymorphism is I
  VARIANT 622..674: note = Derived polymorphism lacks residues 622 to 674
MAAGGSGGEAAQKALQSVAQSTGWTYSLLWRLCPRQGALVWAEGYYNGAIRTRKTTMTTVRQPAGAEDAGDEETALRRSRQLKELYDSLAAGEAAYDGGGGVGDPQQQHQQQVAVVPPPRRPVAALAPEDLTETEWFYLMCASYCFPPAVGLPGEAFVRRAHVWLCGANKADSKVFSRAILARTVACIPVDDGVLEIGTTEKVEEDIFLIQHVRNIFVDQHGAHIMPTTLSGYSTSTPTTQLNHQPFQTKTGISLNLGDEHNSEMEDDDDGRIDLENNTENDSTRRHLPQDASVGNELETLNAESSGPMLIANLTAQDEYCPLHRFHSEDLSSKYLQSSGAEDQAAVAENAHYIKTVLTILRFNACRQTQAASSNIAKTYLALSKNSPFSKWNWKRKGISSMLIPEGTQQRMLKSVLLGAPSSSSHRTSSSAPETRGDDGEGTSRSRRGPVPSQTELSASHVLKERRRREKLNEGFAMLRSLVPFMDRASILGDTIEYVKQLRRRIQELESRARLVGSNQKTTMAQPPPPAASTEERGRRQTSGGYLARAGTCSRAAEASGNSNLGEEPPAAAASDTDTEVQVSIIGSDALLELRCPHREGLLLRVMQALHQELRLEITYVQASSAGDVLLAKLRAKVKEVHGRRSSTTEVKRAIHLIVSSDWNWICEKNPCVA

SEQ ID NO: 17213 - protein, 364 aa, Zea mays
  VARIANT 133..364: note = Derived polymorphism lacks residues 133 to 364
MSLYLAPTAAAATTTTTTLPRQLLPAPSIDLRRLERRGMALPLPPAPAPPPPLVSANNRHAGAKHKAVVVMGATGTGKSRLAVDLALRFGGEVINSDKIQLHAGLDVTTNKVTEQERAGVPHHLLGVARPDEEFTAADFRREATRAARAITARGRLPIVAGGSNSYVEELVDGDRAAFRDRYDCCFLWVDVQRAVLHGCVARRVDEMRARGLVDEVAAAFDPRRNDYSRGLWRAIGAPELDAYLRWPGPGVDGDAESEGERDRLLAAAIEDIKSNTRRLSCRQRAKIQRLAKMWGVRRVDATEVFRRRGDEADEAWQRLVAAPCIDAVRSFLRTDDAAATVASDLAVDGVVPVFAPAPAAAVAG

SEQ ID NO: 17214 - protein, 305 aa, Zea mays
  VARIANT 150..305: note = Derived polymorphism lacks residues 150 to 305
MERVRDRHQRSPTHLLRDPRHCCIRCRRRLWRRSTLRLTSRIEVAAAGGSGSARQTPCPGSSCRCSGSSINCRRLGRGSNNNQAQGPKFINLAQLHKRPTTGLRLELDEGSEHVPCTAPSSAALPLACCSCAWSVALSRSASMRPRSQSSPTLRPGSRSSPTLSMEGDRGIRVRYGEQHAADSGIQGLAFSISVTTTVLPCFTYIMIIGNELYGGKGTVGSNISELVLDKEAMDAANDEEERWEGEKYSYGGKLLLATTKLQDPGTCRLCGSPRQYELQLMSSLSTFSMKLEMTPQIMYPAAGLG

SEQ ID NO: 17215 - protein, 157 aa, Zea mays
  VARIANT 147: note = Ancestral polymorphism is S, Derived polymorphism is F
  VARIANT 142: note = Ancestral polymorphism is G, Derived polymorphism is R
  VARIANT 128: note = Ancestral polymorphism is A, Derived polymorphism is T
  VARIANT 117: note = Ancestral polymorphism is T, Derived polymorphism is M
  VARIANT 112: note = Ancestral polymorphism is V, Derived polymorphism is F
  VARIANT 104: note = Ancestral polymorphism is T, Derived polymorphism is K
  VARIANT 103: note = Ancestral polymorphism is P, Derived polymorphism is H
  VARIANT 97: note = Ancestral polymorphism is A, Derived polymorphism is T
  VARIANT 93: note = Ancestral polymorphism is T, Derived polymorphism is I
  VARIANT 82: note = Ancestral polymorphism is W, Derived polymorphism is S
  VARIANT 77: note = Ancestral polymorphism is P, Derived polymorphism is L
  VARIANT 75: note = Ancestral polymorphism is I, Derived polymorphism is S
  VARIANT 66: note = Ancestral polymorphism is A, Derived polymorphism is T
  VARIANT 54: note = Ancestral polymorphism is A, Derived polymorphism is V
  VARIANT 33: note = Ancestral polymorphism is A, Derived polymorphism is V
  VARIANT 23: note = Ancestral polymorphism is Q, Derived polymorphism is R
  VARIANT 6: note = Ancestral polymorphism is P, Derived polymorphism is L
MATAAPASVKGFNCAANRMYPCQAYALYHAGFAGVLLDLTAISDLFVVSRFMVAHPNNLSTTAAPANEQPLLYQIGPGDTCWIVSTTKLHNLTQYQAMERVNPKLVPTDLDVGTMVTFPIFCQCPAAADNATTLVTYVMQPGDTYVSVATAFSVAYP

SEQ ID NO: 17216 - protein, 519 aa, Zea mays
  VARIANT 126: note = Ancestral polymorphism is G, Derived polymorphism is R
  VARIANT 198: note = Ancestral polymorphism is R, Derived polymorphism is W
  VARIANT 375..519: note = Derived polymorphism lacks residues 375 to 519
  VARIANT 406: note = Ancestral polymorphism is A, Derived polymorphism is V
  VARIANT 429..519: note = Derived polymorphism lacks residues 429 to 519
  VARIANT 437..519: note = Derived polymorphism lacks residues 437 to 519
MQNCNGHHNHGGSVPHYPVPRRRQAVCPLVPVPLILLSPPDHRRPPPSIPHRRGVEDSEEAGGVHVPSGGELRTVTLPDAMLSYFDPADGELRTVTVAELTAGKKVILFAVPGAFTPTCSQKHLPGFMEKAGELKAKGVDTVACVSVNDAFVMKAWKELLGLADGSGVLLLSDGNLELTRALGVEMDLSDKPIGLGVRSRRYALLAEDGVVKVLNLEEDDAFTTSSAEEMLRLACSDAVAAERAITCGFCGLHAVAVAQVGDAKRLACSDPVAGTRFLGTYWGTVSTAFCAEIVESADAYLLAGPIFNDYSSVGYSILLRKDKAVVVQPDRVTVGNGPTFGCAMMRDFLSVLAKRVRPNTTAYDNYRRIFVPGGQPPECEAGEPLRVNVLFKHIQRMLSGGSSVIAETGDSWFNYQKLRLPDGCGYEFQMQYGSMGWSVGALLGYAQGAPDKRVIACIGDGSFQVTAQDVSTMLRCEQRSIIFLINNGGYTIEVEIHDGPYNVIKNWDYTGLVDAIHNG

SEQ ID NO: 17217 - protein, 449 aa, Zea mays
  VARIANT 341: note = Ancestral polymorphism is S, Derived polymorphism is W
MLMNGRIGPNTLPFPGRVSDGRSPNPASTTHHSPPTHLSCPATPPAMALCAAAASTATASASAHLSASTARPRGPSSTSLPSSFVGAFPCAVAARTRRRRAAAAAARATVTVRAEARKSVLIVNTNGGGHAVIGFYFAKELLAAGHAVTVLTVGDEASDKMKKPPFSRFSELTSAGGRTVWGDPADVGAAVGGASFDVVLDNNGKDLDAVKPVADWAKTAGVGQFLFISSAGIYKPTEEPPHVEGDAVKESAGHVGVEKYIAEQFGSCWASFRPQYMIGSGNNKDCEEWFFDRIVRNRPVPIPGNGMQLTNVAHVRDLSSMLSLAVEKPGAAAGRVFNCVSDRAVTLAGMAKLCAAAAGADAVDIVLYDPAAVGVDAKKAFPFRNMHFYSEPRAAKEALGWTSTTNLPEDLKERYAEYAASGRGDKPMAFDLDDVILAAVGKAPASVAV

SEQ ID NO: 17218 - protein, 203 aa, Zea mays
  VARIANT 186: note = Ancestral polymorphism is A, Derived polymorphism is T
  VARIANT 164..203: note = Ancestral polymorphism lacks residues 164 to 203
  VARIANT 14: note = Ancestral polymorphism is R, Derived polymorphism is C
MCDLVARTGRHLQRYENGRRLVAGCIPFRYRDINDGASDDEQKKLVEVLMISSQSGPGLLFPKGGWENDETVEEAAAREAIEEAGVRGDLVSSYLLPHVLTPQHFTDGALLCFVHKATAGVLRFQEQAARSNVQSRNLRPAREGRASLLARTEHPAEELAHRSRGGGAEPLPVDAGGPRDRLLRLARELEKRWWRRRRLRGPN

SEQ ID NO: 17219 - protein, 1779 aa, Zea mays
  VARIANT 1662..1779: note = Derived polymorphism lacks residues 1662 to 1779
  VARIANT 230..1779: note = Derived polymorphism lacks residues 230 to 1779
  VARIANT 156..1779: note = Derived polymorphism lacks residues 156 to 1779
MDPAAGGGRGRDRAGFERACRLPNTVHSEVLPSLPLPTLPRELGFDALRDDEPLAAPDRPDTIMQAANIARVLADTDVSHLGFTAADNVDVDPIRCSWLWREVLKHNPDAFKVKAPSPSSQGPFGGPGYQNQEHEKHFEHFTPNTSKARNESAFPQDEIDSHREHFYNELTSDSIASKKPKIRKRENNNSVSSSAPSIPNTQDVITTFCEVVEDFCGKTEIPDDGDGGDWLSIPLGDVKVLVNEITSVRSKRILHEVPMDTVTRLLDVIDRQIRYSQGLSIDVKENSDVVDAEPLVFSALEASHAALAIMTHHDMPKQLYREELIERIIDFSRHQITDCMAASNPTFRALYKPAENVANDGDDDEDDLENGQVSKRRRTATNLSMRKSSNKLSASVYSAVQKLCLILGFLKELLTTVRLSDGCILQLAKTCFTTFLVDNMQLLQLKAIGVICTVFSSYTQHRSYLVDEILHLLRKLQFSKNAVRTYHLADEDQKQIQMITALLVHLVQFSAIVPNSLKGTVDWTTIVDASGDADYYPIKCHEAATEACCRFWTDVLQRFTAAKSQDMSETKGIIDNLVQDFLMILNLPEYPAAASILEVLCVLLLQNAGLKSKDTNVRCFAIDLLGGIASRLKHDSVICSEEKLWILQDLTDAGSDGSKILKNKCCVCLGGRGINIACNECGRCFHSDCMGAASQDNLERDSVCPLCFCKQQLNVLQTYCQSQIKENGKKTAASTSKKSAKPAEVPAVDIIQQILLSYLQESGPQDDGNLFTRWFYLCIWNKENQHSQEEIIYYLARLKSKEILRDSGNGLAISRDSAKKICLALGQKNSFCRGFDKILALLLASLRENSPVIRAKALRAVSSIVEADPEVLGDKRVQSAVEGRFCDSAISVREAALELVGRHIASHPDVGLKYIEKVAERIKDTGVSVRKRAIKIIRDLCASNPNTDTTHAFVEIISRVNDEESSVQDLVCKTFYELWFEEPTGSHKHLVADGSSVPMEIAKKTEQIVDMLRKMTNHQPLITIIKRNLTLDFLPQSTKAAGINSYMVASIQKRCELICKRLLERILQVEEGAAKEMEIHMLPYIVALQAFCIVDPTLCIPVTDPSKFVVTLQPYLNIQVDSKSAAQLLESIIFVIDAVLPLIRKPTQNVVEELEKDLKHMIVRHSYLTVVHACIKCLCALSESAGRGPGLVENLVNIFYKHLSGANSDSQLLGRSLFCLGLLLRYGYQLMQTSENQLDFPKIINLLQRKYLLRDDFSLKVRALQTLGYILIAKPEFMLQKDMLKLIETALSSEVDYRLKIQGLQNLYEYLRDAESQLTAESTVKPPVRCEINGRSKVPVAAGAGDTNICGGIIQLYWSSILERCLDTNDQVRQSALKIVEVVLRQGLVHPITCVPHLIALEMDPLEGNSKLAHHLLMNMNEKYPLFFESRLGDGLQMSFKFFESIVSNHKMAANIKSNPIAFVKPGISRIYRLIRSNRNSRNKFVHSIVRKFESDSRSRSTVSFLVYCAEVLASLPFTCSDEPLYLIYDINRIIHLKAGGVESNLKRWTSMSQSQNTVDMPTLPGERHVVMQEPGGYYDNVGYAHERVNANPCSTSDVDMAKVQVDVDMAKVQGDCLDAIALQLLLKLKRHLKVVYSLDDARCQSFSLKEPPKSGETFSRQNIPFNVSSTNISLPSCLQDVASVYQDFKTVLHEDSMDFAVFIPSVQIRKRPTPRNTTNPTPRSTTRVRRTAASSVTKARGGARGDDSDDSDDDDWTGGPRVLDFSGGGRVTRQRVQV

SEQ ID NO: 17220 - protein, 436 aa, Zea mays
  VARIANT 214: note = Ancestral polymorphism is H, Derived polymorphism is Y
MADHDLTALMAAQLDRHLVFPLLEFLQERQLYSRPEILEAKIRLLSGTNMVDYAMDIHKSLHGTDDVPEDMVKRRSEVVSRLRSLDEAAAPLVAFLQNPQLVQELRPDKQYNIHMLQERYQIGPDQIEALYQYAKFQFECGNYSWAAEYLYQYRALCTDTERSVSALWGKLAAEILMQNWDVALEEFNRLKEIIDSKNFSSPLNQLQNRIWLMHWALFIFFNHENGRNGIIDLFFQDRYLNAIQTNAHHLLRYLATAVVVNKRRRNMLKELIKVIQQEQHSYKDPITEFLQCLYVNYDFDGAQQKLVECEQVILNDPFLGKRVEEGNFVTVPLRAEFLENARLFIFETYCRIHRCIDISMLAQRLNMSYDEAELWIMNLVRSSKLDARIDSVSGTLIMTTNHINVHEQIIESMKGLNMRTYMLAKNIVEPAQQAAR

SEQ ID NO: 17221 - protein, 323 aa, Zea mays
  VARIANT 191: note = Ancestral polymorphism is I, Derived polymorphism is S
  VARIANT 193: note = Ancestral polymorphism is A, Derived polymorphism is T
  VARIANT 206: note = Ancestral polymorphism is D, Derived polymorphism is E
MRVAASQLPLPTTTPARRRRRASAPPTAAPRPPPRALAAILRSRVIACLRAQDSETALQAAHAAVHGGITVSVLGDFNIGMTAKLTSGRCAVVHFDSTAISSYLAQFFTLSPSHSHAEQRICPLSKINRAWDSRLGYRVIRCSCMLLRPSLEVVMTTPGVLEVIEDLCRSYPSLTFGVGTVLNAADARKAICAGAQFLMSPGTVLDILHDLKESNVLYIPGVLTSTEVLSACSAGAKVVKVYPVSVMGGEMYMSALKKPFPLVPMVASQGIKIGSIKGYMEAGASAVVLSDAIFDSQLMRDGKFNEISELANLATLEALQFTK

SEQ ID NO: 17222 - protein, 1037 aa, Zea mays
  VARIANT 172..1037: note = Derived polymorphism lacks residues 172 to 1037
MLMWYFKPCLYMDVGLASAVTALRTCTDVAHLAHVLEQFRLARCGKLVRDARAVAPSRASASTSSSLGVELELSMHAGGPGSRISNIWLLFRLKTVSVRLSRDDSLRPCQALLSRYSETVVPLIRRFCSTPIKVEEVANIEADGKVSYLDAAALPCDNSDCRGEPSHGSRPWTKRLKHYGPSQKGNRNHHETKLPGSGRDGSSRKGSHPQKGKTKLPGSGRDGSSRKGSHHETKLADRDELIQKGSHHEKELADTPFKPFLFQIVLDTSMSSLMPVLDGWVKIGNRLERDKVNMVLFHLRKQRMYNKALKFVEWIERRKLLNFEERDYASHLDLIARNYGVEAAQKYIERVPEAFRSEVLYETLLVNCVCRDDAQKAEQVFNEIRELSLPLTISACNQMLLLYKRVSRNKVVDILTLMEKENIKYSIFTYKLMIDLKVRSNDILGMEQVLNSMKENGLEPNFTIQTMVAKFYISGCFTEKAEEVINAMEVHVKANRHAVRSLLDLYAILGRPVDVERVWNLCAEPKLEDFLAAIKAWSKLGHIERAEEIFDVLVKTFPKLTSKYFNAMLEVYAENKLLDKSKKFIERMCLDGCTIGPLTWDAVVKLYVNLGELSKADSFLMNVTEDNPDRHPLFSSYVILLKAYAEKGDIHNAEKIFDRVKQTNFPARTLPYNLLLAAYASAQVTPYGFRERMKADKFSPGKSQIEQLKQLDSFAYALQVGLNENSKGEFWEGLEDMVSSVPVGKKLFIGDLNNHVGTSSTSFDGVYGGFGFGTRNQEKEILNFALAYDMFIANTFFRKRKSHLVTFSSGQHTSQIDFVLLRKEDRHVCLDCKVIPGECVICLQRNKHNKLTRIKWWKLKRDVAQTFKERVIEEGHWAEERDTNVMWRKMATCIRKIASEEFGLSQGNRREVKDTWWWNEDVQKAIKEKKDCYKHLHHDKCANNIEKYRIAKKSAKRANEEIKNKWKEYFNKLFNGGNESSTIELDEPFDDNNMGFVRRIQEYEVKEALKRMKVGRAMGPDGIPIEVWRCLGDIAIV

SEQ ID NO: 17223 - protein, 131 aa, Zea mays
  VARIANT 76: note = Ancestral polymorphism is S, Derived polymorphism is F
  VARIANT 15: note = Ancestral polymorphism is Q, Derived polymorphism is L
  VARIANT 2..131: note = Derived polymorphism lacks residues 2 to 131
MRALEKVIITKLTTQCSEKAFELELKLADNRVLQEQLLQKKKITLNNNSTKVDISSEKEVDCAQQETIDLKSKLQFKEAKIEKMKYEHLTREAALTENKLLEEEYKKKLDEANKELSLENDLAACEFLLLS

SEQ ID NO: 17224 - protein, 83 aa, Zea mays
  VARIANT 81: note = Ancestral polymorphism is R, Derived polymorphism is W
  VARIANT 75: note = Ancestral polymorphism is G, Derived polymorphism is R
  VARIANT 62: note = Ancestral polymorphism is L, Derived polymorphism is M
  VARIANT 58: note = Ancestral polymorphism is T, Derived polymorphism is A
  VARIANT 57: note = Ancestral polymorphism is S, Derived polymorphism is L
  VARIANT 47: note = Ancestral polymorphism is F, Derived polymorphism is S
  VARIANT 36: note = Ancestral polymorphism is F, Derived polymorphism is S
  VARIANT 33..83: note = Derived polymorphism lacks residues 33 to 83
  VARIANT 17: note = Ancestral polymorphism is S, Derived polymorphism is P
  VARIANT 8: note = Ancestral polymorphism is N, Derived polymorphism is D
MIKKFNPNVWELPEKMSLDALMLEPVNKDFWGYFGFNVKLSGFEATSIYDLLRHFISTCHCLKLGHALESSEMSRTYKAMRLM

SEQ ID NO: 17225 - protein, 139 aa, Zea mays
  VARIANT 39: note = Ancestral polymorphism is S, Derived polymorphism is N
  VARIANT 35: note = Ancestral polymorphism is V, Derived polymorphism is A
  VARIANT 32: note = Ancestral polymorphism is S, Derived polymorphism is L
  VARIANT 30: note = Ancestral polymorphism is L, Derived polymorphism is M
  VARIANT 23: note = Ancestral polymorphism is A, Derived polymorphism is V
  VARIANT 22: note = Ancestral polymorphism is M, Derived polymorphism is I
  VARIANT 12: note = Ancestral polymorphism is K, Derived polymorphism is N
  VARIANT 6..139: note = Derived polymorphism lacks residues 6 to 139
MKKIVQEMTRMNDERNRLRMIMAQYMAEDLASFSVQDLSNLEQQIEFSLYKVRLRKFFILKRRRKNSLGRSLTLSANAEHTLCFVSGSKSYSTSSCSRSAKGYATFQSLIRRLIKERISLLPPRPRVQRGERSRSNSNP

SEQ ID NO: 17226 - protein, 563 aa, Zea mays
  VARIANT 437: note = Ancestral polymorphism is D, Derived polymorphism is Y
  VARIANT 179: note = Ancestral polymorphism is S, Derived polymorphism is L
  VARIANT 161: note = Ancestral polymorphism is G, Derived polymorphism is C
  VARIANT 103: note = Ancestral polymorphism is D, Derived polymorphism is N
  VARIANT 87: note = Ancestral polymorphism is R, Derived polymorphism is C
MPPSPSDSSPDMDPRSGYCASTRTFYSLRAAPPSPPPPPDAPLSFPAFALSFLPTPLPSPLAASRPALVDAGTGESVPLPAFLSRLRALAAALRARLRLGPGDVAFVLAPAGVHVPVLYYALMSVGAVASPADPSLPAAEVSRLLALSDPRVAFAVAGTRGKLPPGLPTVLLDSPTFLSFLHEPEDAAVVRQSDPVVVRQSDPAAVLYSSGTTGRAKAVVLTHGNLMASNVTRAPAAGETLMLAVPLFHVYGFTFCLRAASAAHTLVLPAARRRFDAAAVLGAVERFEVTRLALAPPALLAIVRAAEEDAAAPARAASLQAVRCGGAPVAADLIARFSRVFPGVSLAQGYGLTETTAGFCRAVGEEESARVGSVGRLSWGAQVKVVDPETGAALPPGVAGELWVRGPFVMKGSVGYLGDDDSTSEILDSQGWLRTGDLCYIDQDGFVFIVDRLKELIKYKGYQVPPAELENLLQTHPDIDEAAVVPYRSDEDGGELPVAFIVRRPGSHHLQESHIKDFVAKQVAHYKRIHHVFLVDSIPKNASGKILRRDLAKLASRRISSKL

SEQ ID NO: 17227 - protein, 160 aa, Zea mays
  VARIANT 130..160: note = Derived polymorphism lacks residues 130 to 160
  VARIANT 124..160: note = Derived polymorphism lacks residues 124 to 160
  VARIANT 100: note = Ancestral polymorphism is P, Derived polymorphism is R
  VARIANT 39..160: note = Derived polymorphism lacks residues 39 to 160
  VARIANT 28: note = Ancestral polymorphism is G, Derived polymorphism is D
  VARIANT 8: note = Ancestral polymorphism is G, Derived polymorphism is E
MGSVSFVGRVLFVAAFLLSAYQELNEFGANGGPTSKAIQPKFNVFIKNVSAHLGVAVPHIELKHVIAATIGLKGLGSLLFILSSSLGAYLLLLYLALITPIIHDFYNYDMEKAEFAGLFAKFTQDLALIGALLFFLGMKNSIPKRQGGKKSPRRRRTRAA

SEQ ID NO: 17228 - protein, 662 aa, Zea mays
  VARIANT 127..662: note = Derived polymorphism lacks residues 127 to 662
MAGGGGERDADEETRNQMMQNLFGDQSEDEDDADDDGQQQQLQSPPHHHHEIEDDGDEDGDDARSDAPARHGGYHSEEVDGEAENGGEGEGESEGQVEMEEESEGEAHRADLDQGESDGDKVHSSPERELDDQRMESDAKGLDSEDEGYQQRTVSSRRRGVVASESEGSEDNYYADGAQEDEEPRQTRKQSSPMEEERDHEVVRDVFGDSDEDEPAPYRSRHEIDEESHRSPMEDEDQYEKDMQPDDTVADEDMRYESDENRELKPKEKPVGPPLDLVVPFKQPPARPDKMNVIKVSNIMGIDPKPFDPKTYVEEDVFVTDESGTKKRIRLEDNIVRWRTIRNADGTTSCESNARFVKWKDGSMQLLIGNEVLDISVHEAHHDQSHLFLRHGKGILQSQGRLLHKMQFMPSSLFSKSHRLLTALVDSQNKKTVKMQKWFETKDPEKAKMEKERLLELRSLVQVCITSVVIHFSCPFVSPVDFVLSTDMKSMQIQGQNIRAHSILQRKREKVNRKYTQPARPRRQLSPGFLEDALDESNMSRNVPRKPPYPPARLPRRQADEYSESEREESEYETDGEDIEHSPPRGREDELDEEEEYEEEVEEEAPLSDEEMEAPKRKRESGGGGGHMREELASEDDESPPRKQPTVQHRRKAVVFDDSDED

SEQ ID NO: 17229 - protein, 142 aa, Zea mays
  VARIANT 103: note = Ancestral polymorphism is G, Derived polymorphism is R
MACCTTTSRLVLSAAAALLAVAGGAAEAPSYCAPGQAIPYRPLSGCTWYVASRSCDVIEAMLPNRAVLKETCCSQLRDIPAECRCRALRVMMETPLVVGAEPGAQQRCRVAQARFAPALVAAAECGLLTAHGRRFCNALDAE

SEQ ID NO: 17230 - protein, 176 aa, Zea mays
  VARIANT 142..176: note = Ancestral polymorphism lacks residues 142 to 176
  VARIANT 120..176: note = Derived polymorphism lacks residues 120 to 176
  VARIANT 114..176: note = Derived polymorphism lacks residues 114 to 176
  VARIANT 105..176: note = Derived polymorphism lacks residues 105 to 176
  VARIANT 67..176: note = Derived polymorphism lacks residues 67 to 176
  VARIANT 51..176: note = Derived polymorphism lacks residues 51 to 176
MPFASAVSTADWILPSTCIPRSSRHTNHHLLLCLAPIAEEGRGLLDAGPAQCSSTAARDTTSVAARKENTAPKQHHLHRRWEGEHCVQTHLRRAVVHVVAPAGQQDPKLGGLLQGRLHLQGSRAAGECCSTTSLTGSGTMTRPLQSTSSWRLHLIWEGSVSFVDCGGGQAGRFALK

SEQ ID NO: 17231 - protein, 496 aa, Zea mays
  VARIANT 31: note = Ancestral polymorphism is R, Derived polymorphism is Q
MLLSGRHHCHHKFTPSSPPAAFRSTHLRRLRPLRPLALASANPPPPPSPLPSLFPSPRRPWRWRHSASDVIEDLPPVEADGNDAVKVKKSFWAAVSLIIGTAVGPGMLGLPSATIRSGQAPSAVCILLSWAYVVSSIVLVAELSFAAMARDGVDEVSFTGLASSTLGAGPGAVVAVVYAALSFSLLVACVAGIGSLVSQLFPGVSPVLANALFPCFAGVLIAFFPFKAVDGANRALCGLMLVSITALVVTGVSVGRTSLLGSLSYACWSPGAILPAIPVTVLTLGFHVITPFICKIVGDSVYDARKAILIGGAVPLAMVLSWNAVILGLASAGGNAGFDDPIKLLLSVNPAALPAVRGFAFAALATSLIGYAVSFPKQLADTVELILQRFSQKQGSMHQANGSGGYGRNGAILTWMVLIIPIFIASFFSAVFSKALDFAGVYANCFLFGILPPVMAWIHRSQKKRRSPDSCEDVLPGGNAALLILFAVAVVLAIWH

SEQ ID NO: 17232 - protein, 557 aa, Zea mays
  VARIANT 309: note = Ancestral polymorphism is G, Derived polymorphism is R
  VARIANT 271: note = Ancestral polymorphism is L, Derived polymorphism is V
  VARIANT 65: note = Ancestral polymorphism is D, Derived polymorphism is Y
MASAAARGAAVRSPLLVHHRVPLVHPSGGGSLRVGWPGIGPGREGRRRGAPVGARVFARYSQAQDFSTRLQDRAGELPKLVEDLIQTSISTGPRGAFRMAQGIQAVLGVGGEWLNDLSKTANTSAGIPSQMQLGLLSPLYLRRLFERMGATYIKLGQPTNCVMMQFVASAPTLFPAEYVEEFQKCFDQAPAVPYDVIESILREELQRPLDSVYEYIDPVPIASASIAQVHGARLKSSQKDVVIKVLKPGIEDTLVADLNFIYVVARVLEFLNPELQRTSLVGIVKDIKESMLEEVDFRKEAANIQAFQGYIDAMGFDRQAKAPFVYQHCSTKRVLTMERLYGVPLTDLDSIRSLVPDPELTLVTALNVWFGSLISCESFHADVHAGNLWLLRDGRIGFIDFGIVGRISPRTWAAMEVFLASFATEDYDAMASALSEMGATGNDINTNEFAKDLRKIFSSIQDLDTEIIVATARTPDATAVSANVVLDERQMNALFLDLVRVSESYGLKFPREFALLMKQLLYFDRYTRLLAPSMNMLRDERINISTNRQPRRTDRFQ

SEQ ID NO: 17233 - protein, 427 aa, Zea mays
  VARIANT 350: note = Ancestral polymorphism is R, Derived polymorphism is W
MAAAAAVFFPSTPNPRHRLAAAARRPPPSFTGATDAVPLPEDEDSSDDDADDDGAPRRSGRRDRRRAVRVAWEKLVRWSRSWRRRNRSDVLETTRKVVVLGGGSFGTAMAAHVAAKKADLEVAMLLRDDHICRSINNAHVNCKYLSEHRLPENIVATTSAADALAGADFCFHAVPVQFSSSFLESISTHVDPKLPFISLSKGLELNTLRTMSTIIPRALGNRRQPFVVLSGPSFAVELMNKLPTAMVVASKDNKLASSVQQLLASPNLRISTSSDVTGVEIAGALKNVLAIAAGIVEGMSLGNNCMAALVAQGCSEIRWLATKMGAKPTTLSGLSGSGDIMLTCFVNLSRNRTVGLRLGSGEKLDRIMGSMNQVAEGVSTAGAVIALAQKYKVKMPVLTAVARIIDNELTPTKAVLELMNLPQVEEV

SEQ ID NO: 17234 - protein, 217 aa, Zea mays
  VARIANT 27: note = Ancestral polymorphism is S, Derived polymorphism is R
  VARIANT 49: note = Ancestral polymorphism is V, Derived polymorphism is L
MSSLPGGFLCVRVLRGIDLVSCDAKGSDPYVVLSLDGQKLKTSVMKKTVNPLWNEDLTLAVMDASAPIKLEVFDKDTFSKDDMMGDAEFDVEALAQIVQMDLEDIRSGTVVRTVRPGGTGSCLADESHIIWDKGHVVQDLLLRLRNVDSGVIHLQLRWVATPPEGSQLEANKKAMNIQCKICMQTFICTTSEAKCKEHAEARHPKNDLYQCFPHLKN

SEQ ID NO: 17235 - protein, 376 aa, Zea mays
  VARIANT 148: note = Ancestral polymorphism is L, Derived polymorphism is P
  VARIANT 129: note = Ancestral polymorphism is R, Derived polymorphism is L
  VARIANT 113: note = Ancestral polymorphism is N, Derived polymorphism is S
  VARIANT 53: note = Ancestral polymorphism is N, Derived polymorphism is H
MSKARVYTDVNVLRPKEYWDYEALTVQWGEQDNYEVVRKVGRGKYSEVFEGINVNNNEKCIIKILKPVKKKKIKREIKILQNLYGGPNIVKLLDIVRDQHSKTPSLIFEYVNNTDFKVLYPTLTDYDIRYYIYELLKVNSHVVTSVFPSVYFEGMLIVCKEMITPALDYCHSQGIMHRDVKPHNVMIDHELRKLRLIDWGLAEFYHPGKEYNVRVASRYFKGPELLVDLQDYDYSLDMWSLGCMFAGMIFRKEPFFYGHDNHDQLVKIAKVDIQSIYLLNASLLVIATSIYYQVLGTDGLNVYLNKYRIELDPQLEALVGRHSRKPWTKFINADNQHLVSHEAIDFLDKLLRYDHQDRLTAREAMVSFPVLNFGGM

SEQ ID NO: 17236 - protein, 167 aa, Zea mays
  VARIANT 150: note = Ancestral polymorphism is V, Derived polymorphism is A
MMSSSSGIKQEGPKLFSSRRILARDRSSVAVADASFRVYYSLGAGTVPFLWESKPGTPKSSVTPPAPASSTAGAVPVPPISPPPSYQQAVSRSKANKFARKQRPARTSWPPAGWIIGWLSLNVRRRSPPSSSPTDHQQRCVARNEHGVVVVDGDDERRSPRSSTLCF

SEQ ID NO: 17237 - protein, 472 aa, Zea mays
  VARIANT 140: note = Ancestral polymorphism is Y, Derived polymorphism is N
MAVDDSTPAAKSRRLERSVVSSISNLPEHLQQEIFSRVGDVKSLFMFAVTSRGWLRRFTDRAFLRELFPSHGRHGARLLGVFLQDAPFNRPDTSLMPAQMAPPPPAQQQQRASSCAPTFLPAPGSPLGARRLVDDAAFDNADLLAAHRGIVLVRLAPRTPDEEACHLFGVCNPVTGYRHVLPPLEWSLAGSRLNGYAIVTAADMPQHHPPATARFKFSQLLVITQQIDLHYLVGVVDVYVHSYSAATGSWSEPTGCLDSNAFSLMGDGSAVIHRGAAHWLCVDDGGLRYRPSVYRRGYHTYTLSVDVATARVSLTRIPVRVGGKQLLYVTGDGELAVASVYFIYVILWTQAAGGGGGGDTTPAWTRTLFTIPVAPVPFPHVDGYLKHRLERWCNFSHGSLLALFRARGVLILDLNTKAMEEVSIPDLHNKATIFMAEYGANRNQTWLPYEMDVVEFFMLHLGGGTVSEIGSP

SEQ ID NO: 17238 - protein, 893 aa, Zea mays
  VARIANT 324..893: note = Derived polymorphism lacks residues 324 to 893
MPGPAVEAAARSGGDHHGGCCGKAAGKWEKTYLDVLGICCTAEVALVERLLTPIQGVRAVTVVVPSRTVIVDHDTAAVSQFHIGSEQGGPRGLRPSLWQQRRRRRAVAQPVHRRLRRPARPVPARAAAPPAAVAGGGGGLRGLPAHAAPGVRRGGQADAGHQHPDAHRGRRLRGARELHGGRRHRVPLHRRRVAGDAGVQQGQRRDAVPHVHGAQDRRAGRDGAGRRHGRRRGRHRRRGQGRRRGPRGRRGRRRAQRGRREQPHRRVLPRAEAAAVGGLGRHHQLRRLHLREDDGPRRELDGGEDGEAGGGGPEQPVSDAAAHRLVRQALHPCVVVSFACAAVVVLAAGVVLVPALLGARDLELEHWFRLSLVLLVSACPCALVLSTPVATFCALLRAARMGLLVKGGNVLESLGEVRVAAFDKTGTITRGEFSIKDFHVVGDKVEMNQLLYWVSSIESKSSHPMAAALVEYAQSKSVQPKPENVTETCIYHGEGIYGVMDGKQIYIGNERIIARSSCRHHQHGTQAGHQETDGLKGVSIGHVICDGDLVGKFSLSDTCRTGAAEAILQLRSMGIKSVMLTGDSAAAAKHAQEQLGGVLEELHAGLLPEDKVRLVRGLQARHGATLMVGDGMNDAPALAAADVGVSMGLSGSAAAIETSHAALMSGDILRVPKAVRLGRRARRTIAVNVASSVGAKAAVLALAVAWRPVLWVAVLADVGTCLLVVLHSMLLLRDGAARRPRCCASATACKSKQASKPCCATVKPVATTRHRHGHGHGHGHAGAGKPGTLGGDKQGKDCHGCCQKESKPPEDAVVIAIPGRAVEHRKEAFPHENAGAGGCCAAAHGAEDEVCIVISARSPCCSTARSRSGSPKDALCCHGSGGKDGGAISALVC

SEQ ID NO: 17239 - protein, 118 aa, Zea mays
  VARIANT 97: note = Ancestral polymorphism is Q, Derived polymorphism is L
MVGAIGTLVVDTVATGYFTRVHFKDSAAAAVGAAAVGDEEQQQQQAASAPHVDDGADGDGHGHGGHAHMHTHATHGHSHGASVIIKNPMVQSRGKLQLAINAFMLFCAGRMATLAKWT

SEQ ID NO: 17240 - protein, 475 aa, Zea mays
  VARIANT 218: note = Ancestral polymorphism is T, Derived polymorphism is M
  VARIANT 240: note = Ancestral polymorphism is S, Derived polymorphism is W
MAVDDAHAPAKKRCRRATESISGISSLPEHLQQEIFLRVGDIKALFMFAVTSRGWLRRFTDPTFLRELCPRHGGNSRHGARVLGVWLQCAVFDPYDKVMVQARMAPQQQQGASSMAAPTFLPALGSPLGARRLVDGDAAFDYAELLAARRGIVLVRLAPRTPAEMDSRPYLFAVCNPVTGHRHVLPPPEWSLSEVRGYAIVTAADSPQLHPPAAAHFTFSRLLVIAHHRQGIRGDAYLHSYSAATRSWSAPTMCLDRGDMRAVTVCDWSAVVHRGAAHWLCVDIERYHLATRTRGRGRGDDDRHMYMLSVDVATARASLTRLPVRVGGNPLLYVTGDGNLAVATVYMSHVTVWTESPASTAPAWLRTSFLMPAAAPAVPYPPPQLRHQENWRNFNHGSLIAVFRGTKIFILDIDTKAMEKVSVLDFHSKAMISLAAANWQATWVPYEMDVVEFFMVQLGGIRDRLGPTISEIQSP

SEQ ID NO: 17241 - protein, 344 aa, Zea mays
  VARIANT 139: note = Ancestral polymorphism is P, Derived polymorphism is T
  VARIANT 69: note = Ancestral polymorphism is G, Derived polymorphism is R
  VARIANT 34..344: note = Derived polymorphism lacks residues 34 to 344
  VARIANT 33: note = Ancestral polymorphism is H, Derived polymorphism is N
MTLPQDIIVEQIFLRVPPDDPARLLRGALVCKHWARLLAHRDFRRRYGERHGGLPPLLGFVANKISTDGVARFVPTLAFSPALRHDGYRAHDARHGRVLLNRIMGGGSGASHALALNSWNAAVLCASSSCYGHHLDCRPGHFLVAFVGMDAKEMFARVYSSESAAWGKVTSARLPGSHFHDKLSGALARNAIYFVLGPEHGMVKYDLATGKLSLVAVPETLTLDGWRLMTTEDGGLGFAELNLHSTLTLWSMVDEGRWAVSRAIDLTDRLPVIALAVSTCMVAFADIAGVIFLRTTDGLYTYDLKTEQSILVMDNDFYGIIPYASFYTPVLRVATTCEGSASTS

SEQ ID NO: 17242 - protein, 223 aa, Zea mays
  VARIANT 65: note = Ancestral polymorphism is D, Derived polymorphism is N
MSFLFGKRKTPAELLRENKRMLDRSIREIERERQGLQAQEKKLITEIKKTAKEGQMGAVKVMAKDLIRTRHQITKFYQLKSQLQGVSLRVQTLKSTQAMGDAMKGVTKAMAQMNRQLNLPGLQRIMQEFERQNERMEMVSEVMGDAIDDALEGDEEEEETEELVNQVLDEIGIDINQELVGAPSAAVAQPASAGRVAQAESAGNADTGIDADLQARLDNLRRM

SEQ ID NO: 17243 - protein, 270 aa, Zea mays
  VARIANT 9: note = Ancestral polymorphism is P, Derived polymorphism is L
  VARIANT 29: note = Ancestral polymorphism is A, Derived polymorphism is T
  VARIANT 45: note = Ancestral polymorphism is T, Derived polymorphism is M
  VARIANT 48: note = Ancestral polymorphism is S, Derived polymorphism is N
  VARIANT 93: note = Ancestral polymorphism is C, Derived polymorphism is Y
  VARIANT 114: note = Ancestral polymorphism is P, Derived polymorphism is L
  VARIANT 128: note = Ancestral polymorphism is R, Derived polymorphism is H
  VARIANT 147: note = Ancestral polymorphism is I, Derived polymorphism is T
  VARIANT 158: note = Ancestral polymorphism is T, Derived polymorphism is I
  VARIANT 163: note = Ancestral polymorphism is L, Derived polymorphism is P
  VARIANT 178: note = Ancestral polymorphism is R, Derived polymorphism is S
  VARIANT 182..270: note = Derived polymorphism lacks residues 182 to 270
  VARIANT 185: note = Ancestral polymorphism is V, Derived polymorphism is F
  VARIANT 186: note = Ancestral polymorphism is P, Derived polymorphism is L
  VARIANT 191: note = Ancestral polymorphism is C, Derived polymorphism is Y
  VARIANT 193: note = Ancestral polymorphism is C, Derived polymorphism is Y
  VARIANT 208: note = Ancestral polymorphism is N, Derived polymorphism is K
  VARIANT 222: note = Ancestral polymorphism is D, Derived polymorphism is Y
  VARIANT 242: note = Ancestral polymorphism is G, Derived polymorphism is V
MTSVYRVAPDVHTFNIFFSSSCRVEGVDAAMRWFGEMQRRSCAPTVVSFNTLMCGFIREGRYKEGTKVAREMLELGVGLSVASMEILIGGLCCGSKALEAAELFVEFLGDGVVLEGFDCFELVEALCRGGKVDRVVEAVDMVLERNTKCCLSAPTGATVLECLMEAGKLDEVYRLMWRMIDQGIVLDTISCNCIFEALCEAGRTADANQLRVLAKEKGFEADGETYCMLVQGFGRQGKRKEGKAVLDEMLDLGFIPNIASYNRLLGGLHK

SEQ ID NO: 17244 - protein, 172 aa, Zea mays
  VARIANT 62: note = Ancestral polymorphism is N, Derived polymorphism is K
MALTMFIPIFISLFFAKRERGCRTFKRPGVDAFLEHMSKLYEVVVYSDQPPMYVEPVFERLNSRGTISHRLSRPATKYVDGKHYRDLSKLNRNPAQVIYLSAHALESCLQHENCVEIKPFKLEDKNDTQLLDLIPFLEYVAMARPSDIRTVLASYQGHDVAAKFIERSKEHQ

SEQ ID NO: 17245 - protein, 150 aa, Zea mays
  VARIANT 54..150: note = Derived polymorphism lacks residues 54 to 150
MAAVVGLCSSSSRPPGALPSSLLGYEALTGSLDDSRFEDYLHSYDHRRQVFSTQMGLSNQDIVALFGGHTLVGGIRELLSGEKEGLLQLPRDKALLSYPSFCPLIDKYVAVYISLILVICSGSVYVNLGGCNKYLSALCFVIFFSLEWFI

SEQ ID NO: 17246 - protein, 55 aa, Zea mays
  VARIANT 11: note = Ancestral polymorphism is L, Derived polymorphism is M
MGLFRGSFTLLVGMGCGVYIAQNYNVPNVKKLFNTYVFLAKHIEETYRKPKKDDD

SEQ ID NO: 17247 - protein, 307 aa, Zea mays
  VARIANT 176: note = Ancestral polymorphism is S, Derived polymorphism is L
MASLGVRAAAAARLPSLRPRRDGSRVLTGLRVGTGHYGVRLALSSSTSASPREFKVAGLPVDDSSLGPGDEYEFGLYTPKLLAVTGDDYVSNPRMPDEDEFDHFYRVVAKKTDMLLSCHLPKPLAVSEEEKAVQEKFKEMANECIDLLVDAMRRIPAEKRRPLFSVFGELYPVFESVRWTAEGGCAKWWMALQIMEKLEIVRKMVSSACGGTPLDRGTVFARKVDLTGVDGQALAGHGLGSNLSVEDVHGFMLFTMNIICLHACCFLILGETNTGGDLRAAPQRLQQRQVGHRWHGLCFHSLLAIVT

SEQ ID NO: 17248 - protein, 412 aa, Zea mays
  VARIANT 355: note = Ancestral polymorphism is T, Derived polymorphism is I
  VARIANT 122: note = Ancestral polymorphism is H, Derived polymorphism is Y
  VARIANT 111: note = Ancestral polymorphism is A, Derived polymorphism is G
MVVVVSAAAAEEEEEDVTVREFDGASDHDRAAVERLERACEVGPSAGKLCLFTDLLGDPLCRVRHSPAFLMLVAESGAGGEVVGVVRGCVKTVACGRRGRDDELELFSKVGYLLGLRVSPAHRRRGVARALVARMEEWFRQAGAEYAYVATDRANEPSVRLFTSRCGYAKFRAPSVLAHPVFRHDLAPPRRAAVVRLCPRDAELLYRARFAGVEFFPRDIDAVLRNPLSLGTFLAVPDARAWPGGGGAGAEPFLASPPASWAVCSVWNCKDAFRLEVRGAPRLWRAAARASRAADRALSPWLARVPSVPDLFRPFGIHFLYGLGGAGPDAPRLATALCRHAHNAARRAGARVVATELAACDPLRAGVPHWARLGAEDLWCIKRLADGYGDGALGDWTKAPPGASIFVDPREF

SEQ ID NO: 17249 - protein, 459 aa, Zea mays
  VARIANT 138: note = Ancestral polymorphism is K, Derived polymorphism is E
MASLVVRAAGAAAAAARLPSLRPRRNGSGVLSGLRVGTGHYGARLALASSTASHKEFKIACLTVDDSSLGPGDEYFGLYTPKLLAVTEDDYESDPRMPGEDEFDHFYRVLAKKTDNLLSCYIPMPLALSEEEKAVQKEFKLIASGCIDLLVGAMRRTPAEKRRPLFLVFGELYPVFEFVRWTAEAGCAKWWMALQIIEKLEIVRKMVSSAFGGAPVDRSMVFARKVDLTGVDGEALAGHGLGSNLSVVIFVLMDSVFSNVKSDIDAMVSDPCRMADEDVQEFDHYYRHLAKRAAKLHAIYPPELPKPLSESEDEKAVQERFKEMANESIDLAAGAMRRIPAEKWRPLISVFAYVFLVFVRVRWYAERGCAKWWMAPQIIEGLQTVRRMVSSACGGTPLDIDKVFDRMVALSGVSVQAAPGGHGVVGSNDLSEVIFALIDNVFGNVKSDIYDMVSASTPC

SEQ ID NO: 17250 - protein, 498 aa, Zea mays
  VARIANT 25: note = Ancestral polymorphism is P, Derived polymorphism is A
  VARIANT 26: note = Ancestral polymorphism is S, Derived polymorphism is F
MAPPSWQGHAAAVLSVPLLILVVAPSTTAIGVNYGTKGDNLPPPATVASFLANRTRIDRVKLFDTNPDMVRAFAGTGIAVMVTAGNGDIPKLATKDGAGAWVAANVAPYYPSTDISLVSVGNEIMDTADKALISNLVPAMRALKAALVAAGYPKIRVSTPHSLGILSVSEPPSASRFRDGFDRAVFAPMLAFHRQSRSPFMVNPYPYFGYNGVTLPYALARPNPGVPDPGTGITYTSMFEAQLDSVYSAMKKLGFEDVEIAVGETGWPTKAEDGQIGVSTAEAAEYNRYLIGEASGGSGTPLMPKRTFETYIFALFNENLKPGPVAERNFGLFYANLTPVYDVGLMKDGVKTAATPAPAPDESKAAQSAVKKDDVEAAAAPEETAASASAPGPSSVDGEASSKATGPSPSEAPSQSGSTGEDKTPEKEEGGGDAPPPAASASGPPDEASETAAKDVDAAGGGKTPAPAGAESQGSSNLRVPVSCLLTVALSLALTGGI

SEQ ID NO: 17251 - protein, 475 aa, Zea mays
  VARIANT 186: note = Ancestral polymorphism is P, Derived polymorphism is L
MGSIGGHTTTATADRRRRVLFFPLPYQGHINPMFQLAGLLHLRGFSVTVFHTDFNAPDKSRHPAYDFVPVPVRGCLPKGSSDALQVTVERILAVNRACEAPFRERLASLLAREDVACLVADAHLLTLLDVARGLGVPTLVLRTGSAACLRMFAAFPALCDKGTHVIHALTLLFVFQSDVESQLETPVTELPPYRVRDLPSTTSACHGVISEVISRLVTAVTTSSGLILNTMDALECGELASLRRDFGVPVFDIGPLHMLSPAASSSLLLQDRGCLEWLDAQAPASVLYVSFGSLASMSAAELVETAWGIANSGYTFLWVLRPGLVRGSQTSEAAPPLPDGFDAATRGRGMVVSWAPQEEVLAHPAVGAFWTHCGWNSTLESLCAGVPVIARPCFGDQMGNARYVDHVWRTGLTLDGVLERGEVEAAVAALMAPGEPGDGLRRRARELESSAADCMTKDGSSCTNVDKLVDHILTL

SEQ ID NO: 17252 - protein, 432 aa, Zea mays
  VARIANT 138: note = Ancestral polymorphism is S, Derived polymorphism is W
  VARIANT 129: note = Ancestral polymorphism is Q, Derived polymorphism is R
  VARIANT 86..432: note = Derived polymorphism lacks residues 86 to 432
MFQLAGLLHSRGFAITVFHTDFNAPDASRHPAYDFVPVPDGTPESNPAQVTAERILELNRACEAPFRERLAALLEQENARDNVVACLVGDAHLLTLLEVARGLGVPTMVLRTTSAACFRCFLAYPMLHQMGYLPPQESKLYMPVKELTPLPVRDLYYSRTGDNEGVSKLLARATEAVKNSSGLVINACDALEATELETIRDQLNIPLVLAVGPLHKLSSESTGSSLLNQDYGCIEWLETQPSGSVLYVSFGSLASMDSREFLEVASGLANSGLPFLWVVRPDVVVVVQGLDGPDFPNGFEAAVEGRGKVVRWAPQQQVLAHRAVGGFWTHCGWNSTLESISEGVPMICRPCFADQMMNARYVEEAWGVGFALEGELERGKIVRAIRKLMKEREGDAMRERAMELKNRMEDGFKIGGSSHNAIDKMVSYFLSM

SEQ ID NO: 17253 - protein, 504 aa, Zea mays
  VARIANT 280: note = Ancestral polymorphism is W, Derived polymorphism is S
  VARIANT 301: note = Ancestral polymorphism is V, Derived polymorphism is A
MEILLSVFLGELTTRSIDFLVRRCSTKPSAPELEDRLRRVMLRAQVIADEALGRHITNPAMLLQLSMLRDGVHQGHYMLDTSRCQYSSRDAEPTTDTEGSRKALALSRASSSPSSILPSSSRGKGRFRYSSSSSSRNAEVVLLEGLTNVLQKLSSMVDDAGEMVAFLTSYPRLHRQPYSMHVQLGNCMFGRQMEAELVVGFLLHSRRGPTHGHGSSQETAVEVLPIVGPDDDLATLGEGCATEHQDGGGMPRPSTNEDGRSRRRLLLVVELSGDLDDDAWNKLCFAAAKRRMSNDSSKVMVIVTSRSEKVTRFGTAAAVRLQNLSHEAFWYFFKTLAFGGTDPGAGTHASSSVRVAMEIAGMLGGCLVGANITAYLLRDNCDVRFWRKVLAFLRGVMLTHRQPDSGEHPFDLISDNRLAHLGRMAAPSTEDLVLYHQDQRSPQEEVPDLRIQDVMYGSARPSGRFEALAWRSPIPPYYSYVNTCEIRDLKLKGRAAAKRKRCVV

SEQ ID NO: 17254 - protein, 89 aa, Zea mays
  VARIANT 24: note = Ancestral polymorphism is I, Derived polymorphism is N
MKLLQDLVPECSEITGKAVMLDEIINYVSHCNDKSSIDLSTVMFVAGAIMGYIMFIESTVTVHTELTPKSCGFQDCSLDYDNCSFLDSR

SEQ ID NO: 17255 - protein, 472 aa, Zea mays
  VARIANT 73: note = Ancestral polymorphism is P, Derived polymorphism is A
  VARIANT 51: note = Ancestral polymorphism is V, Derived polymorphism is M
MAGGVHEARAGGSRPRRRRPRRVLMFPLPFQGHINPMLQLGDALHARGLAVTVLHARLNAPDPARHPEFRFVPVPDGVPAHVAARGNVIDIIEAMNAAMEADGSGPVRAVLESVVADVEQPPAACIVFDANLLAVPRAASAVGLRTLVLRTASAACLGCFMAYPMLHQKGYLPPQESDLYMPVKELPPLRVRDLFYSTWSDHKKMRDLLARANEAMENSSGVVINTLDALEKPELERIREQLHVPIVLAPGPLHKLCSSKSTSSHSTLDHQDHSCIRWLDKQPSESVLYVSFGSLASLDSDEFSEVAWGLANSGHPFLWVVRADSVRGSDGPAALPDGFEAAVHGRGKVIRWAPQQEVLAHPAVGGFWTHSGWNSTLESVSEGVPMMCRPQFADQMMNARYVVDTWGVGLELEGELQRGGVEMAIRKLMKGRDGEEMRGRAKELKKIVADCLEARGTSQVATDKLVNYILSL

SEQ ID NO: 17256 - protein, 469 aa, Zea mays
  VARIANT 22: note = Ancestral polymorphism is F, Derived polymorphism is S
  VARIANT 127: note = Ancestral polymorphism is Q, Derived polymorphism is H
  VARIANT 243: note = Ancestral polymorphism is P, Derived polymorphism is L
MAEGDGPTPARGARVVLFPLPSQGHLSPMLHLASALHARGLAVTVLHTAYNAPDPAHHPGLAFVAVPDVIPEAVAATTNGIAKILALNAAMEASGHVRGALASLLAEEAGGQRLACLIFDSTLFAAQKAAAGLGLPTLVLHTGSAAGFRLFRSDTYNMLHDRGYLPATESNLHMPVKELPPLQVRDLFDPSKLPNKEIVQKILGRATESTTNSSGAILNTFEALESRELEMIRDELADRGIPPFAVGPLHKLTAAPSNDGADETSLLSQDRVCMEWLDARGPGSVLYVSFGSVVHVTADELVEIAWGLANSGVPFLLVVRRGLVVGVDKQELPDGFMAAVEGRGKVIEWAPQQEVLAHPAVGGFWTHNGWNSTLESIYEGVPMLSRPIFGDQLPTARYVCDVWRIGVLLEGVLERREVEKAIKKLMEEDEGVGIRGRAKDLKEKVRMCLESSGSSQLAVDKLVDHILSL

SEQ ID NO: 17257 - protein, 144 aa, Zea mays
  VARIANT 73: note = Ancestral polymorphism is C, Derived polymorphism is S
  VARIANT 70: note = Ancestral polymorphism is G, Derived polymorphism is R
  VARIANT 57: note = Ancestral polymorphism is H, Derived polymorphism is P
  VARIANT 53: note = Ancestral polymorphism is G, Derived polymorphism is R
  VARIANT 39: note = Ancestral polymorphism is R, Derived polymorphism is W
  VARIANT 34: note = Ancestral polymorphism is Q, Derived polymorphism is E
  VARIANT 32: note = Ancestral polymorphism is R, Derived polymorphism is G
  VARIANT 26: note = Ancestral polymorphism is D, Derived polymorphism is G
  VARIANT 25: note = Ancestral polymorphism is E, Derived polymorphism is K
  VARIANT 20: note = Ancestral polymorphism is V, Derived polymorphism is A
MSGATCSTVMMDEELEVVEVDVVAEDKSMERGPQPQGRWSPTRPCGDWRALLRLGEHPTRILLRDSHGGGGSCFVVSSSSPGADYAEILGRSVVSADRISLYQYHGWTTTRCCRSARGTSNDEFKPIPEAYEVLSDSQELVIYD

SEQ ID NO: 17258 - protein, 476 aa, Zea mays
  VARIANT 13..476: note = Derived polymorphism lacks residues 13 to 476
  VARIANT 25..476: note = Derived polymorphism lacks residues 25 to 476
  VARIANT 43: note = Ancestral polymorphism is R, Derived polymorphism is C
  VARIANT 50: note = Ancestral polymorphism is P, Derived polymorphism is L
  VARIANT 52: note = Ancestral polymorphism is P, Derived polymorphism is S
  VARIANT 53: note = Ancestral polymorphism is F, Derived polymorphism is L
  VARIANT 65: note = Ancestral polymorphism is A, Derived polymorphism is E
  VARIANT 90: note = Ancestral polymorphism is P, Derived polymorphism is S
  VARIANT 140..476: note = Derived polymorphism lacks residues 140 to 476
  VARIANT 156: note = Ancestral polymorphism is R, Derived polymorphism is H
  VARIANT 164: note = Ancestral polymorphism is P, Derived polymorphism is L
  VARIANT 166: note = Ancestral polymorphism is L, Derived polymorphism is H
  VARIANT 167: note = Ancestral polymorphism is A, Derived polymorphism is V
  VARIANT 175: note = Ancestral polymorphism is T, Derived polymorphism is M
  VARIANT 181: note = Ancestral polymorphism is A, Derived polymorphism is S
  VARIANT 224: note = Ancestral polymorphism is R, Derived polymorphism is H
  VARIANT 271..476: note = Derived polymorphism lacks residues 271 to 476
  VARIANT 288: note = Ancestral polymorphism is W, Derived polymorphism is C
  VARIANT 302..476: note = Derived polymorphism lacks residues 302 to 476
MDCVCIEAHTFLQIPSLSVDLALQQPRSIGKSRWAMAGQEHRCRRIVLFPLPFQGHISPMLQLAELLHARGLAVTVLHTGFNAPDATRHPELTFVPIHESSFPDEVTSLGTDIVTQLLALNAACEAPFREALASLLRGGQDVACAVVDGQCYSALRAAHRLGVPALVLRTDSAATFSSMLAYPRLRDAEERLDEPVPDLERLRARDLIRVDGSDTDALCGFIARVADAVRASASGVVINTFERMEASELAKIQRELSRPAFAVGPLHLLSQAPAEQSLHAPDRGCLAWLDDHPPRSVLYVSLGSVACVDRGAFVEMAWGLARSGVSFLWVVRPGLVGGVPEVPPLPDGFSEEVRNRGKIVSWAPQREVLAHAATAAFWTHCGWNSTLESVCEGVPMLVQPCFADQMVNARYVTHEWGVGLEVGEEIERGRVAMAVTKLMTGEDAAQMRGRAYHLKILASAATSLPIDSLIHYISSL

SEQ ID NO: 17259 - protein, 93 aa, Zea mays
  VARIANT 20: note = Ancestral polymorphism is A, Derived polymorphism is S
MGTLACPWRSGHLFAFITFAVLFFSTSFAGRQYSFLMDQDALRQQEGEGARTEQKEALVPLVQARRLSVKTNDYSSYDPSPSMDKPHSKLIPN

SEQ ID NO: 17260 - protein, 468 aa, Zea mays
  VARIANT 191: note = Ancestral polymorphism is G, Derived polymorphism is D
  VARIANT 103: note = Ancestral polymorphism is L, Derived polymorphism is V
  VARIANT 50: note = Ancestral polymorphism is N, Derived polymorphism is K
  VARIANT 25: note = Ancestral polymorphism is I, Derived polymorphism is N
MAGDDGRAPSGLRVVMFPFPFWSHINQMLQLGKLLRARGLGVTMLHTDFNAPDPALHPDITFVSIRESLPAEVVANPDMVEQMMQLNAVCEAPFQAALAGELLARGTTTGGPREVACVVVDGQWYKMLGAATRVAVPALVLRADGAATLLSMLATPRLRADGYLPIKEERLDEVVPGLEPLRVRDLIRVDGSDDETVLRFITRNAEAVRASSSGVVLNTFEGIEGAALAKIRRELSGRPVFAVGPLHLASPDPAAAAAAGYQDAPDPTCLAWLDARPPRSVLYVSMGSVARVDRAVFEETAWALAGSGVPFLWVLRRGSVRGADEEVPPVPEELRETVRHRGKIVAWAPQREVLAHPAVGGFWTHCGWKSMVEAISEGVPMLVQPCFAEQIVNARYVTHQWGIGYEVGKPLERTAMAKAARKLMAGELGPQGPRERARLLKAQAKQCVAERGGISLALDGLVDYICSL

SEQ ID NO: 17261 - protein, 517 aa, Zea mays
  VARIANT 291: note = Ancestral polymorphism is T, Derived polymorphism is M
MAYPAAPHTSAAFLASFATPLPARRASPPTRRRAVSVAAIATTTTCVFADAPRGIKEEQADSGAQAAAAAAARRDVSPDTVASIILGGGAGTRLFPLTRTRAKPAVPVGGCYRLIDIPMSNCINSKINKIYVLTQFNSQSLNRHIARTYNFGEGVGFSGGSVEVLAATQTAGESGKKWFQGTADAVRQFLWLFEVSYLLQVDVVISSFSLIFHCLTKVYYNIVLQKHVDSGADISVACVPMDESRASDFGLMKADRNGHITDFLEKPKGADLESMQVDMGLFGLSPEFASTYKYMASMGIYVFKADVLRKLLRGHYPTANDFGLEVIPMAAKDYDVQAYLFDGYWEDIGTIKSFFEANLALTDQSPNFYFYDPVKPIFTSPRFLPPTKVENCKVLNSIVSHGCFLTECSVEHSVIGIRSRLEPGVQLKDTMMMGADYYQTEAERLSELSVGKVPVGVGENTKIRNCIIDKNARIGKNVVIMNSENVQEADRPAEGYYIRSGITVVLKNAVILNGTKI

SEQ ID NO: 17262 - protein, 487 aa, Zea mays
  VARIANT 274..487: note = Derived polymorphism lacks residues 274 to 487
  VARIANT 237..487: note = Derived polymorphism lacks residues 237 to 487
MGVSRLKEHLGHIYGSMKACRKVPNHVKDIMSQKVTDGRIRRARGNKLCLFVEKEVSATRHDYRSARISLDEQAQIDMAMRNSMRDSFSTLEHDSCPPFGKSMGSATRAASCSTGKQSRLSSYYKNTLDTSRGPFDIDLAHSRTQVQPLIDVMLEKGHKEKLGISLAKWFHANDIPGRKVDCPYFRSTLNLAQQLGDGVPIPRGREIDGPLLDMNYVDMEAHMDWKDYGVTVMCDSWTAAALNPEALYTSKMARKPKFQHAVTMAIKKLSSSSSKASAAIDQYTFFRKQAGLFGGEEAKYSALNGRASAGNPIMEWLCSSRSESVPTLDENDEPESPSRPSGFVLKELGGLNEEEMVLLNSRIGSGRKRNVVEEDIGDDFLPDSSEGGGSPTYNESGDSDSNDGGGDDEDGELSGPCFAARTQPKLATDQYIGPGQDEETTPLCPRSKRQKKLSIKGLHMLEKVNDLIFKHKHKNMAYTWTDSMARF

SEQ ID NO: 17263 - protein, 185 aa, Zea mays
  VARIANT 4: note = Ancestral polymorphism is S, Derived polymorphism is Y
  VARIANT 6: note = Ancestral polymorphism is Q, Derived polymorphism is H
  VARIANT 9: note = Ancestral polymorphism is A, Derived polymorphism is S
  VARIANT 66: note = Ancestral polymorphism is A, Derived polymorphism is T
  VARIANT 69: note = Ancestral polymorphism is A, Derived polymorphism is T
  VARIANT 83: note = Ancestral polymorphism is K, Derived polymorphism is N
  VARIANT 94: note = Ancestral polymorphism is P, Derived polymorphism is Q
MAAYLQALACAMLLLAVSPLACTASKTLLQDRCESYAGGDRSSYDYCVWTLRRDNKSATADELGLAVIAARMARATAKATGVKIAWLRANETVPVRRDCLAACAREYAAAVRRLGHAASAARAGKLQHAQTLLAEATGTPALCDAAFAAARQDTPLADADLGLDDQIELAIAILPAPRPSLPART

SEQ ID NO: 17264 - protein, 187 aa, Zea mays
  VARIANT 68: note = Ancestral polymorphism is A, Derived polymorphism is T
  VARIANT 109: note = Ancestral polymorphism is Y, Derived polymorphism is C
MAASLQALACAMLLLAVSPSPLACTASKTLLQDRCESYAGGDRSSYDYCVRTLRRDNKSATADELGLAVIAARMARATAKATGVKIAWLRANETVPVRRDCLAACAREYAAAVRRLGHAASAARAGKLQHAQTLLAEATGTPALCDAAFAAARQDSPLADADLGLDDQIELAIAILPAPRPSLPART

SEQ ID NO: 17265 - protein, 185 aa, Zea mays
  VARIANT 6: note = Ancestral polymorphism is Q, Derived polymorphism is H
  VARIANT 83: note = Ancestral polymorphism is K, Derived polymorphism is N
MAASLQALACAMLLLAVSPLACTASKTLLQDRCESYAGGDRSSYDYCVWTLRRDNKSATADELGLAVIAARMARATAKATGVKIAWLRANETVPVRRDCLAACAREYAAAVRRLGHAASAALAGKLQHAQTLLAEATGAPTLCDAAFAAARQDTPLTDAYLGLDDQIELAIAILPAPRPSLPART

SEQ ID NO: 17266 - protein, 371 aa, Zea mays
  VARIANT 65..371: note = Derived polymorphism lacks residues 65 to 371
  VARIANT 105: note = Ancestral polymorphism is G, Derived polymorphism is D
  VARIANT 135..371: note = Derived polymorphism lacks residues 135 to 371
  VARIANT 190..371: note = Derived polymorphism lacks residues 190 to 371
MADVHFTINAHKSCIIPRHPTTGFLSRSRVLGIQRLTNLQSSDGTFSSGFYEVYTHAFTFSVWYSKAAANKTIVWSANPDHPVHARRSALTLQKDDNMVLTDYDGAAVWRADGNNFTGVQRARLLNTGNLVIEDSGGNTVWQSFDSPTDTFLLTQLITAATRLVPTTQSRSPSNYIFRFSDLPQVSDIYWPDPDQNIYQDGRNQYNRTRLGMLTDSGVLDSSDFADDQALVASDVGPGVKRRLTLDPDGNLRLYSLNDSDGSWSVSMVAMTQPCNIHGLCGPNGICHYSPRPTCSCPPGYATRNPGNWTEGCVAIVNTTFCDRYDKRSMKFVRLPNTDFWGSDRQHLLSVSFRTCRYICISDCTCKGFQYQ

SEQ ID NO: 17267 - protein, 193 aa, Zea mays
  VARIANT 165: note = Ancestral polymorphism is N, Derived polymorphism is D
  VARIANT 144: note = Ancestral polymorphism is C, Derived polymorphism is Y
  VARIANT 141: note = Ancestral polymorphism is C, Derived polymorphism is R
  VARIANT 131: note = Ancestral polymorphism is E, Derived polymorphism is G
  VARIANT 106: note = Ancestral polymorphism is G, Derived polymorphism is D
  VARIANT 102: note = Ancestral polymorphism is R, Derived polymorphism is T
  VARIANT 100: note = Ancestral polymorphism is D, Derived polymorphism is Y
  VARIANT 98: note = Ancestral polymorphism is I, Derived polymorphism is V
  VARIANT 60: note = Ancestral polymorphism is V, Derived polymorphism is F
  VARIANT 49: note = Ancestral polymorphism is T, Derived polymorphism is N
  VARIANT 45: note = Ancestral polymorphism is D, Derived polymorphism is Y
  VARIANT 43: note = Ancestral polymorphism is P, Derived polymorphism is H
  VARIANT 39: note = Ancestral polymorphism is S, Derived polymorphism is L
  VARIANT 38: note = Ancestral polymorphism is S, Derived polymorphism is L
  VARIANT 29: note = Ancestral polymorphism is R, Derived polymorphism is H
  VARIANT 9: note = Ancestral polymorphism is S, Derived polymorphism is L
MKGLWVGFSGNNALLYRRENPLSLRCSFRSLKARNNRSSAVAPKDYCETYIQFLRDKWIVPDLDPPSPKDVDLLYQFIDKCKRLMVVTGAGMSTESGIPDYRSPNGAYSTGLILNHFLIRLHHRAGSNPLELHGSVYEVICLECLNVVHPSVENHSRRNVVNNTDPCWKLEIYHSHVRCWVGSSTEKISFWIA

SEQ ID NO: 17268 - protein, 78 aa, Zea mays
  VARIANT 13: note = Ancestral polymorphism is L, Derived polymorphism is F
MGGLSTKLFVVLLLLVCYTGTQGGPVTMVSARKCESQSFRFKGPCSRDANCANVCLTEGFTGGVCKGLRHRCFCTRDC

SEQ ID NO: 17269 - protein, 143 aa, Zea mays
  VARIANT 88: note = Ancestral polymorphism is E, Derived polymorphism is G
  VARIANT 87: note = Ancestral polymorphism is A, Derived polymorphism is T
  VARIANT 84: note = Ancestral polymorphism is T, Derived polymorphism is M
  VARIANT 60: note = Ancestral polymorphism is V, Derived polymorphism is M
  VARIANT 36: note = Ancestral polymorphism is P, Derived polymorphism is S
MASQAIESHRAGAEVCTGDAACRKKSIELLEELGLPKGLLPMEDIQEFGYNRDTGFMWLVQGKKKVEHTFKKIKQTVSYAAEVTAFTEKGKLRKITGVKTKELMLWLSVVEVYVPEASPEKVTFKTGTGLSDSFDAAAFALGE

SEQ ID NO: 17270 - protein, 186 aa, Zea mays
  VARIANT 44: note = Ancestral polymorphism is R, Derived polymorphism is Q
  VARIANT 85: note = Ancestral polymorphism is T, Derived polymorphism is N
MDEAQVVESKDGTISVASAFVAHQEAVQDRDHKFLTKAVEEAYRGVDCGDGGPFGAVVVRNDEVVVSCHNMVLKHTDPTAHAEVTAIREACKKLGKIELSDCEIYASCEPCPMCFGAVHLSRIKRLVYGAKAEAAIAIGFDDFIADALRGTGFYQKANMEIKKADGNGALIAEQVFEKTKEKFQMY

SEQ ID NO: 17271 - protein, 143 aa, Zea mays
  VARIANT 4: note = Ancestral polymorphism is Q, Derived polymorphism is H
  VARIANT 17: note = Ancestral polymorphism is T, Derived polymorphism is I
  VARIANT 21: note = Ancestral polymorphism is A, Derived polymorphism is V
  VARIANT 31: note = Ancestral polymorphism is E, Derived polymorphism is K
  VARIANT 36: note = Ancestral polymorphism is P, Derived polymorphism is S
  VARIANT 54: note = Ancestral polymorphism is T, Derived polymorphism is A
  VARIANT 60: note = Ancestral polymorphism is V, Derived polymorphism is M
  VARIANT 84: note = Ancestral polymorphism is T, Derived polymorphism is M
  VARIANT 96: note = Ancestral polymorphism is T, Derived polymorphism is S
MASQAIESHRAGAEVITGDAACRKKSIELLEELGLPKGLLPMEDIQEFGYNRDTGFMWLVQGKKKVEHTFKKIKQTVSYAAEVTAFAGKGKLRKITGVKTKELMLWLSVVEVYIPESSPEKVTFKTGTGLSDSFDAAAFALGE

SEQ ID NO: 17272 - protein, 508 aa, Zea mays
  VARIANT 26: note = Ancestral polymorphism is V, Derived polymorphism is I
  VARIANT 211: note = Ancestral polymorphism is P, Derived polymorphism is L
MLNCSRKMGRSASVLQVLLVSATIVVAQTQWASGVWGMYCEDLTASVERPHRASVTDFGAVGDGATLNTKAFQNALFHLDSFAKKGGAQLFVPAGRWLTGSFSLISHLTLSLDKDAVILGSPDSSDWPVIDALPSYGRGRELPGKRHQSLIFGSNLTDVIITGANGTVDGQGAVWWDWFHNHTLNYTRPPLVELMYSTRVVISNLTFINSPFWNIHPVYCSQVLVQHLTILAPISSPNTDGIDPDSSTNVCIEDCYVRNGDDIIVIKSGWDEYGISFAHPSSNISIRNITGQTRNSAGLAFGSEMSGGISDVRAEGVRIVNSVHGIRIKTAPGRGGYVKNVYVADVSFDNVSIAIRITGNYGEHPDDGYDRNALPTISNITIKDVVGVNIGVAGMLQGIPGDSFSGICLSNVSLSVRSTDPWNCSLVEGYSSSVSPEVCEQLRATPGPGSGQMCYGGNYPAAAAQPQPPQKSGASRLVLGWLVLVRYGCRHITWFLLANELPGLFNKG

SEQ ID NO: 17273 - protein, 116 aa, Zea mays
  VARIANT 41: note = Ancestral polymorphism is A, Derived polymorphism is V
MPRHLVGDSVGNLSLKELKQLESRLEKDISKIRARKSELLAAEINYMAKRETELQNDHMNLRTKSQANVWLTSTCRTQEHALQATDQKINLQDTKNMPYRPLKCQSCCPGFFCPDH

SEQ ID NO: 17274 - protein, 246 aa, Zea mays
  VARIANT 54: note = Ancestral polymorphism is A, Derived polymorphism is V
MAMLARSAAHLFFFLLLVSTAPAVRTIPDEARGPGNNIHEACSKTLFPKVCLHALKDNPECQAGAVTPRRLAELLVYVSAEVGMTVAAFAHHELNSIKDDVLYKCLDTCSEDIEEAVAHLSALSRDFSDAKFLEVKSWLSSTLGGTSTCDDACKDAPVSDIKNACITKSFEFEKLLRVTLDLITDASGSMSAEVALPPSAASGASGPAPAPFGGYGSSAGAPAYGAPSPAGDPAYGASGSPAPTPL

SEQ ID NO: 17275 - protein, 113 aa, Zea mays
  VARIANT 86: note = Ancestral polymorphism is T, Derived polymorphism is A
  VARIANT 81: note = Ancestral polymorphism is P, Derived polymorphism is L
  VARIANT 69..113: note = Derived polymorphism lacks residues 69 to 113
  VARIANT 60: note = Ancestral polymorphism is A, Derived polymorphism is P
  VARIANT 32: note = Ancestral polymorphism is R, Derived polymorphism is Q
  VARIANT 28: note = Ancestral polymorphism is R, Derived polymorphism is H
  VARIANT 24: note = Ancestral polymorphism is V, Derived polymorphism is I
  VARIANT 23: note = Ancestral polymorphism is P, Derived polymorphism is L
  VARIANT 19: note = Ancestral polymorphism is V, Derived polymorphism is I
  VARIANT 16: note = Ancestral polymorphism is A, Derived polymorphism is V
MTTVSGWDDESVLLNVMVIEATLVYESHRKRRASTCSNDDDTRSNTKYGDTVDRAPLFHAAKVYLAMVQIMPIHEILASTLIEKMTLQIFQTYHQGATFLQWCGAKTTTWSTQ

SEQ ID NO: 17276 - protein, 480 aa, Zea mays
  VARIANT 180: note = Ancestral polymorphism is E, Derived polymorphism is D
  VARIANT 203: note = Ancestral polymorphism is E, Derived polymorphism is G
  VARIANT 357: note = Ancestral polymorphism is F, Derived polymorphism is I
  VARIANT 441: note = Ancestral polymorphism is V, Derived polymorphism is A
MARHINFIINKCFKPHTMVMEESLQRALLRAQVIDEEAMGRQITNQAMIQQLGMLRDAMHRGYYALDAFRYQPHCGEDCNDPAIRGMLSLSKVPSPKEPYFFSQTAQSRVQLQDALDGLSSMIVDLNESVMFLMSYPRLYRQPYSMHILLANCMFGRHMEAELVVKFLLHTPPHCSRELEVMPIVGPPRVGKSTLVAHVCKDERVCDYFSEILWLCESDFTSDELAGRQGCGMKRHNCMPNLNRGKRLLVVVELCGNLYEDAWNRLYLVSKRSFPSGSKIIVTSHSDTIVKFGTTPALTLKPLSHEAYWYFFKALTFESMDPKKHPTLAQLAMEIARMLHGSFHGAHITSYLLREKFNIHFWFKFMCFLRGFIQKHVSEIGVNPFDLLNQNRPVRHGRMATPSEDLIVCHQYHRSSQEEVPEIRIQDVLYGSTKRHGKFEVLVWRSQIPPYYSYVNVCEIRERKITGAKRKHPMKDRTTF

SEQ ID NO: 17277 - protein, 452 aa, Zea mays
  VARIANT 139..452: note = Derived polymorphism lacks residues 139 to 452
MEESLQRTLLRAQAIDEEAMGRHITNQAMIQQLSMLRDAMHRGSYALDAFRYEPHYGEDDSDQVVSGFMSLSKAPFAKDQYFFSRTAQFREQLQEALDRLGSMIVDLNELVMFLASYPRMHCQPYNMHILLGNCMFGRQMEAELVIKFLLHTQLHSSEELEVLPIVGPPRVGKSTLIAHVCKDERVQDHFSEIVWLNDLDFTDGEHQNQVSNSNKDKRLLVVIELSGNLYEDAWNRFYLASKRSFCSGSKIVLTSSSDRAVKFGTSQALTLNHLSHEAYWYFFKTLAFGSIDPEAHPGLAQVAMEIARTQNRSIPGACIICYLLRNNFNIHFWCKVLRFLRVFVQNHVSKFNKHPYDLLSQNRPIQISRMATPSEYVVIRRQYQCSSQEEVPKIRAQDVVYGSMKTCGKFEVLLWRSPIPPYYSYASTYEIQEPRTTSAKRKRSMKDGVTFC

SEQ ID NO: 17278 - protein, 253 aa, Zea mays
  VARIANT 6: note = Ancestral polymorphism is P, Derived polymorphism is T
  VARIANT 17: note = Ancestral polymorphism is K, Derived polymorphism is N
  VARIANT 57: note = Ancestral polymorphism is G, Derived polymorphism is V
  VARIANT 66: note = Ancestral polymorphism is D, Derived polymorphism is E
  VARIANT 89: note = Ancestral polymorphism is Y, Derived polymorphism is C
  VARIANT 131: note = Ancestral polymorphism is L, Derived polymorphism is R
  VARIANT 140: note = Ancestral polymorphism is G, Derived polymorphism is V
MVSPTPGGKDAREGGGKAEWMIYAFVARGTAVLAEYTEFTGNFPAIAAQCLQRLPAGSSSAGTGPDGRGDAPARFSYACDRHTFNFLLYRGYAYCVVAEESVPKNVSVAFLERLKDDFMKRYGGGKADTALAKCLNKEYGQVIKQHIQYVLDHSEELDKMLKVQAQVSEVKNIMLDSIEKTLGRGEKLSELQDKTSELHIQAQQFKKQGVKIRRKTWLQNMKIKLVILGILLLLVIIVWVSICQGFDCTKHET

SEQ ID NO: 17279 - protein, 137 aa, Zea mays
  VARIANT 1: note = Ancestral polymorphism is T, Derived polymorphism is M
  VARIANT 19: note = Ancestral polymorphism is S, Derived polymorphism is P
  VARIANT 20: note = Ancestral polymorphism is E, Derived polymorphism is K
  VARIANT 25: note = Ancestral polymorphism is A, Derived polymorphism is V
  VARIANT 29: note = Ancestral polymorphism is L, Derived polymorphism is M
  VARIANT 31: note = Ancestral polymorphism is C, Derived polymorphism is S
  VARIANT 33: note = Ancestral polymorphism is G, Derived polymorphism is A
  VARIANT 50: note = Ancestral polymorphism is P, Derived polymorphism is A
  VARIANT 51: note = Ancestral polymorphism is A, Derived polymorphism is T
  VARIANT 59: note = Ancestral polymorphism is R, Derived polymorphism is C
  VARIANT 60: note = Ancestral polymorphism is R, Derived polymorphism is C
  VARIANT 63: note = Ancestral polymorphism is S, Derived polymorphism is I
  VARIANT 64: note = Ancestral polymorphism is S, Derived polymorphism is F
  VARIANT 65: note = Ancestral polymorphism is I, Derived polymorphism is N
  VARIANT 67: note = Ancestral polymorphism is A, Derived polymorphism is T
  VARIANT 68: note = Ancestral polymorphism is E, Derived polymorphism is K
  VARIANT 93: note = Ancestral polymorphism is G, Derived polymorphism is S
  VARIANT 96..137: note = Derived polymorphism lacks residues 96 to 137
  VARIANT 100: note = Ancestral polymorphism is A, Derived polymorphism is T
MPPFATAPQLCKLSQPTASEMKFVAAYLLESLGADAATEERVDALPAPAPALPTKNDVRRILISISAEVEQDRLDRLLALLEVKDIAELIATGREQLAYAPSGAAAGVIAAPAAAEAVEATKKEEDDDDVALFNLFD

SEQ ID NO: 17280 - protein, 339 aa, Zea mays
  VARIANT 140: note = Ancestral polymorphism is V, Derived polymorphism is E
  VARIANT 159: note = Ancestral polymorphism is E, Derived polymorphism is K
MEESLQRTLLRAQAIDEEAMGRHITNQAMIQQLSMLRDAMHRGSYALDAFRYEPHYGEDDSDQVVSGSMSLSKVPFAKDQYFFGRTAQFREQLQEALDRLGSMIVDLNELVMFLASYPRLHCQPYNMHILLGNCMFGRQVEAELVIKFLLHTQLHSSEELEVLPIVGPPRVGKSTLVAHVCKDERVQGHFSEIVWLNDLDFTDGEHQNQVSNSNKDKRLLVVIELSGNLYEDAWNRFYLASKRSFCSGSKIVLTSSSDRAVKFGTSQALTLNHLSHEAYWYFFKTLAFGSIDPEAHPRLAQVAMEIARTQNRSINAAYTICYLMRNNFNIHFWCKTNTD

SEQ ID NO: 17281 - protein, 842 aa, Zea mays
  VARIANT 43..842: note = Derived polymorphism lacks residues 43 to 842
  VARIANT 400..842: note = Derived polymorphism lacks residues 400 to 842
  VARIANT 554: note = Ancestral polymorphism is M, Derived polymorphism is K
  VARIANT 667..842: note = Derived polymorphism lacks residues 667 to 842
  VARIANT 694..842: note = Derived polymorphism lacks residues 694 to 842
MEADPPLPPASALMEELVEEVLLRFPPADPASLVRAALVCRRWRRIVTGPRFRRRYRDLHLHRGRGGSHPPMLGFLANAGAGTRFVPTSTFRLAPARARAPADGLLLGGWRALDARHGRALLRRDTGRDAPVDCELAVWDPATGRRTDLPRLPWSPYPYSWNAAVLCAATITASACDHLDCCGGGGHFLVVVVGTNHAEMFSHVYSSEAGAWNASASASARHPDDNVDFAPSALAGNALYFAFQTGAAALEYDLGTREMAVVRLPPPPRLDWQRAVLATRDDGRLGLATAGKSTIYLWAREAPPRGDGSWTRAIELDTLLPVGALSAFVDVVSFVDGVGVVFVRTGDGLFTIDLMSRRVTKVFKDTFFSGIFPYMSFHTPALEVASTGEGPSSGARENSQMESFLSAVLGELISRSINLIINKLSKVNMEESLQRALLRAQVIIEEAMGRHITNQVILLQLGVLRDAMHRGYYALDAFRYQPHYGEDGNPAVRRFVRLSKVPCAKDLYFSGPTVQFQEQLQEALDKLSSMIVDMNELVMFLMSYPRLYRQPYNKHILLGNCMFGRQMEAQLVINFLLHTKPHSSEELDVLPVVGPHRVGKSTLIAHVCKDERVRDYFSEILWLHDSDFTDDELTLRQGCAMKRQFFLSNFKKGKRFLVVIELYGNLCEDARNKFYRSSRQSFLSGSKIIVTSCSDKIVKFGTAPALTLKHLSHEAYWYVFRTLTFGSIDPEMHPRLAQLAMEIARLQIGSINSAHTISYLLRDNFDIHFLCKYHRSPHEEVPEIRLQDVFYGSIKKNGKFEVLVWRSQIPPYYSYVHACENRERKNTGAKRKRCMKDGTTSS

SEQ ID NO: 17282 - protein, 172 aa, Zea mays
  VARIANT 33: note = Ancestral polymorphism is P, Derived polymorphism is L
  VARIANT 87: note = Ancestral polymorphism is A, Derived polymorphism is T
  VARIANT 102: note = Ancestral polymorphism is S, Derived polymorphism is N
  VARIANT 118: note = Ancestral polymorphism is E, Derived polymorphism is K
  VARIANT 121: note = Ancestral polymorphism is D, Derived polymorphism is G
  VARIANT 127: note = Ancestral polymorphism is S, Derived polymorphism is Y
  VARIANT 137: note = Ancestral polymorphism is P, Derived polymorphism is L
MDGPARSTSSHARILASLPISAATAPGSAPKTPTTPPVATAHQPSQPTTTSETSEMEEFLAAYLLPCLGADAATGQRVDVLPGPATALPTKDDVRRILRSVSAEVEEDRLDLVFALLEVKGIAELIYTGGEQLAYAPSGAAAAVVAAPAAAEVEEEATKEEDEDVALFNLFD

SEQ ID NO: 17283 - protein, 493 aa, Zea mays
  VARIANT 128: note = Ancestral polymorphism is L, Derived polymorphism is H
  VARIANT 142: note = Ancestral polymorphism is V, Derived polymorphism is A
  VARIANT 155: note = Ancestral polymorphism is P, Derived polymorphism is S
  VARIANT 163: note = Ancestral polymorphism is G, Derived polymorphism is C
  VARIANT 269: note = Ancestral polymorphism is N, Derived polymorphism is I
MESFLSAILGELISRSMNFIINKWSKPLTLDMEESIQGALLQAQVIIEEAMGRHITNQAMLLQLGMLRDAMHRGYYTLDAFRYQPHYGEDANDPSARRFLTLSKAPCAKDLYFTRRTVQFQEQLREAHDKLRSMIVDMNQLAMFLMSYPRLYRQPYSMHILLCNCMFGRQMEAQLVISFLLHTKPHSSEELEVLPVVGPLKVGKSTLIAHVCKGERVRDYFSEILWLHDCDFTDDELSFRQGGAMKRQFFLSNFKKGKRLLVVIELYGILCEDRWNRFYRASRRSFLSGSKIIVTSCSDKIVKFGTTPALTLKHLSPEAYWYFFKTLTFGSTDPEMHPRFAQLAMEIARLQIRSINSAYVTSYLLRDNFSIHFWCKVLSFLRGVLQAHISKFGVHPSDLLNKNNLVHLGRMASPSEDLIIYHQYHRSPQEEVPEIRIQDVVYGSIKKQGKFEVLGWRSQIPPYYSYVYVCEIRERKITGAKRKHCVEDGATSS

SEQ ID NO: 17284 - protein, 571 aa, Zea mays
  VARIANT 412..571: note = Derived polymorphism lacks residues 412 to 571
MGPPAYTASPCTGSALFSNTRAPPPPPRLLIRWGPGPPSAVGRHGGRVTPSQERRGPAPSQERRRPAPSQERRRPTESSSQSHQLQERKRHWKAGEFPGTAADGGGGGGRRPALGNRHSKAGEFPGTDGVRPAPAPPQGKRHWKAGEFPGAAAAPGSGTPRTPLKNVKKRLDARADAKAWACTVTEALADRVSSKNWQEALQVFEMLKEQPFYHPKEGTYMKLIVLLGRSGQPTRAHQLFDEMLQQGCQPTPELYTALIGAYCRSGLLDEALQLLNDMKSSPLCQPDVYTYSTIIKACIDAARFDLTDAMYKDMAERSISPNTVTQNIVLSGYGKAGRLDDMERVLSDMLDSVSCKPDVWTMNIILSLFGNRGEVELMERWYEKFRGYGVEPETRTLNILIGAYGKRRMYDKMSAVMEHMRKLAFPWTTATYNNVIEAFAEAGDAGNMEHAFNQMRSEGMRPDTKTFCCLIDGFSRAGQFHKVVGMVKLAERLDVPVNTPFHNAVLGACARADDLVEMERVFRRMKHTQCEPDASTYSILVEAYRKEGMTDKIYALHQENPALVPADFVMV

SEQ ID NO: 17285 - protein, 107 aa, Zea mays
  VARIANT 55..107: note = Derived polymorphism lacks residues 55 to 107
  VARIANT 50: note = Ancestral polymorphism is G, Derived polymorphism is E
MCCTPPDLSSHLTLDSPMGGPFSSIVGALGPCYPVPRGAAPSAMEAFEHGLLPIQKLVFLEEHKCEIVQMLQTRKHICGMTGHRVNDALDLKIADIGIVVADATDTA

SEQ ID NO: 17286 - protein, 113 aa, Zea mays
  VARIANT 10: note = Ancestral polymorphism is Q, Derived polymorphism is L
  VARIANT 12: note = Ancestral polymorphism is W, Derived polymorphism is R
  VARIANT 14: note = Ancestral polymorphism is L, Derived polymorphism is S
  VARIANT 27: note = Ancestral polymorphism is G, Derived polymorphism is V
  VARIANT 45: note = Ancestral polymorphism is A, Derived polymorphism is V
  VARIANT 50: note = Ancestral polymorphism is T, Derived polymorphism is I
  VARIANT 60: note = Ancestral polymorphism is R, Derived polymorphism is S
  VARIANT 62: note = Ancestral polymorphism is E, Derived polymorphism is V
  VARIANT 67: note = Ancestral polymorphism is I, Derived polymorphism is N
  VARIANT 69: note = Ancestral polymorphism is D, Derived polymorphism is G
  VARIANT 79: note = Ancestral polymorphism is A, Derived polymorphism is V
  VARIANT 85: note = Ancestral polymorphism is A, Derived polymorphism is T
  VARIANT 90: note = Ancestral polymorphism is K, Derived polymorphism is E
MLLSHVCENLIRNLKTGKVDQTLSLSGGKTTCIACQPTLPILVTALDDRIVCFWDASIYRLEEKVKIMGSYALELVFIADINGSARLVVKFKSMMVIMEVNLAIEYTSRWSDG

SEQ ID NO: 17287 - protein, 31 aa, Zea mays
  VARIANT 31: note = Ancestral polymorphism is L, Derived polymorphism is I
MNGTVFVRNYKRMPQVTDWDMMFVIVFPANL

SEQ ID NO: 17288 - protein, 442 aa, Zea mays
  VARIANT 67: note = Ancestral polymorphism is H, Derived polymorphism is Y
  VARIANT 423: note = Ancestral polymorphism is M, Derived polymorphism is I
MAPPPWPLLATSLLLILFHHSPRAAVAFPPSLGDSLLGAARAPGFAAWLRGLRRRIHERPELAFQEHRTSELVRDELDAIGVPYAWPVAQTGVVATIAGGSDGPVVALRADMDALPLQELVDWEHKSKESGKMHACGHDAHTTMLLGAAKLLHARKDDLKGTVKLVFQPGEEGYGGAYHVLREGVLDDVSAIFGLHVDPGLPVGTVSSRPGPFLAAAGRFRVTVTGKGGHAAGPQDAVDPIVAASSAIVSLQLLVAREIDPLQAAVVSVTFMKGGDAYNVIPESASFGGTFRSLTTEGFSYLMKRIKEIIEGHAAVHRCTAAVDFMQEKLRPYPATVNDEGMYRHAREVAEAMLGQDKVSVGAQMMGAEDFSFYAEKFAGAFFMIGVRNKSMEEAMRPLHSPYFVIDEDVLPVGAAFHSAVAMEYLNKYSTTRQTELLRIEL

SEQ ID NO: 17289 - protein, 582 aa, Zea mays
  VARIANT 523: note = Ancestral polymorphism is A, Derived polymorphism is V
MAAPPPAPFLLLLAVAAASLAGADDPYRYFTWTVTYGPISPLGTTQQFFSSSPLPVPQLLHALHLSQFFPPSSPLPVPQLRQGILINGQFPGPRIDCVTNDNLVVNVVNSLDEPFLLTWNGVKQRKNSWQDGVAGTNCGIPPGANYTYRFQAKDQIGTFFYFPSLALHRAAGGFGALNVYQRPAIPVPYPPPAGDFTLLVGDWYAAASPHADLRRALDDGGGGALPPPAALLINGAAASGAAPFVGAQGGTYLFRVSNIGLRASVNVRVQGHALRLVEVEGTHPVQSAYDSLDVHAGQSLAFLVTLDQAPLDYAVVASTRFAAAELTAVATLHYAGATARAPGPLPPAPPPGYGWSLGQARSFRWNLTASAARPNPQGSFHYGAIPTSRTLVLASSASLDGAGRRRCAVNAVSFVVPDTPLKLADRYDIAGVIDWDGLPARLDGAAAVPRAGTPVLRLGLHEFVEVVFQNTEEELQSWHLDGYDFWVVGYGDGQWNETQRQTYNLVDAQARHTVQVYPNGWSAILVSLDNQGMWNLRSAMWDRQYLGQQLYLRVWTPEQSLSNEYAIPANAILCGKAAALPH

SEQ ID NO: 17290 - protein, 369 aa, Zea mays
  VARIANT 358..369: note = Derived polymorphism lacks residues 358 to 369
  VARIANT 280: note = Ancestral polymorphism is M, Derived polymorphism is K
  VARIANT 277: note = Ancestral polymorphism is R, Derived polymorphism is S
MGLDVMEIGMGADLSLDLRHFASKAVRQSKDDTPAPDMDACIRRLEEERGKIEMFKRDLPLCARLLADVIDVMKEEAGKKKTTTRRRSDRRLASAAADDEEEEADGATADKSKWMSTAQLWTGDSGREDAESEKQDKGRCSPEARSRGALLPFKADVGSGAPAFAPLFLRTDDKAAAARVGVPDLSSLLSPPATMPPADAGAEESRRQVVGFAQAAARAAAMAPSAPALGLQSQQQQQQQQQARKARRCWSTELHRKFVAALDQLGGPQVATPKQIRELMKVDGLTNDEVKSHLQKYRLHNRRAPGSGVVRQPIVLVGGLWIPQEQGSPQSGSPHGPLHHLSTSVAAVSSAATASCEEEDGRSESYGWK

SEQ ID NO: 17291 - protein, 306 aa, Zea mays
  VARIANT 129: note = Ancestral polymorphism is S, Derived polymorphism is F
  VARIANT 83: note = Ancestral polymorphism is V, Derived polymorphism is F
  VARIANT 21: note = Ancestral polymorphism is E, Derived polymorphism is D
MASLQVTPTSAFTEWNELKFEGLYLFHTPLGSGANQARVIDNKAPIGIGATVVNNWTVYDGPGPNAKLVARAQGLHIQAGNWVNSFSLVFVDQRFSGSTLEVTGIVVESGEWAIVGGTGQFAMANGVIFKKFHEQRSEGNIIQLTIHAFCPVLGPRKRSAAKVGPWGGSGGSPVDITAEPQRLKSITVATGIAVTSIAFSYVDSAGQTQSAGRWGGSGGETEPVIQLGDSEVLTELSGTIGNVDGHTVITSIKFVTSLKTYGPFGAWGDGSDTPFAIPVQQGSAIVGFFARAGVYLDALGVYVRSL

SEQ ID NO: 17292 - protein, 574 aa, Zea mays
  VARIANT 144: note = Ancestral polymorphism is A, Derived polymorphism is G
  VARIANT 268: note = Ancestral polymorphism is A, Derived polymorphism is V
MEMTTSGAGGVTKLDDDDYPSAAAADRCPPGTEKKMCRRVLLVGSLVTLPLLAFFVFSRENASVAWLQVAIAQLTATNDDDGAAGTRVYGGRRSSWPRAHDEFLGGLLAPGMDRRSCRSRYQSSRYYKHFPFAPSPHLLQKLRGYEARHRRCAPGTPLYAKAVEQLRSGHSAEGGTECSYVVWLPFDGLGNRMLSMVSGFLYALLTGRVLLAALPPDSSDLFCEPFPGATWRLPAEDFPVANLFGVGQDMERSYTKLVDGMVAANATAGVAPSYVYLSLGWLLRDGLFFCGEHQLALRRVDWLLLYSDLYFAPSLYAVAEFQDELRRLFPEKESVHHLLSRYLLHPANPVWSMVTRYYRAYLAPAARRIGVQIRMFDHASIPADDMYGQILNCSRQEHVLPETDDVGEAAPSPTASSGGSKNPTTAIFVASLYADYYRRLTSRYSAAKGGGATRRVGVFQRTHEERQATESLAHNQRALAEIYLLSFCEELVTSGLSTFGYVSSGLAGIRPAILLTAFDHVVPETPCRRAASIEPCNLTPPRGVECLSRPADKDDLARHVRVCEDFKDGVKFFD

SEQ ID NO: 17293 - protein, 1135 aa, Zea mays
  VARIANT 205..1135: note = Ancestral polymorphism lacks residues 205 to 1135
MEASAGLVAGSHNRNELVVIRRDRESGAAGGGAARRAEAPCQICGDEVGVGFDGEPFVACNECAFPVCRACYEYERREGSQACPQCRTRYKRLKGCPRVAGDEEEDGVDDLEGEFGLQDGAAHEDDPQYVAESMLRAQMSYGRGGDAHPGFSPVPNVPLLTNGQMVDDIPPEQHALVPSYMSGGGGGGKRIHPLPFADPNLPGALLTLFAVGICQCECHNVYPCADDRLAGAAVQPRSMDPSKDLAAYGYGSVAWKERMEGWKQKQERLQHVRSEGGGDWDGDDADLPLMDEARQPLSRKVPISSSRINPYRMIIVIRLVVLGFFFHYRVMHPAKDAFALWLISVICEIWFAMSWILDQFPKWLPIERETYLDRLSLRFDKEGQPSQLAPIDFFVSTVDPTKEPPLVTANTVLSILSVDYPVEKVSCYVSDDGAAMLTFEALSETSEFAKKWVPFSKKFNIEPRAPEWYFQQKIDYLKDKVAASFVRERRAMKASYMALFFIQREYEEFKVRINALVAKAQKVPEEGWTMQDGSPWPGNNVRDHPGMIQVFLGQSGGRDVEGNELPRLVYVSREKRPGYNHHKKAGAMNALVRVSAVLSNAAYLLNLDCDHYINNSKAIKEAMCFMMDPLVGKKVCYVQFPQRFDGIDKNDRYANRNVVFFDINMKGLDGIQGPIYVGTGCVFRRQALYGYDAPKTKKPPSRTCNCWPKWCLSCCCSRNKNKKKTTKPKTEKKKRLFFKKAENPSPAYALGEIDEGAPGADIEKAGIVNQQKLEKKFGQSSVFVASTLLENGGTLKSASPASLLKEAIHVISCGYEDKTDWGKEIGWIYGSITEDILTGFKMHCHGWRSIYCIPKRPAFKGSAPLNLSDRLHQVLRWALGSVEIFFSKHCPLWYGYGGGLKFLERFSYINSIVYPWTSIPLLAYCTLPAICLLTGKFITPELTNVASIWFMALFICISVTGILEMRWSGVAIDDWWRNEQFWVIGGVSAHLFAVFQGLLKVFAGIDTSFTVTSKAGDDEEFSELYTFKWTTLLIPPTTLLLLNFIGVVAGISNAINNGYESWGPLFGKLFFAFWVIVHLYPFLKGLVGRQNRTPTIVIVWSILLASIFSLLWVRVDPFLAKSNGPLLEECGLDCN

SEQ ID NO: 17294 - protein, 592 aa, Zea mays
  VARIANT 291: note = Ancestral polymorphism is A, Derived polymorphism is V
MEMASAAGGVPKKLDDDPAAHAAEPWPPAAREEKNKLWRRVLLVGSLVTLPLVAFFVLGRESASTAWLQMAIAKLTAMNNGTAGTVIRVLQVQRCCLHTELIKLAQPPPGFTEGPHVHGRDELLGGLLAPGMDRRACRSRYQSWQYYKHFPFAPSPHLLAKLRAYEARHRRCAPGTPLYAKSVEQLRSGRSADDMECAYIVWLPFDGLGNRMLSMVSGFLYALLTDRVLLAAVPPDSADLFCEPFPGATWRLPAEDFPVANLFGVGQDIDRSYTRLVGDGKVGPGLAAANATPSYVYLSLGWQLKDPLFFCGEHQRALGKINWLLLYSDLYFTPSMYAVAEFQDELRRLFPERESVHHLLSRYLLHPANPVWSLVTRYYRSYLPAATRRIGVQIRMFGHSSIPADDMYNQILNCSRQEHILPETEDGDEDAIDRNGGDGSNNSTAILVVSLYADHFERLRSRYYEHAAKGGEMVGVFQPTHGERQATDNLAHNQRALSEIYLLSFSEELITSGLSTFGYVSSGLAGVRPAILLTAFDHKVPETPCRRVVSMEPCNLTPPRGLECTDKPADVEDLARHVRVCEDFNDGVKFFD

SEQ ID NO: 17295 - protein, 315 aa, Zea mays
  VARIANT 125: note = Ancestral polymorphism is S, Derived polymorphism is F
  VARIANT 55: note = Ancestral polymorphism is E, Derived polymorphism is K
  VARIANT 36: note = Ancestral polymorphism is G, Derived polymorphism is S
MSRSDSPSPSPAAARRAQPSDATLVNAFLWPWVTLGITMPGGVHAVDLYSADPEKLARGYQPEVSLDGQCTWYFLSPLRPKSPHDPRKVRTVADGTGCWRSDSGVKNVIDCLDGARHVGYRQNFSFMRRDAAGADARSGWAMTEFHLHHSYDEHGHGGKVEGLVLCKMYRNRNRRIHGGSDDVVPGVSPCAEKTFSCGKSQPIGHDYSKAKNSDGGATATGTIAPPLLNSMVAGDDKVSGATTTTTAPPLGHKGNPVEMDNEDLLTWAPARKKMRAAGAGAESSEAASTVSNPTPDQVRCPRCGFHFTTMQSSRS

SEQ ID NO: 17296 - protein, 403 aa, Zea mays
  VARIANT 15: note = Ancestral polymorphism is D, Derived polymorphism is Y
  VARIANT 74: note = Ancestral polymorphism is S, Derived polymorphism is F
MAAAPPPDPTVLIEDLVEEFLLRIPPDDPASLARAALVSRHWHRVITGPVFRRRFREFHRSPPLQGYISNIHNSIQFVPISSFRPRHADLDDVIAIHSSPGRVLLCRRPGKGLDVFPGKGLDVFLSVWDPITDELRDLPALPLPVVPGPCTCNWDAAVICAVGEGCNHIHCGFKVVCVGTSQRRDFSCVYSPEAGSCWSDLIFAASGEHTNSFETGTCVHAGSSLYFLSRFNHEIVKYDLLTDRMSTICFRVEPDAQINGMATVLIATEDGRLGVAKTSNSTLGCSTLHLWIRDHERWEERRPIELRMLLPDDALRDPQFPPEFFPDKPWLAGFAGTRAGVIFFKTRLGYFVVDLNSGTSKNIGECLGWGCIIPYVSFCTPGTLLSLCILLICTCTISSSSAV

SEQ ID NO: 17297 - protein, 150 aa, Zea mays
  VARIANT 29: note = Ancestral polymorphism is A, Derived polymorphism is V
  VARIANT 30: note = Ancestral polymorphism is A, Derived polymorphism is V
  VARIANT 75: note = Ancestral polymorphism is I, Derived polymorphism is T
  VARIANT 78: note = Ancestral polymorphism is P, Derived polymorphism is S
  VARIANT 108: note = Ancestral polymorphism is V, Derived polymorphism is L
MARSGAMVSCMLLLVVAQLLMVMATQTAAAAGDQRGAGRRLLWQSRLNQQSYLSYQVSALSRIAQGSQISDTNSIELPCIMWLKVYKPKRFDLSCFINWVRTTKHTQVVVAGVWRLVCDIPRKKCMFPSRTSTIEDEVAGTRGGASWRRG

SEQ ID NO: 17298 - protein, 267 aa, Zea mays
  VARIANT 191: note = Ancestral polymorphism is G, Derived polymorphism is R
  VARIANT 200: note = Ancestral polymorphism is L, Derived polymorphism is M
  VARIANT 228: note = Ancestral polymorphism is S, Derived polymorphism is L
MEPDADADYMGDLSRFLPPSPSSSPLKNLGRRKQPSMQAQAQPRAKHGKGVPWQERRRQERERKQREEDARTMAGLTEAIPKSNVGFRMLKQMGYDPDSRTGAGAEPVSIEIRHSRAGLGAEEPVLALTSSLAPVEKPREVSEQERRQQEEMAAELREDSRNGLPEHLKINHLEVLAMSRIQSVCDKFVKGLIPVHGSNLKELAFAGCLELTSSSIKTVGEYCQELTSLDLRNLNRLRDSALWHLRGCRLLRKLRLQRNTFSFFLAF

SEQ ID NO: 17299 - protein, 116 aa, Zea mays
  VARIANT 46: note = Ancestral polymorphism is T, Derived polymorphism is M
  VARIANT 85..116: note = Derived polymorphism lacks residues 85 to 116
MERTKKPCLGVVALLLFLLLASAAHGAQPADAKDIAAGDGDGERATVRTGHGHGYSSSHSGGHPSGGTPEQGGAGVVDPRNLNARSHHRRGAATRANVYSSWLVCTLVAGGVMLLL

SEQ ID NO: 17300 - protein, 219 aa, Zea mays
  VARIANT 83: note = Ancestral polymorphism is L, Derived polymorphism is S
MLDAAIRALEVEARDAKMRLDATAQLPRRTQRMLGFRHGGLLDLPPLRLARCAASPSCWICRLSVSSSSSAGGMPNNLYILTLLLATTTYLSGMKILVSNILMQRRTLSLLGSMGLRSQPGLEPDKGLTWQMTKRRGDQEVHKVTEERPGWCSDPHLPPCAAFVEIMATVFSRDAWRCVWHMIQNDLVHGWGLDFALRKCVEENMEWNSNFGGRTSVKT

SEQ ID NO: 17301 - protein, 461 aa, Zea mays
  VARIANT 30: note = Ancestral polymorphism is R, Derived polymorphism is H
MSASENQAAEARMDKSAMKIGPTGNKIRIRLPLSLRKRLAEGLQTMSTGLPEDTTKHAAKEVPEYTDDTAKANFIVPDLNLTIAAGTQDKRESICPVRKGSCEERHTDIMSNGLPPDSSETTKKQACVGAMDNTQSMEPSITGVQSEVEKNNSIKKPCEPASENILSKKLLYETNSNTSRKRVTEEAKINNPSKNLKTSAVKCGEANDCFLTRRSADQSNDKKFSKKLCSSAVQATDSCQNISGMKLPTSVGVAVEQSTSTAFSEATKVYKEFEKQVKRTVYLDNLSCLATDGVITTALNQFGSVKHVSFLTNYTVPFDIPKSALVEMETEKDADSVVKILDEFPFMISGMPRPVRAKHATAEMFNDRPCKPGIKLEFRWVGPTDPDYHNVRKFKFLSKRHELENLALIKNELREEQLLARHQQDNLNFHYMKLETVDSMITSGCINRLTHIYNLRFADMY

SEQ ID NO: 17302 - protein, 268 aa, Zea mays
  VARIANT 16: note = Ancestral polymorphism is G, Derived polymorphism is E
  VARIANT 28: note = Ancestral polymorphism is T, Derived polymorphism is M
  VARIANT 79: note = Ancestral polymorphism is A, Derived polymorphism is V
  VARIANT 99: note = Ancestral polymorphism is L, Derived polymorphism is F
  VARIANT 187: note = Ancestral polymorphism is T, Derived polymorphism is A
MWCQSCKEGYDEEDAGTCKECYEEASETEEELKREIDDLRSRLLFLRLPSPTLDAASAPNCDLLLHAIPSTGAGGERDAGRTPDTPAVPAHRVILVGPLSFTTSSFLCAILASRSPVFRAMLENEMEESRSGVIKIYDVSYDILRAFVHYMYTAEALLDEQMASDLLVLAEKYEVKHLKAYCEKFIASKVNDDNAITHYAFAHRHSAKQLLEASLSVLMANMSTLSDREEYKELVEKDPRLVVEIYEAYLNRQVNTAAGKDTNCSNRK

SEQ ID NO: 17303 - protein, 379 aa, Zea mays
  VARIANT 6: note = Ancestral polymorphism is T, Derived polymorphism is P
  VARIANT 62: note = Ancestral polymorphism is G, Derived polymorphism is R
  VARIANT 63: note = Ancestral polymorphism is Y, Derived polymorphism is H
  VARIANT 124..379: note = Derived polymorphism lacks residues 124 to 379
  VARIANT 129: note = Ancestral polymorphism is A, Derived polymorphism is V
  VARIANT 142..379: note = Derived polymorphism lacks residues 142 to 379
  VARIANT 156: note = Ancestral polymorphism is S, Derived polymorphism is F
  VARIANT 157..379: note = Derived polymorphism lacks residues 157 to 379
  VARIANT 159: note = Ancestral polymorphism is S, Derived polymorphism is Y
  VARIANT 191: note = Ancestral polymorphism is S, Derived polymorphism is L
  VARIANT 201: note = Ancestral polymorphism is T, Derived polymorphism is M
  VARIANT 211..379: note = Derived polymorphism lacks residues 211 to 379
  VARIANT 229..379: note = Derived polymorphism lacks residues 229 to 379
  VARIANT 248..379: note = Derived polymorphism lacks residues 248 to 379
  VARIANT 251..379: note = Derived polymorphism lacks residues 251 to 379
  VARIANT 302..379: note = Derived polymorphism lacks residues 302 to 379
  VARIANT 308..379: note = Derived polymorphism lacks residues 308 to 379
  VARIANT 310: note = Ancestral polymorphism is T, Derived polymorphism is K
  VARIANT 311: note = Ancestral polymorphism is W, Derived polymorphism is R
MEMMYTDIAQALEANGIEANLNDYLTFFCLGNREVKQEGEYEPEEHPEPDTDYIWGSRGQIGYAIVAMIARGLMLGPDQPVVLHMLDLPKSADALSGVRMELIDAALPLLRGVVATSDEAEAFRGVSFAVLIGGWPRKEGMQRKDLIAKNVPIYQSQASALQQHAAPNCKVLVVANPANMNALVLKELAPSVPAKNITCLTRLDHNRALGQISEKLGVHVDDVRNAIVWGNHSSTQFPDASHATARTQHGEKTVRELIADEKWFKEEFVSVVQQRGEAVIKARKQSSSLSAASAACDHMRDWILGTPKGTWVSMGVCSDGSYGVPKGIFYSFPVTCEKGEWSILQGEFLSLYQYSRFCRTLSREGCYCRCFLQSPYSCS

SEQ ID NO: 17304 - protein, 188 aa, Zea mays
  VARIANT 19: note = Ancestral polymorphism is T, Derived polymorphism is M
  VARIANT 43: note = Ancestral polymorphism is R, Derived polymorphism is K
  VARIANT 58: note = Ancestral polymorphism is S, Derived polymorphism is F
  VARIANT 101: note = Ancestral polymorphism is H, Derived polymorphism is R
  VARIANT 117: note = Ancestral polymorphism is R, Derived polymorphism is Q
  VARIANT 118: note = Ancestral polymorphism is S, Derived polymorphism is F
  VARIANT 123..188: note = Derived polymorphism lacks residues 123 to 188
  VARIANT 141: note = Ancestral polymorphism is S, Derived polymorphism is C
MIKKSKDLDAIREMKSCVTWILKSHPPKNVESKILREHIKKEREAAKARKRPYYLKKSELRERKLMNKYNELKEAGKLDALMEKRRRKNASKDHRFMPYRHNSFLILEASERMILGRSSRGGWTLDSQCLLLCCPSRTIVCNMHNLYYFLRIECRRPRWFSMFLISLAAFSVTTTLHMLADLFIYYSC

SEQ ID NO: 17305 - protein, 157 aa, Zea mays
  VARIANT 131: note = Ancestral polymorphism is A, Derived polymorphism is G
  VARIANT 79..157: note = Derived polymorphism lacks residues 79 to 157
  VARIANT 69: note = Ancestral polymorphism is P, Derived polymorphism is L
MGSSLLEKYEVVEQIDPERAMDAEVVELIDQAPTAPPTLSPTRSSARGDDFPFLLLVYSSCSAFLMCAPILNPSLSIACPCRGVGAGEGIIDIMTLESGLREDTHPMGAELRESKLMNKYNELKEAGKLDGFMERRRRKNASKDHLYMPYRWNGDGA

SEQ ID NO: 17306 - protein, 690 aa, Zea mays
  VARIANT 14: note = Ancestral polymorphism is L, Derived polymorphism is H
  VARIANT 18: note = Ancestral polymorphism is A, Derived polymorphism is T
  VARIANT 230: note = Ancestral polymorphism is S, Derived polymorphism is W
  VARIANT 345..690: note = Derived polymorphism lacks residues 345 to 690
MNMEHAVFLFLVWLNTAAITTLCAGGGQTRFSYSGFAGANLTVDGNATVTPDGLLVLTSSKTNLQGHAFYHTPLQLSTSPGGKVASFAAAFVFAIVSDYTDFSAHGMAFVVAPNKGFPGALPAGYLALLNVQNNGNASNHLLAVELDTTQNTDFKDINANHVGIDINDLHSVQSSPAGYYDGGGVLRNLTLFSREAMQVWVEYDGDAGRIDVTLAPIRVGNNKPARPLVSAICNLSTVLKEQSYVGFSSATGGINSRHYVLGWSFAMNGPAPAIDIARLPKLPPFGPKPRSKVLAIVLPIATAAAIVAVGSLATLLVLRKLRYAEVLEEWELEFGPHRFSFKDLYHATSGFKSKHLLGAGGFGQVYKGVLGSSKSVCTEVAVKRISHESRQGMKEFIAEVVSIGRLRHRNLAQLLGYCRRKGELLLVYEYMPNGSLDKYLYYREEENKPVLDWAQRFHIIKGVASALLYIHDKWEKVVIHRDVKASNVLLDSEMNGRLGDFGLARLYDHGTDPQTTHIVGTMGYLAPELIRTGRASKLTDVFAFGAFLLEITCGRRPVSIDDDAAQEMLVDWVLEHLREEGSLAHTVDVSLRGQYDVDEVFLVLKLGLLCSHPYTNIRPDMQQVMQYLDGSTPLPDLQPTDMTFSAMALMQNEGFDSYAMSIQSSAGTGSMATAVSAGSIGTISFISGGR

SEQ ID NO: 17307 - protein, 541 aa, Zea mays
  VARIANT 235: note = Ancestral polymorphism is V, Derived polymorphism is E
MQNDEFQDINDNHVGVDVNSLHSVQSYYAGYYGGGGGSGGFRNLTLISGEAMQVWVDYDAEVAQINVTMAPLSMAKPARPLVSARYNLSTILTDDGPAFVGFSAATGGTLKSRHYVLGWSFSIDRPAPAIDLSKLPKLPRVSAKDRTRTLEIVLPVATAAFLLAAGMAILLLVRRHRRYAELHEDWELEFGPHRFSYKDLFHATDGFKNSNLLGIGGFGRVYKGVLPASRTEIAVKRVSHESKQGMKEFISEIVSLGRLQHRNLVQLLGYCRRKGELLLVYDYMPNGSLDKCLHDREGQHTLDWALRVQIIKGVASGLSYLHLDWEKVVVHRDIKASNVLLDGDMNGRLGDFGLARLYDHGGADGPKTTHVVGTIGYIAPELGRTGKASPLTDIFAFGIFVLEVACGRRPISKQLTQDDDSDGGALLLVDWVLSHWQNGSLTETVDIRLQGDYDSDEASMVLKLGLLCSHPFVDARPTSMRQVTQYLDGHVALPDFMPPCHILPSSMMIPEQSEGFLMYNNTSSQIFKASNGSMSSLSGGR

SEQ ID NO: 17308 - protein, 655 aa, Zea mays
  VARIANT 611..655: note = Derived polymorphism lacks residues 611 to 655
  VARIANT 380..655: note = Derived polymorphism lacks residues 380 to 655
MADVALLRSNQLPFLLLCPADAPPSIFLSAATLPRLCPCFHGELAPAPTSDVPSPSRPAPPSPWFPPSSDQVSEFLDSKSETDVDVDYNSLYSKQDFLQGDDDHGMRVAAATYLKNFTRRNLETRLCSSEVYKEFRDQLAQALLRVEPAILRVLIEVFRQVVEKDFVKDNLWPELIPQLKLVIQSSNLISPGQHPEWNTINALTVLQSVVRPFQYFLNPKVVKESVPQQLEQIAAEILVPLQVTFHHFSDKVLLSPDGTNLEYEQLLLITCKCMYFTVRSYMPSRVKQILPSFCKDMFRILDSLNFNSLIEDGSTMKLKIAKRCLIIFCALVTRHRKHTDKYLDATYCQLCNKNIKTKHPFKSIFPALALNEKDIEEWEEDTDEYMQKNLPSELDDISGWTEDLFTARKSAINLLGVIALSKGPPVASAASKRKKGDKNKGKSEMSSIGELLVIPFLSKFPIPSHGEDASSVAVQNYFGVLMAYGGLQDDMSSSIYQSLMKALTMEYVEDITCYPVCASASGAIAELIENSYVPPDWLILLQVVLKRISTGDENESALLSKLLGTIVEGGQEKVLSHIPEIVSNIASTVMELLPLVPDPWPQVVVHLSSVWSIFWYFVMMTGGRNTGRVGVIKNREKHKGSFETIHMLLRAFCYV

SEQ ID NO: 17309 - protein, 154 aa, Zea mays
  VARIANT 1: note = Ancestral polymorphism is M, Derived polymorphism is L
MARDALAEKNGEVSRLRMELKSTQELLRTALQERDEVQYLAKGFYEMNRWLIMSRLPPVLQATTSVVHALDDGSSSTGSCSQAPNVEGASVGRSTTRVVVTRLLCKVCCARDACMLILPCQHLCACESCGISLTVCPLCYLAKDNVMEVEARFG

SEQ ID NO: 17310 - protein, 590 aa, Zea mays
  VARIANT 230: note = Ancestral polymorphism is D, Derived polymorphism is H
  VARIANT 250: note = Ancestral polymorphism is E, Derived polymorphism is Q
  VARIANT 281: note = Ancestral polymorphism is R, Derived polymorphism is W
MAADAAQQGPGVHRRRGGAAPRAWCCSFAGVPDSPDLRPIPSSAASPAAASRKLPPKSPSAASFYGSPTSSRLAGLGGLIDPRRILSPGRVSPIDPDGAVPLPPPTPPPPPPAEFPAAVGTAEQPAPVLASALPSAAAAPQVVSVREEADAHAAGVLDLKLFLRGRDGRCVLMELDSRVLCGCSDFFAAMAPHEDAAATAAGAGAAGKTIEVDGVDNLDAFRAAVELMYDPDPMRGLAAAGVSRAIDVLERHKLLTTDIKHVWIQEPLVPLPTSGGSRTVWVLKLPPPDQVCSSIMFSKGIKTCLTYIEAVPWNENEEEKLKNLFARFTFDEAISQDILARLRPHNWKSSDDLAVQLIQSVTNSTSTMARKDMQSLVNGLLSKSSVYQKDSSGLNKESLYQICYSCLESLVDLFEEAIEPTYYTGQAVVVRGSKPLIERISTQTENLNWLLDILVNIDIAEEFVELWAKQGRLIRMHEQASAIVRYELSRISAGVFIALGKGKVQCRGDVRSLLFHGWFSTMLLDFGWLQRCPKGLDLRSLEENLGRGLLTLPLRQQQCLFEEWFQFYATKGPECPNLIRAFQFSSSHCM

SEQ ID NO: 17311 - protein, 103 aa, Zea mays
  VARIANT 97: note = Ancestral polymorphism is R, Derived polymorphism is K
  VARIANT 78: note = Ancestral polymorphism is L, Derived polymorphism is F
  VARIANT 64: note = Ancestral polymorphism is L, Derived polymorphism is P
  VARIANT 56: note = Ancestral polymorphism is G, Derived polymorphism is C
  VARIANT 46: note = Ancestral polymorphism is H, Derived polymorphism is R
  VARIANT 45: note = Ancestral polymorphism is R, Derived polymorphism is C
  VARIANT 43: note = Ancestral polymorphism is R, Derived polymorphism is S
  VARIANT 40..103: note = Derived polymorphism lacks residues 40 to 103
  VARIANT 27: note = Ancestral polymorphism is L, Derived polymorphism is V
  VARIANT 25: note = Ancestral polymorphism is R, Derived polymorphism is C
  VARIANT 23: note = Ancestral polymorphism is A, Derived polymorphism is T
  VARIANT 17: note = Ancestral polymorphism is E, Derived polymorphism is G
  VARIANT 4: note = Ancestral polymorphism is T, Derived polymorphism is M
MASTVLEATRVAHEDLERLERLAARELQWEPDNPRDRFFQSHRVRHMLDLVVSTSCKLVRPFILFLRVHDSIHLSDSLCLAILGLDTIYICRLYYERLKEVFI

SEQ ID NO: 17312 - protein, 399 aa, Zea mays
  VARIANT 15: note = Ancestral polymorphism is D, Derived polymorphism is Y
MAAAPPPDPTVLIEDLVEEFLLRIPPDDPASLARAALVSRHWHRVITGPVFRRRFREFHRSPPLQGYISNIHNSIHFVPISSFRPRHADLDDVIAIHSSPGRVLLCRRPGKGLDVFPGKGLDVFLSVWDPITDELRDLPALPLPVVPGPCTCNWDAAVICAVGEGCNHIHCGFKVVCVGTSQRRDFSCVYSPEAGSCWSDLIFAASGEHTNSFETGTCVHAGSSLYFLSRFNHEIVKYDLLTDRMSTICFRVEPDAQINGMATVLIATEDGRLGVAKTSNSTLGCSTLHLWIRDHERWEERRPIELRMLLPDDALRDPQFPPEFFPDKPWLAGFAGTGAGVIFFKTRLGYFAVDLNSGRSKNIGGCLGWGCIIPYVSFCIPGTLAPCFHSVFCSFALAQ

SEQ ID NO: 17313 - protein, 93 aa, Zea mays
  VARIANT 53..93: note = Derived polymorphism lacks residues 53 to 93
MPLKPSRLLHKKQAERAKFIVEKAEQDKRSAIIRAQLIGQAIANNPAFLALRQIEAAREISHAISASANKVFLDSNDLLLNLQQLNVSSRQKK

SEQ ID NO: 17314 - protein, 300 aa, Zea mays
  VARIANT 74: note = Ancestral polymorphism is R, Derived polymorphism is C
MAKFVSSVLVQETVSQALSNLWSESTRRKMDQTVAGSQGHELGERLEMAHTRLEAVLETSERWQIADAALLRWRSKLKRVARYWTVFSARALSGFAQTRCAASGMISTSSIGHGSESGILGLGGGGYSSEDYLRVDTAPVIAAVYTEEQHFLHTEFSSFGQVEEIMLPMAIDYFCKNEKATIYQMLWKGLSMALRSRVQTHRPGCRDQSRTGFVTEIVINQMVGSRIHLAVLDASQDSNFPVVGWWLVVIAYGLPTNFVGMHGLVGGGNNCVCSLCDESEESTVYLMACSFDCGFAATCW

SEQ ID NO: 17315 - protein, 148 aa, Zea mays
  VARIANT 18: note = Ancestral polymorphism is R, Derived polymorphism is H
  VARIANT 19: note = Ancestral polymorphism is P, Derived polymorphism is Q
  VARIANT 78..148: note = Derived polymorphism lacks residues 78 to 148
  VARIANT 85: note = Ancestral polymorphism is G, Derived polymorphism is W
MAAAQSSTDSLAPHLRRRPRRLVFDRRYGWIFDEWTHPADQALSGGRGMFCALTMARSLVSAAACSTRSGQCSRVSIRRTMGDLGLTGLNKRGVSNARKMGQDININYAVSSISRVLERPKRLHKKQQAWFRELECSGVVADLKLIQT

SEQ ID NO: 17316 - protein, 194 aa, Zea mays
  VARIANT 178..194: note = Derived polymorphism lacks residues 178 to 194
  VARIANT 168: note = Ancestral polymorphism is T, Derived polymorphism is I
  VARIANT 165..194: note = Derived polymorphism lacks residues 165 to 194
  VARIANT 137..194: note = Derived polymorphism lacks residues 137 to 194
  VARIANT 135: note = Ancestral polymorphism is F, Derived polymorphism is Y
  VARIANT 124: note = Ancestral polymorphism is C, Derived polymorphism is Y
  VARIANT 120..194: note = Derived polymorphism lacks residues 120 to 194
  VARIANT 118: note = Ancestral polymorphism is F, Derived polymorphism is S
  VARIANT 103: note = Ancestral polymorphism is P, Derived polymorphism is S
MADPDFSSTVQTLSRNPEFFVGMSSSSGEFGHRRQDNVKVIFPESQVVGSANPYSVADNNVLALASSAAADSVALVDKAIAKLHVDVRAHATDSKRKAKSQDPGWKFGWWPDPTKKEFIRCIFCLKVVPSRIKRFKQHLASGFSDTTKCSMVPEVVSKDMYAYLKRNTRLVLSVESEEGGQKDGDATEPEQKYC

SEQ ID NO: 17317 - protein, 560 aa, Zea mays
  VARIANT 24: note = Ancestral polymorphism is K, Derived polymorphism is R
  VARIANT 70: note = Ancestral polymorphism is H, Derived polymorphism is N
  VARIANT 453: note = Ancestral polymorphism is P, Derived polymorphism is S
  VARIANT 455: note = Ancestral polymorphism is A, Derived polymorphism is E
MMLPKAVDHFRENGEAAVHQMLWKGAVYVLDFLVEKGGDATNTYWILMTERVSSMVVQETVSQILSGLIHSYEGKGDSNPNDNLERLEMAHIKLEAALETCSKWHITDLSLLRWRKKLKRAAQECDDTLYKYKKMILEDEQMEQEVRNSYFPRRIAHATKSFIFSAFGHNNYESSRSAVRRFEWYADGASEFLRFVELGGAPCCHMPFNSFAKHLFAGKELQHKIVRGNEYPLFLLWLMPFVTEEHGIEACLIFIKKDGNTLEDDFFFSVILQLSESTDIVGITMKCLQLFPHHFQPTVDTIKKELTQLTTQDFSWVPYVDLWHRKHWDNLHRFSTQWFRPDPLCCKQHDQHKLQYSNLGTVDASLDSIIEVNMQCQISLPKYNNHRTALSECKYSLRDYQKLKAGFLFTPHCPSENMLPADTSSTMVPIFRRGQHCEDTDIALEQLKEIMMSKAIDYFRQYTEATVYQILWKAIHGTAYIHFEKPAMEAPGARRSFRGARKRKLVQPMDQDVQHRTRMISHLLDLWAPHAPVRLRGLILDWIQKEKESQLAAPVHHCCT

SEQ ID NO: 17318 - protein, 760 aa, Zea mays
  VARIANT 574: note = Ancestral polymorphism is A, Derived polymorphism is G
MDPPGSNQDGVVNMTRAMQALSPWLKHPRATITKVEGLVLAAAALLLLQLFFGIYKRRCRNSFLSTVLRALSKLMEALIIYTLGTMQSSPIKNSSYPIWAVFLVMASAGTTAVQHYDFCDGFYSKYMEGGLDLIKYGFYMIMFNLLIDPNNYTLKTALGLKRHLNKSRASSRCVGALFYIALVTKVLGSCGLALVGYTMQKRSPFIPTKIRRRTQAAGAEAETEEGAANNGTSDDSDPQSMKSYEYEVCRRLCGSGLVTIDQIWDRLDGSSASLKDLCLSCALFQQLKRRHFFGRVRPKTSSARKDHDFVFKKLLPSEGDFRRAFRIIEAELGFCYDFFFTKYYYTFVGTHLLPLSLVTAFLVKIVLLLTVGVFAVRNSLVLETPNPIIEVHISRGDYIISLLLLGVALTVELVNAAFYLASDWAQVSLATSMHVKKKQRCASIFGEVIAFLRRVTFSGQLMRNRMNSQHSVMVGLGQRQHDPVEVSDAVKRAVARSLISTYGGNPTNDVGETSIWQEDHRYSWALKGLSQLEVLLIWHVATEYCDISAAPSPSPSNRCSEHQGFTANLSAYCAHLFENALGLLRNHRRDRITRREDHRGVAVHLSRYCAYLIGSVPELLPYHQADIAQLAHMVVEERTELFRLDSTTNIYDEMKDLQGTGEEDDPRKIFQKGIKLGKQLGRMEDGDHWEVLQDFWAKTTIHAAKSHYTTKQHMQHLESGGEFLTHIWALLAHAGILNLNVGNEDHEDQANLGSGPSAVV

SEQ ID NO: 17319 - protein, 244 aa, Zea mays
  VARIANT 66..244: note = Derived polymorphism lacks residues 66 to 244
MCAWKTAGALSGRTSVSKIRLMDGQGRTVDFRNTVIIMPSNLGAWHLLAGMVSKNSMEVARDLVMQEVDGYFHNEEETQYKKIIWEEMNKEYLEEQAAKEALAAELAARGIDPEAGKKKRKRNEDMKSSTPAETPAEATCNMLKRKGLGSKINVGAVDELYKWCKTIWSIAVDCWVDPSGSYFSWKASAMGKMCQMQRHFLKRDTLLYEGQISSNNIEIGIIRADREFKVLSPSEIKDFMEEVE

SEQ ID NO: 17320 - protein, 517 aa, Zea mays
  VARIANT 41..517: note = Derived polymorphism lacks residues 41 to 517
  VARIANT 230: note = Ancestral polymorphism is R, Derived polymorphism is I
  VARIANT 293..517: note = Derived polymorphism lacks residues 293 to 517
MSPEKGPPIRVPSARSEPRPGAGGARNTTPRVIAEYGVLDWEHNHEHAVVPAPLRGPLPLRHTRRIARSEPRKRGPLLPAAPPSSSPSSLPLHLTVPAPAPRQSHQTPPPHSFLSLAEQALVLAISSHPLPTLAAFLASRRDELLRADITSLIKALELSGHWEWALALLRWAAKEGAADASSAGLLSTFEAMQDTARDGQIMSIHISQMVRNYKVARILPRIIEFAKNDRSVVLGAEYEKHRYVLLMRIFPLLLVERSDPSKVTSKTSLSSVPSTIKSNSSRSTLTLPSMRDRNELPTPRIEGEILSSSNLKAFTFNDLKNATKNFRPDNLLGEGGFGHVYKGWIDEHTLAPSRPGSGMVVAVKKLKPEGFQGHKEWLTEVDYLGQLHHKNLVKLIGYCSDGDNRLLVYEFMPKGSLENHLFRSEVLILCHGQRLKVAIGAARGLSFLHDAENQVIYRDFKASNILLDSVSLIRNSRHPALIVDHIEQHESLENIFSPVLETTAQAYGEDDNIQPSS

SEQ ID NO: 17321 - protein, 1553 aa, Zea mays
  VARIANT 751..1553: note = Derived polymorphism lacks residues 751 to 1553
MDATASDPSSGRRRQLQGPRPPRLAVNVESLKIKKPAVTRRLKTTEVIEVQLADFKAAVQRLTGLGAAVAATDYMDMKYTGPGPSMVSSPRVEFSDGSTAGCSSPPPSEKTVEEEGKKRGRRGEGRKRKEEEEEGRGRKRKKEEEERKKESPRPRLWLLSPTTTAVSASARARLAATERAIWPLSLPRPPTDYGEDADSLAAVLSLPGRPGILSPAALPPAAFSGQFSALPFDPSCLSWLKELTPFLPSASRCVEELECLFTLKRSTLLLPGMPCPATVSTFELFRDVLEIKSGNGEGAPAGHVGDAEQSLKAEPVGDPQVGVYSPSISRLFQQLVHVRTIISSFNGKLPSDAWFNHVKNLTSDAEESLEYLHYKMMLAKLGVGIEFKKVMPNVSGTCSKTTALSFMHLLASQELVFLPVTDKLEGLRPGSPGLTGVVLGNYSEILSLSSSVMRCILLCRGILGIINIVNMRLKKDSLELPAFAFDDLTYAGQNKGTGMNAHRVPAHMTDPIYLLPMFIRSLLCLDLSNCSGLTQLPASIGNLSNLVALNLSHCYSLHTLPASVGRLKNLQILVLSCCHELRILPVSLCELSKLRLLDLAGCSGLQNLPASLVNLCNLEILNLSYCKELKELPQPFGNLQELKYLNLSGSHRVDLDVECLYTLANLKSLTLSPLTNIQGFPGSFKDLANRLDSLRLWKNQIHPQCGPKAVSLHSYRCYEQSIIDMLLSDEADNSSNQIVTSACIVGESGMGKTELVHRIYNNRMILDTFDLRIWLHMCDKKRLLGKIVELTTFASCGDASISVLEEIVIEELASKRLLLVLDDSEIKDQYFWGYLWKLLNVCAKGSAVIVTTKSMVDANQTGAMQTFYLSPLSKEECFMIFKEHVLEDLVVNNYCQLESIGWKFAEKCGGNPMCIKALSGLLCHSEVGLSEIDMIVDGILPALRLCYDLLPAHLQQCFKFCSLFPKDYIFVKHHIIRLWIAEGLVFCEEGTKPEDTALHYFDQLFCRSFFQRSPFHSDHKDSFVMHELFHDLAHSVSKNECFRCEEPFCSLAENVSHLSLVLSDFKTTALSNEVRNLQSFLVVRRCFPVVRIFTLDDIFVKHRFLRALNLSYTDILELPISIGNMKHLRLLALNNTKIKSLPIEIGQVNSLQTLELKDCCHLIDLPGSISNLAKLRHLDVQKESGNIIVGMPHGIGYLTDLQTLTMFNIGNDMLHCSISELNNLNGLRGHVHVTRLENIMTANDAREANMMGKHLLEALTLEWSYQDEGMDDDMGKEIASEILQNLQPNSNIMELIIRNYAGDLFPVWMQDNYLCKLTSVTLDNCHGCSELPYLGDLPSLKSLFIQRINVVERFGIETSSLATEVKYPTRFPSLEVLNICEMYDLQFWVSTREEDFPRLFRLSISRCPKLTKLPRLISLVHVSFHYGVELPTFSELPSLESLKIEGFQKIRSISFPHQLTTLNKLEIIDCKELLSINAYSLSVSNFKVVRCLKLDLVGSSMEDHISHKVVNGRNILTRKHMVLKTLTHTNLLDDGSKWEKFGEKNIFGYIFPR

SEQ ID NO: 17322 - protein, 959 aa, Zea mays
  VARIANT 901..959: note = Derived polymorphism lacks residues 901 to 959
MDNNGEKTTTIIHTLRDALLHFAVKSKKLASPLLEPFGRATEPTTVNDDELMALKSKLRRIRATLRDAESLSVTDCSVQLWLAELGDLENRAEDVVEELEYESRRSAQLEELKQDLLYAATTRKQRREVALLFAPPPARRLRRKIDDVWARYEEIASDRKTLRLRPGDGGCAPRPAASPLVPSSVLPRTERLHGRHGDVERVAALVLGDPDGGTSYAVVPIVGMAGVGKTALMQHVCGMETVKSCFELTRWVWVSQDFDVVSVTRKIVEAITRSRPECGELSTLHELIVEHLAGKRCLIVLDDVWDDNPSHWNSLTAPLSHCAPGSAVAVTTRSNKVARMVSTKVYHLKCLSDEDCWLVCQRRALPNSGANVHKELVEIGERIAKKCHGLPLAAEAAGSVLSTSAVWEHWNEVLNNDLWADNEVKNLVLPVLKVSYDHLSMPLKRSFAFCSLFPKGFVFDKDLLVQLWTAQGFVDAEGDCSLEAIANGYFNDLVSRCFFHPSPSHALSEGKFVMHDLYQELAQFVSGNECRMIQLPNSTKIDESSRHLSLVDEESDSVEEINLSWFCGHRDLRTFMFIARTEQNPEEMTFRTKIPSELITGFECLRALDLSNSNIMELPKSIGSLIHLRFLGLDNTAIQMLPESICALLHLQTIKLNHCSSLTQLPQGIKLLLNLRCLEIPHSGIKMPSGIGELTRLQRLPFFAIENEPAGCTIADLNELVNLEGHLHITGLNNLDGAQASIANLWNKPRIKSLTLEWSGVTNFSKSLCDPQGNAVSCISDSQHPAISATADQVLNCLKPHSNLEELSIKGYNGSFSRSWLGWLPLDRLASIELKDCRNCKEVPPLGCLPSLKHILIQSLPSVKLIGPEFFGNAGDTTSNIRSRICNVFPALKSLKFSNMEAWEEWLGVKSEHFPNLKYFSIVRCSKLKLLPKFTSEPKLKIRYCDLLQMPLCQVSYET

SEQ ID NO: 17323 - protein, 98 aa, Zea mays
  VARIANT 49: note = Ancestral polymorphism is T, Derived polymorphism is A
MASSAYASWSKRWIRPEVYPLFVPMAVALGICSYQLVRNITGNPEVRVTKEKRAAGVLDNHDEGERYAMHGLRKFVRGKKPEIMASINSFFADPPKDD

SEQ ID NO: 17324 - protein, 493 aa, Zea mays
  VARIANT 150: note = Ancestral polymorphism is R, Derived polymorphism is H
  VARIANT 265..493: note = Derived polymorphism lacks residues 265 to 493
  VARIANT 285: note = Ancestral polymorphism is S, Derived polymorphism is C
  VARIANT 350: note = Ancestral polymorphism is T, Derived polymorphism is M
  VARIANT 456..493: note = Derived polymorphism lacks residues 456 to 493
MESFLSVALGELVTRSINFIINKFSKPPTLAMEESLQRTLLRAQVIDEEAMGRHIPNQAMIQQLGMLRDAMHRGSYALDAFRYKPHYGEDDSVQVVSGFMSLSKLPFAKDPYFFSRTAQSREQLQEALDRLGSMIVDLNELVMFLASYPRLHRQPYSMHILLGNCMFGRQVEAELVINFLLHTQPHSSEELEVLPIIGPCRVGKSTLVAHVCKDERVQDHFSEILWLNDLAFTDDERAFRQGYAMEHQNQVSNWNKDKRSLVVIELSGNLHEDAWNRFYLACKRSFCSGSKIVVTSSSDRAAKFGTAQALALKHLSHEAYWYFFKTLAFGSMDPETHPRLAQVAMEIARTQNRSINAAYIICYLMRNNFNIHFWCKVLRFFRVFVQKHVSRFGTHPYDLLNQNRPIRISRMGTASEYFTIHRQYHCSSQEEVPKIRVHDVVYGSMKTCRKFEVLSWRSPIPPYYSYANTYEIQERRTTSAKRKRSTEDGVTFC

SEQ ID NO: 17325 - protein, 539 aa, Zea mays
  VARIANT 38: note = Ancestral polymorphism is R, Derived polymorphism is W
  VARIANT 267: note = Ancestral polymorphism is R, Derived polymorphism is C
MPWTRTEGARVCYVVVAPASGGVSCSGWGNMMKQIFGRRKASKTADKEFTGGRTFSQLSGSGVADLSGQPPILSSTGHAYGSGNRTGFQDSRINDNLFSSNFRPLPSFKDVPNTEKQNLLIKKLDVCCTLFDFTDASKNMKEKEIKTLMLLEIDEYVRTANVKFPEIVVEAITKMISVNLFRTLISPPREKKALQAFDLEEDEPLMDPAWPHLYHVYELLLTFVQSPQNDAKLAKRYIDYSFILRLLDLFDSEDARERDRLKMVLHRIYGKFMVYRPFIRKAINNIFYQFIYETEKHNGIAELLEIFGSIINGFALPLKEEHKLFLVRTLIPLHKPRCTTMYHQQLSYCITQFVEKDCKLADSVIRGLIKYWPITNSTKEVLFLGELEEVLDATQPGEFQKCMVPLSHQIARCSNSPHFQVAERVLFFWNNTHFENLVKQNSKVILPIVFPALEKNINGHWNQVVRSLSLNVRKLFSDRDPQMFNECLRGYEEDKDREKEFRLKQELAWKRLDEIASAKVTSGEAVLVSPTLHRQPSVL

SEQ ID NO: 17326 - protein, 746 aa, Zea mays
  VARIANT 530..746: note = Derived polymorphism lacks residues 530 to 746
  VARIANT 241..746: note = Derived polymorphism lacks residues 241 to 746
  VARIANT 117..746: note = Derived polymorphism lacks residues 117 to 746
MDPIPPGSNQDGVVNMTRAMEALSPWLKHPRRTIARVEGLMLAAAVLLLLQVFFGFYRRRWWRSSFLSTALRASSKIMEALIIYTLGTMQSSPIKNLSYPVWAVFLVMASAGTTAVQHYEFCDSFNSKYMEGIVDMAKYGFYMTMFNLLIDPNTYTFKAALDLQRRHVKNPRASSRCVAALFSLALSTKALESCGLAFLGYTKQKSGLFISNKFRRRTQAAETTEGTAADNGTSDDDSDPQSMKGYEYAVCYRVFAGGQITVDQIWDRLDGNSASLKDLCLSYALFVELKNRCFFGRVRPKTSSATTKDHDFVFKKLLPSEGDFRRAFRIIEAELGFCYDFFFTKYYYTFIATNLPPVPFLHFLVLAKTVLIFIVGVFAVRNSLVLETPNPIIEVQISRADYIISLLLLVVALVVELVHVAFYLASDWAQVTLAIMRVKKHWYETNTFGAVISFLRRVTFSGQLRRNRMKQYSVIEQRQEDPVEVSDAVKRAVARSLISTYGGNNPTNDDAAAVETWQWQDQMPFRRYSWALKGLSQLEVMLIWHVATEYCDISAGPTPSPSNLSTTCCAHLFANALGLRREDHRGVAVHLSRYYAYLIESVPELLPYHQADIAQLAHKVVEERTELLRLDSTTNIYDKMKDLQGTGEEDDPRKIFHKGVKLGKQLGRMEDGDHWEVLQDFWAKTTIHAAKSHYTTKQHMQHLESGGEFLTHIWALLAHAGILNLNVDNEDQEDKANLGSGPSAVV

SEQ ID NO: 17327 - protein, 232 aa, Zea mays
  VARIANT 180: note = Ancestral polymorphism is E, Derived polymorphism is V
  VARIANT 175: note = Ancestral polymorphism is G, Derived polymorphism is D
  VARIANT 143: note = Ancestral polymorphism is R, Derived polymorphism is C
  VARIANT 131: note = Ancestral polymorphism is A, Derived polymorphism is V
  VARIANT 103: note = Ancestral polymorphism is K, Derived polymorphism is M
MKLVWCPDTASKAYIDGVRAIAAAADYSDGGGSAELVAAMAGGWNAQLIVDAPADSAPPPPSAPSPNNNPPATSLALAAAARHTGGRYARLDAHPDEPAAAAKAAMARLEGVDLLVLDARRRDAAAVLRAARPGPRGMVVVLRHADNTAASASAAPLGRMAAGTRLVRAAYLPIGAGGLEVLHVGVGEGPSLPTTTTQQHDHSSRRRRHGPGGRWIRHVNHRTGEEHVFRRQ

SEQ ID NO: 17328 - protein, 93 aa, Zea mays
  VARIANT 40: note = Ancestral polymorphism is P, Derived polymorphism is S
  VARIANT 42: note = Ancestral polymorphism is S, Derived polymorphism is F
MDPCDPCPPITPESSRSVPPKSSPLPRSSNLNKMENLAHPISSGFVTSKLVLHASLPTPRRGLSPPPRNNGLLFGEHSGGGGSKAIDAEPGAL

SEQ ID NO: 17329 - protein, 129 aa, Zea mays
  VARIANT 102: note = Ancestral polymorphism is A, Derived polymorphism is T
MAPPPPYLTTHLVGEILVRIPPDDPATLPWRRLLCDRAFRRRYGAFHRAPPLLGYIHNHSISGPRFVSTATPSSVPLKAFGGCSNNGWRVIDCRHGRVLFEAVDPYRNWSLEEHPLLGPGREPEPCRMG

SEQ ID NO: 17330 - protein, 93 aa, Zea mays
  VARIANT 16..93: note = Derived polymorphism lacks residues 16 to 93
MVDPRRSMACPMASRRHAAPRWRPGSRDAEGLYLASDSDKWLLIYFPFMQVVKLHFVLFKGPKDVSKICNSLSVWVCELTDLCEIVSLYVQSR

SEQ ID NO: 17331 - protein, 593 aa, Zea mays
  VARIANT 164: note = Ancestral polymorphism is A, Derived polymorphism is S
  VARIANT 331: note = Ancestral polymorphism is P, Derived polymorphism is L
  VARIANT 390..593: note = Derived polymorphism lacks residues 390 to 593
MAVMSGAADSMLPKLVDDPEAVALAVEPWAQPGRKNKKTCRRALLVGSLMTLLLLACFVLGRESASSAAWLQIDLLAKLTAMNNGTAGASTSAEPSIDRVTSIASGLTTTTHAPHGRDELLGGLLPAGMNRRTCRSRYESWRYYKYFPYAASPHLQDKLRAYEARHRRCAPGTPLYAKSVEQLRSGRSADGMECTYVVWLPFDGLGNRMLSMVSGFLYALLTDRVFLAALPADSADLFCEPFPDTTWRLPLEDFPVADLLPRGQSIERSYTSLLDAKEVGPDANATAGVPPYVYVSLGWQLKDPLFFCGEHQLVLGKVNWLLLYSDLYFSPSLYAVAEFQDELRRLFPAKESVGHLLSRYLFHPTNPVWSLTTRYYRSYLATAKRRIGVQVRMFSYGSISADDMYSQILACSQQEHILPETEDGDEDEVVAATRNGDNADGSNSTAILVASLYADYYERLRSRYYDHGAKGGERVAVFQPSHEERQATDNMAHNQRALAEIYLLSFSEELLTSGRSTFGYVSSNLAGVRPTIMLTAYDHKIPEPPCRRAVSMEPCNLTPPLGVECRGKPVDKEDLARHLRVCEDSKDSVKLFD

SEQ ID NO: 17332 - protein, 238 aa, Zea mays
  VARIANT 38: note = Ancestral polymorphism is M, Derived polymorphism is I
  VARIANT 93: note = Ancestral polymorphism is M, Derived polymorphism is T
  VARIANT 96: note = Ancestral polymorphism is D, Derived polymorphism is G
  VARIANT 147: note = Ancestral polymorphism is L, Derived polymorphism is V
MDNLKTHSEYADQPQGPQANAVSFALPTGQVLDLDSHMIGQQHTNLSSFWFSLEQHRLQLDQALQLHNQQLQVSLQQQISMQNSTLLNLVESMTRDVLMQKNDEIASLRVELQRNQEDLETTLHDRDEWMKVAMAAYEINQTLIRMLRTVQLEANSHVSSNDLDAPSYSEASSMARTALETAQPNLICKVCNSGNAGVLMLPCQHLCACKPCVAWLATCPICGAVKTDAIEARFVYKK

SEQ ID NO: 17333 - protein, 253 aa, Zea mays
  VARIANT 66: note = Ancestral polymorphism is G, Derived polymorphism is D
  VARIANT 114..253: note = Derived polymorphism lacks residues 114 to 253
  VARIANT 177: note = Ancestral polymorphism is C, Derived polymorphism is R
MAQRGELGRQLPLRGPLKALEADIHHANAMADAIQRNYGGACVQMRLSFSSLAPLFLYFIQWLDCGCCYALPSYLGLFHILICKVYADGDSSVSTYERRASLREFYAIIYPILQQLESSLIERDLKGKGRCKDIVSRRRMEDWKKVSGRDVEREDECGICMEACTKMVLPNCSHAMCIKCYRDWYKRSESCPFCRGSLKRIRSTDLWVLTNSNDVIDPAHLEKENVRHFYSYIDSLPLILPDSIFFFYYEYLL

SEQ ID NO: 17334 - protein, 486 aa, Zea mays
  VARIANT 198: note = Ancestral polymorphism is L, Derived polymorphism is V
  VARIANT 147: note = Ancestral polymorphism is V, Derived polymorphism is G
  VARIANT 95: note = Ancestral polymorphism is W, Derived polymorphism is C
MDRSKDDLISNLPDCVIGGEIITRLPVADAARLQILSTRWRNIWRSSPLNLDLPVPIYYHDYKDIVSTILAAHPGPARRLKVDWPYDDGESYSRWLQSRAVTGLQELEIEPRYYSWWEGTVFQPPPPDKTRTLPEWPLFQFAPTLRVLKIGHHTCFPSVGSMAALRFPRLEVISFCGVDISEGALHGILAGCPVLRTLVLDDCTGFATVRINSPTITSFAISPSHSSRGFDYDHEEPRVWVTTSQVIIEDAPILEKLVLFRRLLDDTAEPFQFQLLVLSAPRVKVLGSLSSAIRKLEIGGTVLQRTVIMEKPLQMRTVKVLALEDADSIDVVSNYLKCFPCLEKLYIRASSQGYRSAAASYDKQNPIECLEHHLKMVTLDGYTGIRPHVKFAQFFVRNARSLELMKFRIFRNYPCHQPGRTKEWNEEDQRRQLQQARSMASRHLKFCFVRGARCCRHDVYCGHDFEDMSEYMHSSSRGDPFDQWFE

SEQ ID NO: 17335 - protein, 530 aa, Zea mays
  VARIANT 48: note = Ancestral polymorphism is L, Derived polymorphism is I
MSGGGGGGGEDRISILPDGVIGEIVTRLPTADAVRVQVLSRRWRHIWISCPLNLDLGSPNYYTDYKRVVSGILAAHPGPCRRLKVDWPYDDGESYNHWLQSPALVGLQELGIEPEYSSLWLDKKTLPRGDNTRALPERALFQFAPTLRLLRIGYHTFPSVGAVAALRLPHLELISFCCVDISEATLHWMLAACPVLRTLVLDGCTGFATVRINSPTITSFAISPADSSITNDYDPYFLDYDYENPTVRVTTWQVIIEDAPLLEKLVLCRRSAAVESFQLLVVSAPRIRVLGSLSFSIPKLEIGGTVFQPTVRRVNRVGPDDVIMEKRLLMQAVMLATTLRTVKILALEDADSIDVVSDYLKCFPCLEKLYISASQGYRSAGSYDKQNPIECLERHLKMVALDGYDGMGPHVKFAQFFVRNAQLLELMKFRIFRNYHCEPGKTKAWIEDQQRQLQVRSMTSRPVKFKFVHDSRYNQDVYCGEDISDLSEHIHDDPFDQWFESEKEAPRHAEGKEDAIVWNSSQRLDSFDQS

SEQ ID NO: 17336 - protein, 194 aa, Zea mays
  VARIANT 24: note = Ancestral polymorphism is K, Derived polymorphism is N
  VARIANT 71: note = Ancestral polymorphism is G, Derived polymorphism is E
  VARIANT 84: note = Ancestral polymorphism is H, Derived polymorphism is R
  VARIANT 90: note = Ancestral polymorphism is A, Derived polymorphism is V
MGLCVSLGGTAGAEAARAAAPSCKCGTALVLMPSGDMREYPFPATTAARVLEDASAAADGGDGWLLCDADGMGFEGPAPPAVPHAEPLRAGQLYFVLPAAARRRGLRREEVAALAVRASAALSSRASASASAAPGRRRRGAVVAPLVFAPPPEDEEEEREQQKSTALAAPPVRRPARPGRRLVRFASDLTAIPE

SEQ ID NO: 17337 - protein, 419 aa, Zea mays
  VARIANT 344..419: note = Derived polymorphism lacks residues 344 to 419
  VARIANT 289: note = Ancestral polymorphism is D, Derived polymorphism is Y
  VARIANT 17..419: note = Derived polymorphism lacks residues 17 to 419
  VARIANT 3..419: note = Derived polymorphism lacks residues 3 to 419
MRWRPACLSSLTGLSPSARSLTTSVPPPLGSSRMPTRPSGPLKLTVLMVTVPLAPPTTLFPVRPSASLPTKKYTRFEAQVLALRADPATFTVEPEDSEGFGKWSALFSIDEMKEQIETVLHESPELESFVERLVPSVVDFTLLHVSTVKSTILEVGNIELFELNEVISSFLRIMLFFCILSSAVLPKNEKPITESGDEISYEGAKAKHPISLLLGLRRRSTKLSEKVKEQQEKVIKFLCNYFDIDIILHCTIGQSSELEKLVVSSPKASTNPLNISLTMEGGSVFPINDPIITITDTISNPMAYCLAAMKSEGVNLIGENFMSGLKVVFDRERNVLGWKNFDCYSVGNSRSNLLVNSNPSCVPPRPALGPNSYTPEATKGASPNGTQVNVLQPSASFSPKLHCNRNVLVAAALLFLLIL

SEQ ID NO: 17338 - protein, 1391 aa, Zea mays
  VARIANT 388..1391: note = Derived polymorphism lacks residues 388 to 1391
  VARIANT 613..1391: note = Derived polymorphism lacks residues 613 to 1391
MAAIDRVVFALNGQRYEVGGVDPSTRLLEFIRTQTPFTGPKLGCGEGGCGACVVLIAKYNPKTDEVTEFTASSCLTLLYTINFCSVITTEGLGDSQYGFHAVQERMSGFHASQCGFCTPGMCMSIFTSLIKADKSKRPEPPKGFSKLKVSEAGKAFSGNLCRCTGYRPIVDACKSFASDVDLEDLGLNIFWKKGDRNPDVSELPSYTLGGGVCTFPDFLKTELKSSLDHLNNPCIAASGEGWYHPKSIKEYYELINSCLFSDSVKVVVGNTSSGVPGYKDQDIYSKYIDIGGIPELSNIVRMGSGIEIGVATSISRTIEILEEECESISSPNGSVVFRKLANHMSKVATPFVRNTASIGGNIVLAQKFPFPSDIATILLGAGATVCLQVVAERRQITLEEFLEQPPIDATTLLLSIFIPNWISDSGANISLLFETYRAAPRPLGNAVSYVNCAFLGHASLDEQSDTLVLSNLRLAFGAYGTEHAIRATRVEEFLTGKSLTASVVLGAIQLLRETVVPMEGTSHPEYRVSAAVGFLFSFLSPFSKCIPEPGKSLASSSTDSADTDDVRNLPLSTRRETFSSDEYKPVGEPIKKYGVELQASGEAVYVDDIPAPKNCLYGEFIYSTQPLAYVKSIKFKSSLASEKIISFVSAKDIPSGGLNIGSSSTFGDEPLFGDPIAEYAGQALGIVIAETQRYADMAAKQVVIEYDTEDLSPPIITVEQAVEKSSYFDVPPEFYPKEVGDVSKGMAEADHKIPSTEVKLASEYYFYMETQTALAVPDEDNTLVVYSSSQYPELAQSVIARCLGIPFSNVRVITRRVGGGFGGKAFRSFQVATAAALCAYKLRRPVRMYLNRNTDMVMVGGRHPVKAHYTVGFKNDGNVTALHLDLLINAGISPDASPIIPGTIISSVKKYNWGALSFDIKLCRTNNSSKSVMRAPGDTQGSLIADAVIEHVASVLSLDANSVREKNFHTYGTLQSFYPDSAGEASTYTLHSIFDRLVSTSSYLDRAESIKEFNSNSKWRKRGISCVPLIFKVEPRAAPGRVSVLKDGSVVVEVGGIEIGQGLWTKVQQMTAFALGRLWPDADGGGECLLGRVRVLQADTLNLVQGGLTAGSTASESSCAATLQACNTLYDRLKLVLDRLQQRSENVSWDTLVSQASLSSSLVRSHRLLFPAIRKMSCGVSMMQAYEDDVDLSASAYWVPGQASNKYLNYGAGISEVEIDLLTGAITIIRGDLVYDCGKSLNPAVDLGQIEGSFVQGIGFFVYEEYTTNSDGLMISNSTWDYKIPSVDIIPRQFNAEVLNTGYHKNRVLSSKASGEPALVLASSVHCALREAIRAARVEFADSTVSSGHSPLEFQMGVPAPMTLVKELCGLDIVDRYLEGLSTCERAAGGA

SEQ ID NO: 17339 - protein, 322 aa, Zea mays
  VARIANT 170: note = Ancestral polymorphism is R, Derived polymorphism is C
  VARIANT 82: note = Ancestral polymorphism is A, Derived polymorphism is G
MDGEEIGLVLARASDLRTRISACAAAAAGAPGPRRDDEEAAKRLDAAEGDEEGAEEEEDEEEEVESLVGISDALESLERQLAALQDLQHQQRYERETILSQIDRSRRSLLAKLREYKGQDCEVIHEAAAFAGERIERDDSLVLPPYSDHVTNSFALDDLYPLSYMSKPKRLHTQPDSEDDGTAQDDARRNGRESRDTRASKRGSGGGGGGGGGGGIGAFMGWVAKTAVMVVGAVCVMKAAGYESVTWRNGGARLDIAGLFGGGGGKQAVAAGGGDERRAPLRCPPGKAMVVENGRARCVVKERVEVPFDAVLAPPSSRYGLG

SEQ ID NO: 17340 - protein, 585 aa, Zea mays
  VARIANT 70: note = Ancestral polymorphism is V, Derived polymorphism is A
MAVMVRTARTHTNVQIQQLETRLRDQQVVRGALEKALGPEPEPEPDDDGAGPRPLTLQNESPALKLIREVATLELEIKHLEHYLLALYRKAFEQQQAPTTTTALPPSDDRRDAARKLSVSSRPDDETPRARAPVIRGGGGNGRRNGGTADDCSPSSTCPRRTAADSDPAGLRSQSALSFRGAWSSSSSTSSRISPTEDSLARALRSCHSQPFSFLEQGETTAPSGGVVSLADYLGTSVADHIPETPSNLSEEMVRCMAGVYCRLADPPLLARHRPSASSASASLSSAASAVSPTQCLGGGDNNTWSPTSSSSYHCGRRDAARLVINPFRVEGVKELLILYRLETVDLRRMTGGEKLAFWINVHNALVMHAYLKYGVPQQNQLKTTTSLLVKAECKIAGRAINAAAIQGLVLGCTAHCSSGHWLRALLRYPRTTTKASRRASRAGGEEWRAFAVRQPEPLLRFALCSGSHSDPAVRVYFPKRLAQQLEAAREEYVRATAGVRKDDRRVLLPRLLDAYARDAGLTADRLLDAVQRCLPETLRTAVQRCRRRGDGPGAAKAVVEWVPHRRSFRYLLARDLAFPHLSLS

SEQ ID NO: 17341 - protein, 123 aa, Zea mays
  VARIANT 13: note = Ancestral polymorphism is A, Derived polymorphism is S
MAALERRGGHHTAAFIRAAKASSPPPPPARQRQRQRRSKSGAGLDDDDDDRDARAAPRSPQKASRQTKLQEQKREAETEVQRRRRRSEAHNSLRKEARAWKPAACCCSSPILPLFLFLDNAMN

SEQ ID NO: 17342 - protein, 222 aa, Zea mays
  VARIANT 186..222: note = Derived polymorphism lacks residues 186 to 222
  VARIANT 167..222: note = Derived polymorphism lacks residues 167 to 222
  VARIANT 117..222: note = Derived polymorphism lacks residues 117 to 222
  VARIANT 59: note = Ancestral polymorphism is G, Derived polymorphism is R
  VARIANT 57..222: note = Derived polymorphism lacks residues 57 to 222
  VARIANT 51: note = Ancestral polymorphism is G, Derived polymorphism is E
  VARIANT 47: note = Ancestral polymorphism is R, Derived polymorphism is I
MLEAYSPRNETIVTLIRDKKRFDQFTPSDVIGRILTFDMQREEALERRKIGELQAKLEGMKIKDIALKANMVSKNSYGNKGNFSKEQEPGEHEHLADDGEEREDGQIPRPLPPGPIYALGLGVEVLGPTQRVHLLEQVKVEALVLELGDTPGQEQRILALPCKEAFQVDLHVGLVPLSPEHGERGEQQDEMGDPRSLHGATEAVKEERKRSRTEVAWKVKKA

SEQ ID NO: 17343 - protein, 395 aa, Zea mays
  VARIANT 3: note = Ancestral polymorphism is A, Derived polymorphism is V
  VARIANT 12: note = Ancestral polymorphism is L, Derived polymorphism is P
  VARIANT 36: note = Ancestral polymorphism is P, Derived polymorphism is S
  VARIANT 48: note = Ancestral polymorphism is P, Derived polymorphism is Q
  VARIANT 68: note = Ancestral polymorphism is P, Derived polymorphism is L
  VARIANT 189..395: note = Derived polymorphism lacks residues 189 to 395
  VARIANT 198..395: note = Derived polymorphism lacks residues 198 to 395
  VARIANT 292: note = Ancestral polymorphism is R, Derived polymorphism is W
  VARIANT 337..395: note = Derived polymorphism lacks residues 337 to 395
MDAGAKKKRRRLEEGQRGGQELPVLPRGPDLINSLPDEILCSIITLLPTKDGARTQILSRRWRLFGALRLSMSSLRPALRQAGSTTISRSHFFPDLNQLKLLNCSHFPNLKHLTLARVHISDTALHAVLSACPVLESMVLDGNIGCHSLHISSPTLRSLGVSDGVKVLEGKLQELIVEDALLLEMLIPQPPSYGLVIWVIHAPKLKTLGYLHDDIPTFQLGTMFFEKMVPIISLPNVMRTVRTLALLTTPDLDLVIGFLKCFPCVEKLYIVSYTRMLIKNEQGYVPLECLDRHLKNMQIINYEDNSADVNFVKFFILNARVLESMKFVVRQGQCDTKWIARQHKKLEIHLMNHYVGALVIISFEDVYQSDSLIVIFRGHITQELHIRFTPLRKHL

SEQ ID NO: 17344 - protein, 224 aa, Zea mays
  VARIANT 11: note = Ancestral polymorphism is P, Derived polymorphism is L
  VARIANT 21: note = Ancestral polymorphism is P, Derived polymorphism is S
  VARIANT 50: note = Ancestral polymorphism is D, Derived polymorphism is N
  VARIANT 58: note = Ancestral polymorphism is D, Derived polymorphism is Y
  VARIANT 60: note = Ancestral polymorphism is V, Derived polymorphism is F
  VARIANT 72: note = Ancestral polymorphism is T, Derived polymorphism is I
  VARIANT 73: note = Ancestral polymorphism is G, Derived polymorphism is W
MVLFFLNSTMPGLPSEKESIPNLILRGFGTIDRVKAKLEQACPEVVSCADILALVARDVVVLTKGPHGDVPIWRRDGRRSVKQDALDNLHAPFFDVGRNMCQFFMPKGLNAKDQIVLLGVGVCRVPTTVWWLVSSGVESGGGVRSDSGGRRDAVRWPTGWQVELDASRGTGTGRTTEQADDTRRRQKLGGRGSGVGTRGSGRPQMASRPADQAQRRRGLTWVSR

SEQ ID NO: 17345 - protein, 130 aa, Zea mays
  VARIANT 122: note = Ancestral polymorphism is G, Derived polymorphism is D
  VARIANT 117: note = Ancestral polymorphism is R, Derived polymorphism is C
  VARIANT 114: note = Ancestral polymorphism is E, Derived polymorphism is A
  VARIANT 99: note = Ancestral polymorphism is F, Derived polymorphism is L
  VARIANT 98..130: note = Derived polymorphism lacks residues 98 to 130
  VARIANT 97: note = Ancestral polymorphism is R, Derived polymorphism is C
  VARIANT 91: note = Ancestral polymorphism is T, Derived polymorphism is M
  VARIANT 87: note = Ancestral polymorphism is E, Derived polymorphism is V
  VARIANT 68: note = Ancestral polymorphism is R, Derived polymorphism is M
  VARIANT 42..130: note = Derived polymorphism lacks residues 42 to 130
  VARIANT 39: note = Ancestral polymorphism is T, Derived polymorphism is I
  VARIANT 28: note = Ancestral polymorphism is R, Derived polymorphism is T
  VARIANT 24..130: note = Derived polymorphism lacks residues 24 to 130
  VARIANT 1: note = Ancestral polymorphism is M, Derived polymorphism is T
MVRVSVVNDALKSMYNAEKIGKRQVMIRPASKVIIKFLTVMQRHGYISEFEYLDDHRGGKIVMELNGRLNKCGVISPRFDVGVKEIEGWTTRLLPSRQFGYIVLTTYVGIMDHEEARRKNVGGRVLGFFY

SEQ ID NO: 17346 - protein, 779 aa, Zea mays
  VARIANT 615: note = Ancestral polymorphism is T, Derived polymorphism is S
MAEYRLGLQLHGHTDDVRGICVCGDAGIATSSRDRTVKFWTRNPEKESEYVLSKTLAGHSSFVGPLAWIPPSDRFPEGGIVSGGMDTFVFLWDLQKGEVAETMKGHSSQVTGLAVDTNGDIISSSMDCTVRRWRNGNAIEVWEAHKVAVQTVLKLPTGELFTDTVRFLASMPGLGILSASHDSTVKLWALSGQPLLDMIGHSSLVYSVDAHSSGLIASGSEDRSLKIWKDGVCVQSIEHPGCIWDAKFLGNGDIVTACSDGTTRIWTADSNRFCSDEEIAAYTDLISQYTLSRKTVGGLKLMDLPGVEALQVPGNSDGQTLIVREGDNGVAYSWNSAELKWDKIGEVVDGPGEAAQGQVHDGVRYDFVFNVDIGDGEPIRKLPYNRSDDPYTVADKWLLKENLPLTYRQQVVEFILQNSGQNNFVPDPSFRDPYTGALRFSYGVSSLAYPNVLGTKKALLLLLLLLHFYLLVAAADNQTDSVSANAYVPGQPSSSSNGNTPEPIFKHIPKSGMLSFETAQFDGILKKVAEFNSKLSSDSEQKQLSLSETEMSRLPAIVNVLKETSFYHTSKLADADMTLLVKILKSWPPQMMFPVIDFLRMFVLHPDGASLLLKTIETGNDILLETFRKAVASPVQPANLLTVLKAVTNLFGNSCLHQWLRTHCAEIIDSVSNCKSSFSKNAHLAYATLLLNYAVLSIESKEEQSQAQILSAALEIAEDDTQDFDSKYRALVAIGSLMLKGLVKSLALDLDVKSVASSAKSSMDQKIAEVGGDIESLTR

SEQ ID NO: 17347 - protein, 144 aa, Zea mays
  VARIANT 13: note = Ancestral polymorphism is G, Derived polymorphism is R
  VARIANT 12: note = Ancestral polymorphism is S, Derived polymorphism is L
  VARIANT 11: note = Ancestral polymorphism is S, Derived polymorphism is I
  VARIANT 10: note = Ancestral polymorphism is S, Derived polymorphism is L
  VARIANT 5: note = Ancestral polymorphism is S, Derived polymorphism is L
MSWISPSTCSSSGLMVMGIHSPWLAGSPSTRCPVGHSGGCCSVFSVGSHSRDHGHKRVYSKKMYLGGCKLSQNLTVVHPAIFATLRMSLDCEQKRRNWATPKYQLQNVLIPSYKGIVFPSTFVRVENPNILQERIGASRGLAAF

SEQ ID NO: 17348 - protein, 136 aa, Zea mays
  VARIANT 115: note = Ancestral polymorphism is G, Derived polymorphism is R
  VARIANT 97: note = Ancestral polymorphism is R, Derived polymorphism is C
  VARIANT 74: note = Ancestral polymorphism is G, Derived polymorphism is R
  VARIANT 51: note = Ancestral polymorphism is P, Derived polymorphism is S
  VARIANT 16: note = Ancestral polymorphism is I, Derived polymorphism is T
MATKPGRAAAAVLLLTLLAALHAAARNNNNNENRNPGGGGGDPGAFFAGMPRFSGGGVPGGGGFFGGWGEGGLGYRRGAVVPPSTVCPQDGPCRGKRLTCPPRCFRTFSYGGKNGGGGGGGGGCSFDCTERCAATC

SEQ ID NO: 17349 - protein, 130 aa, Zea mays
  VARIANT 28: note = Ancestral polymorphism is P, Derived polymorphism is T
MMDSGEKGVGSNGKPLHYKGTPFHRIIPGFMIQGGDIVRGDDKGSESIYGGIFPDENFTVKHTHPGIYLKIFKLGWLDGEHVVFGRVIQGMDTVYAIEGGAGTYNGKPRKKAVITDAGEIPKEKWGDQDA

SEQ ID NO: 17350 - protein, 213 aa, Zea mays
  VARIANT 14: note = Ancestral polymorphism is W, Derived polymorphism is C
  VARIANT 72: note = Ancestral polymorphism is S, Derived polymorphism is F
MVAIKISSKNFIFWFRSHTTKEIKWSGAKHEPFDADDNGRKMHPRSSFKAFLEVVKWRSVPWEDVEMDAIHSLQLILRDSLQDEDANRNNIRSIVKAPSDNMKKIQGLLELRTVTNEMVRLIETATARVLAVDIPGNINGWNKKATELPGLPVMEAIGRPLIDLVVADSVEVVKQILDSALQGIEEQNLEIKLKTFHEQECCGPVILMINSSS

SEQ ID NO: 17351 - protein, 453 aa, Zea mays
  VARIANT 114: note = Ancestral polymorphism is R, Derived polymorphism is C
MADNALANPIPSVAAAHDDDEDPDLISLLPDCILATILSLLPLPAAGRTQILSHRWRRLWPSAPLHLLDSHLPVPTSSLCVAMSRILASHCVSAVRFHILLARPSASDLDSWFRSLAAKSLQELVLRLPSDDTLRLPPSFLSFRSLSTAELTNCRLPEDGEVYFPHLGELTLRLAIAPSAAALHGLLIGCPKLGSLSLDRVFGCRTLRVRSWSLRSLTVSVSLTPWRVQERGAIELEHLVVEDAPALERLLAHDINWGPSINVARAPRLQMLGYLGIGIPELQLGSALFRSMCAVRLAADLRSVRTLALEMSDPQLKFVADFLMCFPCLETLHVTSHMVIPQGMRILNYEMGDDRIECLSHHLKKVVLKGYLGRKHEMQLAISLVRHARVLQVFKFLCENECNSKWVTNQKRQLQVDSRASLLAQFVFEKFSKGYIRFSKSASNISLVDPFDT

SEQ ID NO: 17352 - protein, 168 aa, Zea mays
  VARIANT 30: note = Ancestral polymorphism is A, Derived polymorphism is V
  VARIANT 40: note = Ancestral polymorphism is R, Derived polymorphism is H
  VARIANT 65..168: note = Derived polymorphism lacks residues 65 to 168
  VARIANT 72: note = Ancestral polymorphism is W, Derived polymorphism is L
  VARIANT 85: note = Ancestral polymorphism is E, Derived polymorphism is K
  VARIANT 89: note = Ancestral polymorphism is I, Derived polymorphism is T
  VARIANT 90: note = Ancestral polymorphism is L, Derived polymorphism is Q
  VARIANT 115: note = Ancestral polymorphism is C, Derived polymorphism is G
  VARIANT 124: note = Ancestral polymorphism is V, Derived polymorphism is I
  VARIANT 125: note = Ancestral polymorphism is V, Derived polymorphism is I
  VARIANT 127: note = Ancestral polymorphism is S, Derived polymorphism is F
  VARIANT 142: note = Ancestral polymorphism is G, Derived polymorphism is S
  VARIANT 150: note = Ancestral polymorphism is P, Derived polymorphism is L
MAEEDVQPLVCDNGTGMIKAGFAGDDAPRAAFPSIVGRPRHTGVMSKRGILTLKYLIEHGIVDNWDDMEKIWHHTFYNELRVAPEEHPILLTEAPLNPKANREKMTQIMFETFNCPAMYVAIQVVLSLYASGRTTGIVLDSGDNVDLVDPRESVTGSGEPGLPEAAVM

SEQ ID NO: 17353 - protein, 214 aa, Zea mays
  VARIANT 100..214: note = Derived polymorphism lacks residues 100 to 214
MISFFDEAEAMMQLDFAAGQPLLPVPVPVPGMHAVGFALDDFDFGATTAGDAAGFHFGAGTATCGGAAGGSGFGTCTTAGGAEDEEERLRRLKRKISNRESARRSRARRRQRAEELGRAAEALRAQRRALAARSDAAAARALAARLDTARLQAEARALRRRLGVAQRQAVLLLALARARLARAQVGTGAPVVAVPPPPQPQHGAGVVAAGAITW

SEQ ID NO: 17354 - protein, 103 aa, Zea mays
  VARIANT 67: note = Ancestral polymorphism is L, Derived polymorphism is F
MAKAGATAVLVTVLVVLAASAEMAHGVCNLSSAGIRACQPAAAIRNPTDQPSSECCAALAGADLACLCRYKNAAGVWVRFYRIDINRAMALPGKCGLAMPANC

SEQ ID NO: 17355 - protein, 285 aa, Zea mays
  VARIANT 166: note = Ancestral polymorphism is P, Derived polymorphism is L
MPFRFQFPWLKNPTTNGGTSNIDTNPSPRFPNPFLPIQAHVTSFLSSFPRALPPPPPWARITSPASTSGALPTSEIEERLAGVPVYALANAAQEFVLVSSTRVGGQGGESVSPTQALGLLCFRKEDADALLEQMDGDMRAGSGVVPVALNKVIQMKSDGVAFRFLPDSSQVANAIKLMQDEGLYAGEGFPGVPVFQSRSLVLMSDNKRYRPVFFRKEDLDNSLHRTSRDQQKPNPAVRFGDTQVSSLEDIIKSMKDSSSSKWDDVVFIPPGFDLATGSTPSQLRK

SEQ ID NO: 17356 - protein, 297 aa, Zea mays
  VARIANT 215: note = Ancestral polymorphism is Y, Derived polymorphism is N
  VARIANT 206..297: note = Derived polymorphism lacks residues 206 to 297
  VARIANT 201: note = Ancestral polymorphism is D, Derived polymorphism is H
  VARIANT 157..297: note = Derived polymorphism lacks residues 157 to 297
  VARIANT 133..297: note = Derived polymorphism lacks residues 133 to 297
  VARIANT 108: note = Ancestral polymorphism is G, Derived polymorphism is C
  VARIANT 78: note = Ancestral polymorphism is T, Derived polymorphism is I
  VARIANT 45: note = Ancestral polymorphism is C, Derived polymorphism is Y
  VARIANT 32..297: note = Derived polymorphism lacks residues 32 to 297
  VARIANT 31..297: note = Derived polymorphism lacks residues 31 to 297
  VARIANT 27: note = Ancestral polymorphism is S, Derived polymorphism is N
  VARIANT 22: note = Ancestral polymorphism is G, Derived polymorphism is E
  VARIANT 2: note = Ancestral polymorphism is A, Derived polymorphism is T
MATGSSLVPLLLIAVAVAQIVGSQAGSISIYWGQNGGEGTLADTCATGNYRFVNLAFLAAFGNGQPPVLNLAGHCDPTNGGCASLSGDIKSCQSSGVKVMLSIGGGAGSYYLSSAADAKDVATYLWNNFLGGQSSSRPLGDAVLDGIDFDIEGGTNQHWDDLAKYLKGYSNSGRRVYLTAAPQCPFPDAWVGGALNTGLFDYVWVQFYNNPPCQYSSGSTTDLADAWKQWLSIPAKQIFLGLPASPQAAGSGFIPADDLKSQVLPLIKSSGKYGGIMLWSKYYDDQDGYSSSVKSDV

SEQ ID NO: 17357 - protein, 297 aa, Zea mays
  VARIANT 255: note = Ancestral polymorphism is P, Derived polymorphism is L
  VARIANT 201: note = Ancestral polymorphism is D, Derived polymorphism is H
  VARIANT 180: note = Ancestral polymorphism is A, Derived polymorphism is V
  VARIANT 157..297: note = Derived polymorphism lacks residues 157 to 297
  VARIANT 133..297: note = Derived polymorphism lacks residues 133 to 297
  VARIANT 123: note = Ancestral polymorphism is T, Derived polymorphism is M
  VARIANT 108: note = Ancestral polymorphism is G, Derived polymorphism is C
  VARIANT 91: note = Ancestral polymorphism is S, Derived polymorphism is W
  VARIANT 78: note = Ancestral polymorphism is T, Derived polymorphism is I
  VARIANT 68: note = Ancestral polymorphism is V, Derived polymorphism is M
  VARIANT 65..297: note = Derived polymorphism lacks residues 65 to 297
  VARIANT 53: note = Ancestral polymorphism is V, Derived polymorphism is I
  VARIANT 45: note = Ancestral polymorphism is C, Derived polymorphism is Y
  VARIANT 34..297: note = Derived polymorphism lacks residues 34 to 297
MATGSSLVPLLLIAVAVAQTVGSQAGSISIYWGQNGGEGTLADTCATGNYRFVNLAFLAAFGNGQPPVLNLAGHCDPTNGGCASLSGDIKSCQSSGVKVMLSIGGGAGSYYLSSAADAKDVATYLWNNFLGGQSSSRPLGDAVLDGIDFDIEGGTNQHWDDLARYLKGYSNSGRRVYLTAAPQCPFPDSWVGGALNTGLFDYVWVQFYNNPPCQYSSGSTTDLADAWKQWLSIPAKQIFLGLPASPQAAGSGFIPADDLKSQVLPLIKSSGKYGGIMLWSKYYDDQDGYSSSVKSDV

SEQ ID NO: 17358 - protein, 297 aa, Zea mays
  VARIANT 34..297: note = Derived polymorphism lacks residues 34 to 297
  VARIANT 23..297: note = Derived polymorphism lacks residues 23 to 297
  VARIANT 22: note = Ancestral polymorphism is G, Derived polymorphism is R
  VARIANT 8: note = Ancestral polymorphism is V, Derived polymorphism is E
  VARIANT 6: note = Ancestral polymorphism is S, Derived polymorphism is L
  VARIANT 1: note = Ancestral polymorphism is M, Derived polymorphism is I
MATGSSLVPLLLLAVAVAQIVGSQAGSISIYWGQNGGEGTLADTCATGNYRFVNLAFLAAFGNGQPPVLNLAGHCDPTNGGCASLSGDIKSCQSSGVKVMLSIGGGAGSYYLSSAADAKDVATYLWNNFLGGQSSSRPLGDAVLDGIDFDIEGGTNQHWDDLARYLKGYSNSGRRVYLTAAPQCPFPDSWIGGALNTGLFDYVWVQFYNNPPCQYSSGSTTNLADAWKQWLSIPAKQIFLGLPASPQAAGSGFIPADDLKSQVLPLIKNSGKYGGIMLWSKYYDDQDGYSSSVKSDV

SEQ ID NO: 17359 - protein, 536 aa, Zea mays
  VARIANT 441: note = Ancestral polymorphism is A, Derived polymorphism is S
  VARIANT 366..536: note = Derived polymorphism lacks residues 366 to 536
  VARIANT 298: note = Ancestral polymorphism is S, Derived polymorphism is L
  VARIANT 156: note = Ancestral polymorphism is E, Derived polymorphism is D
MSLYTLVRTTHHFLALQLRGRDATNTYWILMTEMVSSMVVQETVSQILSGLVHSYEGKEDSNPNDNLERLEMAHIKLEAALETCSKWHVTDLSLLRWRKKLKRAAKECDDTLYKYKKMILEDEQMEQEVRNSYFPRRIAHATKSFIFSGFGRNSFESSRSAVRRFEWFADSASELLRFIELGGTPCCHMPFNSFAKHLFAGKELQHKIVHGNEYPSLLLWLVPFVTEEHGIEACLVFIKKDRNTLEDEFFFSVILQLSESTDIVGTAVKCLQLFPHHFQPTVDTIKKELTQLSTQDFSWVPYVDLWHRRHWDNLLRFSTQWFRPDPLCCKQHDQQHRLQYSNLGTVDASLDSIIEVNMQCQISLPEYNKQRAALSECKYSLRDYQKLKAGFLFTPHGPSENMLPADTSSMVAPPIFRRGQHCEDTDNITLEQLKEIMLPKAIDYFRQNTEATVYQILWKAIHGTAYIHFGKPTSRGARKRKLVQPKDQDVQHRTRMISHLLDLWAAHAPVRLRGFILDWIQKEKESQLAAPVHHCS

SEQ ID NO: 17360 - protein, 683 aa, Zea mays
  VARIANT 2: note = Ancestral polymorphism is S, Derived polymorphism is P
  VARIANT 36: note = Ancestral polymorphism is D, Derived polymorphism is N
  VARIANT 415..683: note = Derived polymorphism lacks residues 415 to 683
MSMLLQFLFLSLILLAASTTGGDGQQFAYSGFSTNDLVVDGATTITSNGLLELTNGTDQQTGHAFYPTPVQFTRSPNGTVQSFSTSFVFAILSVYTDLSAHGMAFVVAPSRNFPGALPGQFLGLTDIRNDGNASNHFFTVELDTIENKEFGDINANHAGANVNGLRSLNSSSAGYYADGDVNGGEFHFHNLSLISREAMQVWMDYDATASSITVTMAPSKAARPARPLFTATHNLTSVVTDAAYVGFSSATGTINTRHYVLGWSFAMNGPAPAIDVSRLPKLPRMGPKPLSKALEIVLPIATAAFVLAVGSAAFLLVRRHLKYAELREDWELEFGPHRFSYRDLLDATEGFKDELLLGVGGFGRVYKGTLPVSKLEVAVKRVSHDSRQGMKEFIAEVVSIGRIQHRNLVRVLGYCRRRGELFLVYEYMPSGSVDKYLYGNNEGTTRPVLSWEHRWRVVKGIASCLLYLHEEWEQVVVHRDIKPSNVLLDSDMNGRLGDFGLARLYDHDADPQTTHVVGTIGYLAPELGHTSKATPQTDVFSFGMFVLEITCGRRPVVVVVVGDDESSQEESQCMLVDWVLERWASSGALLETVDARLGGDYNAAEACLALKLGLLCSHPFSKSRPTARQVMQYLDGEVPLPEMAPTDMSLHMMAIMQNEGFDDYVVTGSTASIGTTSVVSGGR

SEQ ID NO: 17361 - protein, 294 aa, Zea mays
  VARIANT 201: note = Ancestral polymorphism is P, Derived polymorphism is L
  VARIANT 169: note = Ancestral polymorphism is G, Derived polymorphism is S
  VARIANT 105..294: note = Derived polymorphism lacks residues 105 to 294
MVTGKKRTFMFYPSLGVGHLIPMVELAKHLFRHGHGALIAVVNPPDTDVVSAAAVERLAAANPAIAFRLLPVPASPDAGADWVKRDLDTLQLANPVLRDFLLRSQPAAALILDMFCVDALDVAAELGVPAYFFFASAAGDLAMFLNLPYLYPTLPSFRDMGEALVRCPGMPPVRAMDMPLTVQDRDSDRTKVRMYQFRRIPEGRGVLVNSFAWLEPRALRALGDGVCVPGRTTPRVFCVGPLVNDSSSTTGSGGRHECLAWLDAQPKRSVVFLCFGSKDACSVLIALFLYHQFY

SEQ ID NO: 17362 - protein, 684 aa, Zea mays
  VARIANT 9: note = Ancestral polymorphism is R, Derived polymorphism is M
  VARIANT 22: note = Ancestral polymorphism is L, Derived polymorphism is P
MHQMKTKHRSFLSFLCFIIVSLVFALSDCAVSSGDHFVYHGFAGVNLTLDGNALVTPDGLLELTNDTVNLGHAFYPTPLSFNTQQRPNGTVRSFSVSFVFAILSVHADISADGMAFFVAPTKNLSNTWAQYIGLLNSGNDGNTSNHMFAVELDTTQNDEFKDIDNNHVGINIDSLTSLRAHHTGYYGGDDSGSFSNLTLISGKAMQVWADYHGETTQIEVRLAPAGAAKPARPLLSAVCNLSAVLVSDKSYIGFSATTGAISTRHCVLGWSFAMDGPAPAIDLSKLPELPRLGPKPRSKVLEITLPIATGLFVLAVGLVVVLLAYRRLRYKEVKEDWEVDFGPHRFSFKDLFHATGGFRKKNLLGVGGFGQVYKGVLPESRAEVAVKRVSHESRQGMKEFIAEVVSIGRLRHRNIVPLLGYCRREGELLLVYDYMSNGSLAQHLYSEGGQQPALGSWAQRFRIVKGVAAGLLYLHEKWEKVVVHRDIKPSNVLLDSEMNGRIGDFGLSRLYDHGTDPQTTHMVGTMGYLAPELVRSGKASPSTDVFAFGVLLLEITCAQRPVLRQQQQQHTLMDWVLEHWQNGLLAETVDPSLRKDYNLDEACLALKLGLLCSHPFVSARPTMRQVMQYLEGDAAIPELTPTHFSFTMQALTRQDEGFESPSSMLDPPLLTTSMGTFSSLSGGR

SEQ ID NO: 17363 - protein, 400 aa, Zea mays
  VARIANT 218: note = Ancestral polymorphism is E, Derived polymorphism is V
MLSYDFLDVAFSPYSDYWREMRKLFILELLSMRRVQSFAYARAAEVDRLVSSLASTPPGAAVDLSEKLYALSDGVVGTVAFGKMYGSAQFERSSFQRVMDETLRVLGSFTFEDFFPASRLARFADVLTGAAGRRSRIFRQIDRFFDSVIDKHLEPERLQAGVQEDMVDALVKMWREEQADGYEAPHGLTRDHIKGILMNTFAGGIDTCAVTMIWIMAELMRNPRVMQKAQAEVRTLVGNKPRVDEEDVKSLSYLKMVVKENFRIHPPGTLLIPRETMRSCVIGGYDVLPGTRIFVNVWAMGRDPSIWDRPEEFSPERFEGSHVDFRGSSFELLPFGSGRRSCPAIAMGVANVELVLANLLHCFDWQLPEGMVEEDIDMEETGQLAFRKMVPLCLVPIKRV

SEQ ID NO: 17364 - protein, 124 aa, Zea mays
  VARIANT 110: note = Ancestral polymorphism is T, Derived polymorphism is I
  VARIANT 5..124: note = Derived polymorphism lacks residues 5 to 124
MDDAQSRSHELATGWPLLPQLLVVPLLLLLCLLSSGRRSREQGAAERRRAPPGPPKQLPVLGNLLQIGSRPHRYFQAVARRYGPIVEVQLGRVRTVVVSSPDAAKEVLRTNDLHCCSRPNSPGK

SEQ ID NO: 17365 - protein, 686 aa, Zea mays
  VARIANT 227..686: note = Derived polymorphism lacks residues 227 to 686
  VARIANT 246..686: note = Derived polymorphism lacks residues 246 to 686
MSAAAALSARPRPPTPAAIIHSLFVSLSDPSAIRLLPAPLLVFSQLRRLLPPDAATQLLLHPIASLLHLHRSDIRIGLQLHGLSLSAGLSCYSHLLPHLLSFYSHHPSLLPTASSLAAGSTSPEPYNVLISACLNHGLPRHALAAYQKMVDKDAVPPDAFTYPKVLRACAETADLVLGRAVHVRAAAAGMDGHLFFQNALVSMYAKCGDLAAARRVFDGMDNRDVVSWNSMISGYAASGQWREAVELFRQMQAEGAEANSVTWNTIAGGYIQMRDYRAALGLIRDMVRGGAEVDFVTLVIGSNACSRAGWLRLGKEIHGLAVRMQCHEIDSVVNAVITMYARCNDMERALMLFRTMRCPGLVAWNTMLAGFALLDDAEAASRLFREMVCSDVQPNYVTVVTYLALCARVANLQHGQELHAHIIRQGFKRYCLLWNSLIDMYSKSGRLSVAQNVFDTMDDRDMISFTSMIAGYGMQGKGIVSLRFFKQMIDSGIMPDAIIMVTVLSACSHSGLVDEGEELFDKMVSSYGIKPQMEHYSCMVDLYARAGLLEKAEELLNQTPFPPTSTMVAALVGACHEQGNVIIGERSARRLLEMKTENAGHYVLIANMYAAAGCWNELATVRKLMRDMGVMKAPGLAWADLGNGFTPFLVGDRSNPLAPEIYEVLDELTEQMRNMSNCSDLDILSM

SEQ ID NO: 17366 - protein, 225 aa, Zea mays
  VARIANT 37: note = Ancestral polymorphism is P, Derived polymorphism is L
  VARIANT 156..225: note = Derived polymorphism lacks residues 156 to 225
  VARIANT 170: note = Ancestral polymorphism is M, Derived polymorphism is T
MANPPRERFPDTRGRATFQSWSRAHPKVARFRKKPFPLFYSLEALYEGSVATGDLNFTSTQQLPPYAPLSVDTLAPPAIVPPLAPPTIVPPLAPPASVPSAPTFVVPSARKMTSEAMSAIHEAREGEGSKSRKRKQSHVGAALEDYVEFKKSQTNKTLDALKELSMRKCMKEMEAMDGFIDEEKSYAVEVFESEINREAFMSTMNHNVRRMWQKRKIRVLSGSNT

SEQ ID NO: 17367 - protein, 456 aa, Zea mays
  VARIANT 249: note = Ancestral polymorphism is V, Derived polymorphism is L
MMMMMNRPQPQQAGPLQLLRSLGLGVGGGGGARRGAMKSATSLLLGAALATAFFLLYTSLCRDLGSAAAAAPRSGSPPPTTPRREQETGDTAAARQEAATGEGGEERVAASSDGDHRGGDATAEENGQSKEEEQRRIVMPATSTTHERSEVNLMFPTTHQATSHHRPQPKQQKKSPPPASQDLADLLRRAATADKTVLMTAINEAWAAPGSFLDLFLESFRQGEDTAGLPRHLLVVAMDGRALERCNAVHPFCYLFRVDGMDFAAEQKYMEGDYLEMMWRRNRFQQSVLELGYSFLFTDVDILWFRSPFPRLPRAAQVVMSADFFVGDADSPNNYPNGGLLYVRSSPATVGFYRHWQASRARFPGHHEQYVFDRIVKEGYAGARVQFLDTAVFGGFCQHGDDLGRVATMHANCCVGLDNKLFDLKNVLQDWKTYRARAAAGNAQGFSWRVPGKCIH

SEQ ID NO: 17368 - protein, 452 aa, Zea mays
  VARIANT 282: note = Ancestral polymorphism is H, Derived polymorphism is D
MFGTPSITPAFGNPSSTPVFGTPSATPAFGATSSTPAFGTLSSTPAFGTPSSTPAFGTPSSTPAFGTASTTPAFGASSSTPAFGTTSTTPPFGSLNFGTPSSTSAFGTPSSAPAFGALNFGTPSSTSAFGTPSSAPAFGATPSPSPFGFQQQATPSPSPFGLLGGGGAQITTQMAPVAPLPLSPSDRDIQAIVDAYKEDPGNPRYAFRHLLFSVTEPSQRVKPVAASDIMWAEAMGKLECMDSADRERLWPQLVQGFKDLSHRLKLQDEVLVSDTDRLSMTHSNVKKLQRHFQADTYPWIQRLKQQELAIQRRLLRVIFSLDRFVRIVEALENRGYRCPLTKEEADLYERLVAILKRLKGHNADLAKRVNTLVSTSRLLASSGGAGGSVYIPSSAKVDERSVTELLEALQQQTEAVAKLGNVLKRDIRDMEIIQSEGTDMAEDNVGRRAQKI

SEQ ID NO: 17369 - protein, 319 aa, Zea mays
  VARIANT 99: note = Ancestral polymorphism is A, Derived polymorphism is D
MEEGRMEVSGKKLDFRPQQVGEGHTDVPGMKLEFRLGKLEVDHMKTVDIDTNDRDKEGALAGGAAGVVVETALYPIDTIKTRLQAAQGGSKIQWKGMYDGLAGNIVGVLPASAIFVGVYEPAKRKLLELFPKNLSAIAHLTAGAIGGAASSLIRVPTEVVKQRMQMSQYKTAPDAVRLILAQEGIKGLYAGYGSFLLRDLPFDAIQFCIYEQLRIGYRLTAKRELHDTETAIIGAFAGAITGALTTPLDVMKTRLMIQGQTNQYRGFIDCAQTIMREEGAGAFFKGIEPRVLWIGIGGSIFFAVLEKTKSVLAERNTRR

SEQ ID NO: 17370 - protein, 260 aa, Zea mays
  VARIANT 21: note = Ancestral polymorphism is S, Derived polymorphism is F
  VARIANT 66: note = Ancestral polymorphism is G, Derived polymorphism is S
  VARIANT 98: note = Ancestral polymorphism is P, Derived polymorphism is L
  VARIANT 107: note = Ancestral polymorphism is L, Derived polymorphism is F
  VARIANT 139: note = Ancestral polymorphism is P, Derived polymorphism is A
  VARIANT 236..260: note = Derived polymorphism lacks residues 236 to 260
MREVADLILSFPDETPVVVLSAMGKTTNNLLLAGENAVSCGAPKASEIPKLAVIKDLHLRTVDELGLDKSIVSGILLFAPLCSWNASAEKTDDDIPMPAYFRFLALLAFKIFSAEQVDVAVLEVGLGGKFDATNVVKAPVVCGISSLGYDHMEILGDQILFLVINLVSINGLLVLMNVMLSRNKELLSAPNRLKWKCLTHCLIRGEAEGGLIRSRKRKPDQVIISRDDVSESQFNQVLNIELQQIIDGDCHRSQKTTVSI

SEQ ID NO: 17371 - protein, 161 aa, Zea mays
  VARIANT 24: note = Ancestral polymorphism is A, Derived polymorphism is T
  VARIANT 13: note = Ancestral polymorphism is D, Derived polymorphism is N
MFVGIYDGFNRPDATDYLVVQLYTAVCRELDGVLRLHADEPAEAGHNGGGRALARGQGCHHDVLDVLARALRSTEVGYFMEAEARAAECPELAMVGSCVLVALVKGADVYVMNVGDSRAVLAQRAEPEPEKSVPQSAPEPEQSAGAQEERAVCEQGHFERS

SEQ ID NO: 17372 - protein, 86 aa, Zea mays
  VARIANT 40: note = Ancestral polymorphism is E, Derived polymorphism is K
  VARIANT 37: note = Ancestral polymorphism is P, Derived polymorphism is L
MVEIRSALVREATALVDEVKTPEKPAKETAPAAKQIPAPKKPEEMLRAQHMLTTLVDEVQPPKKPEETSENTSAGCPTPSYPAQEC

SEQ ID NO: 17373 - protein, 253 aa, Zea mays
  VARIANT 151: note = Ancestral polymorphism is P, Derived polymorphism is Q
  VARIANT 17: note = Ancestral polymorphism is A, Derived polymorphism is P
MDVKCRRLEGKVAIVTASTMGIGLAIAERLGLEGAAVVISSRKQKNVNEAVEGLRAKGITAVGAVCHVSDAQQRKSLIETAVKSFGHIDILVSNAAANPSVDSILEMKESVLDKLWDINVKASILLIQDAAPHLRKGSSVIIISSIAGYNPEQGLTMYGVTKTALFGLTKALAGEMGPDTRVNCIAPGFVPTRFASFLTENETIRKELNERTKLKRLGTVEDMAAAAAFLASDDASYITAETIVVAGGVQSRL

SEQ ID NO: 17374 - protein, 189 aa, Zea mays
  VARIANT 136: note = Ancestral polymorphism is G, Derived polymorphism is R
  VARIANT 48: note = Ancestral polymorphism is R, Derived polymorphism is C
  VARIANT 18: note = Ancestral polymorphism is P, Derived polymorphism is L
  VARIANT 14: note = Ancestral polymorphism is P, Derived polymorphism is S
  VARIANT 13..189: note = Derived polymorphism lacks residues 13 to 189
  VARIANT 12: note = Ancestral polymorphism is R, Derived polymorphism is W
  VARIANT 1: note = Ancestral polymorphism is M, Derived polymorphism is I
MATASSQTFSSRRPKGLLGLPYLSIPVLLLSLPSDQHAPSAPPPHPLRSVRPLPNRAPTLPRRHHASRFPPLGPGLPTVALPHLPLPCSPPTLRLDRLYTLLSSIHTRPDARHPEWCQRDALVASILVADHLYHFGFNVALVLLVEIHSCGDGDGDGFGVGLRHVMGQAGFSGVRKQRSTWTQVTKKYN

SEQ ID NO: 17375 - protein, 350 aa, Zea mays
  VARIANT 26: note = Ancestral polymorphism is S, Derived polymorphism is C
  VARIANT 49: note = Ancestral polymorphism is P, Derived polymorphism is L
  VARIANT 62: note = Ancestral polymorphism is L, Derived polymorphism is R
  VARIANT 80: note = Ancestral polymorphism is S, Derived polymorphism is R
  VARIANT 121..350: note = Derived polymorphism lacks residues 121 to 350
  VARIANT 162: note = Ancestral polymorphism is L, Derived polymorphism is Q
  VARIANT 168: note = Ancestral polymorphism is H, Derived polymorphism is Q
  VARIANT 204: note = Ancestral polymorphism is P, Derived polymorphism is L
  VARIANT 227: note = Ancestral polymorphism is D, Derived polymorphism is G
  VARIANT 280: note = Ancestral polymorphism is G, Derived polymorphism is V
MQYLTDVARSKDLLKVVGHSVTMAMSDGEFLKSRKWAVGGHDWEVHLRPKDHPVGHQRPVTLRLVLISEARCGDVEAKLSCRLVDPIGRLKPSKEKSMSHKFYKSGDYSGAIQVTAREDLEQSGYLVDDSYTVECSITVLKKAPALNTAAAATAMDRDAAMLPSLELQRRLGEFLQKGMGADVTFHVSGEKFAAHKAILASRSPVFMAELFGGMKEESSRRHIEVKGIKPEAFKAVLHFIYTGTAPELNKKGDGATSLAQHLLAGADRYGLDMLKHFCVVRLADCITVDTVATTLALAEQHGCSQLKASCIEFIAGYLDAVLETEGYKHLEASCPSVLADILKATRRPTN

SEQ ID NO: 17376 - protein, 244 aa, Zea mays
  VARIANT 170: note = Ancestral polymorphism is S, Derived polymorphism is Y
MKGAVYSPWKARSTLHGLPQSTVSRPTTTTLAWLPMEGRGRCDRAPAQHGRRDPLSSPHHRRPLSIEESRLPSPPSPHMAGEPIATVPSGPDSAAEADRLLALAELELSAGRLRAARRHALRAARLYPISPCAPVVATAANVLLADASSHHAVLLLPEPDDPEASPLSTSELRRHFKSLVKSLRVGLDAATAAAYLFVVAAADEAVGRATEAYEVLTAPAPGTFWTACAGCRLLHEFERKYVGY

SEQ ID NO: 17377 - protein, 161 aa, Zea mays
  VARIANT 100: note = Ancestral polymorphism is G, Derived polymorphism is R
  VARIANT 105: note = Ancestral polymorphism is A, Derived polymorphism is T
  VARIANT 106: note = Ancestral polymorphism is R, Derived polymorphism is H
  VARIANT 113: note = Ancestral polymorphism is G, Derived polymorphism is R
MPLGDGAEAADFVLPDELLAALPRDPYKQLDLAHRITALAVSGRVSGLEREAGRLRAEAAGKDRENAELREGVVLLDTALQETNARLRSPMLTMADLPTGTRDPAREFRFPPGWFLEGSKCANIRYHVKEASYQHVIGIPLTSFAYADEENLPVLPWFIKK

SEQ ID NO: 17378 - protein, 106 aa, Zea mays
  VARIANT 8: note = Ancestral polymorphism is G, Derived polymorphism is E
  VARIANT 11: note = Ancestral polymorphism is F, Derived polymorphism is I
  VARIANT 18: note = Ancestral polymorphism is E, Derived polymorphism is K
  VARIANT 41: note = Ancestral polymorphism is F, Derived polymorphism is I
  VARIANT 83..106: note = Derived polymorphism lacks residues 83 to 106
MTAREPRGFGFIQYFDPEDASDAKYHMDGKMLLGREIAVVFAEENRKKPSDMRAREKISGRGRSYDGRLRSRSPGLNDYPRGRSRSQRRSYSPALKRKHYSRSPAP

SEQ ID NO: 17379 - protein, 77 aa, Zea mays
  VARIANT 5: note = Ancestral polymorphism is D, Derived polymorphism is V
MVTTDWGPIIVAVVLFILLSPGFLFQLPARVRVVEFGNMGTSALAILVHAILYFCILTIVVVAIGVHVYTTKPDPVE

SEQ ID NO: 17380 - protein, 109 aa, Zea mays
  VARIANT 2..109: note = Derived polymorphism lacks residues 2 to 109
MEGRRSNEVSSAEAVLVGALSSGVNAPTWFVLKITFLLLALCFTAMLALAFSSKNFVIVAHVLLLVTIGTVLFVLLNRFLAEVGLVPVEQQMKEMGIHKTEATDEDKRN

SEQ ID NO: 17381 - protein, 327 aa, Zea mays
  VARIANT 312: note = Ancestral polymorphism is G, Derived polymorphism is R
  VARIANT 298..327: note = Derived polymorphism lacks residues 298 to 327
  VARIANT 107..327: note = Derived polymorphism lacks residues 107 to 327
  VARIANT 98: note = Ancestral polymorphism is R, Derived polymorphism is G
MEVKSAMLASSLNLTPTLSASATALFPASSARIAAPALSMEGTSATARSPWKARPPPRIVAPSLSTPVTAHSLWKIFLADRCRGISTVYWVLGFYMTRQFALPSIAQRHILAGLASAVGGLSAPYERASRIHERHVVKWLWAAGCHPFGTFLNSSQISQILQDVALRTTIYAQVDAALRKIRDTSGHLKTPLGELVKGNKNKSTIELWVEKFYKKVTNLPEPFPHDLVEKLEEYLDKLEGQLVDLSSLLYDHRLVDAYQNSTDILQSTIFTQQYVERVLANERDKMKCCSIEYSHPKQSSQAFVYGGILLAGFLVYSLVIFFSSPVR

SEQ ID NO: 17382 - protein, 282 aa, Zea mays
  VARIANT 171: note = Ancestral polymorphism is T, Derived polymorphism is I
  VARIANT 174: note = Ancestral polymorphism is P, Derived polymorphism is R
MDVGRCSTNDPKGLSYAQGLVTALENFEFLCGMVIWHDILFSINMVSKKQHSKTVCMDAALEQIKGVILYFKKYRAEGFSRIIDIAKEIAEEMDVEPVFPRNRQAKRKKHFDEQNDQNEEEALSAIESFRVNCFLVMIEMAIASLNSRFEEMELFENIFGFLINSERFCTTGLPSDVTVEVGDMSFHLHKFPLHSKSAFLERSIEENSDQEECIIKLNDIPGGAKSFELVARFCYGVKIEFSPANAVYLRCSSKHLEMTEKVAEENLIAQSEMFLNQVVLCN

SEQ ID NO: 17383 - protein, 169 aa, Zea mays
  VARIANT 60: note = Ancestral polymorphism is P, Derived polymorphism is S
MGVVSAAADAIVAVFSLTIVVAAPLLDAQSVLPHTLYPAPLLELKRWYAAEFGDYLVAQSPGFFRGLVCLELAFQWPLAVATLYGILTRRRWAATTSLMAGVGTLTSMVQANQHQSCFRCMFLMLFLLSLLFYVDFAHALDALLLVHHLGLLPGRRGSRSAVTLGEFSV

SEQ ID NO: 17384 - protein, 154 aa, Zea mays
  VARIANT 32..154: note = Derived polymorphism lacks residues 32 to 154
  VARIANT 38..154: note = Derived polymorphism lacks residues 38 to 154
  VARIANT 66: note = Ancestral polymorphism is K, Derived polymorphism is N
  VARIANT 71: note = Ancestral polymorphism is R, Derived polymorphism is Q
  VARIANT 86..154: note = Derived polymorphism lacks residues 86 to 154
  VARIANT 105: note = Ancestral polymorphism is E, Derived polymorphism is K
MWVKMATCIKVASEVFGVTKGSSGESKDTWWWTENVQKAIKDKKECYRSLFHDKSAVNIERYKVAKKTAKRAVSEAKGRAYDDLYRRLSTKEGEKDVYKIARIRERKTGDLNQVKCIKDEMDQLLVKGQDIKQRWQRIQESEVKEALKRMKGAR

SEQ ID NO: 17385 - protein, 1116 aa, Zea mays
  VARIANT 987..1116: note = Derived polymorphism lacks residues 987 to 1116
MECNKEEASRAKDLALVKLQEADYAGAKRIALKAQKLFSGLENISQLLTVCEVHCCAAIKINGETDWYSVLQVETTADDILLKKQYRKLALLLHPDKNKFVGAEAAFKLIGEAHMILTDKVKRSRHDSKRNPVIPKSAPKKRGRPSKETDYVAKRANKENTDAVYSTFWTICTTCGTKYQYPYSLLMKVLLCQVCSKSFFAYDLSKKPFVRVDASNPWSGIGMRHKMFPNQQHNYQSVPTQQNPVTGRQTPVPDQKQQPRNVSGKQTPGINQQQRSQKFPFSSRPKNVVNSHPWGGFGRQQEMCPLSQPTHVSDQKPYYQRAPGQQNPVNGHQTLVTDHQQHSLNTQQQSTNPPCNPGSKNVVNSQGAAFQNSNATANSNLTDEAGACNREKITRPSFNDEDRTKSQVANSDKVHLVNKQMKGNKVATGSSHPVAINGSQVARKDVLTAACADKTSGQHPCIASQQRNSVIVEDGSDGCGKVSDHLPNSSTKKRIRKDHSSYTAGKSDHTTENEVAEANSQHKYSIPSKEKITNEKEVISGLNLDVLQGTKRKQQTSSGSGSDAAAKSVNHSIPCNVTVSCPDPDFYDFEKNRDADRFTVDQIWAVYDDLEGMPRYYARIKQVYSPNFMLQFTWLEYDPLCDAEKEWSSKELPVACGNFRVGRTLLTEDTKMFSHVVSWTKGRKRNRYEIYPKKGEVWALFRGWDINWVSDSDDHRHHDYDIVEITSDFAMGLGTYVIPLVKIKGFVSLFVRSSSEAPFLIPSGNTLSFSHSIPFHRLVENGRQHIPTGALELDTASLPSDLEKAFTPVNLDNSFMSTGSGSTPCNVSSTSSCEVPVGKTEQTQDGTGTGVKDGVEKLNQNTKVEQDNGSEASTIDDCGDGWNDSSPPGSPAGFHYPDTEFCSFTSLRSFDKFKKGQVWALYCDTDKFPKYYGLVKSVDSEDCTVHIRWLEHCPREQVEEHLAQDGLSIGCGLFEVSRQSETYDCTEVFSHSVEVTGKGKRYEILPCAGQVWAVYKDWSRTWSFEDYSRCEYLLVEVMEVSDGDITVSCLTKAEGFSTVFMQEQNGKSRRIARSDLTMFSHQVPAYRLTDETGDLCGYWELDPASLPEVLLVRKTK

SEQ ID NO: 17386 - protein, 476 aa, Zea mays
  VARIANT 168: note = Ancestral polymorphism is V, Derived polymorphism is G
MRSWARAALGVAELLVSAAIHLGYAFYIFGTAVAADVSASLVKGLMAGGGVAKDVAVDGEDEAAAVLDDGAVPPIVLVHGIFGFGKGRLGGLSYFAGAEKKDDRVLVPDLGSLTSVHDRARELFYYLKGGQVDYGEEHSREYGHSRFGRTYARGHYPAWDEEHPVHLVGHSAGAQVIRLLQQMLHDREFEGHGDTSERWVLSVTSLSGALNGTTRAYIDGMRAEKEGGGRWLRPVCLLQICRVGSVLYHWLDLPWLKRYYDFGFDHFGMSRRVVGVAGLAEILLDAGSGGGRRGPFATGDWILPDLTIQGAARINARVRTFPATFYFSYASRRTARSPPGSAGATVPSGVTRIHPLLFIRVLQMCRWRYPAGADPPYQGYRDEDWEDNDGALNTFSMTHPRIPVEHPSVQVEKDEDCRPLRPGIWYYKIVEADHMTFVINRRRGGVQFDLVYDSIFDNCRKHVFRTAPPPTLPVQS

SEQ ID NO: 17387 - protein, 333 aa, Zea mays
  VARIANT 157: note = Ancestral polymorphism is S, Derived polymorphism is P
MEAEAAAKRAREGGEDATAPVAGAEAVVAGAGEQAGISAVIPGWFSEISPMWPGEAHSLKVEKVLFQGKSDYQNVMVFQSSTYGKVLVLDGVIQVTERDECAYQEMITHLPLCSIKDPKKVLVIGGGDGGVLREVSRHISVEQIDICEIDKMVVDVSKQFFPHLAVGFEDPRVSLHIGDGVAFLKNAPEGTYDAVIVDSSDPIGPAQELFEKPFFQSVARALRPGGVVCTQAESIWLHMHIIEDIFVNCRQVFKGSVNYAWTTVPTYPSGVIGFMLCSTEGPAVDFQHPVFNIEEDEHSTKSKGPLKFYNSEIHTASFCLPSFAKRVIESKAS

SEQ ID NO: 17388 - protein, 195 aa, Zea mays
  VARIANT 28: note = Ancestral polymorphism is C, Derived polymorphism is Y
  VARIANT 41..195: note = Derived polymorphism lacks residues 41 to 195
  VARIANT 58: note = Ancestral polymorphism is E, Derived polymorphism is V
  VARIANT 137: note = Ancestral polymorphism is F, Derived polymorphism is C
MTMAGGGGLNRSSSRGQLLPQELLDDLCSRFLLNVPKEELESFERILFLLEQAHWFYEDNSVEHNPNLKSLSFKDFTSLMFKSCTALRPYIAHLDDIYKDFNNYKFRVPVSGAIILDDTYERCLLVKGWKAGASWSFPRGKRNKDEEDHTCAVREVNFCLYHVHACSLFSFLSAPYNFFEAYYTCSNEIYYEYIL

SEQ ID NO: 17389 - protein, 143 aa, Zea mays
  VARIANT 70..143: note = Derived polymorphism lacks residues 70 to 143
  VARIANT 119: note = Ancestral polymorphism is H, Derived polymorphism is R
  VARIANT 120..143: note = Derived polymorphism lacks residues 120 to 143
  VARIANT 121: note = Ancestral polymorphism is N, Derived polymorphism is I
  VARIANT 123: note = Ancestral polymorphism is T, Derived polymorphism is S
MSSQAEISERMRAILIDWIIEVQYRLTLMPETLYLTVYIIDQYLSMESVPRKELQLVGISAMLIASKYEEIWAPLSILRLAYTTSSDILQVKDLMCLCDNAFTRDQVLTKEKAILDRLHWNLTVPTMYMFIVRYLKAAMCDTE

SEQ ID NO: 17390 - protein, 169 aa, Zea mays
  VARIANT 25: note = Ancestral polymorphism is P, Derived polymorphism is A
  VARIANT 71: note = Ancestral polymorphism is D, Derived polymorphism is Y
  VARIANT 88: note = Ancestral polymorphism is W, Derived polymorphism is R
  VARIANT 121: note = Ancestral polymorphism is G, Derived polymorphism is E
MASSRKLAPLAVALATIALVVTVTPCAAQKSVEDDVVDLHNAARADVGVKPVSWNNSLATYAESYAETRQDDCQLKFSDGPYGENLFWGAAGTNWTAADVVGLWVAQKQYYDHASNTCAAGKKCGAYTQVVWRGTTSIGCAAVVCSNEGGVFAICSYNPPGNLDGQSPY

SEQ ID NO: 17391 - protein, 260 aa, Zea mays
  VARIANT 62: note = Ancestral polymorphism is T, Derived polymorphism is I
  VARIANT 73: note = Ancestral polymorphism is K, Derived polymorphism is T
MGRVIRAQRKGAGSVFKSHTHHRKGPARFRSLDFGERNGYLKGVVTDVIHDPGRGAPLAKVTFRHPFRYKHQKELFVAAEGMYTGQFVYCGRRATLSIGNVLPLRGIPEGAVVCNVEHHVGDRGVFARASGDYAIVISHNPDNGTSRIKLPSGAKKIVPSSCRAMIGQVAGGGRTEKPMLKAGNAYHKYRVKRNSWPKVRGVAMNPVEHPHGGGNHQHIGHASTVRRDAPPGQKVGLIAARRTGRLRGQAAATAAKADKA

SEQ ID NO: 17392 - protein, 113 aa, Zea mays
  VARIANT 8: note = Ancestral polymorphism is E, Derived polymorphism is A
  VARIANT 21: note = Ancestral polymorphism is A, Derived polymorphism is V
  VARIANT 37: note = Ancestral polymorphism is V, Derived polymorphism is L
  VARIANT 48: note = Ancestral polymorphism is F, Derived polymorphism is V
  VARIANT 72: note = Ancestral polymorphism is A, Derived polymorphism is V
  VARIANT 79: note = Ancestral polymorphism is R, Derived polymorphism is C
  VARIANT 90: note = Ancestral polymorphism is G, Derived polymorphism is R
MAATPNTEALSVLCNGASYGAGDPFATSLTFVLSELLSATPVRAGHDFYDISPYPAAFAYGHAACRAALSAADCAACLRSAVSQMDASCGYSVGARAVLVDCSVRYEQYAFVD

SEQ ID NO: 17393 - protein, 262 aa, Zea mays
  VARIANT 71: note = Ancestral polymorphism is S, Derived polymorphism is Y
  VARIANT 63: note = Ancestral polymorphism is G, Derived polymorphism is C
MPSILAIKKVNQLQPPFLAPMGHPSSIHSFYLYSEYMATAAAAATSSSSSSSSDSLPFSMVCGDEAPAAVSWRAADAEVSVAAVPGAGLRQAPSKGAFIGVRRRPWGRFAAEIRDSTRNGARVWLGTFDSAEAAAMAYDQAALSARGSAAALNFPVERVQESLRALALGGNAAGASASAGGSPVLALKSRHSKRKRRKKSELLAAAAAKGAAAAAKATAAGGRSQIKNAAAAAEQQRFVVELEDLGAEYLEELLRISESYSS

SEQ ID NO: 17394 - protein, 74 aa, Zea mays
  VARIANT 48: note = Ancestral polymorphism is P, Derived polymorphism is L
  VARIANT 47..74: note = Derived polymorphism lacks residues 47 to 74
  VARIANT 43: note = Ancestral polymorphism is C, Derived polymorphism is Y
  VARIANT 8: note = Ancestral polymorphism is R, Derived polymorphism is S
MPKIKTSSFKYPEGWELIEPTIHELDAKMGKAENDPHDGKRKCEALWPIFRISHQRSRYIYDVYYRRKEISQEL

SEQ ID NO: 17395 - protein, 736 aa, Zea mays
  VARIANT 215: note = Ancestral polymorphism is Q, Derived polymorphism is L
MEKEEQQANDYTDEDTDYTDDEEEDYNDDEDYTPEPETASKRQKRHTLEQIRELRAAYQRCDHPDAPTRRALGAKIGLEGRQVQYWFQNQRSQTQAKALAQNNRVVQQENAALMAENASLRHAILTGSCLACGGATTAAAPAELPPESRRLVAENARLRGEYARATALLNQILLSAPAPPGPAAAAVVVSSSSVARPVADRAARLRGHAEAAMDQFLLLATKGEPLWLPTTPDGEALNYQLGYKHKKALPVHHGLCPDEFVMEASRATGVVRASATYLVATLTDARRWSEMFPSVVASVTARRDAAISGGVFGSHIQLMNAELQVHSPRLLNRSINFLRYTKRVAEGRWAVMDVSVDGILGPPGSRVADAAAAAAAANGVTLVPAWYTGCRLLPSGCLVEDMRNGYCKVTWVVHAEYDETTVPTMFRPLFRSGKALGAHRWLASLQRQCEFLAVLHSSQVSRGGDNTAAAISSMGKRGVLELAQRMVADFYSAVSGPVTQPSSSIDEWYGSAGAGARRTDTAVRMVTSKKAGTVADLVLSASTTVWLPNTPPQLVFRYLRDDQRRGEWDAFFASSAAVTELCSVPTGHLNGNAVSVLYSNVTDGTDRKKTLILQEACTDASCSMVVYAPVEEDSMRAVMNGGDHASVFLLPSGFAVLPDGHGRARHAPSSSSSTPVGCDDTTAGSLLTVACQALVPGSSPSDNRAAPGAFDDVGKLLCRALEKIKAAVKTDIVTPA

SEQ ID NO: 17396 - protein, 626 aa, Zea mays
  VARIANT 305..626: note = Derived polymorphism lacks residues 305 to 626
MAATMGSISANGSYQTNRPSALKQAPHMQFQQCCNGGLRFLSKHSQSTRSKIQVAKRRATDNGIHPKTTGHRAPIVCSAGMTIVFVATEVHPWCKTGGLGDVVGGLPPALAAMGHRVMTIAPRYDQYKDAWDTSVLVEVNIGDTVETVRFFHCYKRGVDRVFVDHPMFLEKVWGKTGAKLYGPTTGTDYRDNQLRFCLLCLAALEAPRVLNFNNSEYFSGPYGEDVVFVANDWHTAILPCYLKSMYKPNGIYKNAKVAFCIHNIAYQGRFARADFDLLNLPDSFLPSFDFIDGHVKPVLGRKLNWMKAGIIESDLVLTVSPHYVKELTSGPDKGVELDGVLRTKPLEIGIVNGMDVYEWDPSTDKYISVKYDATTVTEARALNKESLQAEVGLPVDSSIPVIVFVGRLEEQKGSDILIAAIPEFVGENVQIIVLGTGKKKMEEELTQLEVKYPNNARGIAKFNVPLAHMMFAGADFIIVPSRFEPCGLIQLQGMRYGVVRLPSSALLQQFRFFVTIPICSSTGGLVDTVEEGVTGFHMGSFNVECETVDPADVTAVASTVTRALKQYDTPAFHEMVQNCMAKDLSWKGPAKKWEEVLLGLGVEGSRAGIDDAEEIAPLAKENVATP

SEQ ID NO: 17397 - protein, 537 aa, Zea mays
  VARIANT 37: note = Ancestral polymorphism is Y, Derived polymorphism is H
MALEKLQVLHALDVADTQRYHVRAVVIAGMGFFADAYDLFCITLVTKLLGRIYYHVPGREEPGRLPPRLEAAINGVTFCGMIVGQLLFGWLGDKVGRKKFYGKTIMLMIMGSFLSGLSFGNSADGVMATLCFFRFWLGVGIGGDYPLSATIMSEYANKRTRGSFVAAVFAMEGFGVLAGCIVTLVVSATFQARLGAPAYEEDPAASTPPQADYAWRIILMVGAIPACFTYHWRMRMPETARYTALVARDADKAARDMSRVLQVDITGEPDKVESITRDRGDYGVFSRRFARRHGAHLAGAVACWFVLDVVFYSQNILQEGIFSDVNWVPRARTMSALEETYRVGRAHAIIALCGTLPGYWFTIAFVDVVGRKAIQFLGFAMMMGFMLLIAAFYDSLISPGRRIWLVLMYTFTFFFANFGPNSTTFILPAEIFPAHLRTTCHGISAAAGKVGAIVGTFGFMYAAQKADGSEAAETGYPSGIGVRASLFVLAASNALGILFTCFLPEPKGRSLEEVCGEGAEPTIRDDTDVGDSKILPL

SEQ ID NO: 17398 - protein, 332 aa, Zea mays
  VARIANT 293: note = Ancestral polymorphism is H, Derived polymorphism is R
  VARIANT 289: note = Ancestral polymorphism is R, Derived polymorphism is G
  VARIANT 268: note = Ancestral polymorphism is G, Derived polymorphism is R
  VARIANT 238: note = Ancestral polymorphism is S, Derived polymorphism is Y
  VARIANT 139: note = Ancestral polymorphism is N, Derived polymorphism is Y
MEVEEAGGEVENAGKDEAEAEYHSRDFEWEDLKEEVESGPVFSYHLSPFLDPAASTTSPPQPSSEAWRSFHRRHASGKFFKERRYLLKEFPELCSSKDHAKVLEVGCGNGSTAVSILRSSERITVFACDCSKDTLEKAYEIISNTKGINIKDRFHPFLMDVSKETFPDWLFCKACQTSLGKAAASLLDPSHHGIREEHPVFLGENQCCAGGMDFITMIFTLSAIPFDIMPTTIEQCVSVLKPGGLLLFRDYGLYDMTMLRFLPHQRVGFREYMRSDGTFSYFFSLDTVRELFRAAGLVELELEYCCVKSVNRKNGKTMRRVWVHGKFKKPPR

SEQ ID NO: 17399 - protein, 163 aa, Zea mays
  VARIANT 7: note = Ancestral polymorphism is C, Derived polymorphism is F
  VARIANT 135: note = Ancestral polymorphism is A, Derived polymorphism is S
MAPRLACLLALAMAAIVVAPCTAQNSPQDYVDPHNAARADVGVGPVSWDDTVAAYAQSYAAQRQGDCQLIHSGGPYGENLFWGSAGADWSASDAVGSWVSEKQYYDHDTNSCAEGQVCGHYTQVVWRDSTAIGCARVVCDNNAGVFIICSYNPPGNVVGESPY

SEQ ID NO: 17400 - protein, 124 aa, Zea mays
  VARIANT 68: note = Ancestral polymorphism is S, Derived polymorphism is L
  VARIANT 66: note = Ancestral polymorphism is T, Derived polymorphism is M
  VARIANT 55: note = Ancestral polymorphism is L, Derived polymorphism is P
  VARIANT 44: note = Ancestral polymorphism is P, Derived polymorphism is L
  VARIANT 38: note = Ancestral polymorphism is K, Derived polymorphism is R
  VARIANT 13..124: note = Derived polymorphism lacks residues 13 to 124
  VARIANT 8: note = Ancestral polymorphism is L, Derived polymorphism is F
MYAYGRNLGLSFQVVDDMLDFTQSAEQLGKPAASDLAKGNLTAPVIFALQSEPELREIIDSEFSDTDSLAAAIELVHRSGGIRRAHELAREKGDLAIQNLQCLPRSDFRSALEKMVEYNLEGIE

SEQ ID NO: 17401 - protein, 205 aa, Zea mays
  VARIANT 26: note = Ancestral polymorphism is P, Derived polymorphism is L
  VARIANT 42..205: note = Derived polymorphism lacks residues 42 to 205
  VARIANT 109: note = Ancestral polymorphism is I, Derived polymorphism is T
MTESLVRNKSGMASIKEMPVVQDGPPPGGFAPVRFARRIPTSGPSATAIFLTTFGAFAYGMYQVGQGNKVGSFLGRFKSIPSIVELDSLKVSGDVWFSSGIVLKGKVTITAKPGVKLEIPDGAVIGNKFKLCKVRSIQFCQKGIPYLNTYDGRTIRYPDPLIKANDTIKIDLETNKIMDFIKFDIGNVVMVTGGRNTGRVGVIKN

SEQ ID NO: 17402 - protein, 267 aa, Zea mays
  VARIANT 194..267: note = Derived polymorphism lacks residues 194 to 267
  VARIANT 210..267: note = Derived polymorphism lacks residues 210 to 267
MARFLCMEDDNEVTGESPVADEWDMLSLTSSIYASPLFRRGFDPINLPGYGNVINIQEGTQTGLVMSDGFVFPPSEHENLPIEPEHEDLPIEPGHDESNTNSVEKESSCAGNNDDDWCHVSPEEIDDVSNENLADNSDLPTASEATVPDSQPTEINAKREKDHRTCKADHTCERWWKKKTTYLFHHIKGVTTLCSVVAAGAVVGFVVMGQRWQQDHWHLHQFKFSVSGESMNRVIGAFSRLKDGLPGSEQLRSMLPTRVLPQQPLSA

SEQ ID NO: 17403 - protein, 489 aa, Zea mays
  VARIANT 1: note = Ancestral polymorphism is M, Derived polymorphism is V
  VARIANT 37: note = Ancestral polymorphism is T, Derived polymorphism is I
MPPSSPGGGSQRNQANPSMASAAAVVSLNVGGEIFQTTTATLSRAGASSPLASLGPSSPSAPHFLDGDPRLFAQLLSFLRHGRLLAPSYPSATLLAEARHFALDGALLASLSPASAFAPLSLRPSALLPLTGRVAPSAVALCPSPPHPVSLVAAHGGVVTCFDAALASRTSVLTPLPAVDSLAAVSPVLALAGARDFHGVHLCRFSDDASAGCTDPNVLSWPGSPSATVLSMATTTASEAPSPPWLFSSFESARRNSSAVVVFDLNSLSPVVEIGRKEVFGADIEAAIPASKLAWLGGHSLLLAAGSHSGPAGVVGDIRLWDVRASATVPVWEVREKEDCFADVAASDALSAVFKVGAASSEVFMADLRRLGNGGGVGLEPWVCIGDGQKAAAAASSGRKERNGCRIECYCSWVFVARGADVEVWSQVGLAPEAGGKKVMRRNWVGSELSTKPKIVSWAFGGSRMALARADQLSVEIWDSATAAIGANP

SEQ ID NO: 17404 - protein, 178 aa, Zea mays
  VARIANT 6..178: note = Derived polymorphism lacks residues 6 to 178
  VARIANT 43: note = Ancestral polymorphism is D, Derived polymorphism is V
  VARIANT 45: note = Ancestral polymorphism is L, Derived polymorphism is F
  VARIANT 47: note = Ancestral polymorphism is A, Derived polymorphism is V
  VARIANT 52: note = Ancestral polymorphism is P, Derived polymorphism is L
  VARIANT 54..178: note = Derived polymorphism lacks residues 54 to 178
MVRLFQENTPSVVYITNLAVRWSSCSLEGNQKAVLHVYFGMLVGLLAAEQLPEEYQDQCQVYFGMLVVVFYAITSFFSLQIGTWEEKNLNTWTNRSREATVDLFLKSAEYLDCAVHYVLIHIPPQRLNMGVHRRSSVVTLMMTTYSFMKALPKDVLLIIEYKNNYLLYLIVKSETFFL

SEQ ID NO: 17405 - protein, 284 aa, Zea mays
  VARIANT 102: note = Ancestral polymorphism is R, Derived polymorphism is W
MSSGKRSFFAPKKKATNPFDSDSDDDKPQQRPARASSVPPPDEQRGSSSLFGAGDRGGLFSSAANHHYRNDFRDAGGLEGQSVQELEGYAAYKAEETTRRTRGCVRIAEEMRDTASKTLVTVHQQGQQIHRTHMMAVDIDQDLSRSEKLLGDLGGLFSKKWKPKKNGAIRGPMLTRDDSFIRKGSHLEQRQKLGLADHPPPSNARQFRSEPSSALEKVEIEKAKQDDDLSDLSNILTELKGMAVDMGSEIERQTKAMGDAEKDYDELNFRVKGANTRARRLLGR

SEQ ID NO: 17406 - protein, 1086 aa, Zea mays
  VARIANT 993..1086: note = Derived polymorphism lacks residues 993 to 1086
  VARIANT 971..1086: note = Derived polymorphism lacks residues 971 to 1086
  VARIANT 918..1086: note = Derived polymorphism lacks residues 918 to 1086
  VARIANT 233..1086: note = Derived polymorphism lacks residues 233 to 1086
  VARIANT 189..1086: note = Derived polymorphism lacks residues 189 to 1086
  VARIANT 83..1086: note = Derived polymorphism lacks residues 83 to 1086
  VARIANT 40..1086: note = Derived polymorphism lacks residues 40 to 1086
MEASAGLVAGSHNRNELVVIRRDGDPGPKPPREQNGQVCQICGDDVGLAPGGDPFVACNECAFPVCRDCYEYERREGTQNCPQCKTRYKRLKGCQRVTGDEEEDGVDDLDNEFNWDGHDSQSVAESMLYGHMSYGRGGDPNGAPQAFQLNPNVPLLTNGQMVDDIPPEQHALVPSFMGGGGKRIHPLPYADPSLPVQPRSMDPSKDLAAYGYGSVAWKERMENWKQRQERMHQTGNDGGGDDGDDADLPLMDEARQQLSRKIPLPSSQINPYRMIIIIRLVVLGFFFHYRVMHPVNDAFALWLISVICEIWFAMSWILDQFPKWFPIERETYLDRLSLRFDKEGQPSQLAPIDFFVSTVDPLKEPPLVTTNTVLSILSVDYPVDKVSCYVSDDGAAMLTFEALSETSEFAKKWVPFCKRYNIEPRAPEWYFQQKIDYLKDKVAANFVRERRAMKREYEEFKVRINALVAKAQKVPEEGWTMQDGTPWPGNNVRDHPGMIQVFLGQSGGLDCEGNELPRLVYVSREKRPGYNHHKKAGAMNALVRVSAVLTNAPYLLNLDCDHYINNSKAIKEAMCFMMDPLLGKKVCYVQFPQRFDGIDRHDRYANRNVVFFDINMKGLDGIQGPIYVGTGCVFRRQALYGYDAPKTKKPPSRTCNCWPKWCFCCCCFGNRKQKKTTKPKTEKKKLLFFKKEENQSPAYALGEIDEAAPGAENEKAGIVNQQKLEKKFGQSSVFVTSTLLENGGTLKSASPASLLKEAIHVISCGYEDKTDWGKEIGWIYGSVTEDILTGFKMHCHGWRSIYCIPKRVAFKGSAPLNLSDRLHQVLRWALGSIEIFFSNHCPLWYGYGGGLKFLERFSYINSIVYPWTSIPLLAYCTLPAICLLTGKFITPELNNVASLWFMSLFICIFATSILEMRWSGVGIDDWWRNEQFWVIGGVSSHLFAVFQGLLKVIAGVDTSFTVTSKGGDDEEFSELYTFKWTTLLIPPTTLLLLNFIGVVAGVSNAINNGYESWGPLFGKLFFAFWVIVHLYPFLKGLVGRQNRTPTIVIVWSILLASIFSLLWVRIDPFLAKDDGPLLEECGLDCN

SEQ ID NO: 17407 - protein, 103 aa, Zea mays
  VARIANT 46: note = Ancestral polymorphism is E, Derived polymorphism is K
  VARIANT 55: note = Ancestral polymorphism is F, Derived polymorphism is L
  VARIANT 69: note = Ancestral polymorphism is A, Derived polymorphism is S
MQQLNVLMGYPPRLIRSYGRPEFDMQQKTSHIEDMSYFQGFFFCPEVASLLLHNFCVYHTNPQGHEMGAAPMSLDVLVPCVANLADQVADVLDFFMYRIMTWH

SEQ ID NO: 17408 - protein, 351 aa, Zea mays
  VARIANT 206: note = Ancestral polymorphism is P, Derived polymorphism is L
  VARIANT 88: note = Ancestral polymorphism is G, Derived polymorphism is R
  VARIANT 80: note = Ancestral polymorphism is S, Derived polymorphism is R
  VARIANT 62: note = Ancestral polymorphism is L, Derived polymorphism is R
  VARIANT 32: note = Ancestral polymorphism is K, Derived polymorphism is M
MQYLTDVARSKDLLKVVGHSVIKAMCDGEFLMSRKWAVGGHDWEVHLRPKDHSEGHERPVTLRLVLISEARGGDVKAKLSCRLVDPTGRLKPSKENSKSHKFYKSGDYSGAIQVTGREDLEKSGYLVDDSYTVECSITVLKKAPARNTAAAAAATAMDRDAAMLPSLELHRHLGELLQKGTGADVTFHVSGEKFAAHKAILASRSPVFMAELFGGMKEEASRHIEVKDIKPAAFKAVLRFIYTGTAPELDKKGDGGTSLAQHLLAGADRYGLDMLKLICVGWLADRITVDTVATTLALAEQHGCSQLKASCIEFIAGYLDAVLETEGYKHLEASCPSVLTDILKATLRPTN

SEQ ID NO: 17409 - protein, 223 aa, Zea mays
  VARIANT 40: note = Ancestral polymorphism is P, Derived polymorphism is R
  VARIANT 49: note = Ancestral polymorphism is S, Derived polymorphism is F
  VARIANT 159..223: note = Derived polymorphism lacks residues 159 to 223
  VARIANT 164..223: note = Derived polymorphism lacks residues 164 to 223
  VARIANT 166: note = Ancestral polymorphism is G, Derived polymorphism is R
MPAGPWLLPPHKPSPLGDRKASPISQSPIFSYLSNPTNTPHHHHHLILSALSVLSLKELQHFHDAITLLASLHSDPACPPSPFLICLFHALLPLFISTASIHTRPDAKHPEWCHRDALVASILTADHLYHFEFNVALMLLVETHSCGDGDGDGISVRLRHVMGQAGLSGVQKQFSAWTQVTKKHNRFFPKVDDDGNRGRPWKVVLCIVRISFAGEEITIRARR

SEQ ID NO: 17410 - protein, 130 aa, Zea mays
  VARIANT 11: note = Ancestral polymorphism is G, Derived polymorphism is E
  VARIANT 29: note = Ancestral polymorphism is L, Derived polymorphism is V
  VARIANT 38..130: note = Derived polymorphism lacks residues 38 to 130
  VARIANT 45: note = Ancestral polymorphism is C, Derived polymorphism is W
  VARIANT 62: note = Ancestral polymorphism is E, Derived polymorphism is K
  VARIANT 66: note = Ancestral polymorphism is P, Derived polymorphism is L
  VARIANT 67: note = Ancestral polymorphism is G, Derived polymorphism is R
  VARIANT 88: note = Ancestral polymorphism is E, Derived polymorphism is A
MGSHLELAVTGACLVVVLLRDDDVYVMNLGDSRAIVAQRWDDEDCLIGSMWVEDIGVGLETETRIPGYSAIGLEALQLSTDHSTSIEEEVQRIRREHLDDDQCVVNDRVKGRLTVTRAFGAGYLKQVKRL

SEQ ID NO: 17411 - protein, 171 aa, Zea mays
  VARIANT 9: note = Ancestral polymorphism is D, Derived polymorphism is N
  VARIANT 35: note = Ancestral polymorphism is P, Derived polymorphism is L
  VARIANT 63..171: note = Derived polymorphism lacks residues 63 to 171
  VARIANT 73: note = Ancestral polymorphism is P, Derived polymorphism is L
  VARIANT 80: note = Ancestral polymorphism is A, Derived polymorphism is V
  VARIANT 86..171: note = Derived polymorphism lacks residues 86 to 171
  VARIANT 87..171: note = Derived polymorphism lacks residues 87 to 171
  VARIANT 106: note = Ancestral polymorphism is A, Derived polymorphism is T
  VARIANT 124: note = Ancestral polymorphism is R, Derived polymorphism is C
  VARIANT 151: note = Ancestral polymorphism is P, Derived polymorphism is L
MRDPWRQSDATPSPSLAPATPPAPATSSPAALLRPRQEAFEHGLLPIPKLIFPEGMLAQTLAQLKEKLAASVPDGRMRAAALAEAQQIPQEQAALALGTLTAVLPAEDPVLGDGAMDGAATDIRDVLLFLYIQSYKRLVPRSSHKDSHAVPDVWPSTSAFDGYLSALSPIQ

SEQ ID NO: 17412 - protein, 90 aa, Zea mays
  VARIANT 5: note = Ancestral polymorphism is K, Derived polymorphism is M
  VARIANT 7: note = Ancestral polymorphism is E, Derived polymorphism is G
  VARIANT 18: note = Ancestral polymorphism is V, Derived polymorphism is G
  VARIANT 23: note = Ancestral polymorphism is A, Derived polymorphism is V
  VARIANT 26: note = Ancestral polymorphism is P, Derived polymorphism is L
  VARIANT 54: note = Ancestral polymorphism is A, Derived polymorphism is S
  VARIANT 55: note = Ancestral polymorphism is T, Derived polymorphism is M
MKGGKKEVAGAVVAILLVLQLMAAPPTAMAARSPRGAVPDGSLATTPKVTMLSATLCYTGETCKYIGCLTPACSCNYSDRLCYIIFTPVA

SEQ ID NO: 17413 - protein, 355 aa, Zea mays
  VARIANT 192: note = Ancestral polymorphism is S, Derived polymorphism is F
  VARIANT 150: note = Ancestral polymorphism is Q, Derived polymorphism is H
  VARIANT 23..355: note = Derived polymorphism lacks residues 23 to 355
  VARIANT 6..355: note = Derived polymorphism lacks residues 6 to 355
MLIENQRTVTCAPTNTAVAEVASRVLGVIEESGGGGAATKCFFGDVVLFGNEDRMAVDRKLENIFLDTRVRRLRQCLMPITGWTKSLSSMIALQEDPMVPYERYDEAIQGCVLDLVSEEIKLRNVIVVCSLRTMDDKKVKEIQKDLLEVQKKAREVEREKISFETYFQSNYKKLAKDLRTCVETFVDDLPRSATSEENFCCMAEVLLLLDAFGVLVQSEPVEQLQALFKRHSDVRFRLREAISSCLRKLWLLSSNFKLPEMYDSRTIDLEFLLQNAKIVLCTASSSYRLLYMQKAQPLEVPVVDEAAQLKECESLIPLQLPGVRHAVLIDDESSSQILRLGDIASKGTQPTAQGC

SEQ ID NO: 17414 - protein, 504 aa, Zea mays
  VARIANT 268: note = Ancestral polymorphism is E, Derived polymorphism is A
MRPLPASVASRLAAVLADPVGVPLPVFNSLLSALAASVDPSHGHLPLYLFRRRLLPFRRPDAFTLSVLTSALPSAAVTLHALALRLGLLHADPVLANSLLRLYICPPVPCQGLARRLFEEMPARTASSYNTLISHSHDDVWGLVRRMVADGCAPDRFTMSAVLPVCTSARWGRELHCYAVRDWMCGDDDFHVSSGLVSMYCRVGHPDSARTVFNRMARRNVVCWTAMVGGYIENGMFDDAVDCFRAMWLIDAIPPNRITLITVLSAIEALSSLAEGKQVHGFAVRMMMHAEMSLNNALIDTYAKCGALHYARRIFDDTSWCKDVISWGAMILGYGIHGMGVEAVALFDQMLSSGVKPDSIIGLGVLSACCHAGLVLKGLNTYSSMVNDHGVHPTEEMCACMVDLLGRSGNVYHALDFVKSMSVEPGSSVWGALLDASVKYDNKEIQDLASRSLLRLEQGKPSNLVAVSNLNASSERWNIVKQVRDTINQGSLKKKTGCSWVNPI

SEQ ID NO: 17415 - protein, 430 aa, Zea mays
  VARIANT 284..430: note = Derived polymorphism lacks residues 284 to 430
MEAADASSAPPPAEGRVVWVNGPIVVGAGPGGLSVAACLRARGVPCVVLDRADCIASLWQRRTYDRLRLHLPRQFCELPGMPFPDHYPEYPTKRQFVDYLQAYAERAGVQPRFNQAVTSARYDRAAGLWRVRAADALADDDVASAASTEYIGRWLVVATGENAERIVPEFDGAQDFAGPVSHVSEYKCGEAYRGKRVLVVGCGNSGMEVCLDLCDHNALPSMVVRDAVRRTTRSAAQRSDPSPSVLSSSFIADLLHRFSFSTRRCTSCPGRCSASPPSPSPSSCSASCRSGWWTPSSSCSRASSSATWRSSASGAPPGALSSSRTPGAGPPCWTSAPSPGSAPATYRSCRASRGSSVAAPSSSTAAASLRTRSYSPPATTATSLSGSREVISSRRKGTQGCRSHTAGRGSPGSTLLASPGEASPAFPPTL

SEQ ID NO: 17416 - protein, 200 aa, Zea mays
  VARIANT 11: note = Ancestral polymorphism is T, Derived polymorphism is S
  VARIANT 29: note = Ancestral polymorphism is S, Derived polymorphism is F
  VARIANT 79..200: note = Derived polymorphism lacks residues 79 to 200
  VARIANT 117..200: note = Derived polymorphism lacks residues 117 to 200
  VARIANT 124: note = Ancestral polymorphism is S, Derived polymorphism is L
  VARIANT 129: note = Ancestral polymorphism is L, Derived polymorphism is V
  VARIANT 145..200: note = Derived polymorphism lacks residues 145 to 200
MTSKTSGSITTILSTTGKLSSVGSSFMASAGSRSTSGGFDEGAKYSDGQILEAPNLRTFTFIELKTAPKNFRPDSVLGEGGFGRVYKGWVDEKTMAPTRNGTGMVVAVKKLNSESMQGFDEWQSEINFLGRLSHPNLVKLLGYCWEDKELLLVYEFMAKGSLENHLFRSEFLRCTFHLTSFGNHLSYALYISSAYAILLQ

SEQ ID NO: 17417 - protein, 327 aa, Zea mays
  VARIANT 277: note = Ancestral polymorphism is G, Derived polymorphism is E
MLAWKEKVADRLARLLADSPVSPSPAQAAVEPSQAKSFPPEHFTPPKTSSLSSYVFSLLPTSNTGHEQNSPCSETLRPLPPESLPKKWRWSDVTWKDPPVELSEESGSESDRDERNGNFGNDPVLQSYRPINNSNGNEETSTSDCVGTLRYLTEKSMFVSPKLFAFFQSSLPGTLKGCHWVLLYSTWKHGISLRTLLRRSENIQGPCLLIVGDMQGAVFGGLLNSPLRPTEKRKYQGTNQTFVFTTIHGEPRLFRPTGANRFYYLCLNNALAFGGGGSFALCVDEDLLHGSSGSCETFGNSCLAYSPEFELKNVELWGFTHSWSRST

SEQ ID NO: 17418 - protein, 123 aa, Zea mays
  VARIANT 102..123: note = Derived polymorphism lacks residues 102 to 123
  VARIANT 98..123: note = Derived polymorphism lacks residues 98 to 123
  VARIANT 94: note = Ancestral polymorphism is S, Derived polymorphism is N
  VARIANT 92..123: note = Derived polymorphism lacks residues 92 to 123
  VARIANT 54: note = Ancestral polymorphism is S, Derived polymorphism is N
  VARIANT 51..123: note = Derived polymorphism lacks residues 51 to 123
MLLDASPLLASSTSSHSSVFHLTSVPSPLACGHSLSHAARATTSRNRSRARRCSRHRRGPAHPDHTSPSTTATPSRAPPPRRSPRTCLRRPRASGGSRRGCRCRGGSRARTAARDRRSRRTEL

SEQ ID NO: 17419 - protein, 235 aa, Zea mays
  VARIANT 99: note = Ancestral polymorphism is S, Derived polymorphism is Y
  VARIANT 109..235: note = Derived polymorphism lacks residues 109 to 235
  VARIANT 190..235: note = Derived polymorphism lacks residues 190 to 235
MAARSPRGAVPDGSLATTPKVTMLSQEIYNEVMISCGFGSSSTTAGTSGIILTWHIATCILEVRHPYQCGGGGCQEQLNRHKIAATHLSRYCAYLMAWYPDLLPDHEEWSTALYETVKDDARRALAGCSAGCAAVLGPEAEYVSRPVIQSLSVYSRHEGLRKGVVLGKQLVELMEGEETAWMVLAEFWSEMILTREKRNKEKGKNGGIVSVASENNSDNGDVLIIFAGCAADDAQ

SEQ ID NO: 17420 - protein, 447 aa, Zea mays
  VARIANT 331: note = Ancestral polymorphism is L, Derived polymorphism is P
  VARIANT 235: note = Ancestral polymorphism is W, Derived polymorphism is C
  VARIANT 234: note = Ancestral polymorphism is N, Derived polymorphism is D
  VARIANT 222: note = Ancestral polymorphism is S, Derived polymorphism is F
  VARIANT 219: note = Ancestral polymorphism is R, Derived polymorphism is L
  VARIANT 212: note = Ancestral polymorphism is C, Derived polymorphism is Y
  VARIANT 211: note = Ancestral polymorphism is S, Derived polymorphism is F
MDPCPFVRVLVGNLALKMPASAPPAAAAASGSGVHPATPPCYYCRIRLNKLPYQTAPAPLLPATEEGSAPAPASCAAAFHASKADLDRAAARPALFLGGRLRTARLKVAVYAGRGGGEGGGRLLGKLVFRFDLRRAVAEPFVFLSGWFDIGKRGAGKPAAANAARAQLNLTVLGEPDPRFVFEFDGEPECSPQVLQVKGSMKQPMFTCKFSCRSNSDLRSRSVQSDSGAVGPRNWLAKLWSERERERAGKERKGWSVTVHDLSGSPVALASMVTPFVASPGTDRVGRSNPGGWLILRRRVDGTWTPWGRLECWRDRGGSAGDAQLGYRFELVPDHNSNVTGSGVCVAESGVPAARGGRFAIDLTTAGSPGRGSGELSRHALWPPGGFVMSAAVQGEGRRGRPSVEIGVAHVGCAEDAAAFVALAAAVDLSMDACRLFSCKLRRELSA

SEQ ID NO: 17421 - protein, 485 aa, Zea mays
  VARIANT 201..485: note = Derived polymorphism lacks residues 201 to 485
  VARIANT 99..485: note = Derived polymorphism lacks residues 99 to 485
  VARIANT 98..485: note = Derived polymorphism lacks residues 98 to 485
  VARIANT 38..485: note = Derived polymorphism lacks residues 38 to 485
MNDRFGRRPSILIADLLFLAGSIVMAFAPTPAVIIVGRVLVGLGVGMASMTSPLYISEASPARIRGALVSTNGLLITAGQFLSYLINLAFTKVSGTWRWMLGVAGLPALLQFVLMLALPESPRWLYRKDRKREAEEIMRKVYPPEEVEGEIEALRTSVEDDMAQERSLGGAGLAGTLRKAFGSVVVRRGLTAGVLCQVAQQFVGINTVMYYSPTIVQLAGFASNSTAMALSLVTSGLNAAGSLVSMFFVDKAGRRRLMLLSLMGVVVCLGMLSGVFFAVDSHAPDVSLAGTALFGANGTCPEFDLAAVAGVEWTCAQCIKAPSGCGFCADTEKLLPGACLRTSDASRRACRAGRREWYMRGCPSSFGWLALVALGAYIVSYSPGMGSVPWLINSEVYPLRFRGVCGGIAAVANWTSNLLVTQTFLSLTQALGTAGTFLLFCGVSAMAFLLIFLLVPETKGMHFEEVEQMLGSKDYKAWKKFNSKA

SEQ ID NO: 17422 - protein, 163 aa, Zea mays
  VARIANT 32..163: note = Derived polymorphism lacks residues 32 to 163
MDGHGQSDEAASKAWRGAASGVVSAPVARVWELVSSTSRLREWMPMVESCTAVAGDEDVPGYVRLVRGGLMFPQQQQGSSWVRERLVAMDHTARSYTYLMEDGNVGLAGSRNTISLLDYGGGATLVVWSFEMEPVDDANQDALLDYLRILYKSCIDTIPPCLL

SEQ ID NO: 17423 - protein, 246 aa, Zea mays
  VARIANT 54: note = Ancestral polymorphism is G, Derived polymorphism is D
  VARIANT 44: note = Ancestral polymorphism is G, Derived polymorphism is S
MAGGGGYGGGGGGGLGGGVGHGFGKGGGLGGGIGHGLGGGYGKGGGLGGGIGHGIGGGYGKGGGFGGGIGHDIGGGIGHGMGGGYGKGGGIDHGISGGYGKGGGLGGGYGKGGGLGGDIGHGMGGGHGKGGGIGHGMGGGFGKGGGGLGGGSGYGAGGGGGLGGGSGHGMGAGFSKGGGLGGGDGLGGGSGHGMGAGFGKGGGLGGGGGGGGGGGFGKGFGFGFGKGSGFGGGGGGGGGGGIGDHH

SEQ ID NO: 17424 - protein, 884 aa, Zea mays
  VARIANT 161..884: note = Derived polymorphism lacks residues 161 to 884
MRSDARLDSVVFQLTPTRTRFDLVLIANGRKEKFASGLLKPFVAHLKAAQDQIAKGGYSITLEPSSGFDVPWFTRGTVERFVRFVSTPEVLERVRTLESEILQLEDAIAIQSNDSLGLKSVEDHGRKLTESNGGGRANYDPDSATAIVVYKPGSNPTPQIQNETAAHEENSKVQLLRVLETRKTMLRKEQAMAFARAVAAGFDIDNLGYLIAFAERFGAARLMKACSHFIELWKQKHETGQWIEVEPEAMSTRSEFPPFNASGIVFMGDNMKPNLESGSINGEANGEDGAKADQKSSQQMGSHAAYPPWAMHPPSGAVVYPPYPMQGMPFYPGVNPYYPPYPPVDDPRYHYSGRKSSRKHSSDSKDSETLDVESDHCSSDRGSSHGRKSHRKGKRSGKKKPSVVVIKNVNVTSKKHGSSESESQSSSEVESADSDNSHSKSSERKHKSSSSKKKEGRRTTFASGDEYSKDEMSNGHDAEQGNWSAFQNFLLRAEEKTRSSDADLFAGEKEPPSRRKQNVNTADPILLAERDGGIVHERNIVGFDSANGRTRAIRVMSNDELVMSGEGRNYMHSEIKEIEAGGGRYRRGTGDDYMVYGQGSQIARHSLLDPLAEAQYKNPVQQDKNRNGVADESFMIPLRSSLHDNIGAESRTTIDIDVELPSRIHKASDEKAGHQLFYEPDELVPERGSEDVSFGYDPAMDYDSHMQTTVKVEDEKTEDDLPVADNDVQKVEKEKLRNAKDGSDKRRKDALLRRLSAPRTPLNDAQKRAQNLRAYKADLQKLKKEQEEEQIKRLERLKLERQKRIAARGNGKGPGNGSPKANGTNGLSKSVPTFTGLKKEKNGTTESLSDRLKRLSEPKSIAGAEHSLNPKSTGADHSRRRSMA

SEQ ID NO: 17425 - protein, 121 aa, Zea mays
  VARIANT 84: note = Ancestral polymorphism is E, Derived polymorphism is D
  VARIANT 56: note = Ancestral polymorphism is A, Derived polymorphism is S
  VARIANT 44: note = Ancestral polymorphism is R, Derived polymorphism is M
  VARIANT 37: note = Ancestral polymorphism is A, Derived polymorphism is P
  VARIANT 29: note = Ancestral polymorphism is D, Derived polymorphism is Y
  VARIANT 3: note = Ancestral polymorphism is G, Derived polymorphism is S
MFGVLSLIFCTFTLIPLLKYVTIVLSADDNGEGRPFALYSLLCRHTKLSLLPNQQAADEELSSYYRNGFAPRNGSSPWLRRFLEKHKKMRVVLLLIVLCGASMVIGDGVLTPAISGGYLPQ

SEQ ID NO: 17426 - protein, 67 aa, Zea mays
  VARIANT 37: note = Ancestral polymorphism is K, Derived polymorphism is E
  VARIANT 57..67: note = Derived polymorphism lacks residues 57 to 67
MDDLLVTLFHNLAQHPETGTGTCRPQACGDAYSRTLKRWHGWLGWPLRAFRTNKFMEIISVVQAHQR

SEQ ID NO: 17427 - protein, 138 aa, Zea mays
  VARIANT 26: note = Ancestral polymorphism is P, Derived polymorphism is S
  VARIANT 29..138: note = Derived polymorphism lacks residues 29 to 138
MQTDIIYEHWDILPPKQIKDPETKKPEDWDDKEYIPDPEDKKPEGYDGIPKEITDPDAKKPEDRDNEEDGEWTTHLLVPFPTKIQGTMETKRLNEALCLTTPSSLMILRWPRLLQRRHGASTRRYCVLMLGVKMVATL

SEQ ID NO: 17428 - protein, 128 aa, Zea mays
  VARIANT 38: note = Ancestral polymorphism is S, Derived polymorphism is L
MAGEMSWVGKKIHLYNVTMGLYMLDWWERCLFSNPSILRVSSNLLREVSHPVFLSMYLDFTFLCHWDVLPLTRVDILVLILLWFVCFNGSRFASDVFERVRLESQLNQVLEENTPEPESEALNFNRIE

SEQ ID NO: 17429 - protein, 387 aa, Zea mays
  VARIANT 290: note = Ancestral polymorphism is G, Derived polymorphism is R
MGSSSAKRFSLRSVGSVAALIFLVLLLVVAGGVATLHHRGNTPARGVLVNDSPLPRKILRVEVIKEAGSNIDFANQQHGPPAPLLPRGLVRETTNLEMEASLAGDPERRHEAAPKPKSLLAVPVGIKNKAVVDKLVSKFPAADFTVMLFHYDGAVEQWGGMEWSDRAVHVAARGQTKWWFAKRFLHPDVVAAYDYVFVWDEDIEVDAFDPVRYLDVVRREGLEVSQPALDRRSEIHHAITARALLPTADGVHRRVRNVRCDGDSVGPPCEGWVEVMVPVFSRAAWRCVWGMLQNDLIHGWGLDYRLGYCAQGGRARNVGVVDSEYVLHRGVPMLIDGGTATPSAGRAAVRLRSFKEMQVFNRRWEVAAAEDNSWMDPYTAAQSRTAK

SEQ ID NO: 17430 - protein, 1037 aa, Zea mays
  VARIANT 796..1037: note = Derived polymorphism lacks residues 796 to 1037
MPMRLLLLLLLTFLATAAAVAGAAGGAAAAGSDADALLAAKAVLSDPAGALASWTNATSTGACAWSGVTCNARAAVIGLDLSGRNLSGPVPTALSRLAHLARLDLAANALCGPIPAPLSRLQSLTHLNLSNNVLNGTFPPPLARLRALRVLDLYNNNLTGPLPLAVVGLPVLRHLHLGGNFFSGEIPPEYGRWRRLQYLAVSGNELSGRIPPELGGLTTLRELYIGYYNSYSSGLPPELGNMTDLVRLDAANCGLSGEIPPELGNLANLDTLFLQVNGLAGAIPPELGRLKSLSSLDLSNNALTGEIPASFAALRNLTLLNLFRNKLRGSIPELVGDLPSLEVLQLWENNFTGGIPRRLGRNGRLQLVDLSSNRLTGTLPPELCAGGKLETLIALGNFLFGSIPEPLGKCEALSRIRLGENYLNGSIPDGLFELPNLTQVELQDNLLSGGFPAVSGTGAPNLGAITLSNNQLTGALPASIGKFSGLQKLLLDQNAFTGAVPPEIGRLQQLSKADLSGNTLDGGVPPEIGKCRLLTYLDLSRNNLSGEIPPAISGMRILNYLNLSRNHLGGEIPATIAAMQSLTAVDFSYNNLSGLVPATGQFSYFNATSFVGNPGLCGPYLGPCHSGGAGTGHDAHTYGGMSNTFKLLIVLGLLVCSIAFAAMAILKARSLKKASEARAWRLTAFQRLEFTCDDVLDSLKEENIIGKGGAGIVYKGTMPDGEHVAVKRLSSMSRGSSHDHGFSAEIQTLGRIRHRYIVRLLGFCSNNETNLLVYEFMPNGSLGELLHGKKGGHLHWDTRYKIAVEAAKGLSYLHHDCSPPILHRDVKSNNILLDSDFEAHVADFGLAKFLQDSGASQCMSAIAGSYGYIAPEYAYTLKVDEKSDVYSFGVVLLELVTGKKPVGEFGDGVDIVHWVRSTTAGASKEQVVKVMDPRLSSVPVHEVAHVFCVALLCVEEQSVQRPTMREVVQMLGELPKPAAAAAAAGQGDEVPGSGDGDECSAAPSGAPAADESVEAPHGEATKEPSSQSSPTTDLISI

SEQ ID NO: 17431 - protein, 289 aa, Zea mays
  VARIANT 257: note = Ancestral polymorphism is R, Derived polymorphism is W
  VARIANT 252: note = Ancestral polymorphism is A, Derived polymorphism is V
  VARIANT 247: note = Ancestral polymorphism is G, Derived polymorphism is S
  VARIANT 243: note = Ancestral polymorphism is R, Derived polymorphism is C
  VARIANT 235: note = Ancestral polymorphism is A, Derived polymorphism is V
  VARIANT 227: note = Ancestral polymorphism is G, Derived polymorphism is D
  VARIANT 198..289: note = Derived polymorphism lacks residues 198 to 289
  VARIANT 179..289: note = Derived polymorphism lacks residues 179 to 289
  VARIANT 114: note = Ancestral polymorphism is A, Derived polymorphism is P
  VARIANT 111: note = Ancestral polymorphism is G, Derived polymorphism is A
  VARIANT 26: note = Ancestral polymorphism is R, Derived polymorphism is H
  VARIANT 3: note = Ancestral polymorphism is K, Derived polymorphism is T
MATLSTSLLAAVVVLALLVSPIACSRKPRPKTKPISHRQAPLPARTSHKLTTATKSPPTTPHHPPPTMVPTAGCQALVPRGACGYQTAVGKQSFNSMIAVESALLYRGGEACDACYEVKCTSNAACSSKPVTIVITDLSPGGLFHREVAHFDMSGTVMGTMAKPDMGDKVRAGGVVRIQYRRVPCKYPGVNVAFKVDQGANPFYFNVLIEFEDADGNLNTVDLMLADNREWTPMAHNWGATWCLNNGRRLRAPFGLRLTSDSGRVLAPNNAIPVAWKLGKTYCSLVNYP

SEQ ID NO: 17432 - protein, 361 aa, Zea mays
  VARIANT 20: note = Ancestral polymorphism is L, Derived polymorphism is I
  VARIANT 37: note = Ancestral polymorphism is L, Derived polymorphism is P
  VARIANT 46: note = Ancestral polymorphism is S, Derived polymorphism is L
  VARIANT 208..361: note = Derived polymorphism lacks residues 208 to 361
MVWPSPLNFISKLYWEAKALLEAALTDANRVREEKILKGTKYSQLSPHLHLQSRIWNQCLNMASWNEAARPVAIRLSPVARSAQKCLAADRSGPALHLRLHHPRGRGCRRMEVASCYRVVGAAVPQPFCTEYSGGFVTTSGSKWRSTGLVMAAKKVAEGENKKMEHTSTLWISRKCLLHPSRLRLPPNGSRLMLPRLLHAAVPLPAPQAVGVAVPQPFCTESSGGLVTQLASKWRSRGPVMAAKKAAEALRGAMTLRTKALKEVCNVAAMISLEKDVMGAAVGWRFSYSDRLQVATLDNKVEKEMEDMAFFFAELALMQYRYGLVTRLPSLVATSVVYAVRLTLARAPLWTDALKHHTVVY

SEQ ID NO: 17433 - protein, 308 aa, Zea mays
  VARIANT 276: note = Ancestral polymorphism is R, Derived polymorphism is W
  VARIANT 266: note = Ancestral polymorphism is G, Derived polymorphism is D
  VARIANT 260: note = Ancestral polymorphism is T, Derived polymorphism is M
  VARIANT 257..308: note = Derived polymorphism lacks residues 257 to 308
  VARIANT 123: note = Ancestral polymorphism is P, Derived polymorphism is L
MAKLWTLLLAAVVVLSLLVSPIACTRKLNKPKPKPGSYRRPVKPKPKPVTGSYKPAPVAARRNHTATPTPSPTVYGPGGWLSGAGATYYGATNGDGSDGGACGYQTAVGKKPFDSMIAAGSTPLYRGGEGCGACYEVKCTTNAACSGQPVTIVITDQSPGGLFPGEVEHFDMSGTAMGAMARPGMADKLRAGGVLRILYRRVPCKYTGVNIAFKVDQGANPYYFDVLIEFEDDDGDLSAVDLMEAGSGVWTPMAHNWGATWRLNNGRKLKAPFGLRLTSDSRRVLVANNAIPAAWKPGKTYRSLVNYP

SEQ ID NO: 17434 - protein, 612 aa, Zea mays
  VARIANT 159: note = Ancestral polymorphism is E, Derived polymorphism is V
  VARIANT 180..612: note = Derived polymorphism lacks residues 180 to 612
  VARIANT 212: note = Ancestral polymorphism is M, Derived polymorphism is T
MAAALPHSRLHLPLHTPSPTSRRRPCPRSRRRLPSFVAVSRLQNTTAATHPVLPPPAPPPSAALLAAEGASLAPRREHRFPGSVSSPTSTASASNEAEYAVLLRALQVRRAVAAEVLVAALGGGKVGGLTYIKNLTGRMGPFVDRVVVEAAAMRRDRPELAHMSFNARAKAYIQESGLVELVKWFKHNSMTYPQIAKVVCACSGDLGKVRKMIKWLRSIYVKGDFLGRVLANGGSFLNRSFEELEEIIGYLESLGVRRDWIGYVISRCPQLLSLSMDELETRVRFYTDLGMDKKDFGTMVYDYPRVLGFLSLEEMNSKVQYLKEFGLSTEELGRLLAFKPQLMACSIEERWKPLVKYLYHLNISRDGMKRMLMVQPTIFCLDLETVIAPKVQFLIDIGVRSDAIGNVLAKFPPVLTYSLYKKIRPVVIFLLTKGGVKQDDIGKVIALDPQLLGCSIAHKLEVSVKYFRSLGIYHFVLGQMIADFPTLLRYNVDILRPKYQYLRRVMVRPLKDLIEFPRFFSYSLEDRIEPRHRTLVANRINMKLRYMLTGSDEEFAQRVREAVERRARFEAGKAAGLETFSCSSETSSDAEATEAAACQNSTDVVGVLQKQA

SEQ ID NO: 17435 - protein, 28 aa, Zea mays
  VARIANT 18: note = Ancestral polymorphism is E, Derived polymorphism is K
  VARIANT 16: note = Ancestral polymorphism is D, Derived polymorphism is Y
  VARIANT 15: note = Ancestral polymorphism is T, Derived polymorphism is A
  VARIANT 7: note = Ancestral polymorphism is E, Derived polymorphism is K
  VARIANT 5: note = Ancestral polymorphism is M, Derived polymorphism is T
MRKCMKKMEAMDGFTDEKKSYAVEVFKS

SEQ ID NO: 17436 - protein, 184 aa, Zea mays
  VARIANT 146: note = Ancestral polymorphism is R, Derived polymorphism is P
  VARIANT 74: note = Ancestral polymorphism is E, Derived polymorphism is Q
MPSSFTSAMAELPTLPKAMARLSRPQVLAGLSFRRWSLAALTRPLRLPATMALSPPPTVALTHLYRLSFRDYGESVLRHLENAISKDPNLRKAPVNHEGVRVSGYGGWFLLRLSLHDPVLPLNIEVVLFTSSLNPNEGISESCDVRMLQAQSNDDAIKLGLAVLAAVNEFPALDVTALNKFVHQ

SEQ ID NO: 17437 - protein, 354 aa, Zea mays
  VARIANT 49..354: note = Derived polymorphism lacks residues 49 to 354
MFNSTLTEDERSHLPVDGAIMITASHLPYNRNGLKFFTSDGGLNKADIKDILERASKIYEESAHNNLKEQGEASKGVVTNVDYMSIYASDLVQAVRKSAGDKEKPLEELHIVVDAGNGAGGFFVDKVLKPLGAVTTGSQFLEPDGLFPNHIPNPEDKTAMKFITQAVLDNKADLGIIFDTDVDRSAAVDSRGRELNRNRLIALMAAIVLEEHPGTTVVTDSVTSDGLTVFIENKLGGKHHRFKRGYKNVIDEAIRLNSIGEESHLAMETSGHGALKENHWLDDGAYLMVKLLNKLAAARTLGSSIGSKVLTDLVEGLEEADVTVEIRLKIDQNHADLKGGYANSEMFFGYFTRR

SEQ ID NO: 17438 - protein, 623 aa, Zea mays
  VARIANT 284: note = Ancestral polymorphism is P, Derived polymorphism is L
  VARIANT 373..623: note = Derived polymorphism lacks residues 373 to 623
MWRSCVSRGLSRAKASASRLLSTASSSYTVVDHTYDAVVVGAGGAGLRAAIGLSEHGFNTACITKLFPTRSHTVAAQGGINAALGNMSEDDWRWHMYDTVKGSDWLGDQDSIQYMCREAPKAVIELENYGLPFSRTEEGKIYQRAFGGQSLDFGKGGQAYRCACAADRTGHAMLHTLYGQAMKHNTQFFVEYFALDLLMDNEGKCQGIIALNMEDGTLHRFRASNTILATGVRSLSILAVMAGHISQQPQHTLVLEMAMLWLHVLVYLSRPVFSSRVSLLVFGPCSCPHHAYLQLQDLEFVQFHPTGIYGAGCLITEGSRGEGGILRNSEGERFMERYAPTAKDLASRDVVSRSMTMEIREGRGVGPLKDHIYLHLNHLPPEVLKERLPGISETAAIFAGVDVTKEPIPVLPTVHYNMGGIPTNYHGEVVDIKGDNPDAVVPGLMAAGEAACASVHGEKQKPLEKDAGEKTIAWLDKLRNANGSLPTSKIRLNMQRVMQNNAAVFRTQETLEEGCELISKTWESFHDVKLSDQSLIWNSDLIETLELENLLINACITMYSAEARKESRGAHAREDFTTRDDEKWMKHSLGYWENEKVRLAYRPVHMNTLDDEVESFPPKARVY

SEQ ID NO: 17439 - protein, 85 aa, Zea mays
  VARIANT 54: note = Ancestral polymorphism is R, Derived polymorphism is C
  VARIANT 40: note = Ancestral polymorphism is P, Derived polymorphism is L
  VARIANT 20: note = Ancestral polymorphism is E, Derived polymorphism is K
MATAAAGLAPAKEVVEKKVELLKEIRAHEVAIAELDNLNPSRAVYQKAGNIFFRKSVKSVITTEQSNRYSIASLSSYFLSLACIV

SEQ ID NO: 17440 - protein, 202 aa, Zea mays
  VARIANT 13..202: note = Derived polymorphism lacks residues 13 to 202
  VARIANT 36: note = Ancestral polymorphism is R, Derived polymorphism is W
  VARIANT 63..202: note = Derived polymorphism lacks residues 63 to 202
  VARIANT 78..202: note = Derived polymorphism lacks residues 78 to 202
MELAAASSATAGWGDLEMHGANDAPGNRSYLMNKAWAFLELFFAMWFLMGNVWVFDARLGSFQRALRLYALCVNLLAWNTVVYSLRFLSAASALRSMGRRRRFGSCRACTCSISSVWTGGSGSSPLALSASKSSSELYIHYTHDILAYSLDQGVSILDTTDIFQLTREIKGELIFILAGGCNQNHDARFYADAFRRDSQRPW

SEQ ID NO: 17441 - protein, 703 aa, Zea mays
  VARIANT 100: note = Ancestral polymorphism is A, Derived polymorphism is D
MDPPGSNPDGVVNMTRAMQALSPLLKHPRATIVKVEGLVLAAAGLLLLQLFLGFYRRRWRSSVLSTVLRASSKLMEALIIYTLGAMQSSPIKNSSYPVWAAFLVMASAGTTAVQDYDFCGSFYNKYMEGGVDMIKYFFYWIMFGLLLDPNTYTFKTTLDLQRHLKNSRASSNCVMALFYFALFTKLCESIGLAAVGYKMQKSNLFFRPNPRKIRFGIQAVETEEYDPQSMKGNGYAVCYRPFGGGGLVTIDQVWYCLDGRSSACLKDLCLSYALFRQLIARRFFGLVVQRPKTIPEIKDHDFVFKKLLPSEEHFKRAFRIIEAELGFCYDYFFTKYYYTFAATNQLPVPFLQSLALAKITLILTVGVFAVRNSLVLETPNPIIQVRISRADYIITLLLLVIALTVELVHAAFYLASDWAQVSLATMYVKRYWYEISPSIFATVIAFLRRVTFSGQLMRNRMKQHSLMRNGIKQQDPVEVSDAVKRAVARSLISTYGGNDPTKDDDAVETSQWQDQMPFHTYSCELKGLSQLEVMLIWHIATEHCDISSGPAPTNRTTRDDDRGVAVHLSRYCAYLIGSVPELLPYHEADIAELALKVVGEPTEQEDDARNIFHKGIELGKQLERMADGDRWKALQDFWAKTTIHAAKSHYTTKQHMQHLESGGEFLTHIWALLAHAGILYLNPVNNEDQEDQANLGSGPSAAA

SEQ ID NO: 17442 - protein, 352 aa, Zea mays
  VARIANT 94..352: note = Derived polymorphism lacks residues 94 to 352
MDAQRALLDELMGTARNLTEEEKKGHKELKWDDPDVCGPYMVRFCPHDLFVNTKSNLGPCLRIHDPKLKESFEKSPRHDTYMQRFEAELAQQCEKLVMDLDRKIRRGRERLAHDSAVPMPIPGKIAEQLSAREEQVKKLLEQIEELGEAGKVDEAEALMKRVDILNAEKTALSNQADSKVAMLEKKMELCETCGSFLVADDALERTQSHVTGKQHIGYGMVRDFLVEYKAAIEKSKEEDRLAREQKAEERRKQRGKEYDNGGRDRDTRREKSGERDYDRDRQYERSRGRDRSYDYRERGSEHRSNLYRNGRDSERGGHRYRSGDMTNDRGRMRSRSRSPTRHGYGRSGSPNH

SEQ ID NO: 17443 - protein, 115 aa, Zea mays
  VARIANT 110: note = Ancestral polymorphism is P, Derived polymorphism is A
  VARIANT 82: note = Ancestral polymorphism is E, Derived polymorphism is K
  VARIANT 81: note = Ancestral polymorphism is E, Derived polymorphism is D
  VARIANT 67..115: note = Derived polymorphism lacks residues 67 to 115
  VARIANT 36: note = Ancestral polymorphism is P, Derived polymorphism is L
  VARIANT 30: note = Ancestral polymorphism is C, Derived polymorphism is Y
  VARIANT 6: note = Ancestral polymorphism is H, Derived polymorphism is Q
  VARIANT 5..115: note = Derived polymorphism lacks residues 5 to 115
MQPPQHYPPTPEAGSQGPGPAPPPSTRHPCNSARAPSRLCRDPVGFMLHDDGAGAQEPTPTTLHCFRVGALCEKAKEILIEESKVQKFFLYANDEDAAEDGDQDAELLIPRFEKG

SEQ ID NO: 17444 - protein, 628 aa, Zea mays
  VARIANT 479..628: note = Derived polymorphism lacks residues 479 to 628
MDQDPPGSNQDGVVNMTRAMQALSPWLKHPRRTIAQVEGLVLVAAALLLLQLFLGFFRRRYRCRNSFVNTVLGASSKLMEALIIYTLGTMQSSPIKNSSYPVWAVFLIMASSGTTAVQYYDFCDSVNNKCMEAVVTTIKYVFYYIMFLLLLNPNTYTLKAALGLSRHHKKPRASSSCVVALFYFALVTKAWESFIVVYLVYRKQKPIHLIPTKIRRRRTQKEGASARKATTETDSDPRSVKGYEYAVCYRLGGGGLVTIDQIWDRLNANSAACLKDLCLSYALFVQLKNRRFFGLVRPKTSSARKDHDFVFKKLLPSCEGDFKRAFRIIEAELGFCYDFFFTNNSLVLETPNPLIEVHISRGDYIITLLLLGIALIVELVHTAFYLASDWAQVALATMYVKKQWYEISTSIFGAVTTFLRRVTFSGQPTMMRNRMKQHSVILGQRQQPGPVEVSDAVKRAVARSLISTYGGKYEASQWQEQMPFDRYSWALKGLSQLEVMLIWHVATEYCDISGRPTRRDDDERGIAVNLSRYCAYLIVSVPDLLPYHKGDIEEMAKKVMEERTELSELGSEIYDEMKDLEGTGEEDDPRKIFQKGVKLGKQLERMADGNPGGGGSARFLGQDNHSCR

SEQ ID NO: 17445 - protein, 91 aa, Zea mays
  VARIANT 73..91: note = Derived polymorphism lacks residues 73 to 91
  VARIANT 23: note = Ancestral polymorphism is D, Derived polymorphism is G
  VARIANT 14: note = Ancestral polymorphism is A, Derived polymorphism is D
  VARIANT 3: note = Ancestral polymorphism is G, Derived polymorphism is D
  VARIANT 1: note = Ancestral polymorphism is V, Derived polymorphism is M
MADEAELALEDADAAMRVAADDDSITATVVSVLLTLAFVGLSILTLGVIYLSVQDFLQKREKEKFEKEEAKKQKEEARKKRAKSRQKRRNY

SEQ ID NO: 17446 - protein, 360 aa, Zea mays
  VARIANT 87..360: note = Derived polymorphism lacks residues 87 to 360
MANVSDLLGAKKDTEPEAKLTAATKISGGRPVESSNKLVNAAPTRCSSQRARQETAGSGNLSEELDKKKQQEWDKETTEGHAVSQHEAGAELDMTMIVQSMKRGKRSARRRRQSSAQLLGFNVRNMAKAGRNDQAIGSKKMKRTRRGTRSLCVHNRGAKEKKCVGGESDASHQSTPANLVKAQDSPADTDAVEHLSVPKSDTSLEPKEPCGIDADEFASNQSGVPVPADGTIMTNIWTDFKESEDAVADGLMATTDVISLYEAKENHTKLDPKIIPGLDLNDGAEKFDTSTAQSALASLLPTVSAPDPCIEFAVKLLKDETPLAAYVPQADEIIGKMVCRQKSTAVGTSKSAQGRKEKKD

SEQ ID NO: 17447 - protein, 207 aa, Zea mays
  VARIANT 108: note = Ancestral polymorphism is G, Derived polymorphism is R
  VARIANT 118: note = Ancestral polymorphism is R, Derived polymorphism is P
MLLHASSAAYHPLFLVPARTGDRGGAPPRLHAAKLQTLNGLQLRSSFSALSCSCSPSPSPGDGGKRSARSLFDELSVLSPVVPWEVDDIWRIYAGYFFILHIPLSFGGLGVIAKVMQRSSLDSMTTVISTLMLQLAELVLTLVLLQYSAKPGQAIQPFFCGKVFTERNWVKETVLGFVVLITLVLTTSILADKLVGSEGWLTVELEL

SEQ ID NO: 17448 - protein, 171 aa, Zea mays
  VARIANT 103..171: note = Derived polymorphism lacks residues 103 to 171
  VARIANT 57: note = Ancestral polymorphism is M, Derived polymorphism is V
MALGARRSQLAGLAAAVLQGACWMPAGLAGSTVVTDSEGHTYAHRLAEGPGGEDVAMGAEEDAEDVVGVARERLGEVGSSADGEIPDADGAVIRGGGKSARRRPSGEKERSETLSPWPSSSATGVRSEEDHTRRSLSAEASVAATTRTTRQGRERRFPFQSWEERGKGSEI

SEQ ID NO: 17449 - protein, 86 aa, Zea mays
  VARIANT 30: note = Ancestral polymorphism is R, Derived polymorphism is C
  VARIANT 40: note = Ancestral polymorphism is G, Derived polymorphism is C
  VARIANT 47: note = Ancestral polymorphism is L, Derived polymorphism is P
  VARIANT 71: note = Ancestral polymorphism is G, Derived polymorphism is R
  VARIANT 80: note = Ancestral polymorphism is S, Derived polymorphism is R
  VARIANT 82: note = Ancestral polymorphism is K, Derived polymorphism is N
  VARIANT 83: note = Ancestral polymorphism is R, Derived polymorphism is M
  VARIANT 84: note = Ancestral polymorphism is K, Derived polymorphism is M
MRQREEQEKQEEELFTRAPVTKRDKQVEKRRNRQLHGLGCLTDGFDLGMNMLLGGDKEDDGGSSKSHGKSGNRKKHLKSSKKRKRH

SEQ ID NO: 17450 - protein, 270 aa, Zea mays
  VARIANT 237: note = Ancestral polymorphism is D, Derived polymorphism is H
  VARIANT 24: note = Ancestral polymorphism is G, Derived polymorphism is R
MALLTLQPAIPFLLLLLLPAASAGLPGGRTLVFILAGQSNMSGRGGATNGTWDGIVPPECAPSDRIVRLSPALRWEEAREPLHAGVDVGNVLGVGPGMPFAHAVLASEGAAAEPPVVVGLVPCAQGGTPIANWSRGTELYERMVTRARAAVAECSGRGHLAALLWYQGEADTMRRQDAELYQRRMETLVRDVRCDLGRPDLLVIQVGIATAQYNGKFLGVVREAQKAVKLPNVKYVDAMGLPIASDHTHLTTEAQVQLGNKLAESYLETL

SEQ ID NO: 17451 - protein, 91 aa, Zea mays
  VARIANT 81: note = Ancestral polymorphism is R, Derived polymorphism is M
  VARIANT 62: note = Ancestral polymorphism is K, Derived polymorphism is N
MAGEVELALEDADVAMRVAADDDSITAMVVSVLLTLAFVGLSILTLGVIYLSVEDFLHKREKEKFEKEEAEKQKEEARKKRAKSRQKRRNY

SEQ ID NO: 17452 - protein, 302 aa, Zea mays
  VARIANT 251: note = Ancestral polymorphism is P, Derived polymorphism is S
  VARIANT 263: note = Ancestral polymorphism is V, Derived polymorphism is M
  VARIANT 269: note = Ancestral polymorphism is S, Derived polymorphism is F
  VARIANT 276: note = Ancestral polymorphism is G, Derived polymorphism is R
  VARIANT 283: note = Ancestral polymorphism is T, Derived polymorphism is M
MRFVRQGSPSSTHPWRTISSSPEMGLVPGKKQLMAQSCHQQQLIWDFHEPEQRSSGPFKSPDLGAHGMAGLLSLRAGPRSSPSLARSSSAWASPASQVVVRLTSPQFRCARLCNSRSLLAAAVKISKDGSSAVLANSLPFKELTLAWCSQGHDRDCSVEEALAARLSLIKPSLSQVEECPEKRPPSVNTYLIVCSHHQKLGFPAKFKDFKIQNIVRSCDVIFRTLFGPVMSNPQSGSRVLHTLTYETELFSGLIYRMKRQKIMLLIFVSGKIVLTRAKVRDETYTAFENIYPVLTKFRKVRQ

SEQ ID NO: 17453 - protein, 406 aa, Zea mays
  VARIANT 342: note = Ancestral polymorphism is A, Derived polymorphism is V
  VARIANT 316: note = Ancestral polymorphism is E, Derived polymorphism is G
  VARIANT 285: note = Ancestral polymorphism is S, Derived polymorphism is L
MLTAAALLLIQLFLGFYRRPVSQSFLSTVCGRLPRSWRLSSLHSRYDAVLPDQELVVSRLGCFFVMASAGTTAVQDYDFCGSFYNKYMEGFVDLINSFTGVSFPSPSHGGQLCNKDHDFVFKKLLPSERDFKERSGLLSRAGLLLRFLLHKEFTVLETPNPIIQVRISRADNIITLLLLVIALIVELVHAAFYLASDWAQVLATMYVKRYWYEISPSIFATVIAFLRRVTFSGQLMRNRMKQHSVILGQRQQDPVEVSDAVKIAVARSLISMYSGNPTNDVGETSQWQDHRYSWALLQGLSQSQLEVMLIWHVATEYCHISGARPASATARGAAVHLSRYCAYLIGSVPELLPYHEADIAELAEKVTKERKLFGFSDSVSHDRMRNLQGTGEEDNPRKILQKHQAR

SEQ ID NO: 17454 - protein, 292 aa, Zea mays
  VARIANT 258: note = Ancestral polymorphism is G, Derived polymorphism is D
MPPPPPVNPQRLSPAESRERTLYFFHGLGVDVPLPVSAERPDAYTSLVRAIVSSAAVTSSRVSCTLTVSPAVANQYNTLHGGAVAAVAEAVGMACARAAAGDKEMFLGELSTAYLAAARLNEEMADGEPGHKLSPADSRAVTLAFFRALGADARLPASADQPDAYSALVRAILSSVAVSASPTPRISCTITVSHAVTNTYNTLHGGAVAAVAEAVGMACARAAAGDREMFLGELSIAYLAAARCDSEVDVEAQILRKGRSVVVTTIDFRLKDTKKLCYTSRATFYIMPVASL

SEQ ID NO: 17455 - protein, 342 aa, Zea mays
  VARIANT 135..342: note = Derived polymorphism lacks residues 135 to 342
  VARIANT 85..342: note = Derived polymorphism lacks residues 85 to 342
  VARIANT 53..342: note = Derived polymorphism lacks residues 53 to 342
MDLPGPIHEILVLFGGFGLLLGGLGVVLLTNPIYSAFSLGLVLVCISLFYFLLNSYFVAIAQLLIYVGAINVLIIFVVMFVNGSEWSKDKNYWTIGDGFTLLLCITIPFSLMTTIPDTSWHGILWTTRSNQIVEQGLINNVQQIGIHLATDFYLPFELISLILVVSLIGIHFDNGVKDNRILELTILSKWLTPSINLFQENSNSSINSYEFLTNAISSSSSLLPLHSRTNVRLARGNLCTPPLPFGRPTPHRNCLPETVPWPAGLTQGTLLLKVVRAFPGSMAWVTYFSAVAPGMSLVEKQWLVHGAHTSALQRLVLGPRLEAFSLPLLTLKKQGHLVSLNL

SEQ ID NO: 17456 - protein, 321 aa, Zea mays
  VARIANT 87: note = Ancestral polymorphism is K, Derived polymorphism is M
  VARIANT 119: note = Ancestral polymorphism is T, Derived polymorphism is I
  VARIANT 166..321: note = Derived polymorphism lacks residues 166 to 321
  VARIANT 253: note = Ancestral polymorphism is I, Derived polymorphism is N
MASSAIAAQICLTHEGEDRIRSTMATLSSSMLVFGYATKEADEAMLFRHMVPSKLWKVLSWLNVGTEKKLANVKVVVDQFIYEEIYKRKAWGSNKSQADVLSMYTKLSWDPSMSEQQKTDFLREMVVGFIIAGKDLIVVKLTWFFYMMCKHPKVEAMILEELKDLQSCRWPRYHCDVAEARGHQLLGAIKVSIYQTQFCFICCHLTYGEKEGDELKRNADVQEIHRRTIFNPVSRVNMPKTIYDHDSACFRRNVWLGDLNYRINLPYEKTHELISKQDWNELFGKDQLKVEVKKGIYLKDGPKGSSTFLQRISTRLTQKST

SEQ ID NO: 17457 - protein, 476 aa, Zea mays
  VARIANT 40: note = Ancestral polymorphism is G, Derived polymorphism is R
  VARIANT 86..476: note = Derived polymorphism lacks residues 86 to 476
  VARIANT 143..476: note = Derived polymorphism lacks residues 143 to 476
  VARIANT 151: note = Ancestral polymorphism is R, Derived polymorphism is C
  VARIANT 177..476: note = Derived polymorphism lacks residues 177 to 476
  VARIANT 184..476: note = Ancestral polymorphism lacks residues 184 to 476
MAETPRPTPSLLSTCRSSPLLPAVSHRAPSARLQRLLLFGARSLCGILDASRDRGPLLPAAPPPSSPSSLPLHLTAPAPAPRRSHQTPTPPHSFLSPAAQALVLAISSHLLPTLAAFLASCRDEFLRADIMSLLKALELLGHWEWALALLRLKGSVLLIGMIVVKKFGLKGCTFLFQHPTEIKRQAVKSVNSQIRCVASLLILILWCVTLYKIKWLKCPTGASFGFGGKLVSFHPVAPTQGAQTSTSEVHVHNLVIEQSLVSRSTEFEAAIQNGDKSSLRALCEKKSQESLSDEERETWGFLRVMFEDGDFARTKLLAHLGFEPPQAPPASSTDELSQILADTLNIDHAAVTDNADAQFLIDNGDDFFNNPQPLEASLAEELVSTNGQHIEQEVSGDAVPSDPSIDKSIQHALVVGDYKGAVNQCLASNRMADALVIAHAGGSALWESTRNHYLKNSISPYLKVVSAMVDNDLMSF

SEQ ID NO: 17458 - protein, 75 aa, Zea mays
  VARIANT 18: note = Ancestral polymorphism is G, Derived polymorphism is R
  VARIANT 21: note = Ancestral polymorphism is S, Derived polymorphism is L
  VARIANT 30: note = Ancestral polymorphism is A, Derived polymorphism is V
  VARIANT 37: note = Ancestral polymorphism is A, Derived polymorphism is T
  VARIANT 47: note = Ancestral polymorphism is R, Derived polymorphism is C
  VARIANT 53: note = Ancestral polymorphism is R, Derived polymorphism is H
  VARIANT 54: note = Ancestral polymorphism is Q, Derived polymorphism is L
  VARIANT 58: note = Ancestral polymorphism is A, Derived polymorphism is T
  VARIANT 69: note = Ancestral polymorphism is H, Derived polymorphism is N
MASMRQLLRVQVEAIMGGFTSCCARTVYLASLTGPLATVKVHNSSERLHLVFHQELDALLCVCHPHIVHLLAFYH

SEQ ID NO: 17459 - protein, 365 aa, Zea mays
  VARIANT 185..365: note = Derived polymorphism lacks residues 185 to 365
  VARIANT 177: note = Ancestral polymorphism is D, Derived polymorphism is H
  VARIANT 51: note = Ancestral polymorphism is G, Derived polymorphism is V
MEPQCNVGMFTRAELLEASVELRHHALGCVKSTALRCAVKLGVANAIQRRGGRASVEDLLTELSLDASRLRCLHSVMRALAALGVFKEGSDGEYGLTAISSLLVDDDSSVRGSLRPITLLYLEPAFVAPVLNLADWALAGVDGSDDDNNCSARGTAFKMTHGEDVWDVLARDAFLGDFFNGALASETRFLMDIAIRGSPQVFEGIASLVDAGGGTGAAAQAVAAAFPDTRCTVLELPQVVDAAPIDGPVRFVGGDMTKFIPPADAVLLKNVLHDWSDKDCVIILKRCKEAIAASGKVIVIDIVLGSSSLAICNETQLWLDLFMSTVTTGKERREEEWYRLFKEAGFSAYKISPVLGLLSIIEVFL

SEQ ID NO: 17460 - protein, 129 aa, Zea mays
  VARIANT 63: note = Ancestral polymorphism is R, Derived polymorphism is W
  VARIANT 59: note = Ancestral polymorphism is H, Derived polymorphism is N
  VARIANT 43: note = Ancestral polymorphism is M, Derived polymorphism is I
  VARIANT 40..129: note = Derived polymorphism lacks residues 40 to 129
  VARIANT 29: note = Ancestral polymorphism is R, Derived polymorphism is K
MFHNLIGERDSHRHITMEGITEVLVALERIEQQAELTYDQLLMLEANLFFGAFASYDRHRDMRMDIDDMSYEKLLALEERIGSVSTALSEEQFTKCLKRSIYSQVALEVNKSTVDDMKCSICQVSGNLT

SEQ ID NO: 17461 - protein, 375 aa, Zea mays
  VARIANT 92..375: note = Derived polymorphism lacks residues 92 to 375
  VARIANT 120..375: note = Derived polymorphism lacks residues 120 to 375
  VARIANT 161..375: note = Derived polymorphism lacks residues 161 to 375
  VARIANT 173..375: note = Derived polymorphism lacks residues 173 to 375
  VARIANT 208: note = Ancestral polymorphism is H, Derived polymorphism is Y
  VARIANT 214: note = Ancestral polymorphism is E, Derived polymorphism is K
  VARIANT 238: note = Ancestral polymorphism is E, Derived polymorphism is G
  VARIANT 244: note = Ancestral polymorphism is M, Derived polymorphism is T
  VARIANT 261: note = Ancestral polymorphism is D, Derived polymorphism is G
  VARIANT 294..375: note = Derived polymorphism lacks residues 294 to 375
MSKPTEAVPPAGSMVRSGTEVISSCGGRRCALGHVVCIYVFESLTLFGFTGHACLLRFISEICVPSSLFTSRFYICSESDYQDLLRNTDANQTTLDRNMFGGQRLHVCGEGELSFQDHTWKTISSSAKELMSSLLSVEPYKRPTASDLLGHPWVIGDYAKQDLMDAEVVTKLQRFNARRKLRAAAIASALSSKVALRTKRLMNLLGRHDLSSEELDNLRAHFARICADGENATLAEFEQVLRAMRLEALVPLAPRVFDLFDNNRDGTVDMREILCGLSSLRNSRGDDALRLCFQMYDADRSGCISKDELASMLRALPEECLPGDITEPGKLDEVFDEMDANSDGKVSFDEFKAAMQKDNALQDVVLSSLRPPPPP

SEQ ID NO: 17462 - protein, 158 aa, Zea mays
  VARIANT 14: note = Ancestral polymorphism is H, Derived polymorphism is N
  VARIANT 18: note = Ancestral polymorphism is P, Derived polymorphism is L
  VARIANT 29: note = Ancestral polymorphism is I, Derived polymorphism is F
  VARIANT 33: note = Ancestral polymorphism is G, Derived polymorphism is R
  VARIANT 34: note = Ancestral polymorphism is E, Derived polymorphism is G
  VARIANT 66: note = Ancestral polymorphism is L, Derived polymorphism is V
  VARIANT 68: note = Ancestral polymorphism is G, Derived polymorphism is S
  VARIANT 78..158: note = Derived polymorphism lacks residues 78 to 158
  VARIANT 85: note = Ancestral polymorphism is A, Derived polymorphism is T
  VARIANT 88: note = Ancestral polymorphism is D, Derived polymorphism is N
  VARIANT 93: note = Ancestral polymorphism is G, Derived polymorphism is D
  VARIANT 105..158: note = Derived polymorphism lacks residues 105 to 158
MGPLSHNYLLRAAHLSNPLMVDIRVGVIIRKAGETIRYIQLQSGAKIQVTRDHEAELGALTRQVELSGKPEQISKAEQLIKEVLAEADVGSSGAGSGGQKYNATQQGAETFQMKIANNKVYTLFYLDKGGTDYWEGGETIKSMQTNSGARIQVCYLVI

SEQ ID NO: 17463 - protein, 117 aa, Zea mays
  VARIANT 113: note = Ancestral polymorphism is G, Derived polymorphism is D
MPPPRLASPSRAVTAILARTPVPSLPSRCPPHPLASAYRVVTDAAPSLRPVLPSLLWSVMARDITCVFLLQKLQVYTLVPSLLREEVPILVGVILWEAIQLCSSSGKCILVGGHATM

SEQ ID NO: 17464 - protein, 146 aa, Zea mays
  VARIANT 37..146: note = Derived polymorphism lacks residues 37 to 146
  VARIANT 44: note = Ancestral polymorphism is P, Derived polymorphism is L
  VARIANT 52: note = Ancestral polymorphism is P, Derived polymorphism is S
  VARIANT 60: note = Ancestral polymorphism is A, Derived polymorphism is T
  VARIANT 68: note = Ancestral polymorphism is L, Derived polymorphism is V
  VARIANT 76: note = Ancestral polymorphism is S, Derived polymorphism is L
  VARIANT 86..146: note = Derived polymorphism lacks residues 86 to 146
  VARIANT 91: note = Ancestral polymorphism is A, Derived polymorphism is V
  VARIANT 96: note = Ancestral polymorphism is R, Derived polymorphism is Q
  VARIANT 110: note = Ancestral polymorphism is K, Derived polymorphism is N
  VARIANT 143..146: note = Derived polymorphism lacks residues 143 to 146
MKSGLRVADLDDTQIAAATGATYSDDDDSVEATAPCQEGLVKKPKKPKVKKPKVTVAEATVLIDAENLVAHLFEISASYMNQQDIQLMWFADYFGRAFAAVSASQFPWAKMFKESTVSKMVDVSYHITRYCSRISLCMSSFFSAHA

SEQ ID NO: 17465 - protein, 195 aa, Zea mays
  VARIANT 162: note = Ancestral polymorphism is G, Derived polymorphism is R
  VARIANT 159: note = Ancestral polymorphism is P, Derived polymorphism is T
  VARIANT 60..195: note = Ancestral polymorphism lacks residues 60 to 195
MTCSASAVTPRSREAHVHAVIVAAPWPREMPAPPPPCVSDPFIYLHHHLQSASASPPKPYPLPCCPTMNLPPHHRQNSSNYGSEQHPVSSLWQLCSSMEQKIHVNPLKILSQTKCTHIQNSSSSCPNQLRRIRMPWILRGRSPPIARSLCKLMQMRQLPRLRLLTMTLSCKAHYPLCCPLMDPGPVVEAEESERP

SEQ ID NO: 17466 - protein, 169 aa, Zea mays
  VARIANT 101: note = Ancestral polymorphism is C, Derived polymorphism is R
  VARIANT 78..169: note = Derived polymorphism lacks residues 78 to 169
  VARIANT 76: note = Ancestral polymorphism is T, Derived polymorphism is I
MALGNKRTTLLVAMAALILQPSAASRVGGGLARAIADPGNGDGDGGIPQLPPQPRECRPWLARMMPCAGFLTNNSTVYAPDATCCDGFGSMFTLDTVTCLCHVVDGDIGKLLPAPMSRMRMVELFSVCGHAGRVDLLAAACSLMDGVPPIDLPSPSPLMPSPSARRLGD

SEQ ID NO: 17467 - protein, 213 aa, Zea mays
  VARIANT 113..213: note = Derived polymorphism lacks residues 113 to 213
  VARIANT 98..213: note = Derived polymorphism lacks residues 98 to 213
MDGNSRWARERGLTPADGHKAGGRNLERVVALSRAWGIRALTAFAEVDYMMGLSEWLIGDNIDKLSRQGIRLQVIGDAAKMPASLRSAAAQADEATRQNSQLHVMLAICYSGRWDMVQACRELAREAQANRLSPDDIDESIIAGKLATSAAGEFSCPDLVIRTSGEMRLSNFLLWQSAYSELFFTAKMWPDFGEAEATFHHLACIVESFNSRT

SEQ ID NO: 17468 - protein, 634 aa, Zea mays
  VARIANT 306: note = Ancestral polymorphism is P, Derived polymorphism is L
  VARIANT 305: note = Ancestral polymorphism is L, Derived polymorphism is Q
  VARIANT 227..634: note = Derived polymorphism lacks residues 227 to 634
MDPPGSNPDGAVNMTRAMQALSPWLNHPRRTIAQVEGLVLAAAALLLLQLFLGFYRRRWRSSFASTVLRASSKLMEALIIYTLGTMQSSPIKNSLYPVWAAFLVMASAGTTAVQDYDFCGSFYNKYMEGAVDIIKYVFYWIMFGLLLDPNAYTFKADLNLQRHPKNPRASSNCVVALFYFALFTKLCESMGLAVGGYNKTQKWNLFFRPTKIRFGIQAAETEEYDPQSMKGYGYAVCYRPFGGGLITIDQIWYCLDVRSSACLKDLCLSHALFRQLIVRRFFGLVVQPKIIPEIKDHDFVFKKLLPSGWDFERAFRIIEAELGFCYDFFFTKYCYTFVMTNQLPVPVIQSLVLAKIVLIITVGVFAVRNSLVLETPNPIIEVRISRANYIITLLLLGIALIVELVHVAFYLSSDWAQVSLATMHVKKQWYEISPSIFGTVIAFLRRVTFSGQLMRNRMKQHSLMRNRIEQKDPVEVSDAVKRAVARSLISTYGGKEDDAVETSQWQDQMPFQLLPYHEADIAELAHKVMGEPTEQDDDARNIFHKGIELGKQLERMADGDRWKALQDFWAKTTIHAAKSHYTTKQHMQHLESGGEFLTHIWALLAHAGILYLNSVKNEDQEEQANLGSGPSAVA

SEQ ID NO: 17469 - protein, 255 aa, Zea mays
  VARIANT 85..255: note = Derived polymorphism lacks residues 85 to 255
  VARIANT 55: note = Ancestral polymorphism is Y, Derived polymorphism is H
  VARIANT 25: note = Ancestral polymorphism is R, Derived polymorphism is Q
MGRGKVELKKIENPTNRQVTFSKRRMGLFKKANELAILCDAQIGVIIFSGSGRMYEYSSPPWRIASVFDRYLKAPSTRFEEMDIQQKIVQEMTRMKDERNRLRMIMAQYMAEDLASFSAQDLSNLEQQIEFSLYKVRLRKQELLDQQLLEIRQREMHMPAEQSGYLCLMNPAAAIASGQHQQAGEMVGINPRPFPWWDVGASGSGSQSQQLLLHDRDATESSMTALGLSPQMHGYRLQPRQPNLQQDADIHGWLW

SEQ ID NO: 17470 - protein, 331 aa, Zea mays
  VARIANT 205: note = Ancestral polymorphism is A, Derived polymorphism is V
  VARIANT 89: note = Ancestral polymorphism is P, Derived polymorphism is L
  VARIANT 11: note = Ancestral polymorphism is C, Derived polymorphism is Y
MPPLLALFFLCLSLALRPATAVSSPSFALDFFPAAGAIAQLSLSGGATANATAGSVSMPIPDARVQYRTPIAASALRLGFSTYFAFALPHAPSSLAFFLTPSASRSPPALALVFSARHIRLDLAGRTALQTETRHPVPTTASHLHAWIDYYHSNSSSSSADTDTLHVQLAATRIPTANHHPTPTPPLLSYPLHLLPVLRRGPILAGFRTSSGNCTLFSWAFRAAPNRMHSLPLNPADLLTTPPPEREARASQPAPDRRYSSPWGAALSLLLAAAAGAMLTFIVLFLWYYATKRRPVAPVEYPMHPSHVVYEKIVLVGVKDDAAAADAAGNK

SEQ ID NO: 17471 - protein, 812 aa, Zea mays
  VARIANT 462..812: note = Derived polymorphism lacks residues 462 to 812
  VARIANT 25..812: note = Derived polymorphism lacks residues 25 to 812
METTSTTNEQTDRGAMWELERNLDQPMDAEAGRLRNMYREKSYPTLVLLQLAFQSLGVVFGDLGTSPLYVFSNIFPHEIEDTEQIIGALSLVIYSLTLIPLVKYVFIVLRANDNGQGKPHVLRLLVLGCKVLRAASFIVMPGGTFALYSLLCRHAKINTIPNQHRTDEELTTYSRHTYDEKSLAAKIKRWLEGHQFRKNVILILVLFGTCMAVGDGILTPAISVLSATGGIQVEEKKMKNDAVVIVSVVILIGLFSMQHFGTDKVSWLFAPIVFVWFILIGVLGAVNISKYDQSVLKAFNPIYVYRYFKRGKTSWASLGGIMLSITGTEALFADLSYFPVQAIQIAFTVVVFPCLLLQYTGQAAYIAQNKDHVSHAFYFSLPDSVLWPSFIVATAAAIVASQATISMTYSIIKQALALGCFPRVRIIHTSKKYLGQIYSPDINWILLVFCIAVTAGFKNQSQIANAYGTAVIMVMLVTTFLMIPIMLLVWRSHWTLVILFTVLSLFVEIPYFTAVVRKIDQGGWVPLVFAVAFLIIMYVWHYGTLKRYEFEMHSKVSMAWILGLGPSLGLVRVPGVGLVYTELASGVPHIFSHFITNLPAIHSTLVFVCVKYLPVYTVPLDERFLVKRIGPKNFHMFRCVARYGYKDIHKKDDDFEQMLFDSLMLFVRLESMMEEYTDSDEYSTRETNLSGSANPRINGISAGSNMDLSYTSHDSIIQVQSPNYTGNSQAVSPGQLYHTVGDEIAFLNACRDAGVVHILGNTVIRARRDSGFIKKIAINYLYAFLRKICRENSAIFNVPHESLLNVGQVFYV

SEQ ID NO: 17472 - protein, 299 aa, Zea mays
  VARIANT 270: note = Ancestral polymorphism is T, Derived polymorphism is I
  VARIANT 266: note = Ancestral polymorphism is T, Derived polymorphism is I
  VARIANT 245: note = Ancestral polymorphism is I, Derived polymorphism is T
  VARIANT 194: note = Ancestral polymorphism is V, Derived polymorphism is G
  VARIANT 100: note = Ancestral polymorphism is G, Derived polymorphism is R
  VARIANT 79: note = Ancestral polymorphism is R, Derived polymorphism is C
  VARIANT 51: note = Ancestral polymorphism is S, Derived polymorphism is N
MLQLLFEDLNVNNGVSVCLLLVYVCYSCWISCFIFWDVEIIFVSLDRDEASFRDHFQGMSWLAVPFDAAGLLRQKLCARFAIERIPALIPLSASATSSSGLGCREDAVRLVGEYGVDAYPFSAQRRRELESMDDARREGGRLQELLGCEERDFVISADDINIPIADLTGKTVGLYFGAHWCPPCHVFTKQLKEVYNELKILRPGSFEVIFVSIDRSKGEFQASMSSMPWLAIPYSDATRKRLTRIFSVKGIPGLLILGLDGKALKTDGRTTISTYGAAAFPFTESRVSEVGEALKTVQL

SEQ ID NO: 17473 - protein, 226 aa, Zea mays
  VARIANT 128: note = Ancestral polymorphism is I, Derived polymorphism is N
  VARIANT 106: note = Ancestral polymorphism is N, Derived polymorphism is D
  VARIANT 67: note = Ancestral polymorphism is R, Derived polymorphism is M
  VARIANT 59: note = Ancestral polymorphism is K, Derived polymorphism is N
  VARIANT 20: note = Ancestral polymorphism is S, Derived polymorphism is I
MPGFIKVGYYYFFSRHVIRSVIYGEQPRNRLDLYIPKDNSKSSSVVAFVTGGAWIIGYKAWGALLGRQLAERGIIVACIDYRNFPQGTISDMVSDASEAISFICNNVVSFGGDPNKLCCQSYMTYILILCALQSDDEREMCARTIYRTNIDKKVTQADLKLFFESICGEIDLETNKIMDFIKFDVGNVVMVTGGRNTGRVGVIKNREKHKGSFETIHVLFGAFCYV

SEQ ID NO: 17474 - protein, 555 aa, Zea mays
  VARIANT 411: note = Ancestral polymorphism is D, Derived polymorphism is Y
  VARIANT 288: note = Ancestral polymorphism is T, Derived polymorphism is R
MAPPRRTVYQVGNLSVQRLGQSQVITAVNGQFPGPKIEARDGDTVVVHVVNLSPYNLSIHWHGILQRLSCWADGPNMVSQCPIRPAAGTYTYRFNVTGQEGTLWWHAHVSFLRATVYGALILHPAAPSSYPFPTPHGEATILLGEWWNVSVVDVERQALLMGAGPNNSVALTINGLIGAGGGGGSENSSSSSSSQYELAVQRGRTYLLRIINAALNYELFFKVANHSFTVVAADACYTDPYHTDVIVIAPGQTVDALMRADADPGRRYYMAAQVYQSLANATYSAATTALLTYLPDASGSDDEQPTLMPTMPAFNDSATAQSFYASLTGLLQDGVPLHVDTRMLVTFGLGATPCASAQTLCNRTLGSVAASMNNVSFQLPTTMSLLEAHMRGAPDGVYTRDFPDRPPVMFDFTGDAMAANRSFMLTSKGTKVKTLRYNETVEVVLQNTAVLGAENHPLHLHGFNFFVLAQGPGNFNAHRHVRKYNLVNPQQRNTVAVPGGGWAVIRFTADNPGVWIMHCHLDAHLPFGLAMAFEVEDGPTPDAVLPPPPPDYPRC

SEQ ID NO: 17475 - protein, 97 aa, Zea mays
  VARIANT 41: note = Ancestral polymorphism is E, Derived polymorphism is K
  VARIANT 46: note = Ancestral polymorphism is A, Derived polymorphism is E
  VARIANT 51: note = Ancestral polymorphism is E, Derived polymorphism is G
  VARIANT 60: note = Ancestral polymorphism is R, Derived polymorphism is T
MVMQNEVEAAVKISLLAALGSTTNKLAKGQLDDLTVTTLRKSEEKAKFLVGERDRLLTERDSALQEAQMWRSELGKARGNAAILEAAVVRAEEKARV

SEQ ID NO: 17476 - protein, 135 aa, Zea mays
  VARIANT 88: note = Ancestral polymorphism is G, Derived polymorphism is A
  VARIANT 13: note = Ancestral polymorphism is S, Derived polymorphism is N
  VARIANT 9: note = Ancestral polymorphism is T, Derived polymorphism is A
  VARIANT 4: note = Ancestral polymorphism is G, Derived polymorphism is R
  VARIANT 1: note = Ancestral polymorphism is M, Derived polymorphism is I
MQYGLQLFTMLSSYDCIIYDLLRIRINPSIFLLYSAAGPHTIVDGKEVVNFASANYLGLIGNEKIIDSCISSLEKYGVGSCGPRGFYGTIDVHLDCESKIAKFLGTPDSILYSYGISTIFSVIHAFCKKEDIIVA

SEQ ID NO: 17477 - protein, 614 aa, Zea mays
  VARIANT 57: note = Ancestral polymorphism is A, Derived polymorphism is T
  VARIANT 36..614: note = Derived polymorphism lacks residues 36 to 614
MADHDDAAVLSDVDEDLLPSSSPSISSASSHKTLPQAQPLPQSDAQAQQQRLLALAAELEEERRLRHAAEASIAGAESRVARYKAFAQDVLRKSDALTAEAADSARSLAALQAEATTASSMLSSGFERISAKASPSAAAAPLPTSQKYSSGLPALAYGVLKRANDIVDDLLAQINAANRDRDRAREQMEHRNYQIAIEVSELEASLASRSAEGESLSKSLSQREAEISELRDKITSLEGKLDAQRPVLAEQIECTSKLYHEMRQVVKLVDAEAASALSDSVFVWKESDVEESLKVSLEGTKLAYELAAMALEKVGACINDKESKLMRLEDRVDELIKEKEHISVLLRSALQATTSEVLKVAEDGLREAGIEIGLDERKVHGPGNVEKDEVYTLAGALENTMKESQVRIIELQHLVEALRAESGLLRTRLEGQEKEIGQLRKQIKHVEEKERVANESVEGLMMDVTAAEEEIKRWKMAAEEEAEAGRSIEQEFQIQISSLRKELDEAKQAMVELENKLKFKEETAAAAMAARDAAEKSLKLADMRSSRLRERLEELNRQLEESDSRIDSVNRNGHRRYMCWPWQWLGLNYNYVRLPPVEADETSNEMELSEPLII

SEQ ID NO: 17478 - protein, 358 aa, Zea mays
  VARIANT 60: note = Ancestral polymorphism is V, Derived polymorphism is L
MAPRKEIMAGDHGGGEGEEVVVLVGDYDYELEEEDEDMLPGFRFHPTDEELVTFYLRRKVAGKRLTIEIIKDFDIYKHDPWDLPKSSSISGEKEWYFFCLRGRKYRNSIRPNRVTGSGFWKATGIDRPIHSAASGRAGDPIGLKKSLVFYRGSAGKGTKTEWMMHEFRLPPRADTAHASPSEQEAEVWTICRIFRRNFTYKKQGVHCSSKVSSAAAVVAQPGESSSVTAGSMESDTGDEYTNGLLPQTPLLQDPVNMIDGYSYSYGYDHHHHQQQQLQHGQWNSHALHAAATAPLPSPTTMAAFHHGVLSSPPAAASGPLDDMYYKDGSSWDDIGRMVMELTDPSPSVFSFYDTRSYA

SEQ ID NO: 17479 - protein, 66 aa, Zea mays
  VARIANT 5: note = Ancestral polymorphism is Y, Derived polymorphism is N
  VARIANT 15: note = Ancestral polymorphism is V, Derived polymorphism is L
  VARIANT 24: note = Ancestral polymorphism is M, Derived polymorphism is I
  VARIANT 28: note = Ancestral polymorphism is A, Derived polymorphism is T
  VARIANT 36: note = Ancestral polymorphism is A, Derived polymorphism is D
  VARIANT 39: note = Ancestral polymorphism is S, Derived polymorphism is N
MEGANNQVLSVWQVVPHETYVYFMDLITKTVRDEIAGCSEKCMIPYLSTMMTFDRGRLKDMSWRTM

SEQ ID NO: 17480 - protein, 295 aa, Zea mays
  VARIANT 67: note = Ancestral polymorphism is S, Derived polymorphism is L
MMAKANGAVHASTKEPLFSFGVIADVQYADIPDGRSFLGVPRYYRHSITVLQRAVNRWNEQGNIKFSINFGDIIDGYCPKDKSLWAVQKVLDEFDKFDGPTYHMIGNHCLYNLPRSQLVSLLKIATDSDRAYYDFSPCPGFRIVVLDAYDFSCLGWPHDHPVTIAAMKLLDEKNPNTDKNSPDGLVGVDRRFVKFNGAVGKEQVSWLNDVLQDASTQHQNVIICSHLPMDPGASSPAALMWNYDEVMAIVHQYNCVKACFAGHDHKGGHSVDSHAFMSILQTTTYTMFASVAKFV

SEQ ID NO: 17481 - protein, 68 aa, Zea mays
  VARIANT 49..68: note = Derived polymorphism lacks residues 49 to 68
  VARIANT 44: note = Ancestral polymorphism is T, Derived polymorphism is I
  VARIANT 34: note = Ancestral polymorphism is S, Derived polymorphism is Y
  VARIANT 30: note = Ancestral polymorphism is E, Derived polymorphism is D
  VARIANT 24: note = Ancestral polymorphism is F, Derived polymorphism is L
  VARIANT 23: note = Ancestral polymorphism is F, Derived polymorphism is S
  VARIANT 19: note = Ancestral polymorphism is D, Derived polymorphism is G
  VARIANT 4: note = Ancestral polymorphism is R, Derived polymorphism is S
MCASTIYCTNIDKKVTQADLNLFFESICGEVGRSLLQTQSPFCTAKSLQKWHHQDRSGDQQDHGLHQV

SEQ ID NO: 17482 - protein, 42 aa, Zea mays
  VARIANT 25..42: note = Derived polymorphism lacks residues 25 to 42
  VARIANT 18: note = Ancestral polymorphism is H, Derived polymorphism is Y
  VARIANT 8: note = Ancestral polymorphism is A, Derived polymorphism is V
MDNGGHVAVKILDKAKVHKNKLAEQVNHFIWIVFPLITGDGK

SEQ ID NO: 17483 - protein, 126 aa, Zea mays
  VARIANT 82: note = Ancestral polymorphism is S, Derived polymorphism is F
  VARIANT 67: note = Ancestral polymorphism is R, Derived polymorphism is C
  VARIANT 66: note = Ancestral polymorphism is A, Derived polymorphism is T
  VARIANT 63: note = Ancestral polymorphism is A, Derived polymorphism is T
  VARIANT 51: note = Ancestral polymorphism is S, Derived polymorphism is N
  VARIANT 45: note = Ancestral polymorphism is S, Derived polymorphism is F
  VARIANT 32: note = Ancestral polymorphism is C, Derived polymorphism is S
  VARIANT 30: note = Ancestral polymorphism is A, Derived polymorphism is V
  VARIANT 24: note = Ancestral polymorphism is P, Derived polymorphism is T
  VARIANT 12: note = Ancestral polymorphism is K, Derived polymorphism is E
  VARIANT 10: note = Ancestral polymorphism is V, Derived polymorphism is L
  VARIANT 7..126: note = Derived polymorphism lacks residues 7 to 126
  VARIANT 1: note = Ancestral polymorphism is L, Derived polymorphism is M
MRELIQRFALRKHGIIKKLEVMAPKLEMLVVCDATKAYISAPNLSVVSWDSDTGYNPLCHHFANAARHLHLLHLGSKCVSASLMRQFDEVDVLKLKLNLLNFKGTEAYTNLLNETATLPKCEELKL

SEQ ID NO: 17484 - protein, 179 aa, Zea mays
  VARIANT 20..179: note = Derived polymorphism lacks residues 20 to 179
  VARIANT 83: note = Ancestral polymorphism is L, Derived polymorphism is R
  VARIANT 111..179: note = Ancestral polymorphism lacks residues 111 to 179
MRTTPCSTWWWRRPSRLANSLLGRFIHGNNASSMGRGSSAPPSTATCAACLLGHTLTCHYHRGDDYLEIDMDIGSLAIASAVLHLALGAVMLVTIEMGFLVESQPEEELPWRLFVAVHITQMEMDAAEYVKLPPDEAMPETAHRARAGFRAPDRLSSLALEIPSIGCEEGHDQSDNKDN

SEQ ID NO: 17485 - protein, 295 aa, Zea mays
  VARIANT 38: note = Ancestral polymorphism is L, Derived polymorphism is Q
  VARIANT 57: note = Ancestral polymorphism is P, Derived polymorphism is L
  VARIANT 135..295: note = Derived polymorphism lacks residues 135 to 295
  VARIANT 216..295: note = Derived polymorphism lacks residues 216 to 295
  VARIANT 218..295: note = Derived polymorphism lacks residues 218 to 295
  VARIANT 230..295: note = Derived polymorphism lacks residues 230 to 295
MSGSVEACRKVPNHVKDLMSQKVTDGRIRRARGKKLRLFVEKEVSATRQGYRSARIPLDEQAQIDMAMRNSLRDSFSTLEHDSCPPFGKSTGSASGAASCFTGKQSRLSSYYKNTQDTSRGPFDIDLAHSRTQVQPHIDVMQEKGHKEKLGITLAKWFHANDIPGRKAGCPYFRLALNLAQQLGDGVPIPRGREIDGPSLDMNYADMEAHMAKFKEDWKDYGVTIMCDSWTGGGDDEDGEPSGPCFAARTQPKLATDQYNGPSQDEQTAPLRPRSKRQKKLSIKGLYMLEKAKYI

SEQ ID NO: 17486 - protein, 128 aa, Zea mays
  VARIANT 109: note = Ancestral polymorphism is S, Derived polymorphism is P
  VARIANT 84: note = Ancestral polymorphism is S, Derived polymorphism is I
  VARIANT 70: note = Ancestral polymorphism is D, Derived polymorphism is N
  VARIANT 8: note = Ancestral polymorphism is K, Derived polymorphism is M
METSKMPMNIALLLLLFSVCNPGCTAGACSCSLSDLDVTQTAVPSKVNVYAVTVENRCICTQANVKLACDGFSSSVAVDPGVLSVDGKLCTLNGGRPIGMGPEYAVKFSYASPSQFAFKPVSSSIACS

SEQ ID NO: 17487 - protein, 341 aa, Zea mays
  VARIANT 63: note = Ancestral polymorphism is A, Derived polymorphism is S
MPTAEATTPVPPELSSGQGRTVCVTGAGGFIASWLVKRLLEKGYTVRGTVRNPVDPKNDHLRSLDGADDRLVLLRADLLDPESLAEAFSGCDGVFHAASPVTDDPEMMIEPAIRGTRYVMAAAADAGVKRVVFTSSIGTVYMNPYRDPSKPVDDTCWSDLEYCKNTQNWYCYAKTVAEQGAWEVARKRGLDLVVVNPVLVLGPLLQPTVNASTDHVMKYLTGSATTYVNAAQAYVHVRDVAEAHVRVYEAPHAHGRYICAESTLHRGDLCRVLAKLFPEYPVPTKCKDQVNPPVVGYKFTNQRLKDLGMDFVPVLQCLYETVTSLQEKGMLPVLPTKHDHA

SEQ ID NO: 17488 - protein, 1104 aa, Zea mays
  VARIANT 972..1104: note = Derived polymorphism lacks residues 972 to 1104
  VARIANT 148..1104: note = Derived polymorphism lacks residues 148 to 1104
MDWYSDDSDPDIDEDLREDLDALRRSCILSGADPDAAVAQVSSGLAGPSTPALAAAPGAAADHHHHASSSDDEEDEDLALVRSIRANLHHLHNSKASTVLPDAAPAPRDDDDPSSRPICTWPPSDTDEEEDDLETLRAIQRRFSHYQSSTSTASPKTMKPEASQGVHSDLFADRSGDDFAVQKQNAIVPHGDGFPKAALLLVDALKKNRAYQKFIRRKMVNIEAKIEENKDLRDRVKCLLGYQLSCRKSVSRSLGQKEDPRVRLISPLKSTQPCTKNKYRKIPALFLGPAENPHVSKYEMALKQFPMSFKKQPWSDAEKDKLARGIKQQYQETLILDSLNNGSADGDFSALDMAYALTNGAGNFEVTPENLRSVLPLINWDKISAMYLPGRSGAECESRWLNCDDPLINHEAWTADEETRLLLIIQEKGMCNWIDIAVTLGTYRTPFQCLVRYQRSLNPHILNKAWTKEEDLQLQAAVETFGQKWQLVSASLDGRTGTQCSNRWRKTLHPEKTSVGRWLLDEDKRLMVTVKLIGPGRWSLIAPFIPGRTQTQIFERWCNILDPDLYLDDWRPDEDSTLLAAVSEFGPCWSKISKTIIPGRNDSMCYRRWRKLCKHEVQKAREARQLKKAIFQNNFVDREKERPAICPRDLISLLPSKGDGCDVAIVRGGSEKQGEENHLALSNIVNISSGLDCVAANSVLNASSRRPRRVSSGRRSKKHTEGNNIAAPDDLNASSSAPSSSIKRKSTTGNNVAAKKRSRVSISVNADNEVEKNRITDSVAVSEEGLVKKRTRRPKPVGNEGAVRKRGGSNNEVGTNIITESVAVGEEGVVKKRTRRSKPVGNEGADNEVGTYRITGSVVVGEEGVVKKRTRRSSKPVDNEEVVRKMRGSINNYDEAGTNTMMNSAFGEEEVVKKKTRHSKPVGTEGAASIGGDGMVNKRRTGSVSTENLGAVRKRKIVSSRRKLAEVNLPTEEGVPNAVPDLDFPCAISEERAVDVGNMDKGRRKSTPRPKQINMPEEDADKNSTFTRLKPSLEKGLVSPVMMVLRVEVAVSTRGMPKGSKMMTLFKLECHQAHCLVCEQLHSRFPYTRDVFFRQNQGHLDVIC

SEQ ID NO: 17489 - protein, 231 aa, Zea mays
  VARIANT 47: note = Ancestral polymorphism is R, Derived polymorphism is C
  VARIANT 97: note = Ancestral polymorphism is D, Derived polymorphism is G
  VARIANT 102: note = Ancestral polymorphism is E, Derived polymorphism is K
  VARIANT 117: note = Ancestral polymorphism is L, Derived polymorphism is W
  VARIANT 177..231: note = Derived polymorphism lacks residues 177 to 231
MSAAGGDLPETVEVTLRAVGPSRPTTLRLPPLLSVAELRGCIARERRLAGTEEVRLRLILRGKTLPHQDDSHVTLRDGDTLIVAVAPKPPVNHLLDDDVEDEEEDELKFRIPQTTTLWKRKFFMFLRDKLRLPDIILMALFSLSMKAWIIIAMWFLLAPIAQKYDIGPLYYTHPDNEVHIIGTGFLIILINLGRRQQGDVSAYSIFNEDFRELPGTLNADRIDADIRAGQF

SEQ ID NO: 17490 - protein, 106 aa, Zea mays
  VARIANT 41: note = Ancestral polymorphism is R, Derived polymorphism is W
MQVTPVHALGAGNSPMQGLVMEVILTFSLLFVTYAMILDPRSQVRTIGPLLTGLIVGANSLAGGNFTGASMNPTRSFGPAMATGVWTNHWVYWIGPFRFSRGLDAP

SEQ ID NO: 17491 - protein, 525 aa, Zea mays
  VARIANT 25: note = Ancestral polymorphism is P, Derived polymorphism is R
  VARIANT 144: note = Ancestral polymorphism is L, Derived polymorphism is Q
MGQCLSAPRHRKPPPLPLSPALSVPPQILSSIADAVGEDHTADLPEELLALVFGLLGSGDRKRCSLVCRRWLVVEAASRFRLAIDARASPLAESALPRLLARFPAVSKLALKCDRRAESVGDPALAQVADRLGPGLRRLKLRSLRAVTDDGVAALAAAAANLRKLSVGSCDFGAKGIEAVLRSCLHLEELSVKRLRGLAESEPISVSSPRLQSLSLKDLYNGQCFSCLITQSPNLKTLKIIRCAGNWDIVLQDVPRDSLLAELHLEKLQVSDWGVAALYGLEVLYLAKAPEVTDIGLAELAAKSPRLRKLHVDGWKANRIGDRGLAAVAQKCSSLQELVLIGVNLTSLSLELIATNCPTLERLALCGSDTFGDAEMSCVASKCSALRKLCIKACPVSDAGMNKLAEGCPRLVKVKVKKCRRVTSECAEHLRASRNGALAVNFDTPGGAGELQDGRSVDDSGALDNAGSDVLPEDLDDRIGPDLSSGSSGRPSRWKALMGALMLRSFSVSIFQRQPRGACSTSHES

SEQ ID NO: 17492 - protein, 450 aa, Zea mays
  VARIANT 429..450: note = Derived polymorphism lacks residues 429 to 450
  VARIANT 354: note = Ancestral polymorphism is L, Derived polymorphism is Q
  VARIANT 326: note = Ancestral polymorphism is A, Derived polymorphism is V
  VARIANT 322..450: note = Derived polymorphism lacks residues 322 to 450
  VARIANT 303: note = Ancestral polymorphism is T, Derived polymorphism is S
  VARIANT 297..450: note = Derived polymorphism lacks residues 297 to 450
  VARIANT 287..450: note = Derived polymorphism lacks residues 287 to 450
  VARIANT 267: note = Ancestral polymorphism is C, Derived polymorphism is Y
  VARIANT 241: note = Ancestral polymorphism is T, Derived polymorphism is I
  VARIANT 231: note = Ancestral polymorphism is R, Derived polymorphism is W
  VARIANT 136..450: note = Derived polymorphism lacks residues 136 to 450
MSREGVVRCKDATAAADELPGLLRYRSAPSMLLGEVMCGDQDFPAAAGGEGHGPPDHAATAHRQHPRALSHRAPLRGPGLKASLPRRGRSLHGRSCRLATTVAVAHVPVATAADRDRHAWLCMMLLEFGYMPESRQSYIDKFSAIGIKICIFSWVMSALSWVDVMAASCMDDERVSGEVREQEDDDDKVPQLSAAAMEALREFLAGQHRPKEQNEAGGGEDEVELVPEDWRLSQFWYDERTARELVEEVVRLVSPSGSGSVAGVMACIACLTLYAYLKKTDPGVPAQLLEYDERFGQYGCDFTFYDDNRPEELPAAMKHAYRVIVADPPYLSKECLEKVAKTVSFLARPEGSFLLLLIANQMDQSLSDLCLVNFCYWIQVELASMYRSLNMPITRKASLHRFLEKRKDRLNANGPYQTSPSDAAPVKKEPESQAWLGLGPNAVKSNLNLS

SEQ ID NO: 17493 - protein, 181 aa, Zea mays
  VARIANT 30: note = Ancestral polymorphism is I, Derived polymorphism is V
  VARIANT 50: note = Ancestral polymorphism is R, Derived polymorphism is H
  VARIANT 54: note = Ancestral polymorphism is V, Derived polymorphism is I
  VARIANT 78: note = Ancestral polymorphism is K, Derived polymorphism is N
  VARIANT 86: note = Ancestral polymorphism is L, Derived polymorphism is P
  VARIANT 88: note = Ancestral polymorphism is K, Derived polymorphism is M
  VARIANT 90: note = Ancestral polymorphism is R, Derived polymorphism is T
  VARIANT 108: note = Ancestral polymorphism is R, Derived polymorphism is C
  VARIANT 111: note = Ancestral polymorphism is R, Derived polymorphism is L
  VARIANT 124: note = Ancestral polymorphism is K, Derived polymorphism is T
  VARIANT 137: note = Ancestral polymorphism is K, Derived polymorphism is M
MLDKLGRAFAPKPSSGPHKSRECLPLILIIRNMLKSALTYREVISILMQRHVLVDGKMSFPSLRQTRTTGCFRLYPIKDEDAKFMLCKVRPIQFGQKGIPYMNTYDDRTIRYPDPLIKANDTITIDLETNKIMDFIKFDVGNVIMVTGGRNTGRVGVIKNREKHKSSFETIHVLLGGFCYV

SEQ ID NO: 17494 - protein, 202 aa, Zea mays
  VARIANT 1: note = Ancestral polymorphism is M, Derived polymorphism is I
  VARIANT 27..202: note = Derived polymorphism lacks residues 27 to 202
  VARIANT 28: note = Ancestral polymorphism is E, Derived polymorphism is K
  VARIANT 30: note = Ancestral polymorphism is A, Derived polymorphism is V
  VARIANT 33: note = Ancestral polymorphism is P, Derived polymorphism is L
  VARIANT 40: note = Ancestral polymorphism is L, Derived polymorphism is Q
  VARIANT 52: note = Ancestral polymorphism is R, Derived polymorphism is C
  VARIANT 77: note = Ancestral polymorphism is A, Derived polymorphism is V
  VARIANT 97: note = Ancestral polymorphism is I, Derived polymorphism is V
  VARIANT 110..202: note = Derived polymorphism lacks residues 110 to 202
  VARIANT 117..202: note = Derived polymorphism lacks residues 117 to 202
  VARIANT 122: note = Ancestral polymorphism is E, Derived polymorphism is G
  VARIANT 160: note = Ancestral polymorphism is D, Derived polymorphism is G
  VARIANT 163..202: note = Derived polymorphism lacks residues 163 to 202
  VARIANT 166..202: note = Derived polymorphism lacks residues 166 to 202
  VARIANT 178: note = Ancestral polymorphism is H, Derived polymorphism is N
  VARIANT 186: note = Ancestral polymorphism is S, Derived polymorphism is Y
MALQRLVQAAVWFLGENANYAASEYAWESATPPGTALMMLDADKMVAAASSRNPTLASALTRLQRCAFSGSWEIRIAAVQALTTIAIRSGEPYRLQIYEFLHALALGGVQSNFSELQLSNGENQGASGTGLGSLISPMLKVLDEMYRGQDDPARDIRQHDNSKQEWSDEELKKLYETHERLLDFVSLFCFVPRAKYLPLGPT

SEQ ID NO: 17495 - protein, 168 aa, Zea mays
  VARIANT 141: note = Ancestral polymorphism is A, Derived polymorphism is V
  VARIANT 165: note = Ancestral polymorphism is L, Derived polymorphism is I
MDLASLLLSQLLLLPVVTVVSGETAAHPGYAHAEEACSGMLEAEAEKATVLVPAPERREEFDGGRIVDISHYYREDMPEWESSEGSGEFLQLARSMRNGSDIANFSELRLTAHSGTHVDAPGHVFEHYYDTGFDVDTLDLAVLNGPALLVDVPRDKNITALAKILTFF

SEQ ID NO: 17496 - protein, 607 aa, Zea mays
  VARIANT 39: note = Ancestral polymorphism is K, Derived polymorphism is E
MSNLDSATPAAAVAEIGTAERDSTTASVSALNGTHRCKKKKIKKNTTREQQELQLDLDSTLTAEAEGQVEAKGNEVEEQDATDAVASGICACTHPLTFAIVWLLPTMLKIKLKVSERVLIIVGFLILVMEGTAKYYEEDSKVKVSLMPEKEANTTVVSVSESTPKHKKRRKKKNKIQGQLDSAKASSSVVSMDIIAADKSENGCTDVVGASGHADINMDPINGDDLSSAQSKANDADVLLKNKDGNKGDKNCAENSVLLQESSARRKRRRGKRKWGSAGGGPGFSSDNGGVVAEHSLHSSANHGLSCICAPCLVEAHEKKIQNIYSPRGSLVRFQRKKLLILDLNGLLADINQDYHNAHLAHAKVRTKLVFRRPYCDDFLRFCFQNFELGIWSSRKRERKKTDQWVLGLFNSRVIDMWDLTGMVAYNEMLNAGTGSDLEEALVVDSIIARGGEDMSYCTVTGCKTIDNKDKPLVLKELKRVWNKDEPDLPWGQGEFSPSNTLLVDDSPYKALCNPPNTAIFPEPYNYMNQRDDYSLGPGGDLRVYLQRIAAADNVQNFVRDNPFGQKSITESDPNWNFYVKIVDKMEKQIVDQVETKIVDEVERSLG

SEQ ID NO: 17497 - protein, 1065 aa, Zea mays
  VARIANT 755..1065: note = Derived polymorphism lacks residues 755 to 1065
MPAKYLGALAEDRRPDLYRQVGCVTGILQAFDRRHHLASSHKRLLPPTAGHAPSNPSKGGECTRYSPQVVLEKNSSKTWADSQRAPATELSQTSYSSSPSSSFSSLDGNRSTQQDLSSTDRMLFPERPFKSSPKLKSSFDSDNGLDYPDDALTKSKNMPIVQSSLPTLGIRNLVKDSIYKDSHELSVRISTEEEVKDHPSNCGDQPMQLNGPHHDSTQGKSKGLMDINESLRVLAKLREASWTPPESVHHARLSYDAPRFSYDGKEATSKLREVPRLSLDIKEGHLWNREIDSRLDPSLSSADRNSNTVTGSNAAFETQQEQPACKRLPSVVAKLMGLEELPEHNQSTASSHACNTVQENKQDAMLNSLSISYQYEHAPQQERNPDSTVRNLPNSKFPVQTAPWKQQERIVLPRKLPKGSKGAHGREPAAPWNQLKDLDFQQPNKDLRALKQILDSAKGLLENKKREEAFMPKLYNGNHDDQEMASANMRLNRNTNNMWMPEESNAESSFKSPIVIMKPSKSANLYSKVDSSVFPLGGSSDLPQPQTSNSTDRRKASTINRTAKGQYAKLSPRVPTSQPLVSCDRRSYGRNDDSSNNQKSSSLLVTESSTRRQQLPRNSSVSMQKNKNSTSPKLLQRKLDPERRARPPIPSAESNKSERQSGDRNNSETVSPRSKFRRKLVRPQGDDGMPIGLNNRTRSLYQHDNDMSIRSDGSISVASELDIISNDRSTGVNISNFEQGIGTPSGRNPQKVKTSYDANMDVPSVDPSAAISERPSPVSVLDSSFDQEDLFPTSRTPNSLAVDDERETLEEPWKPSVAIQSKNNKLANVASLLEKLQQLSVNKDEDAPPVDHIAFLCETESPDHRYVSEILLASGLLMKDLGSGQTGLQLHSSGYPINPDLFHVLEQRKAGWVSTPDGIHQSRSGTKSDPRRAHRKLMFDTVNELLLQKFEKETAVYALSSFTRAKDPPAKTFSGQQLPKFISSGIEELDMERSSISQKDSSVIPDAEILRRLQGWTSFSKELPGMVLEIERSIFKELVDEVVHGESADGPEMKAAGRRRRRLFA

SEQ ID NO: 17498 - protein, 902 aa, Zea mays
  VARIANT 103: note = Ancestral polymorphism is G, Derived polymorphism is D
MMETIMVSAACGVMNSLLRKLATLLEKEYMLLKDVKHNITFLRNELASMNLLLFKLADIEDLDVQVKEWRNKVRELAYDIEDCIDNFMVNDRPNRSLIRKTIGRIKKLWFQHDIGKQIQELRTRVVEESDRRYRYKLDDSTFRPEMMEIDHRLKALYVDTNKLEGIDSPVEQIIQWLTGNGKHDQELNIMAIVGFGGLGKTTLAMQVYNKFKDKFDCTAFVSVSRGPNIKKVLMDLLKDVGAAIDTTDDEMRLINKLKGHLTKKRYFVVIDDLWDVSAWSFITCAFHQNNRGSRIIITTRKIDVAKACCLSSGDHIYEMQPLSVAASERLFFKRIFGSEERCPSHLKEASIKILRKCGGLPLAIITVSSLLASKDLTLDQWNRVANSIGSTLENNPDIEVMRKILSISYFDLPHYLKTCLLYISIFPEDYIINRKSLIVRWINEGFVQEEYGKNAHDIGESYFNELINRRLVQPWFIDHDSGSVVTCRVHDMILDLIITKSVEENFVTLLDSRELTSSPQNKIRRLSIQCGDGEPPALVLEESTSLSHVRSVTIFGHGKQLPSLSNMKALRVLDLEGCKGLENHHLENIERLIHLKYLNLRETEITELPKQVVKLQYLDTLDIRNTGVSELPPAIIQLRQLARLFIDLDTRLPYEIGKMQNLEELTHVNTCMYHMNFLKKLAQLSKLRELEISWDHYGTRVDKVSYAELPSSYLASCSFCTSKTPLRHEQQRTISKVPTWVGSLVNLQELSFRITKMTQDDLDVLGDIPALRSLAFHMEICTKTTPWEDPRPEDWLRIRKGFQSLNSFRFECGPWEWMCLIFEAGSMPKLEILDLEVPSVENYLIQKLGFDLGINNLSCISTVTLRFSNRGCSQENEVAIRKSVSIHRNRPALEIIRKKARS

SEQ ID NO: 17499 - protein, 826 aa, Zea mays
  VARIANT 291..826: note = Derived polymorphism lacks residues 291 to 826
MHAACHGITSSPLNLTSTAMAGTNGTARLLQLLAIATSSLPLLQLLVLLQLLCLASALNQDGTLLLSFKLSLVSDPLASLSGWGYADATPCGWNGVVCSPDSRVVSVVLPNAQLVGPVARELGLIEHLRHLDLSGNALNGTIPSDLLRAPELRVLSLAGNGITGDLPEEVGQLRSLRALNLAGNALSGTVPQNITLLPNLTAVSLASNFFSGALPGGTFPALQVLDVSANQLNGTLPSDFGGAALRYVNLSSNRIAGAIPPEMASHLPANVTIDVSYNNLTGAIPALPPFSAQKPTALVGNAELCGRPLDSLCGFTSSSAVEPPNGTAKSPPAIAAIPRDPTEAIPGDGTGSVTGASASGGQRGRMRLATIVAIAAGDVAGIAILFVVVLYVYQVRRRRQRQEVAKQRMGVVFKKPEPDESPDAVGRSLSCCLRKKASDGAEEVTDTSASFAAKEGNTDRNSKAGVDAAACKKKGGDGAVLVTVDGGPELELETLLKASAYILGAAGRSIVYKAVLADSAPLAVRRIGSDCAGIRRFSELDAQMRGVAKLRHNNILRLRGFYWGPDEMLIIHEFAVNGNLANLSVKRKPGSSPINLGWSARVRIARGVARGLAYLHDKKWVHGNVKPSNILLNADMEPLLADLGVDRLIRRADGGLMRPSAAAVRFGSKRSAKSLPDLSPPRSHVGTAPSASPVASAPADTAAHYRAPEAVRSTKASGKWDVYSFGVLLLELVAGRALTSLELCQCAAEDMAQALRVVDPALRGEMEGREEAVASCLRLSAACCAMAPSKRPSIKDALQAMERIPAAAEASASSSSISTAAQSHDS

SEQ ID NO: 17500 - protein, 609 aa, Zea mays
  VARIANT 186..609: note = Derived polymorphism lacks residues 186 to 609
  VARIANT 142: note = Ancestral polymorphism is T, Derived polymorphism is I
  VARIANT 140: note = Ancestral polymorphism is G, Derived polymorphism is R
  VARIANT 137: note = Ancestral polymorphism is T, Derived polymorphism is I
  VARIANT 47..609: note = Derived polymorphism lacks residues 47 to 609
MISLLRRALAASASSPAATYRRLLVVAPLSPRAAPPGPCQAPAAGSQEPPRRAFHCSTAPLGFRSTPASWAGPCPGEGEGEGVDTGAEKGLEIARLGTSPRIVEKLAARGITRLFPIQRAVLEPAMQGKDMIGRARTGTGKTLAFGIPIMDKILSYNEKTGNGRNPLAIILAPTRELARQVEKEFRESAPLDTLCVYGGVPINQQMRALNYGVDIVVGTPGRVIDLLRRGVLNLSQIQFVVLDEADQMLAVGFDEDVEVIMEQLPQNRQSMLFSATMPSWIRKISNKYLKDPVIIDLVGDSDQKLPEGISLYSIASDNFGKPSIIGPLIKEHANGGKCIVFTQTKREADRLAYVMGRSYQCQALHGDISQNQRERTLSGFRDGRFNILVATDVAARGLDIPNVDLVVHYEIPNTSELFVHRSGRTARAGKKGSAILIYTYEQTRAVRVIEQDIGCRFTELPKMPVSDEAADMFNVMRDTRSRSVGSRRTGGPFSREGYGDFEDHRSRGFGDFERFGGSSDRGGGFRDSGSRYHGGSGGFRRSSSDFGRPSFSRSDRFGDFGDSDFSRRGNADFGRSRSSDDSGSSRYPRGYGGSGTSDSGNFGGFKGSK

SEQ ID NO: 17501 - protein, 466 aa, Zea mays
  VARIANT 157: note = Ancestral polymorphism is A, Derived polymorphism is P
  VARIANT 144: note = Ancestral polymorphism is R, Derived polymorphism is C
MEEAATDREQGKDDDVDAAAGSLTYEIFSLLESKFLFGCDAVRPSGRRLLPPATASASTGKVCVLSIDGGARAADGLLAGAALVRLEAALRRRSGSPAARLADFFDVAAGSGAGGVLAALLFARGPPMFSADDALAFLLRRARRHRFAGGLGLLRLAHRGRPFPSSSSSSAAAAAFGRALGDLTLRDTVRPVLVPCYDLATRAPFLFSRADAAERAAHDFRLRDVCAATCAAGAGRVVEVASVDGATRVRAVGGGGALGNPTAAAITHVLNNRREFPGAASIDDLLVLSIGTGAGAGEPEAASIAAEGVSDMVDQAVAMAFGRSRTTNYIRIQGTGGRCGGGRAPRACGGEAKQQAVWKAEAMLLQRGVESVLFQGRKLSGETNAEKVERFAREMAKEHARRKKKKQQQQQMGPCLPVVAAATSGAAAPPNNDKQPPPPLPTTTTANAAKKKHTPATSRLDGGGTR

SEQ ID NO: 17502 - protein, 76 aa, Zea mays
  VARIANT 65: note = Ancestral polymorphism is S, Derived polymorphism is L
MPPLCPHNPHASMSSSPCPRSRFTLQKSLYGGQIDTRRNNRGEELLFNSSKQAFWYGAEQHSWLSVVKSAGSENDV

SEQ ID NO: 17503 - protein, 247 aa, Zea mays
  VARIANT 35: note = Ancestral polymorphism is I, Derived polymorphism is V
MLPTTASKGRGASRSAPPLFGPYLRRIVKWQQMDIEYTFWQMVHLCTSPKVVYQHTKYHKQTKNQWARDDPAFVVILILFLVFATSAYCAAYGESASHAALTITSVVFLHFLFAGIVLATLCWFLTNSYLREEPNSHVVEQRVEWLYAFDVHCNSFFPAFVILYVVQYFLSPLLVAHGFFPALLSNLLFVVAISYYHYLNFLGYDVLPFLDRTTFFLYPIGLVIILSPLMILIGFNPTRYFLSLYFG

SEQ ID NO: 17504 - protein, 155 aa, Zea mays
  VARIANT 78..155: note = Derived polymorphism lacks residues 78 to 155
  VARIANT 87: note = Ancestral polymorphism is R, Derived polymorphism is C
  VARIANT 113: note = Ancestral polymorphism is R, Derived polymorphism is S
MDHGSGSRDLGGEQRGRRALMPGVASDHESGSRDLGGEQRGRRACAAADHGGNESASESGAEGEDRSKMVLLEEPAVQAKRLLEQRCADKVERAAKSISRISLDVDKLTTKARKGCIVWGGRASRGEGDGAKNGGGVVASSKICVGGEGMASWGW

SEQ ID NO: 17505 - protein, 200 aa, Zea mays
  VARIANT 46: note = Ancestral polymorphism is N, Derived polymorphism is I
MAAQVQLRIQHYETNMESLEQMKNSKDRNIDPCSIMIDVAMYDEGNPIMEWLCSSRSESLLTLDENDEPESPNGPSGFVLEELGGLNEEDIVLLNFRIGYRRKKVRKRKVAEEDIGDDFLLDSSEGASSPTYDESGDIESNDGGGDDEDGDPSGPSSAARPPTHNGPGQDEQPAALRPRSKRQKKLSIKGLYMLEKVKYI

SEQ ID NO: 17506 - protein, 405 aa, Zea mays
  VARIANT 305: note = Ancestral polymorphism is H, Derived polymorphism is Y
  VARIANT 281..405: note = Derived polymorphism lacks residues 281 to 405
  VARIANT 235..405: note = Derived polymorphism lacks residues 235 to 405
  VARIANT 194..405: note = Derived polymorphism lacks residues 194 to 405
MLPALPSRVKEELCPRKFCRCVAGLLCTSSSRGGSPKDSTKRWTATRWVEALALFLRCCGIRTAKIKCTWLTILLIVVLLLTHRKERPWLMPTHLLVVLMWCLIDMMDFYRLHIFVTICEILLVRNLCRMLLVMRGVSRLKENLGHILGSVEACRKVPNHVKDLMSQKVTDGRIRRARGKKLRLFVEKEVSAIRHGYQSARIPFDEEAQIDMAMRNSLRDSFSTLEHDSCSPFDKSTGSASGAASCSTGKQSRLSRYYKNTQDTSRGPFDIDLARSRTQVQPHIDVMLERGHKEKLGIALAKKFHANDIPGRKADCPYFRSALKLAQQLGDGVPIPRGREIDGPLLDMNYANMVAHMAKFKEDWKDYGVTVMCDSCTGKHLLSYLTLLYVGIDNDLTFVFYVLIV

SEQ ID NO: 17507 - protein, 350 aa, Zea mays
  VARIANT 142: note = Ancestral polymorphism is K, Derived polymorphism is R
  VARIANT 145: note = Ancestral polymorphism is G, Derived polymorphism is R
MQRLTGRDMWDVEECQSPRMGSVILGVDGGASNTVCVCIPAAMPFNDPLPVLSRTVAGCSNHNSVGEDRARETLERVMSQALLKARRRRSNVCAVCLAVAGVNHPVDQQRMLDWLRDIFPSHVKLFVENDAVAALASGTMGKLHGCVLIAGTGTIAYGFTSDGREARAAGAGPVLGDWGSGYGISAQALTAVVRAYDGRGPETVLTNNILDFLGLASPDELIGWTYEDQSWARIADLLPVVVESAESGDEVANKILHNSVGELASSVKAVVQRLDLGGEDGKHPFPLVMVGKVLEANKKWDIGKEVIDCVTKNYPGAYPIHPKVEPAVGAALLAWNAIASELDGDIRTVQ

SEQ ID NO: 17508 - protein, 720 aa, Zea mays
  VARIANT 547..720: note = Derived polymorphism lacks residues 547 to 720
MLQVVDERTDPFLGRLTRPATIDQSHNFFSDVTNNFKDFSTVVSELHQHLLDANVEVTYTEYLDLMKVEVDQHLNKLSEDIRDLKSCNLAHKYDTDGSCCTACHVGKLAEIDDRFNSLKFLLAVVFRQIREILTVVNSSIHDLQWEHELQSEVTGIIIGDCIRGLQDELERKLYEQSSMVNSLRKNCQETVAQFASIREELIAISNILLPSEEEPQISLCRHESLGNWSDRWKFSFFRKRAHQDHSLSSTQNQNSATQKSISPSEVISERSDFRHLKGMTRHEMLNYFRSEISKLRRLHELDLQEKTEELFKFKREKWSLALKYDVEFEPLRRKFPEVISRFDQIMSNGMAAAVPTICSNSDAFDETSRLSSIIDSLYRENQHLHCLLAEKMKNIQELSSQISDSTRKMSLQYSLEKQILRQLNSTQVEYEDLFVESTIRDEIYQTVVRTLVDSHRNVLEDTTQTFRAKVSSLEAALSEKDKALCLSDEENQMLKEKLSTLEKEHFIQNNQQDLELIKQESEEMVLRDIEMEPQRSCEISDRDIQYEGLIKLNQVLEIASTTAKEIETKRLNLSDIQGKREQEKQLDCILVSIMDLSKEFMETEHRVPKDIKGNEKKTDNLHDQCNYMIQQAIVLTKKGLWYKQMLDTKRSELRKAESEVDIMGDKVNALLSLVQKIYVTLEHYSPVFQHHPVLLDAFLKTCKLVAGIRSRQKKDLQDTI

SEQ ID NO: 17509 - protein, 466 aa, Zea mays
  VARIANT 346..466: note = Derived polymorphism lacks residues 346 to 466
  VARIANT 208: note = Ancestral polymorphism is D, Derived polymorphism is A
MAIRMPALIFRRRAAAAAPKPIQQYLAGLSTAVEHVIPEDNGHIAGGEENKKRWVELPPFAPLDANATARAISRGDGGEGACSNATAIRWVRHCCPHVPASLVQKLFRLRKVKKNLVTADTSSTDSITLQLRLRRVSAKDELVPGDILFLPVNIQESSVTEKTKKFGNKNEIDFLRDLEIYKDRAIIVLNKPPGMPVQGGVGIKNSIDILAPMFENGSSEVPRLVHRLDRDCSGVLVLGRTQFSASLMHAIFREKTADALGDGTQQVLQRKYVALVIGRPRHPKGLLSAPLAKVVLQDGRSERLTVCAGSNTASVQDALTEYRVIESFPQGYTWLELFPRTGRKHQLRVHCAEVLGTPIVGDYKYGRQAHQNWMPLPMPQTIDKEMLKKRKLPFGLTLGGGSVAEQQPQLHLHCKQMILPDISAAMQQLRSSDADHDFSDLEKLSFVAPLPLHMQLSWKILLSVGK

SEQ ID NO: 17510 - protein, 440 aa, Zea mays
  VARIANT 198: note = Ancestral polymorphism is T, Derived polymorphism is A
  VARIANT 101: note = Ancestral polymorphism is L, Derived polymorphism is P
MVRPGKALAAPQLLLLVFLCLLAGGARASPPTDALRRVSPRAGAGGLCQQLLLPQGYPCTEHTVRTSFPLPVLDLLVSCSREDLSITLLQVQTDDGFLLSLQHIPHGRNGIADNTGPPVFLQHGLFQGGDTWFINSNEQSLGYILADNGFDVWVGNVRGTRWSKGHSTLSVHDKLFWDWSWQDLAEYDVLAMLSYVYTVAQSKILYVGHSQGTIMGLAAFTMPETVKMISSAALLCPISYLDHVSASFVLRAVAMHLDEMLVIMGIHQLNFRSSDMGVQILDSLCDDEHLDCNDLLSSITGQNCCFNSSRIDYYLEYEPHPSSTKNLRHLFQMIRKGSFAKYDYGWWGNLRRYGQLRPPSFDLSSIPESLPIWMGYGGLDALADVTDVERTIKELRSTPELLYIGGYGHIDFIMSVKAKEDVYVDLMRFLRAQQGMHSSY

SEQ ID NO: 17511 - protein, 361 aa, Zea mays
  VARIANT 153: note = Ancestral polymorphism is A, Derived polymorphism is G
  VARIANT 158: note = Ancestral polymorphism is R, Derived polymorphism is W
  VARIANT 168..361: note = Derived polymorphism lacks residues 168 to 361
  VARIANT 178: note = Ancestral polymorphism is R, Derived polymorphism is W
  VARIANT 191: note = Ancestral polymorphism is S, Derived polymorphism is Y
  VARIANT 221..361: note = Derived polymorphism lacks residues 221 to 361
  VARIANT 243: note = Ancestral polymorphism is R, Derived polymorphism is W
  VARIANT 245: note = Ancestral polymorphism is Y, Derived polymorphism is S
  VARIANT 265: note = Ancestral polymorphism is G, Derived polymorphism is V
  VARIANT 268..361: note = Derived polymorphism lacks residues 268 to 361
  VARIANT 270: note = Ancestral polymorphism is S, Derived polymorphism is G
  VARIANT 340..361: note = Derived polymorphism lacks residues 340 to 361
MELCPRVPSRERPLPWCTMPRPPCSPSRPSRDPPSPLPPSSRPRSIDGRCRPAILASLPATRGASLCRIFYLFTSKVPGTEPSRILEPSRILEISHWHLVTVSGGWASDAAGRYRCLELDHPCKAPWCDGPLGALESNGWVYSAHCSFKLFVADASWWCLDGKWLFFWGDSNHVDTIRNLLTFVLGITDTSAVTRQFDAVFTNPIGGAGTLRITSIFNGHWNMSMNYLGLHSLRNRGFRQLIRSYFMSGDRVPDVMVLNSRLHDGCYWTSVRIYAQAADFAAQFWSGVMDKVRARGHAVPRVFYRTQMPQGGIDAGKNHATPFTELRDEAGVTYSHPQGWVTLQTLPNEVLVVLRKVIRFC

SEQ ID NO: 17512 - protein, 984 aa, Zea mays
  VARIANT 732..984: note = Derived polymorphism lacks residues 732 to 984
  VARIANT 549..984: note = Derived polymorphism lacks residues 549 to 984
  VARIANT 164..984: note = Derived polymorphism lacks residues 164 to 984
MHAGRLVLRSSQTTPLPALAPARPRGLAWSLGPLTRPGANAAAMREEVRSSAAAAPDPPPGRSASPPPTPVASSAGASSPPAQTNVASIDWLDSDQVSKAGSSHIAPPTSRPALSTNANGAAMDCLQSSCRPWERGDLLRRLATFKPSTWASKPKAASSLACARRGWVNIDMDKIECESCGAHLIFIALTSWSPAEVISAGEAFAEQLDASHQNNCPWRGNSCADSLVQFHLTPSALVGGFKDRCDGLLQFTSLPAIALSAIESMKLTRSVQIDRVLSQSVTVLSGELGYRTDSTTGIDIAQQDETCCYSQAQKLISVCGWEPRWLPNVQDWEENSTRSARNAGSAEPDGQFHSQFPEHHQNSNSVSIKKDKGKGKMHVKDSGCSMRSPLLDCNLCGATVRIWDFRSVPRPSHFSLNNIDMPDTGRKPVLVRGISATSGINGLVTEGAERENIEGRDEAGIVEGKSLSNAQVDLNLTMAGGLPSNNSALPPMPGHLNYGGMGRDLIIGQPTGSELGGRAASIESRGPSSRKRNLEEGGSTADKPISRLQPADSIEGTVIDRDCDEVDDAAQDSGARSKRSRCFNLFDINRPSSSGAGPSRNLSFDLDIDVNRFDTSNAEVPSALRNPFPRDSMRESSVIAMDTVHGMEENSMESVEYHPCDVDDVNKPSSALRSGLMSDTLDPNYSNQAQQSSFVQPAAETESNAREIGGSSMNGGEEVLNAETTPAFARDQLSLGVSGGSVGMGASHEAEIHGIDVSGHKTGSVVGDADPIPELIETMGHTGESAPGPALMDEFVPEEVGREGPNGDSQDMASRLAVRADSGSKICGSTKADSVESGEKTSRENSAHPSLSCNARVFSGIDASKDEVTGIMLTNDDYDPGSGLGATNGGNDYETGLPDFDPIRHHNDYCPWVNGNVAAACCISTGSSTALSGWQLTVDAIETLQSLGQAQNQTMQSDSAASLYKDDHVPPSRKLLKSANHSKS

SEQ ID NO: 17513 - protein, 174 aa, Zea mays
  VARIANT 56: note = Ancestral polymorphism is I, Derived polymorphism is T
  VARIANT 103: note = Ancestral polymorphism is Y, Derived polymorphism is C
MATSRLALVSVFAAAVLLGMASAATYNVGEPAGSWDLRTNYGTWVSSKRFHPGDQTVFKYSPQAHDVVEVNKADYDSCSIASPVATHNSGNDAIALASPGTRYFICGFPGHCDAGMKIQINVVPSANSLGPASAPAANSPVSPPPMSAPSSAATKATGFGALAAVMIAAGLMAY

SEQ ID NO: 17514 - protein, 174 aa, Zea mays
  VARIANT 100: note = Ancestral polymorphism is G, Derived polymorphism is S
  VARIANT 95: note = Ancestral polymorphism is A, Derived polymorphism is G
  VARIANT 5: note = Ancestral polymorphism is R, Derived polymorphism is W
MATSRLALVSVFAAAVLLGMASAATYNVGEPGGSWDLRTNYGTWVSSKRFHPGDQIVFKYSPQAHDVVELNKADYDSCSNASPVATHSSGNDAIALASPGTRYFICGFPGHCAAGMKIQIDVVPSANSLGPASAPAANSPVSPPPMSAPSSAATKATGFAALAAVMIAAGLVAY

SEQ ID NO: 17515 - protein, 591 aa, Zea mays
  VARIANT 57: note = Ancestral polymorphism is S, Derived polymorphism is R
MGGGGGDEKAHRDLSVASFSSLYRPSSLPVEFSFGSDSSESRKRSLPRGVVSIGAISLAGGLVLSAVNDLAIFNGCTTKAIEHAADNPAVVEAIGVPIVRGPWYDASLEVGHRRRSVSCTFPVSGPHGSGFLQIKATRDGEDGLLSFLRHHDWKILLLEAHLEAPSDDEDQRKLVKSHTSDHAVASSPATSSSSAPSSCRNNDRRAPPERQAPGEEKSRRRNDSVDNSNLVDLVNDIVAESVSYRHRRVAEDILKMEKAGKVTARAFTYAELSEATGGFRPESLLGEGGFGPVYRGRLGSSSGPEVAVKQLDRNGMQGTREFLVEALMLSLLKHSNLVTLLGFCTDADHRMLIYEYMPLGSLEDHLLDLPPGRAPLDWATRMRVAQGAARGLEYLHDTARPPVIYRDFKASNILLDTGFRARLSDFGLAKVGPVGDKSHVSTRVMGTYGYCAPEYALTGKLTTMSDVYSFGVVFLEIITGSRAIDTTRPPEKHNLVLWAAPRFKDKRRFAEMADPLLKGAYPTKGLYQALAIAAMCLQEDATMRPAISDVVTALDYLTVAGGGAAANEPPAPNPNQQQQQTDIIGHAGEQA

SEQ ID NO: 17516 - protein, 90 aa, Zea mays
  VARIANT 63: note = Ancestral polymorphism is I, Derived polymorphism is N
  VARIANT 23: note = Ancestral polymorphism is V, Derived polymorphism is L
  VARIANT 16: note = Ancestral polymorphism is R, Derived polymorphism is T
  VARIANT 12: note = Ancestral polymorphism is E, Derived polymorphism is D
  VARIANT 6..90: note = Derived polymorphism lacks residues 6 to 90
MKKLVQDLSVIEAALRTSSKLVVSSNGKRVRRLHPLPHKELKDSKKSTVLVENLPPDFSMESIQEKIATVGKFSQAHVLIEYEVVEAAEK

SEQ ID NO: 17517 - protein, 91 aa, Zea mays
  VARIANT 12: note = Ancestral polymorphism is A, Derived polymorphism is T
  VARIANT 55: note = Ancestral polymorphism is S, Derived polymorphism is N
MIYKTFPLCEAAEAHRLMEASTHIGKILLLPLHLWRLRSYSRRSQFKNICNFCDSLHGCCTGVACLFYISCSTRLDLLPREIILSIGSLKC

SEQ ID NO: 17518 - protein, 266 aa, Zea mays
  VARIANT 128: note = Ancestral polymorphism is R, Derived polymorphism is L
  VARIANT 88..266: note = Derived polymorphism lacks residues 88 to 266
MASAKLLYIVVVDEDASSFRYTRSLLHSTLQLMGCKRRHAFEVRPSAAGCKVFDVIRGDQQGLGDTATSARVRRYEVAEATPTTSSRQFQFELYKRRTTVLLPRDLFLDLVLDLDALALYKFVAPNQRTDLMLACRIRERKESITVLCGTSGKSTLSMLLGSRLGITTVVSTDSIRHMMRSFVEENKNPLLSASTYHAGECLDPVAVAEAKARSKVKKRSGVSSNSNIDYAKSGALTEKVDGKSIGKKQMAIEGYKAQSEMVIDFD

SEQ ID NO: 17519 - protein, 257 aa, Zea mays
  VARIANT 130: note = Ancestral polymorphism is G, Derived polymorphism is S
MEHYDSYLCSGSMHSYGGVGGATDAALDAGGDDMQRLLNALMDDMAAESDSFSDDMEAASSESSSSACSANSQQEATRRPQQQPDGGHSNGSNKSSKKQHQQQSPAPYIGVRKRPWGKFAAEIRDSTRKGARVWLGTFDSPEAAAMAYDQAAFSVRGAAAVLNFPVERVQESLRALALSSASSAAGSPVLALKCRHSIRKRSPNKNKNKKQERQQQVAVAAAGPQQPPCPTSVVELEDLGADYLDELLRVSSEFHWQ

SEQ ID NO: 17520 - protein, 80 aa, Zea mays
  VARIANT 57: note = Ancestral polymorphism is S, Derived polymorphism is N
  VARIANT 46..80: note = Derived polymorphism lacks residues 46 to 80
  VARIANT 36..80: note = Derived polymorphism lacks residues 36 to 80
MLLGTNLAGFVLSIANDIGGSRAMMSYLSILLRQDQYSQGIIRYLELPPSEAFQVDSFIAKSYHEDVKISLHVKIRVKGL

SEQ ID NO: 17521 - protein, 227 aa, Zea mays
  VARIANT 108: note = Ancestral polymorphism is A, Derived polymorphism is V
  VARIANT 123: note = Ancestral polymorphism is C, Derived polymorphism is Y
  VARIANT 167: note = Ancestral polymorphism is L, Derived polymorphism is S
  VARIANT 192: note = Ancestral polymorphism is R, Derived polymorphism is W
  VARIANT 194: note = Ancestral polymorphism is E, Derived polymorphism is D
  VARIANT 204..227: note = Derived polymorphism lacks residues 204 to 227
MDRLFRRKVAVSDAHFCGAGLYLEPKAFAEEGVVAGSYKVRYCGGSEAEHEDIHSLRRRGSLAVTKGLSCSLRRSAFLIWVSSFCLRACGSISSPAARKYGYKDYPTAIFLLFHFPSGAESFCMYTTCWIELLDLPCELNTHKKYIYGPARALHVPWHRPLSQALVLWGEHDQIFHVEKAFKVARELGANARLEVLEDTGHMPQEEDLKRSRPPQLLASCSTIIFVI

SEQ ID NO: 17522 - protein, 114 aa, Zea mays
  VARIANT 93: note = Ancestral polymorphism is R, Derived polymorphism is S
  VARIANT 87: note = Ancestral polymorphism is Y, Derived polymorphism is N
  VARIANT 78: note = Ancestral polymorphism is T, Derived polymorphism is I
  VARIANT 59: note = Ancestral polymorphism is W, Derived polymorphism is L
  VARIANT 44: note = Ancestral polymorphism is A, Derived polymorphism is V
  VARIANT 32: note = Ancestral polymorphism is L, Derived polymorphism is V
  VARIANT 25: note = Ancestral polymorphism is P, Derived polymorphism is L
  VARIANT 2: note = Ancestral polymorphism is A, Derived polymorphism is V
MAAGAFCVTKAMQHELAQNWGIGMPDEDFSIVLEAVLMYDRRVAAALGEDDSTDEEQLWIDIKNGKQFVYPRLLFIVTGKGPDRKKYEDQIKRLKLRRVALRTMWLASEDYPLL

SEQ ID NO: 17523 - protein, 158 aa, Zea mays
  VARIANT 2: note = Ancestral polymorphism is L, Derived polymorphism is R
  VARIANT 5: note = Ancestral polymorphism is V, Derived polymorphism is A
  VARIANT 6: note = Ancestral polymorphism is V, Derived polymorphism is I
  VARIANT 7: note = Ancestral polymorphism is K, Derived polymorphism is R
  VARIANT 12: note = Ancestral polymorphism is P, Derived polymorphism is L
  VARIANT 16: note = Ancestral polymorphism is A, Derived polymorphism is V
  VARIANT 20: note = Ancestral polymorphism is A, Derived polymorphism is V
  VARIANT 29..158: note = Derived polymorphism lacks residues 29 to 158
  VARIANT 30: note = Ancestral polymorphism is A, Derived polymorphism is V
  VARIANT 36..158: note = Derived polymorphism lacks residues 36 to 158
  VARIANT 44: note = Ancestral polymorphism is T, Derived polymorphism is I
  VARIANT 51: note = Ancestral polymorphism is K, Derived polymorphism is N
  VARIANT 60: note = Ancestral polymorphism is A, Derived polymorphism is V
  VARIANT 81: note = Ancestral polymorphism is T, Derived polymorphism is N
  VARIANT 107: note = Ancestral polymorphism is F, Derived polymorphism is S
  VARIANT 108: note = Ancestral polymorphism is S, Derived polymorphism is R
  VARIANT 135: note = Ancestral polymorphism is F, Derived polymorphism is I
MLVRAVKLLKNLHFMAKPAAIDLIRSIIQAEGASTEQALSSALTSIMDALNSTDWNTRKAVSLALSSIAISSGYLVTSFRNSCLRSLECSKFDKVKPVRDTIIYMQFSCEKLFQGLILLNHEAGSSTKEQIPKRFHTMRLTYDATTKIEVDGDEDGGG

SEQ ID NO: 17524 - protein, 642 aa, Zea mays
  VARIANT 117..642: note = Derived polymorphism lacks residues 117 to 642
MHEILAGMSTHIIQLLQGLCSDGLWRYGVFWSFKSETNGWILTWGDGYVNKMIEDWQMGDLSASPTVRKNQTIPSSWCKKSYPFCPIEAALMRMPSHLYPLGEGIIGKVALTGQHCWISANELCSTAMHKYQEDWQLQFAAGIKTVLLVPVVPHGVLQLGSLDTVFESAVLVALIKDMFHKICDASVSHASLSTGSAYSNNLSLPTATLSINHPDVNLIYSSAQIVNADHHSLTHPFSTSEIPILEDITIGSYRTIPTGWPNGLLGDNGTIGHEYFEGFSLTDMAHWNQENTHGSTIVVNDGAMLSNTSIHSEFHGDVMVMSREEHELFTWRCRLKQEPTSPALPQLNDNSADLYVQLETNNYAELLLDTIIYQTGHTSNIESAPSAESPISCKTQVKKDHSLRVDESPISDIPGRQDLSPISINEGFISCAMTDGRVEINKTIPEECLVENTHRINSAEIKRRCRKVELQRPRPRDRQLIQDRMKGLRELIPNASKCSIDALLDKTIAYMLFLQSVSEKAEKIQNTLEDKESHDETKKQLERCPLRVEELNQPGHLLIELHDSRSFRDSLFACFILIQMLCEDYEVFLEMAHVLKGLKVSILKGVLEYRSDKFCARFVIEGSDGFNQMQILCPLMHLLRRR

SEQ ID NO: 17525 - protein, 324 aa, Zea mays
  VARIANT 31: note = Ancestral polymorphism is A, Derived polymorphism is V
MGSRYEVEVTVGSARDLKNVNWRNGELKPYAVVWIDSGAKCSTRVDLDNGENPTWDEKLLVPLPPTSRLDDAVLYIDVVHANAAEGVKPLVGSARLPLRDVLDDAGIGGKASRNLRLKRPSGRPHGHLDVRVAVKEPSRYYDPNPYPAPAGYANAGTRDPYGSSAAAGGYYGSGGGYGSGGGYGGSGSYGAAQPYTAAPPAGYPSTYGSAPPPQPGYGAPPVAAAYGAPPVAAAYGAPPVDAATAAYGTSAVGADGKKKNKMGMGTGLAVGAAAGVLGGLALAGGASYLEDKFEERVSERVEENLEREDSYGGGYDNYGGDDDY

SEQ ID NO: 17526 - protein, 211 aa, Zea mays
  VARIANT 62: note = Ancestral polymorphism is E, Derived polymorphism is V
  VARIANT 104..211: note = Derived polymorphism lacks residues 104 to 211
  VARIANT 166: note = Ancestral polymorphism is R, Derived polymorphism is H
  VARIANT 206: note = Ancestral polymorphism is G, Derived polymorphism is R
MRKPASTPATVLSSHPLTLRLLARLLALLAPRLIRPSHPALSSLPLHPTSPQPTMRPLYGCEPDAFTYRYLVHGLSAQGRTRNARELFDEMRGSGLLGSHTSSQCITMMEAVNDGGDLHISVTMPSIEGTCLNLLGVRGPNRDSPGANARDVGVVHILGNTVIGARRDLGFIKKIAINYLYAFLRKIYRENNTIFNDPHESLLNVGQVFYV

SEQ ID NO: 17527 - protein, 353 aa, Zea mays
  VARIANT 55: note = Ancestral polymorphism is I, Derived polymorphism is S
MMTSWLLGRRGPSGFSWSSTADQVTQGISAAGLTAIVTGPYLFPNISSSFFIVFIISNPAQSHPGASSGIGAETARTLALRGAHVIMAVRSLPAAQAVKDAVLAQAPGAKLDVMELDLSSMASVRAFASQFIDRGLPLNILINNAGVMAIPFALSKDGIEMQFATNHVGHFLLTHLLLDTMKRTSHESNLEGRIVNVSSEGHRLAYREGIRFDKINDESVYSSIGAYGQSKLANILHANELARRFELLVNKDHWAVTEDNVNITANSLHPGSIITNLLRYHSILDVLHRTLGKLVLKNAEQGAATTCYLALHPHVKGVSGKYFCDCNLYEPSANAKDMELAKRLWDFGVELIT

SEQ ID NO: 17528 - protein, 585 aa, Zea mays
  VARIANT 411..585: note = Derived polymorphism lacks residues 411 to 585
MEGGAHEFDGSTFKECFSLSWRNPYVLRLAFSAGIGGLLFGYDTGVISGALLYIRDDFVSVDRNTWLQEMIVSMAVAGAIIGAAIGGWTTDRFGRRASILVADSLFFAGAAVMASATRPAQLVVGRVFVGLGVGMASMTSPLYISEASPARIRGALVSTNGFLITGGQFLAYLINLAFTKAPGTWRWMLGVAALPAVVQFGLMLALPESPRWLYRQGRAEEAEAILRRIYSAEEVEREIEELKESVAAERGSSEKLSLVALVRTATVRRGLVAGVGLQVFQQLVGINTVMYYSPTIVQLAGFASNQTALALSLVTSGLNALGSVVSIYFIDRTGRRKLLVISLVGVILSLGVLTAVFHETASHSPAVSATETARFDASLTCPSYRPSSPASGGASWDCTRCLKAAAGSSECGFCASGAGRLLPGACLVSNNTVRDACHGEGRLWYTRGCPSRYGWLALLGLALYIIFFSPGMGTVPWIVNSEIYPLRYRGVCGGAAATANWVSNLAVAQSFLSLTEAIGTSWTFLIFGGLSVAALAFVLVCVPETKGLPIEEVEKMLERRELRLRFWAPRHTQDNGKESGKNAGV

SEQ ID NO: 17529 - protein, 231 aa, Zea mays
  VARIANT 25: note = Ancestral polymorphism is M, Derived polymorphism is V
  VARIANT 39: note = Ancestral polymorphism is P, Derived polymorphism is L
  VARIANT 97: note = Ancestral polymorphism is P, Derived polymorphism is R
  VARIANT 102: note = Ancestral polymorphism is E, Derived polymorphism is D
  VARIANT 139: note = Ancestral polymorphism is T, Derived polymorphism is I
  VARIANT 199: note = Ancestral polymorphism is F, Derived polymorphism is S
  VARIANT 204: note = Ancestral polymorphism is L, Derived polymorphism is H
MATSDELAQIDISKEEKDKLVAEVMRYVLFKTHQSSDCPIKREELTGIITKNYRQRALPTLVINEAKERLAATFGYEMRELQRTRAPATRSGRPAQRQFNADAKSYVLVSMLDPEVYSKYVEDKAAAHLSGFAFAVIGIIHLAGGKMPEEDLWHQLKRVGLNETDEAHLVLGNNKQALEHLVQQRYLLKEKIAGPEGHFVMYELAERALDESISVKIKDHISQVVGTCLQK

SEQ ID NO: 17530 - protein, 79 aa, Zea mays
  VARIANT 19: note = Ancestral polymorphism is D, Derived polymorphism is G
  VARIANT 24: note = Ancestral polymorphism is R, Derived polymorphism is K
  VARIANT 47: note = Ancestral polymorphism is P, Derived polymorphism is S
MRKHGWQLPYHPLQCSATDWLTDKRAAGGCDSRVLGTGVHLLVFFVPFVGTKPFQIVAMAIYTPLVYPYMPSIFEMKPN

SEQ ID NO: 17531 - protein, 222 aa, Zea mays
  VARIANT 184: note = Ancestral polymorphism is R, Derived polymorphism is M
  VARIANT 56: note = Ancestral polymorphism is I, Derived polymorphism is V
  VARIANT 52: note = Ancestral polymorphism is V, Derived polymorphism is I
  VARIANT 6: note = Ancestral polymorphism is E, Derived polymorphism is A
MAAAAEVVLLDFWVSPFGQRCRIALAEKGVAYEYREQDLLDKGELLLRSNPIHKKIPVLLHAGRPVCESLVILQYIDEAWPDVAPLLPKDDPYARAQARFWADYIDKKIYDSQTRLWKFEGEAREQAKKDLVEVLETLEGELADKPFFGGGALGFVDVALVPFTSWFLAYEKLGGFSIQEHCPRIVAWAARCRERESVAKALSDPAKVLEFVQFLQSKFGAK

SEQ ID NO: 17532 - protein, 418 aa, Zea mays
  VARIANT 236: note = Ancestral polymorphism is T, Derived polymorphism is M
MGEITNVMEYQAIAKQKLPKMAYDYYASGAEDEWTLQENREAFSRILFRPRILIDVSKIDMTTTVLGFKISMPIMVAPTAMQKMAHPDGENATARAAAAAGTIMTLSSWATSSVEEVASTGPGIRFFQLYVYKDRKVVEQLVRRAERAGFKAIALTVDTPRLGRREADIKNRFVLPPHLTLKNFEGLDLGKMDQLNVCAPIEHGQAADSGLASYVAGQVDRTLSWKDVKWLQTITTLPILVKGVLTAEDTRLAVANGAAGIIVSNHGARQLDYVPATISALEEVVKAARGQLPVFVDGGVRRGTDVFKALALGAAGVFVSYLPTLLPSADTTTAQTSNNVFIIRLPGLPSSDWLTYVGRPVVFSLAAAGEAGVSNVLRMLRDEFELTMALSGCTSLAEITRKHIITESDKLSAIPSRL

SEQ ID NO: 17533 - protein, 246 aa, Zea mays
  VARIANT 191: note = Ancestral polymorphism is V, Derived polymorphism is G
  VARIANT 189: note = Ancestral polymorphism is Y, Derived polymorphism is N
  VARIANT 20: note = Ancestral polymorphism is H, Derived polymorphism is Y
  VARIANT 5: note = Ancestral polymorphism is Y, Derived polymorphism is C
MEALYLLASLAATLVTSAFHSLLLLLRLLLRYPRRAAPTDDGPAAAARLYEGRVRHARRRPAAHTFEYPARYALVDLDRLPLPGHLSADDARRVASTSGPVHLLTVPESVGYEQNPLSIYYCYDSAGQGQDGELRTCIAEVTNTPWAERVMFTFQPGSDLIAKPLHVSPFMDMLSNWSIRADAPGDRLYVVISVQHPTLGDYFTAVLDAKLVGQTSNSLRLATFFWLMPHKVAAWIYWEVRVLCVM

SEQ ID NO: 17534 - protein, 410 aa, Zea mays
  VARIANT 111: note = Ancestral polymorphism is H, Derived polymorphism is N
MRRVRVSSHQAPVHKLGDGQMKLTPRFRLAATPASSSGPQQASWEAAEALIPGLPDDAALNCLLRLAVESHGACRLVCRRWRHLLADKARFFAQRRALGLRAPWLFTLAFHRCTGEIQWKVLDLGQRSWHAIPAMPCRDRACPRGFGCVAVPAAGDGGDALVVCGGLVSDMDCPLHLVLRYDVCRNRWAVMARMLAARSFFAGGVIDGRVYVAGGYSADQFELSSAEVLDPAGAGAWRPVASMGANMASADSAVLGGRLYVTEGCAWPFFSAPRGQVYDPRADRWEAMPAGMREGWTGLSVVVAGRLFVVSEYERMKVKVYDPETDSWDTVGGAPMPERIMKPFSVSCVDSRIVVVGRGLHVAIGHVREEPAGGGPGSRGAPGYSVCWQDVDAPKEFSDLTPSSSQILHA

SEQ ID NO: 17535 - protein, 94 aa, Zea mays
  VARIANT 4: note = Ancestral polymorphism is A, Derived polymorphism is V
  VARIANT 13: note = Ancestral polymorphism is R, Derived polymorphism is H
  VARIANT 28: note = Ancestral polymorphism is T, Derived polymorphism is M
  VARIANT 32: note = Ancestral polymorphism is G, Derived polymorphism is V
  VARIANT 50..94: note = Derived polymorphism lacks residues 50 to 94
MMAAWGGVSDLARAEAGDHGRASVDRPTVTPGTLERVRIPQSHGLHQRFCQQCSRFLDHLIISMVCWHWKNFCAGAVIKKVTVLLIYIQFIQSA

SEQ ID NO: 17536 - protein, 21 aa, Zea mays
  VARIANT 1: note = Ancestral polymorphism is M, Derived polymorphism is T
  VARIANT 8: note = Ancestral polymorphism is T, Derived polymorphism is P
  VARIANT 17: note = Ancestral polymorphism is R, Derived polymorphism is H
MDKGSDYTKKETERLHRMLEK

SEQ ID NO: 17537 - protein, 117 aa, Zea mays
  VARIANT 75..117: note = Derived polymorphism lacks residues 75 to 117
  VARIANT 50: note = Ancestral polymorphism is R, Derived polymorphism is C
  VARIANT 45..117: note = Derived polymorphism lacks residues 45 to 117
  VARIANT 25: note = Ancestral polymorphism is G, Derived polymorphism is S
MLIVLIWQYDFSPFTVLIIAILNDGTIMTISKDRALIFVTRSRSWSFVERPGLLLVTAFLLAQLVATFLDVYANWGFARIKGIGWGWAGVVWLYSIIFYFPMDLIKFFIRFVLSGRA

SEQ ID NO: 17538 - protein, 139 aa, Zea mays
  VARIANT 20: note = Ancestral polymorphism is L, Derived polymorphism is H
MQKVRPTNHFVISKDFDELLKMATADKREKLEVFTKEVIRFGNRCKDPQWHNLDCYFEKLACELAPRSYLKGKAESVMLKLVTCVQNTVELYHELHALDRLEHDYRLKQKEHDGLSLRGDSLDILKQETILDCGVLWKQ

SEQ ID NO: 17539 - protein, 91 aa, Zea mays
  VARIANT 2..91: note = Derived polymorphism lacks residues 2 to 91
  VARIANT 33..91: note = Derived polymorphism lacks residues 33 to 91
  VARIANT 38: note = Ancestral polymorphism is C, Derived polymorphism is Y
  VARIANT 39..91: note = Derived polymorphism lacks residues 39 to 91
  VARIANT 46: note = Ancestral polymorphism is G, Derived polymorphism is D
  VARIANT 59..91: note = Derived polymorphism lacks residues 59 to 91
MYTRFASWGSSIFGPPSLATGGGWPFWEGARRWTFRCCCTGKILLGISNLFIFSLDQSRIKPIDLHANIVATNVTYEYTICKSTSDFAARL

SEQ ID NO: 17540 - protein, 241 aa, Zea mays
  VARIANT 108: note = Ancestral polymorphism is Q, Derived polymorphism is R
  VARIANT 93: note = Ancestral polymorphism is M, Derived polymorphism is T
  VARIANT 78: note = Ancestral polymorphism is G, Derived polymorphism is R
  VARIANT 42..241: note = Derived polymorphism lacks residues 42 to 241
  VARIANT 32: note = Ancestral polymorphism is R, Derived polymorphism is I
  VARIANT 8: note = Ancestral polymorphism is C, Derived polymorphism is Y
MANIIRKCWDPNLDKRPDMDEVVRLLEALDTRKRGGMTPKGQAGGQGGNLLIDLFRHCDNPLGEKQVNNPFFHKTPSGSARQPLQLTNDVTKMMQKHQLETPQFHQTRFSVLLNVPRSIEKFYFHVVAGIHLRDVSFLIPHSWLLAMLDDQMSFPSLRQTRTTGCFRLHPIRDEDAKFKLCNGRSVQFDVGNVVMVTGGRNIGHVGVIKNWEKHKGIFEVIDVLLGAFCMLCLVFSYLLYR

SEQ ID NO: 17541 - protein, 122 aa, Zea mays
  VARIANT 83: note = Ancestral polymorphism is G, Derived polymorphism is V
  VARIANT 68: note = Ancestral polymorphism is E, Derived polymorphism is G
  VARIANT 46: note = Ancestral polymorphism is V, Derived polymorphism is I
  VARIANT 45: note = Ancestral polymorphism is R, Derived polymorphism is H
  VARIANT 25: note = Ancestral polymorphism is T, Derived polymorphism is M
  VARIANT 23: note = Ancestral polymorphism is R, Derived polymorphism is W
  VARIANT 22: note = Ancestral polymorphism is G, Derived polymorphism is S
MLPALNLAGDVVVMDRVSMRLGRVTPRDIVLMISPEDPRKWLVKRVVGMQGTPSPTLSTPTTATPPPEPSCLDISIERLKEHGITTKKSSQNLKGGQVAVRSTTGYPNGHRVKEPHRAAPHR

SEQ ID NO: 17542 - protein, 380 aa, Zea mays
  VARIANT 178..380: note = Derived polymorphism lacks residues 178 to 380
  VARIANT 95: note = Ancestral polymorphism is N, Derived polymorphism is Y
  VARIANT 93..380: note = Derived polymorphism lacks residues 93 to 380
  VARIANT 90: note = Ancestral polymorphism is G, Derived polymorphism is R
MTKEVLESDVYEVFERIQDPNLVYPDYYLNPFHAYDEGNISWLVAVETEPATMSIAKRAIPEATPIEEASQIIRDNWLNVIEEHHLKYSGNSQVNDILDIGCSIGVSTRYLTEKFPSAQAVGLDLSSYFLAVVAQREEKLSRPKPIRWVHANGEATGLSSNSFDLVSLAYVCHECPARAITGLVKEAFKVLRPGGTIALTDNSPKSKVLQFVVGASPTTFKTILSKHAQEESKALTRKTRILDVVYNSSNNELVRTQTLVNSAIVQVDAAPFKQWYLTHCGVDIGRKKKMHVAKKDATEEQDGEAIVEETKKSNHVQKKIEKRQQDRAVDTHIEEQFGSGRLLACISARPGQCGRANGYILEGKELEFDMKKLQSITHRK

SEQ ID NO: 17543 - protein, 94 aa, Zea mays
  VARIANT 68..94: note = Derived polymorphism lacks residues 68 to 94
  VARIANT 36: note = Ancestral polymorphism is L, Derived polymorphism is I
  VARIANT 34..94: note = Derived polymorphism lacks residues 34 to 94
  VARIANT 29: note = Ancestral polymorphism is R, Derived polymorphism is Q
  VARIANT 20: note = Ancestral polymorphism is T, Derived polymorphism is M
  VARIANT 14: note = Ancestral polymorphism is P, Derived polymorphism is L
MVLTVFICPISLEPMVDPVTLCTGQTYERANISWWIALGHRTCPTMMQELSDDALTPNATLRQLITAWFSRRYTRFNKRSADFHGRATDLVHGL

SEQ ID NO: 17544 - protein, 264 aa, Zea mays
  VARIANT 118: note = Ancestral polymorphism is P, Derived polymorphism is L
  VARIANT 135..264: note = Derived polymorphism lacks residues 135 to 264
  VARIANT 150: note = Ancestral polymorphism is E, Derived polymorphism is D
  VARIANT 152: note = Ancestral polymorphism is P, Derived polymorphism is S
  VARIANT 157: note = Ancestral polymorphism is P, Derived polymorphism is L
  VARIANT 166: note = Ancestral polymorphism is R, Derived polymorphism is H
  VARIANT 172: note = Ancestral polymorphism is G, Derived polymorphism is E
MSAPTRRDSVVSPDHAGRSSAPLHHTTVSGLKGVIDKAEPHRALELIWLGTSLGDGLGDGLVGSGKGSQLPQGRDAGLALEGLSPRHRRALEAVDEIGGTTVEVRGALIKPCVPAGEPGGDELSESGVGGEGIVRELLHHGRAGPVAQGDPPRDIGPLIRLPRAERHRIHHGLEGYGANEDCQHHGLEGEAACPRAGGRFMVAAVKGIRSTSLGIRGRAWRERRIHKDGGSYGRRAEDECRGWKERGCGWMMEGARLWDAGLPG

SEQ ID NO: 17545 - protein, 573 aa, Zea mays
  VARIANT 336..573: note = Derived polymorphism lacks residues 336 to 573
  VARIANT 354: note = Ancestral polymorphism is R, Derived polymorphism is W
  VARIANT 381: note = Ancestral polymorphism is L, Derived polymorphism is P
  VARIANT 382..573: note = Derived polymorphism lacks residues 382 to 573
  VARIANT 516..573: note = Derived polymorphism lacks residues 516 to 573
MASSISAPAPPAAPATAPASGRPKKPSQFNPSTGKTRTPVPARPMRAAAPKWNPLQRLAAAALDALEEGLVAGVLERAHPLPRTADPAVQIAGNYAPVGERPPTGELPVSGRVPACLDGVYVRNGANPLHAPRAGHHLFDGDGMLHAVRLRGGRAESYACRFTETARLRQERAIGRAVFPKAIGELHGHSGVARLLLFGARSLCGVLDASQGIGVANAGLVYHNNRLLAMSEDDLPYHVRVTADGDLETAGRYDFGGQLDTAMIAHPKLDPATGELFALSYNVVSKPFLKYFYFTADGRKSPDVEIPVDAPTMMHDFAVTENHAIIPDQQIVFKLQEMVLGGSPVVYDRNKTARFGVLPKRATDASRLRWVDVPDCFCFHLWNAWEDEATGEVVVIGSCMTPADAVFNESAAGEESFRSVLSEIRLDPRTGTSSRRAVLSDADQVNLEAGMVNRQLLGRRTRYAYLAIAEPWPKVSGFAKVDLEAGTVDKFIYGDGRYGGEPCFVPRPDAPAGAAEDDGYVLCYVHDEARGASEMLVVNARDMRAEAAVKLPGRVPYGLHGTFIAGKELQRQA

SEQ ID NO: 17546 - protein, 257 aa, Zea mays
  VARIANT 23: note = Ancestral polymorphism is R, Derived polymorphism is S
MILLFPCCRCSEASTWDSQVLSRHAECLELEELTAISVNPSLLPALNQLLLEAYAILRPKPLDYDQRNTLVDVFRKMVNQRFGSGIFCGVLPIVSARVPILKVIDRGTGVECDISVENKDGMTRSMIIKFVSSLDERFQILSYLVKFWAKVHDLNTPRQLTMSSMSIISLVAFHLQVPWVNYYFVQTRHPPILPAFSDLLKDGLDCESIERNALRFRDFGSRNKESVAELFVSLISKVSNYKVHLLLMFAVEVTCHN

SEQ ID NO: 17547 - protein, 328 aa, Zea mays
  VARIANT 194..328: note = Derived polymorphism lacks residues 194 to 328
MAPQRRDRCRSPAPHPAPHPYSLRRVPGRIHNPIRIVPAPPLHILKRTTISKPHKAAELLSAESLWEHGLCASNFEASWISKTWKKGVGNLSVEDFLDRSQNFARSVGKVQMQKICKCLRECALNLLDFMRGKMDTTKLKTLLFGRLSPDELVSKPRLKHVKRKRNWERTPQGGRCVLQKSAKHAGSATGSDSLPTPNKVLHHALHYRVAGHQSSIHQFVPIIRWPRIIPSGFGYGLSLGIPSVAPHLGKGILGKPPIIPSGFGYGLSLEIPSVAPHLGNGILGKPPSNITPLDQRSSTQLVHVRNPHQHTCQQSCGGAMEPSSSGVA

SEQ ID NO: 17548 - protein, 341 aa, Zea mays
  VARIANT 151: note = Ancestral polymorphism is R, Derived polymorphism is M
MATAAAAVTATFRTLIQHAAACGAPVPLPSVRFQSLQRHRVGLRRFAPPRGRPVLPPPFAAEDFSSYVDDFSGDDGEEHFDEEEGSEPEEEAEAPRAYSSPRSRPPRGDDPGRLFVGNLPYTYTSEELAQVFSEAGRVDDAQIIYDKVTNRSRGFAFVTMATAEEAAKAIQMFDGALLGGRTARVNYPEVPRGGERRTVTMSGRRRDDGTYKIYAGNLGWGVRADTLRNVFEGRAGLLDARVIFERETGRSRGFGFVSFSTAEDAQAALESLDGVELEGRSLRLSLAEQNPPPGSPPSTAQAQQEETDSGAPAGGGTEAASSSEPSEAEVGESNLQTAANY

SEQ ID NO: 17549 - protein, 189 aa, Zea mays
  VARIANT 94..189: note = Derived polymorphism lacks residues 94 to 189
  VARIANT 103: note = Ancestral polymorphism is G, Derived polymorphism is R
  VARIANT 115: note = Ancestral polymorphism is G, Derived polymorphism is D
MPMAASVLLAAPATSPPLTWQRWAPLLAPSKKPTAIAVPRHAAAPRKSDGGGKKQLNLFQRAPAAALDAFEEGFVANVLERAHGQPSTANPAVQIAGNVVPIGERLPVRRLPVSGRIPPFISGIYARNDVNPCFDPVAGHHLFDGSASKLQPATLELCSVAPLGPQPRQQNHPHRSPPPSPPAVQQAAA

SEQ ID NO: 17550 - protein, 421 aa, Zea mays
  VARIANT 325..421: note = Derived polymorphism lacks residues 325 to 421
  VARIANT 322..421: note = Derived polymorphism lacks residues 322 to 421
  VARIANT 284..421: note = Derived polymorphism lacks residues 284 to 421
  VARIANT 252..421: note = Derived polymorphism lacks residues 252 to 421
MAGRAARGGRAGRGWPGGRGGRAGRRGGAGGRARAKPAGAGTLGQARDHVGADTTRSRHGGATGPGRLNRPGAAELAGRRAAEPGAGRAQGPSGSPGNRAGGAERARPGSPGAGPSRTREGEGRLAGGAAGRGGGLVTGGGAEGRGQAGAGSPERGRGGRARGVGAGEGGARPGGVGRAGGAGAAERGRGGRAGRRGGTGGRAGAEPGGEVWGVSCTFGGGEIDHSQWFMINTMEHKDLDRMEGVYRLLLHERKLMQDVTSDAKFHAPIQYERDVFTALGTTKWQLEQFEREVNAAAFSDKSKSRENAILKFRQFIRAIADQISQVEESLESLRLGSSRTQKHLYSSEHDGDGLASFLSGPSSKDDHAYHSTGTDEIVELKLDNVTLVNGYHSTQEHTTYEHRNSDKDLEGQLISRWSGRT

SEQ ID NO: 17551 - protein, 31 aa, Zea mays
  VARIANT 6..31: note = Derived polymorphism lacks residues 6 to 31
  VARIANT 30: note = Ancestral polymorphism is V, Derived polymorphism is A
MKPYLQIGSSSWIPGTTSLRQPSIAIFTYVF

SEQ ID NO: 17552 - protein, 86 aa, Zea mays
  VARIANT 18: note = Ancestral polymorphism is R, Derived polymorphism is P
MANAGLRAYREVLRLVRRLPAETQPYYAKYARQNFVNYRDLAADDDLGALLRRAYTHSTWVLSKYSIDAGKVAVRLKDLTDGHAVM

SEQ ID NO: 17553 - protein, 143 aa, Zea mays
  VARIANT 15: note = Ancestral polymorphism is M, Derived polymorphism is R
MWTSVVSSWLVQELRLLMQQLGHDLDQEEPRTYRHSHVGSPIANSPPGAWAQYSSPTDSNMLQAFTRSPTGNGMSPIRIPSLISNAPKIAPIGKDSNRSKYDQVFSNGNQSLGAAFQHSHSYQDHNSEHMSSSPGTLSGPQFL

SEQ ID NO: 17554 - protein, 351 aa, Zea mays
  VARIANT 115: note = Ancestral polymorphism is L, Derived polymorphism is R
  VARIANT 221: note = Ancestral polymorphism is E, Derived polymorphism is G
MAASSPMVLSLLLLASLTALLVLAPRLSPPQPPTGEQAPAAPGGGGGEEEEEADDLRLFRRAALESSAAGGPPKVAFLFLTNSDLTFAPLWERFFAGNEARLRVYVHADPSARLLLPPTPSFRGRFVAARPTRRADASLIAAARRLLAAALLDDPGNAYFALLSQHCVPLHSFPRLYAALFPTPTRARSSYIEVLEGEPQMASRYAARGGEEGMLPEVPYERFRIGSQFFALARRHAVLVVRERRLWRKFRAPCVPEMAQDSCYPEEHYFPTLLDMADPGGVARYTLTRVNWTGSVAGHPHTYEAPEVSPRLIADLRASNHTHHPHMFARKFAPDCLGPLLAIADTVIFKD

SEQ ID NO: 17555 - protein, 137 aa, Zea mays
  VARIANT 111: note = Ancestral polymorphism is G, Derived polymorphism is R
  VARIANT 67..137: note = Derived polymorphism lacks residues 67 to 137
  VARIANT 20: note = Ancestral polymorphism is V, Derived polymorphism is I
  VARIANT 13: note = Ancestral polymorphism is Q, Derived polymorphism is R
MNKLLMEENDRLQKQVSRLVLDNGYMKNRLHSPSVATTDTTCECVVTSGQHNQQPSSSASSTKGCEQPSRVSLKPGYISNLILAVMLIFLLSSLLAIAEETLAEFMSKATGTAVNWVQMVGMEPGPDSALFRTTAAA

SEQ ID NO: 17556 - protein, 342 aa, Zea mays
  VARIANT 185: note = Ancestral polymorphism is L, Derived polymorphism is F
  VARIANT 146: note = Ancestral polymorphism is F, Derived polymorphism is L
  VARIANT 142: note = Ancestral polymorphism is W, Derived polymorphism is C
MGCCLHRRLCLGGTGTLPFVRRFTAKEVEAATRGFTAVLDAAGTAYRARFAGGLVATVVRRRRDADDNDDHHRQGEGGGGGTTDAFYLELQLLARLNHRHVVRLRGFALAHHARPVPFRPPTLSSFPLPSLCALSISASADWFLVFDHMENRSLKECLHDPLRTPLDWRTRLQVAIDVAAALEYLYYHCDPPVFHVSVNSGTVLMDANFVAKLSDVGVVSHDVRLATTDSFQDRVERRRAGLAFQYGVLVLELVTGQSPGADGELVRWAQDPGSAASVHRMVDADLGGVYDARELRDLVAVARLCTRDRDDRDEGAGVVTIPQIVRYLQGKLERIGCQARFG

SEQ ID NO: 17557 - protein, 290 aa, Zea mays
  VARIANT 272: note = Ancestral polymorphism is G, Derived polymorphism is V
  VARIANT 266: note = Ancestral polymorphism is G, Derived polymorphism is S
  VARIANT 261..290: note = Derived polymorphism lacks residues 261 to 290
  VARIANT 171: note = Ancestral polymorphism is R, Derived polymorphism is H
  VARIANT 170: note = Ancestral polymorphism is A, Derived polymorphism is T
  VARIANT 169: note = Ancestral polymorphism is A, Derived polymorphism is T
  VARIANT 158: note = Ancestral polymorphism is R, Derived polymorphism is K
  VARIANT 72: note = Ancestral polymorphism is S, Derived polymorphism is R
  VARIANT 62: note = Ancestral polymorphism is V, Derived polymorphism is M
MLPARIRRGSERNFIPLPQDTTTSAPAVRRGMRAQRARLAEALRLKMVQLAIHSCEKVRKAMVSGVKGLLSSCSSTLKRTKMLLLECLCVLACDDAAAVSEAAQDALDHLFNQGHNHVTENEISDTFTRFVPLPVLKQLKLMMACDNKVLIVLYIISRLVERLPQVVIAARFFDCLGLCIGHSSQFSGSMDKLIVSKPLSIGYLYSVAELKSGAYSKDTTNISLHATSTSAASKISVIHDNALPNALLGTVEYELPHVPPWFFHAGSQKLYGVLAGIIRLVGLSTVSGTL

SEQ ID NO: 17558 - protein, 151 aa, Zea mays
  VARIANT 2: note = Ancestral polymorphism is A, Derived polymorphism is V
  VARIANT 59: note = Ancestral polymorphism is T, Derived polymorphism is I
  VARIANT 61: note = Ancestral polymorphism is K, Derived polymorphism is R
  VARIANT 96: note = Ancestral polymorphism is E, Derived polymorphism is K
MVSKQTRRLLVLAAVAVCLHLPAASVATDVDYCSKKEYPVKVSGVQIVPDPVEPGKPATFKISASTDKTIEKGKLVIDVKYFFFYVHSETREICGEISCPATGDFVLSHEQTLPGFTPPGSYTIYMKMVGDDDEELSCISFGFSIGFVASS

SEQ ID NO: 17559 - protein, 320 aa, Zea mays
  VARIANT 8: note = Ancestral polymorphism is A, Derived polymorphism is V
  VARIANT 38: note = Ancestral polymorphism is V, Derived polymorphism is M
  VARIANT 151: note = Ancestral polymorphism is G, Derived polymorphism is S
  VARIANT 166: note = Ancestral polymorphism is E, Derived polymorphism is G
  VARIANT 184: note = Ancestral polymorphism is L, Derived polymorphism is R
  VARIANT 240: note = Ancestral polymorphism is A, Derived polymorphism is S
  VARIANT 253: note = Ancestral polymorphism is A, Derived polymorphism is V
MYLLGYIANQSRVYLIDKELNVIGYTLLLSLIEYKTLVMRGDLDHANKILSSIPKAQYNSFLHSFSVFRPTSCRVCSLLASVLVSLSYGSVAHFLESRGMLEEALEIATDADYKFDLAVQLGKLEVAKAIAIEAQSESKWKQLGELAMSTGKLMNDSLLAWVCQLEMAEECLLQAKDLSGLLLLYSSLGDAEGIEKLASLAKEHGKNNVAFLCLFMLDKVEDCIQLLVDSNRIREAALLARSYLPSKVPEIVAIWRDDLSKINPKATESLADPSEYPNLFEDWQVALTVEKSVASQRYTLSHKLLHFVLEYCLPEIKKIH

SEQ ID NO: 17560 - protein, 83 aa, Zea mays
  VARIANT 32: note = Ancestral polymorphism is R, Derived polymorphism is W
  VARIANT 33: note = Ancestral polymorphism is R, Derived polymorphism is H
  VARIANT 41: note = Ancestral polymorphism is P, Derived polymorphism is A
MEPMAIVTVTGGVLGPVFVLLSRIQPVVDFFRRLCDCLRHPQRRPARPLRAPWIRDNVELSLMRRAAVSIALPGVSSFSTLAR

SEQ ID NO: 17561 - protein, 102 aa, Zea mays
  VARIANT 4..102: note = Derived polymorphism lacks residues 4 to 102
MIVECLNWRIQNEIDSVLERPIALVDLYRSICDSQLIGLSGYTKEGLPIFGIGVGRSTYDKASVITLMLAICLVGYNYNQNHKSVWFEAIRTKPNKGMCYDS

SEQ ID NO: 17562 - protein, 162 aa, Zea mays
  VARIANT 5: note = Ancestral polymorphism is F, Derived polymorphism is I
  VARIANT 32: note = Ancestral polymorphism is L, Derived polymorphism is Q
  VARIANT 37: note = Ancestral polymorphism is A, Derived polymorphism is T
  VARIANT 44: note = Ancestral polymorphism is Y, Derived polymorphism is H
  VARIANT 45: note = Ancestral polymorphism is N, Derived polymorphism is S
  VARIANT 55: note = Ancestral polymorphism is A, Derived polymorphism is T
  VARIANT 58: note = Ancestral polymorphism is A, Derived polymorphism is T
  VARIANT 92..162: note = Derived polymorphism lacks residues 92 to 162
MGVRFNNFFDARMIVGVLETDAGDPALHLEFLANYIAELSLLEYSLLSYSPSLIAASAIFLARFVLQPTKYPWLLPDENDAVFVADDTLYIWKQNSTLAHYTQYKRSELSECVKTLHRLSSVGPGSNLPSITEKYSQHKYKFVAKKQCPPQIPAEFFKDAAC

SEQ ID NO: 17563 - protein, 329 aa, Zea mays
  VARIANT 70..329: note = Derived polymorphism lacks residues 70 to 329
  VARIANT 80: note = Ancestral polymorphism is G, Derived polymorphism is E
  VARIANT 83: note = Ancestral polymorphism is V, Derived polymorphism is A
MAGGHPAPLRPVVVAMKGHPGSGKSTAARAIATALCCPLLDKDDVRDCMLPLEGLAAAGMLNDLSYAVLWRMAERQVRLGLSVVIDSPLSRRSHLDMLTRLAGVLVVVVECRPGDNEEWRRRLESRGSAVANGGGGDGWHKPKTWAELERLLEGYQGCTDYEIGDVPRIVVDTTDPTVDAQVAAEKLLFSVSCCSVAVFHVLMSFVHLFVEQHSVLVSRSIEQAFLMASAGLKPGVPVILRELEPSSEMFKQGASLRVTGSLQSFDVESATATIQDGSVSLKVDTQHLRDVSFRTNSVYQFIGELQIREVDDVHDPPSSRFFIFWLQPV

SEQ ID NO: 17564 - protein, 339 aa, Zea mays
  VARIANT 25..339: note = Derived polymorphism lacks residues 25 to 339
MHCIAPRLLLLPLPTASRHALSPTQMPPLPPLLPSRACKFHLASARSPSHAAASVFGDDEDEVAHACRAAAARPCAFSLATTRSRPPPPARTASSLGLGVPNPPPRPPNACPRPLPTLIYLSLPLPLPFLLLPVAALLLLPQEYSPSIVARACDFVLHADLFVVFAVVFCWIGFVWIASEIGSMLLRVSHFMDGGSCGLEGASVVTSTTSAGIQLLPEKHYADEACGAMASSNGPEGVPVVTSADDPPTRADIPFLCNSVDETCEATGDDSAPLNAQICTGFSKLISLEVKKGLQKCATFPPSSGQPQQEDCSCSHVGDGLTGAPAFWRFVSLPVSTSC

SEQ ID NO: 17565 - protein, 107 aa, Zea mays
  VARIANT 95: note = Ancestral polymorphism is S, Derived polymorphism is N
  VARIANT 58: note = Ancestral polymorphism is M, Derived polymorphism is I
  VARIANT 48: note = Ancestral polymorphism is A, Derived polymorphism is T
  VARIANT 47: note = Ancestral polymorphism is V, Derived polymorphism is I
  VARIANT 42: note = Ancestral polymorphism is P, Derived polymorphism is L
  VARIANT 38: note = Ancestral polymorphism is L, Derived polymorphism is V
  VARIANT 32: note = Ancestral polymorphism is A, Derived polymorphism is V
MYMHSVGNSRMYLGKVSPTVKEQLTYLAKLEAVCAEDLDIDPDEVLVAISHFCFKNLMDESVTIDRPNPIDTVLKNIANMRPEVFIHDILNGSYSGAFFVSRFCEAL

SEQ ID NO: 17566 - protein, 81 aa, Zea mays
  VARIANT 13: note = Ancestral polymorphism is K, Derived polymorphism is N
  VARIANT 24: note = Ancestral polymorphism is H, Derived polymorphism is R
  VARIANT 29: note = Ancestral polymorphism is G, Derived polymorphism is E
  VARIANT 57: note = Ancestral polymorphism is G, Derived polymorphism is R
MAIKMKGIFKGLKIISQMFVHKEHEMEIGYPTYVKHVAHIGLGTSDTSPSWTAEFKGTDDSSAGSVRSTAAQSRQTSWTSA

SEQ ID NO: 17567 - protein, 219 aa, Zea mays
  VARIANT 196: note = Ancestral polymorphism is M, Derived polymorphism is T
  VARIANT 177: note = Ancestral polymorphism is R, Derived polymorphism is Q
  VARIANT 88: note = Ancestral polymorphism is G, Derived polymorphism is S
MDQYLRVERPRNESTIKENKYAAPVRIPTNSTVEDDKVALMMPEQVPSLTQVSPAQTQSTSPSPFSVNQLMAAIPRQEIRFKINPKLGSLGPQLQYSKIMDLALDKANREIILPVIQRSVTIASRTTKELILKDYALESNNNTITRFAHLMVGTLAGSLAHVTCKEPLRVSLYSNLRNLIQNLMSGSETIEQLIHMLINDNLDLGCAIIEAVATRQVAS

SEQ ID NO: 17568 - protein, 525 aa, Zea mays
  VARIANT 203..525: note = Derived polymorphism lacks residues 203 to 525
  VARIANT 249..525: note = Derived polymorphism lacks residues 249 to 525
  VARIANT 345..525: note = Derived polymorphism lacks residues 345 to 525
  VARIANT 410: note = Ancestral polymorphism is I, Derived polymorphism is T
  VARIANT 477: note = Ancestral polymorphism is T, Derived polymorphism is I
MARGIILLLLVTPLAISMALPSLSTRIEGSVIGERSNLFSQLHSDNSSPTENKLQPGEKSFASEAYAVNWNEPPDQQSQDSLEQLEPYRVIWKQPVQGEKSFVSEAYPAKWNKPPSPSKQSQDSFEPEAYRVKWNKSPPPHQQSQDSFESEAYRVKWNKSPPPHQQSQDSFEPEAYRVKWNKSPPPHQQSQDSLEQEAYRVKWNKSPPPQQQTQDSFEQEAYRVKWNKSPPPHQQSQDSFEPEAYRVKWNKSPPPHQQSQDSFEPKAYWVGWKKHAQGATDVADETTPARGHGLHVATGMLFTRKSLLPGTALPEGTKFCGHGFLDPERFELRADADAIPFSYSQLDTILRMFRIPRGSKKAEQVAATLRTCEAESPEAHACATSEQAAADFAASSLGVRASKLVALVTTVHGGKDATRYVVAPNGITRIGKAAGAAAVVPCHPMPYPYMVHYCHQPADVEALRVELTGLGDGGVTTAIAMCHANTMNWDDRYFQMLNVTRGEEICHFMPRNYVLWLPAAELLGN

SEQ ID NO: 17569 - protein, 248 aa, Zea mays
  VARIANT 22: note = Ancestral polymorphism is A, Derived polymorphism is D
MASSVSLRGAILQRPHLTPRPDARRAPTTRRRAVPAKICCIGWDPEGILGAPQGGHIARLEFRRRLERDSEAREDFERQVREEKERRRSEREARVIPDTDAGLVEFFLDTDAREIEIEIGRLRPRLSQDFFGHVSREIAQIKFAVTRTAEMEDRLIELEAMQKVLLEGVEAYDKLQNDLVTAKERLMKILQSSDRKSTLLEMVERNELNISILTLLDENIASAKTSNQDEAAAFMEDVRSSLVKYITI

SEQ ID NO: 17570 - protein, 531 aa, Zea mays
  VARIANT 426..531: note = Derived polymorphism lacks residues 426 to 531
MELASTMSVAMALAAAIFVVLCSVVASARGRREKALKLPPGPRGWPVLGSLGALAGALPPHRALAALAARHGPLMHLRLGSYHTVVASSADAARLVLRTHDSALADRPDTAAGEITSYGYLGIVHTPRGAYWRMARRLCATELFSARRVESFQDVRAQEMRALARGLFGCAAGRRAVAVREHVAGATMRNILRMAVGEKWSGCYGSPEGEAFRRSLDEAFAATGAVSNVGEWVPWLGWLDVQGFKRKMKRLHDLHDHFYEKILVDHEERRRLAQASGGEFVATDLVDVLLQLSEESTKLESESEARLPRDGVKALIQDIIAGGTESSAVTIEWAMAELLRHPEAMAKATDELDRVVGSGRWVAERDLPELHYIDAVVKETLRLHPVGPLLVPHYARERTVVAGYDVPAGARVLVNAWAIARDPASWPDAPDAFQPERFLGAAAAVDVRGAHFELLPFGSGRRICPAYDLAMKLVAAGVANLVHGFAWRLPDGVAAEDVSMEEHVGLSTRRKVPLFAVAEPRLPVHLYSATE

SEQ ID NO: 17571 - protein, 1104 aa, Zea mays
  VARIANT 394..1104: note = Derived polymorphism lacks residues 394 to 1104
MRASASAVPMEASASARRSAASPDPGAKKPRLAQPPARDPRSYAAAAAASNGGASAAEQALVDELLGQYRTALGELTFNSKPIITNLTIIAGENLQAAKPIAAVICANILEDQAAIYLHMKLQFCPPYYIIVILSNRSTISSFYVFDVPCTTFLFPVLFQKVLLQTEVYDTPSCTYEKYVHALVPSEQKLPSLYLLDSIVKNIGKDYVKHFSARLPEVFCKAYKQVDPSIHHSMRHLFGTWKGVFPLPPLQTIEKELGFQSSTNGLSGAAPSRTDSQSPRPSNSIHGILGSGAKTAVIADTDDDIERANRLGTERSAGRRLDAPNARPNIEHIQRDPFSNPIHEKLAGRDVRGLGFSNTSQQAVVGTGQVRSKPRGQDGIGGPYYASGVVSSEEKIDKRSNFYTSKDVRPSGSVHFDSALLPTRSINANRVGRPSSNKSWKHSEEEEYVWDDVPSKTTEYSGTHNIIKGEWMSDDGNAKFASLQSAKWADAGPVECIDPKTHKVDNVSRFGFAAGQERRISAYMDQEEYLLGKREVEARIDREIRPYGQQFPAARDSSLWVSQEKALPDNGLDPWVSKFSNQPAEMSICTGTMPASIISSVPVRLSGHYAGRSNLDTTNSVPIRSTEAFGQQKHRYWSSSPPQAHPPSSTAPFARQGSPNHDESDFYPSGSFSQLGQDPQEEYSQRALPVLAKGSHVVVHNDELTQGQPSLQATLQTQKYPIIQSKSHINPSDQLQASFLCENSPSLFRPSIQLGEVSLPSDSTPISSDLTSASNLLAGLIKSGFKPSNHSDAQPLGPSGSLLVASLSLQNAAGENTILQTQTPNTSRPPLPPGLPPPPSTQSAEKAAPLSSLLSSLVAKGLISSPASDSSDAVISQPNKESSINGKDVAASGVPLPALKSSFGKVSSSNSDSSAPPNASLPKAIEIEMGDLIGLEFKPEKLRKYHEHVISYLDDQSHQCKMCGNRFGLEELSLHTSSCGPRESRTIYTGIAPKRWYPSRNIYIDGSHEIEDSAEASDAGLGSAEVCEFMVHADERQIICALCGEPFDDVYSFEKGNWMYKDAVFLDYAKGKNSCGNNVKGEEHVPIVHVRCMPRGSNDGMDVD

SEQ ID NO: 17572 - protein, 119 aa, Zea mays
  VARIANT 107: note = Ancestral polymorphism is E, Derived polymorphism is V
  VARIANT 103: note = Ancestral polymorphism is T, Derived polymorphism is K
  VARIANT 96: note = Ancestral polymorphism is C, Derived polymorphism is Y
  VARIANT 95: note = Ancestral polymorphism is T, Derived polymorphism is I
  VARIANT 81: note = Ancestral polymorphism is L, Derived polymorphism is S
  VARIANT 65..119: note = Derived polymorphism lacks residues 65 to 119
  VARIANT 62: note = Ancestral polymorphism is C, Derived polymorphism is R
  VARIANT 57: note = Ancestral polymorphism is D, Derived polymorphism is Y
  VARIANT 56: note = Ancestral polymorphism is N, Derived polymorphism is D
  VARIANT 38: note = Ancestral polymorphism is L, Derived polymorphism is F
  VARIANT 33: note = Ancestral polymorphism is M, Derived polymorphism is I
  VARIANT 28: note = Ancestral polymorphism is L, Derived polymorphism is H
  VARIANT 23: note = Ancestral polymorphism is D, Derived polymorphism is N
  VARIANT 16: note = Ancestral polymorphism is F, Derived polymorphism is Y
MITILRATRAAMNIEFSKDILLDKLAKLSNMQMEAQLLNLLKRHDQEYNVDEISMNDKLTNCGHQITIMEYAGFPFPTVALKVYTSDLTSLFLWTCPRCKGYTKGFEVIYRDHSTCGEG

SEQ ID NO: 17573 - protein, 146 aa, Zea mays
  VARIANT 88: note = Ancestral polymorphism is R, Derived polymorphism is I
MARWRIGYYGEVLYFLIEVTKQLDQIDRNVLKMDSANRINERCLELQKNKKSTKTKLEDDKRKVHPAKRSCGCPTILSRHMRMKYLQRFPHNSLPGSYGTLHCYATDMLAVGHVHHALKTTHYVVLIYIEGIEPDAALEALVDRFR

SEQ ID NO: 17574 - protein, 684 aa, Zea mays
  VARIANT 592..684: note = Derived polymorphism lacks residues 592 to 684
  VARIANT 587..684: note = Derived polymorphism lacks residues 587 to 684
  VARIANT 483..684: note = Derived polymorphism lacks residues 483 to 684
  VARIANT 400..684: note = Derived polymorphism lacks residues 400 to 684
  VARIANT 343..684: note = Derived polymorphism lacks residues 343 to 684
  VARIANT 322..684: note = Derived polymorphism lacks residues 322 to 684
  VARIANT 296..684: note = Derived polymorphism lacks residues 296 to 684
  VARIANT 142..684: note = Derived polymorphism lacks residues 142 to 684
MLKLLGQEADSFGKRAEMNDYFYGESKKHSDVFCDISELDFVPYATDLDSEELELKEQKPITKAQSGGDSSGSRSNDCYFPGLHDDLSQDCLAWASRSNYPSLSCLNKRFNLLINNGYLYRLRRKYGIVEHWVYLACSLMPWEAFDPSRKRWLRLPRMPCDECFSCADKESLDVETQLLVLDREYTGLAIWMYNLLTRSWSPCTPMNLPRCLFASGSSGEIAIVAGGCDKNGHMLRSAELYNSEIGHLDTIPDMNLPRRLSSGFFMDGKFYVIGGVSSQRDSLTCGEEYTLETRTWRRIFDMYPGGTSASQSPPLVAVVNNQLYAADQSTNVVKKYDKANNAWNILRPLPVRADPSNGWGLAFKACGDRLLVIGGHRGPRGEVILLHSWCPEGGEDGADWEVLLVKERAGVFVYNCAIMGCWGRGWQANEMARKMYVAGIKLDEITYNLIIKGFFMRGEHEMAKTVFGAMHWRGCKPNSKVYQTMVHYLCERRDFDLAFRLCKDSMEKNWFPNVDTINQLLKGLMAISKDSNGKEIMKLVTGRKPSYSDASLARNFLRYFEPPLFQRAASGLASARMWLNVVAAARQSRRFWRINHLLQRQRLGHGMQEQVPSRHSLSFPQSRAGQLVMKPLTECITKGPRMREPLLADIVQAEDIKELCKLLVVVSREAAKAYVGTAIVFTLI

SEQ ID NO: 17575 - protein, 187 aa, Zea mays
  VARIANT 96: note = Ancestral polymorphism is T, Derived polymorphism is M
MMHQQHNTTISPPSWAAAAAAAARGKRGVVSLQGPRPLPLILPPGTTTTTSSSSSSTPRPAKRPRRVVNSGGGDVSRAPQQSSAAAPGPVILYEHTPKVIHARADEFKALVQSLTGRGGGQEAVPRPPASSQQTAAGDLLVLTLGHHQHVPPPPPLPSPGGAAGFLLSPGSFLFSPATMQAIQELIS

SEQ ID NO: 17576 - protein, 216 aa, Zea mays
  VARIANT 124..216: note = Derived polymorphism lacks residues 124 to 216
MSPARPPPPSARLRAFPRDGVLTSFYAGRFPSIPGCLNRRSCGRAGRVYCLFSGGDNRKKQDEARKALENALGKKAEFDKWGVEIERRQRGYPRDPAACGGGWSGGGSWFRRLTGGGFWDAAKQTVLTILGIIAAFFLIANFNILVASVINSLLLVLRQIRRILSFIAYCVFQGALVERSGPKSSTLGLSNVAGVPVKEKAGMSAKERVVGKWAMD

SEQ ID NO: 17577 - protein, 188 aa, Zea mays
  VARIANT 76: note = Ancestral polymorphism is S, Derived polymorphism is Y
  VARIANT 68: note = Ancestral polymorphism is G, Derived polymorphism is A
MKADKQAELDKVSTDKAKIIKLSDSWPLHSSIQLYSLKISKAFSGEDAARDLVAFELQVAKEMHLPEGSDQRSAVSSANESVQLQRPEFGHLEQWAVILIPFFFSSHHSCVQLANCSLISGKHLLFDTSVQMRFSQLFLCTTIFEINNPCKMRFAFGNIFSANLRQAPARQAALGTGIPNTVVCAFYD

SEQ ID NO: 17578 - protein, 515 aa, Zea mays
  VARIANT 15..515: note = Derived polymorphism lacks residues 15 to 515
MEPAAEDVAAAAPDSWESADIDGPISRLILSARRVSSSPDLADNPDPPQPPPALQPQGPPSVPSAAREDLMAQVDQFLREALEKPRERLSVLRMEQEILKFIGDPRFTEYEFNGLPTSYLRLAAHRLAQHYFLQSIAIPDNSLPDGTGSHIILRKTSSECQLPDVCLADIPVNLPQEENISVAKVAIKQRPQKNLHGMNSSSAHSFRDNHQKSVEERKEEYNKARARIFNNGVSNATDGRSAEEVTSLTTLHRSTSLELNSNNRMGQGAEITLERTLTTTSASSMSNRSKSDKEPAVNRNRQNNRVAIFRDRESERRDPDYDRSYDRYMQRFDPGFGFSGGSYTIRPLYAPAVNYNTEFPQLGSAHQSPVAVEQQPRPIAQHMPVTWSAAQATNAIGYGPDGVMGPYSPGHIRAPVRSSVFMHASQQYAIPSRPGVPFVHPQESMGPFAQVYFLLVQTHQQQSNASLRFARPCEWAIREESKDWGGPVCEQATGMWVSAVLTFLFCLILGPLGTY

SEQ ID NO: 17579 - protein, 253 aa, Zea mays
  VARIANT 150: note = Ancestral polymorphism is L, Derived polymorphism is P
  VARIANT 100: note = Ancestral polymorphism is F, Derived polymorphism is C
  VARIANT 61: note = Ancestral polymorphism is A, Derived polymorphism is V
MSAVSFVSMANAGLAELRGDHMPYSKFWHAVAGAAGGDARQRGGMPLLRSRDGMLLAYAPALLAAAASFAVPGAVEGARAELLSAALAAHFLKRVLEVLCVHRYSGSMPLGTAATISCSYLVSTATMVYAQHLSRGLPDPAVDLLCPGVLVFAVGLAGNLYHHRLLSGLRADDGTGYKVPRGGLFGLVACPHYLFEILAFFGFAMISQTLYALAVATGTAAYLAGRSCATRRWYRSKFQDFPPRIKALIPYVL

SEQ ID NO: 17580 - protein, 276 aa, Zea mays
  VARIANT 6: note = Ancestral polymorphism is L, Derived polymorphism is P
  VARIANT 20: note = Ancestral polymorphism is A, Derived polymorphism is V
  VARIANT 27: note = Ancestral polymorphism is A, Derived polymorphism is V
  VARIANT 176: note = Ancestral polymorphism is G, Derived polymorphism is D
MWLPFLYPPPASVYVTVMSVVSLLSAANAGLSELRGNHVSYSKFWHVAAAAGGDGSNKQRARAGGGAVLTGRDGMLVTYAPAFAAAAASFAVPGAVEGARARLLSAALTAHFLKRLLEVLFVHRYSGSMPLGTAVGGAANYLVATATMVYAQRLSRSVQDPPVDLRGPGVVVFAVGLAGNFYHHCLLSRLRADGGGSKGYKIPRGGLFGLVACPNYLFEIVGLFGVAMIAQTVYALAYATGAAAYLAGRSCATRRWYQSKFDEFPARIKALVPYVL

SEQ ID NO: 17581 - protein, 578 aa, Zea mays
  VARIANT 22..578: note = Derived polymorphism lacks residues 22 to 578
  VARIANT 29: note = Ancestral polymorphism is G, Derived polymorphism is D
  VARIANT 53..578: note = Derived polymorphism lacks residues 53 to 578
  VARIANT 89: note = Ancestral polymorphism is P, Derived polymorphism is L
  VARIANT 157: note = Ancestral polymorphism is P, Derived polymorphism is L
  VARIANT 162: note = Ancestral polymorphism is R, Derived polymorphism is I
  VARIANT 173: note = Ancestral polymorphism is G, Derived polymorphism is D
  VARIANT 180: note = Ancestral polymorphism is S, Derived polymorphism is Y
  VARIANT 215: note = Ancestral polymorphism is P, Derived polymorphism is S
  VARIANT 222..578: note = Derived polymorphism lacks residues 222 to 578
  VARIANT 239..578: note = Derived polymorphism lacks residues 239 to 578
  VARIANT 242..578: note = Derived polymorphism lacks residues 242 to 578
  VARIANT 248: note = Ancestral polymorphism is L, Derived polymorphism is V
  VARIANT 251: note = Ancestral polymorphism is P, Derived polymorphism is L
  VARIANT 262: note = Ancestral polymorphism is I, Derived polymorphism is T
  VARIANT 280: note = Ancestral polymorphism is G, Derived polymorphism is S
  VARIANT 297..578: note = Derived polymorphism lacks residues 297 to 578
MRLLGPTLTQEEQENLSRFSKWMLDVGEGKINATSQAGEDEPTWIQIPDELLLLPQGDKIACIVDKIYDDLNKNYMQLEYLKDRAILTPTNDIVDSINEHIVSLIPEDTKEYLSCDKVIKAPNTHESYDLLYPIEFLNTLNGNSFPQHRIVLKKGTPVMLLRNLNQSEGLCNGTRLIITSLGDKVIEGQIMTGTHKSKIVLIPRISLALKNTKWPFVLQRRQYPIKVCYAMTINKSQGQTLSKVGVYLKKPVFTHGQLYVAISRVTSQNGLFILIEDDSGNCSTKTRNIVYKEVFTQLDPRNINVVIRVRVIRKWEFRGATNDGPLRHINLILADEQGTAIHAEIPAALATEKGSLIQIEKVYEIRRFRVVSSRSYFKPVQNNLMIQFTLYIQAKVVKDPPHIFPIYIYNLTSFEKIEESVDNKNYLIDAIGMLTQIGAPHVAGYNNSSIVRDIFIKNISDASLKITLWGDQASGFSTDNVCNQGNNKPIVIMFFGCLAKQFKGQSYLSGTAATTWYFNPDIPEAQEYYINHRALSAPPLYHDSYKIANGGFHLAPNAKSLHLKPPLDTAVHHVAVQM

SEQ ID NO: 17582 - protein, 411 aa, Zea mays
  VARIANT 29..411: note = Derived polymorphism lacks residues 29 to 411
  VARIANT 179..411: note = Derived polymorphism lacks residues 179 to 411
MSTGSGGTKGSKRVLAPNAEDQVGRVTRQKTKEQSSADKDVRGSTTNTEEQALISANCPAQHDDEIQICDEDAMMDKWIRGKSMGRQLGRISRGLNTKIPLVISEGKRRPEVPMQAAMLASEGGISLRQHIPILTHWKDYKNDKSYLEDFVRRIGGQFAVNTKNKDVRFACADVMMCVQRQMRYKLKKAYFNGVAADKVRTTSPLSTMTDEQWMQLVNMWSTPKHKDKCENNKVIRGKVRFQQKTGSRSYIAHLHSVKQAKYGDAPPTAIDLFKECHCSSKTGFAEPVKEAIDTMESLMGEHGVEGKESKTPIEAVAQVLASSKFLQNIGLVPATKKSSNGGDPTRVADLEAELESEKQNTLEVRAQLDALKKKVEESEQARDKKLEKINDLQKGADETNALLRRLFSLNK

SEQ ID NO: 17583 - protein, 236 aa, Zea mays
  VARIANT 178..236: note = Derived polymorphism lacks residues 178 to 236
  VARIANT 60..236: note = Derived polymorphism lacks residues 60 to 236
  VARIANT 25..236: note = Derived polymorphism lacks residues 25 to 236
  VARIANT 16: note = Ancestral polymorphism is R, Derived polymorphism is W
MFILSFPLIMASSNRRRKRSQRYTQDFVEAVSDVDSNFDSDDDIMGEAVYDDEYLRSCKQNKPSSAFEEDEEFHLEEDAEDDDEEEEYSLSTSEDLEELQRHKKLETRDRRSTKLRSLGEIQKGLRRSKRSFCPRINYRQYDFLDSDTEPRKVRKPNASDPDAGSDAENDMKLSTSGQEQEEEEDDSHGGQNGNNANDKMEEGHTAAENKNRTRRRGEGADTTAVCREDGCSYKGK

SEQ ID NO: 17584 - protein, 534 aa, Zea mays
  VARIANT 349: note = Ancestral polymorphism is S, Derived polymorphism is N
  VARIANT 32: note = Ancestral polymorphism is S, Derived polymorphism is C
MSEMESVAALMDSTSSKIQQLQEAFAELESQSAFCMNFKWKQLEDHFRGLEQSLKKKFDELKEQEKEFQETVAKSEQMLEQREAAVVAKELTSLERLQEKREAALAMIFSKSRLSLPVPSINPMNKALDNLGVKWPKPASEESVHLQVDNAAVRPRSELVALCEEMNVNGLHKFISDNRKNLAAIREEIPSALKKTSHPYGLVLDSLEDFYSGDNLVLDGKKDGDLLGVRRTCLMLMESLGQLHSNDITCSSLERHMLTTNIIERAKTIAFKWKSKLDNLDIDASNGNCLEAHAFLQLLATFGISAEFNEDDLCKLLPYVSRRRQTPELCRLLGLSQKMPGVIEVLVESGRPIDAINLAYVFELTEQFEPVHLLKAYLRDVKKMSHARNVKTSPGAQNEMNERELSALKSVIKCIEEHKLEQQYPVDPLQKRVLQLEKAKADKRMAVEAAKPQSKRPRANGSAFATRATGFADKSFYSATPERHPFNPCERQFVYGAEVHLPPMMTSASYTMQPAHGPYYGNGYPVQYQVSYIH

SEQ ID NO: 17585 - protein, 405 aa, Zea mays
  VARIANT 349: note = Ancestral polymorphism is S, Derived polymorphism is N
  VARIANT 32: note = Ancestral polymorphism is S, Derived polymorphism is C
MSEMESVAALMDSTSSKIQQLQEAFAELESQSAFCMNFKWKQLEDHFRGLEQSLKKKFDELKEQEKEFQETVAKSEQMLEQREAAVVAKELTSLERLQEKREAALAMIFSKSRLSLPVPSINPMNKALDNLGVKWPKPASEESVHLQVDNAAVRPRSELVALCEEMNVNGLHKFISDNRKNLAAIREEIPSALKKTSHPYGLVLDSLEDFYSGDNLVLDGKKDGDLLGVRRTCLMLMESLGQLHSNDITCSSLERHMLTTNIIERAKTIAFKWKSKLDNLDIDASNGNCLEAHAFLQLLATFGISAEFNEDDLCKLLPYVSRRRQTPELCRLLGLSQKMPGVIEVLVESGRPIDAINLAYVFELTEQFEPVHLLKAYLRDVKKMSHARNVKTSPGAQNFKNCPCT

SEQ ID NO: 17586 - protein, 173 aa, Zea mays
  VARIANT 5: note = Ancestral polymorphism is R, Derived polymorphism is W
  VARIANT 20: note = Ancestral polymorphism is A, Derived polymorphism is V
  VARIANT 21: note = Ancestral polymorphism is G, Derived polymorphism is R
  VARIANT 33: note = Ancestral polymorphism is D, Derived polymorphism is E
  VARIANT 71: note = Ancestral polymorphism is C, Derived polymorphism is Y
  VARIANT 87: note = Ancestral polymorphism is G, Derived polymorphism is R
  VARIANT 114: note = Ancestral polymorphism is P, Derived polymorphism is L
  VARIANT 121: note = Ancestral polymorphism is M, Derived polymorphism is T
  VARIANT 154: note = Ancestral polymorphism is E, Derived polymorphism is K
  VARIANT 161: note = Ancestral polymorphism is L, Derived polymorphism is F
MEALREFLAGQHRPEEQNEAGGGEDGVELVPEDWRLSQFWYDERTTRELVEEVVRLVSPSGSGSAAGAVACITCPTLYACLKKTVPGVPAQLLEYDERFGQYGGDFTFYDYNRPEELPAAMKHAYRVIIADPPYMSKECLEKVAKTVSFLARPEGSFLLLLTGNCSSWQCSVE

SEQ ID NO: 17587 - protein, 154 aa, Zea mays
  VARIANT 89: note = Ancestral polymorphism is D, Derived polymorphism is N
MKGSKVHEHEADVPASDLWAIYGSLRAAELLPELLPHVLAKVELVSGDGGVGTILQLIFPPGIPGLQSYKEKFIKVDNENYIKEAEAIDGDILKLGFEAYMIRFEIIPKGANSSVIRSTIEYVIADAHPELEAMVSTATLAETAQKFSEFAKAK

SEQ ID NO: 17588 - protein, 345 aa, Zea mays
  VARIANT 35: note = Ancestral polymorphism is T, Derived polymorphism is I
  VARIANT 121: note = Ancestral polymorphism is A, Derived polymorphism is V
MPAVSAATGASSPPAAANAVVEDIYGFLRVLGDGTVLRSPEEPAFCPASFPSSHPSVQWKEAVYDKPNNLRVRMYKPSAAGRTREKLPVLVHFHGGGFCLGSCTWANVHAFCLRLAAEAGAVVLSAGYRLAPEHRLPTAVDDGAGFLRWLRDQSSAAADGWLAEAADFGRVFVTGDSAGGNIAHHLAVRAEADADVDVLRPVTVRGYVLLMPFFGGVRRTRSEAKCPAEVLLNLDLFDRFWRLALPPGATRDHPAANPFGPDSPDLGSVHFRAPLLVVVGGLDMMRDRTVDYAQRLAAMGKPVELVEFAGKPHGFYLHEPGSEATGELIGLVSRFLRSCEARAGA

SEQ ID NO: 17589 - protein, 329 aa, Zea mays
  VARIANT 32: note = Ancestral polymorphism is Y, Derived polymorphism is S
  VARIANT 31: note = Ancestral polymorphism is V, Derived polymorphism is G
  VARIANT 30: note = Ancestral polymorphism is S, Derived polymorphism is N
  VARIANT 29: note = Ancestral polymorphism is G, Derived polymorphism is D
MEGSNLKGLVDDEIVVKTGKAAGIGLAFGSVYGALHSMLFDGPQVGNNVKYPQLIRTTKVCGHYAASLAVFGATFVGVEQALARYRMKKDIINGAVAGFAAGASLGFSAVRIRQGGQRAGISLCPSPRSRRSCAAVVRAEVSFVDADEAKRLVGEEGYTVLDIRDRAQRERAHIKSSTHVPLFIENQDNDIGTIVKRQLHNNFAGLFFGLPFTKLNPDFALTVKDKFSPESKLLVVCQEGLRSAAAADALEKEGFQNIACITSGLQTVKPGTFESVGKSELQNAGKAGLVTIQGKISVVLGTVLISAYLFITFFPDQAEKLFDLAGISL

SEQ ID NO: 17590 - protein, 294 aa, Zea mays
  VARIANT 2: note = Ancestral polymorphism is R, Derived polymorphism is W
  VARIANT 84: note = Ancestral polymorphism is A, Derived polymorphism is P
  VARIANT 102..294: note = Derived polymorphism lacks residues 102 to 294
  VARIANT 147..294: note = Derived polymorphism lacks residues 147 to 294
  VARIANT 154: note = Ancestral polymorphism is P, Derived polymorphism is L
  VARIANT 217: note = Ancestral polymorphism is A, Derived polymorphism is P
  VARIANT 235..294: note = Derived polymorphism lacks residues 235 to 294
MRWLPRCRRQTRSGQPCQAPPGNRCEAPREAAQAWAGCGEPVRSLRRAPAFLSRFAPDDPDLFRNRPVPDRLLVVSAGVTANLAFTFLVVYAQALTVGVPMQAQLPGVLVPEVRPGSTMDAVQAAERALTEARPTSPARSRGIHVSQFSIGFGPALARFCLGPVEYALRAIPLGGYVGFPDDDPESGFAPDDPDLLRNRPVPDRLLVVSVGVTANLAFAFLVVYAQALTVGVPVQAQLPGVLVPEVRPGSAMDVVQAAERALTEARPTSPARSRGGGLAMDADDTEAGGRVMRM

SEQ ID NO: 17591 - protein, 361 aa, Zea mays
  VARIANT 116: note = Ancestral polymorphism is E, Derived polymorphism is K
  VARIANT 233: note = Ancestral polymorphism is T, Derived polymorphism is P
MEERPSPEASAGNSRAEDDFRSCCGDEEELEDTEESFTAGVAKGELDEASIEANCLGQLRHPKLVELIVYCCEDDHRKVAVFCCCWFLRSITAIHLACSALCAYPFIEALWVSAKELLGIKSDRDEEQPSTMTKGPTPIHQLSRTSCATNLYPSSEWEQMRKDNYKTVNVEESLHKKCFSELRTFLLKPFKLITVFLHETSHALACKLTCGDNLPLDVTTHTSPLPSLFLGCTLFEVVISVCKKLCREGRNEKSHGPSCLFTILRLSSAARLGKRGALAELSIGTERLLSAARLGKRGALAELSTGTECLLGWTITHRSVTISFDPKATDHDELLGLSGPETCVRIYLYRNGAKMMYAPIG

SEQ ID NO: 17592 - protein, 351 aa, Zea mays
  VARIANT 313: note = Ancestral polymorphism is E, Derived polymorphism is V
  VARIANT 120: note = Ancestral polymorphism is A, Derived polymorphism is V
  VARIANT 115: note = Ancestral polymorphism is A, Derived polymorphism is S
MPAVSAAACCAATTPANEVAEDLLGFLRVLRDGTVLRSPADPVFCPATFPGSHPSVQWKEAVYDKPKNLRVRVYRPTTPPGTKKKLPVLVHFHGGGFCLGSCTWANVHEFCLRLAAEAGAVVLSAGYRLAPEHRLPAAFDDGAGFMRWLRDQSAIGGAGASDAWLAEAADFGRVLVTGDSAGATIAHHLAVRAGSAAAEPEPEPEPGLLTVRGYVLLMPFFGGVRRTASEAECAEEAFPNLDLVDRFWRLSLPAGATRDHPASNPFGPDSPDLGPVDFRPVLVVAGGLDLIRDRTVDYAERLAAMGKPVELAEFAGMPHGFYLHQPGSQATGELIQTVARFVHVVAPEAAA

SEQ ID NO: 17593 - protein, 79 aa, Zea mays
  VARIANT 8: note = Ancestral polymorphism is H, Derived polymorphism is Y
  VARIANT 9: note = Ancestral polymorphism is T, Derived polymorphism is I
  VARIANT 15: note = Ancestral polymorphism is P, Derived polymorphism is H
  VARIANT 20: note = Ancestral polymorphism is R, Derived polymorphism is C
  VARIANT 26: note = Ancestral polymorphism is A, Derived polymorphism is V
  VARIANT 27: note = Ancestral polymorphism is G, Derived polymorphism is S
  VARIANT 29: note = Ancestral polymorphism is R, Derived polymorphism is W
  VARIANT 33: note = Ancestral polymorphism is S, Derived polymorphism is L
  VARIANT 47: note = Ancestral polymorphism is V, Derived polymorphism is A
  VARIANT 58: note = Ancestral polymorphism is R, Derived polymorphism is Q
  VARIANT 73..79: note = Derived polymorphism lacks residues 73 to 79
MVRNLLEHTVGNLDPLLRNRLVKIMAGYRTETSLRNGCIDILKADCVNLLVKYYHEARRGGIHGKHGRGNNMQKSGLTN

SEQ ID NO: 17594 - protein, 176 aa, Zea mays
  VARIANT 12: note = Ancestral polymorphism is C, Derived polymorphism is Y
  VARIANT 25: note = Ancestral polymorphism is P, Derived polymorphism is L
  VARIANT 26: note = Ancestral polymorphism is D, Derived polymorphism is Y
  VARIANT 31: note = Ancestral polymorphism is P, Derived polymorphism is L
  VARIANT 33: note = Ancestral polymorphism is A, Derived polymorphism is V
  VARIANT 36: note = Ancestral polymorphism is V, Derived polymorphism is L
  VARIANT 47: note = Ancestral polymorphism is V, Derived polymorphism is I
  VARIANT 58: note = Ancestral polymorphism is L, Derived polymorphism is P
  VARIANT 67: note = Ancestral polymorphism is R, Derived polymorphism is H
  VARIANT 69: note = Ancestral polymorphism is L, Derived polymorphism is H
  VARIANT 74..176: note = Derived polymorphism lacks residues 74 to 176
  VARIANT 96: note = Ancestral polymorphism is R, Derived polymorphism is S
  VARIANT 101..176: note = Derived polymorphism lacks residues 101 to 176
  VARIANT 127: note = Ancestral polymorphism is L, Derived polymorphism is P
  VARIANT 128: note = Ancestral polymorphism is G, Derived polymorphism is A
  VARIANT 153: note = Ancestral polymorphism is P, Derived polymorphism is S
MEGEAETVVGSCSKPCGPLEDYYIPDYILKPGAQQVLVDHAAPCPIVVFINSRSGGQLGSSLIKTYRELLNEAQVFYLSKEAPDKVLHRLYANLERLKMEGHILAVQIWRTLRLIVAGGDGTASRLLGVVSDLKLSHPPPVATVPLGTGNNLPFSFGWVSGQHHSYKQISFILLCR

SEQ ID NO: 17595 - protein, 328 aa, Zea mays
  VARIANT 67: note = Ancestral polymorphism is R, Derived polymorphism is C
  VARIANT 42: note = Ancestral polymorphism is G, Derived polymorphism is D
  VARIANT 19: note = Ancestral polymorphism is F, Derived polymorphism is S
MASEAAPRVVVDECRGVLFVYSDGTVVRRAQPGFATPVRDDGTVDWKDVTFDEARGLALRLYLPRDRGAGAGRRLPVFFYYHGGGFCIGSRAWPNCQNYCLRLASDLGALVVAPDYRLAPEHRLPAAIDDGAAAVLWLARQGGGDPWVAEAADLGRVFVSGDSAGGTIAHHLAVRFGGSPADLAPVAVRGYVQLMPFFGGVARTRSEAECPADAFLDRPLNDRYWRLSLPEGATPDHPVANPFGPGAPPLDAVDFAPTLVVVGGRDLLHDRAVDYAARLRAAGKPVVVRDFHGQQHGFFTIDPWSDASAELMRVIKRFVDADGRFDFD

SEQ ID NO: 17596 - protein, 263 aa, Zea mays
  VARIANT 12: note = Ancestral polymorphism is G, Derived polymorphism is D
  VARIANT 38: note = Ancestral polymorphism is R, Derived polymorphism is Q
  VARIANT 119: note = Ancestral polymorphism is T, Derived polymorphism is I
  VARIANT 123..263: note = Derived polymorphism lacks residues 123 to 263
  VARIANT 127..263: note = Derived polymorphism lacks residues 127 to 263
  VARIANT 141: note = Ancestral polymorphism is F, Derived polymorphism is V
  VARIANT 160..263: note = Derived polymorphism lacks residues 160 to 263
  VARIANT 161: note = Ancestral polymorphism is T, Derived polymorphism is I
  VARIANT 162: note = Ancestral polymorphism is V, Derived polymorphism is L
  VARIANT 181: note = Ancestral polymorphism is A, Derived polymorphism is E
  VARIANT 183: note = Ancestral polymorphism is G, Derived polymorphism is V
  VARIANT 197: note = Ancestral polymorphism is A, Derived polymorphism is V
  VARIANT 235: note = Ancestral polymorphism is L, Derived polymorphism is F
  VARIANT 244: note = Ancestral polymorphism is C, Derived polymorphism is Y
MPWVRNLRRFIGMGAGLGSEALMELETKRILLEIFKERQRKSAEAGSIPSFYKKKPEEGSISSRVQRLAKYRFLKKQSELLLNADDLDAMWVCLRENCVIDDATSAEKMNYEDLCHIATVCTEQIGQKCKRFFSPSNFMKFEKDDSGRIAILPFYLYVMRTVSCFLQEKLLKLAVDVTNYAVGVLNGNLVHLNLIDAVVQIDEGVHWPVKNGLHLSRSIVVYFKHNDMASLASTLEKLTRGNKCAEKIRRYIVVESIYQVQCF

SEQ ID NO: 17597 - protein, 1123 aa, Zea mays
  VARIANT 142..1123: note = Derived polymorphism lacks residues 142 to 1123
MTTSPPPAEQQHEEEEVLVPYGPHLELPNGAQPMEVVPAEPAATVENQQIEDPPISRFTWTIENLSRVSTKKLYSEIFVVGGYKWRILIFPRGNNVEFLSMYLDVADSGVLPYGWTRYAQFSLSVVNQIHNKFTIRKETQHQFSARESDWGFTSFMPLGELYNHSRGYLVNDTCIVEAEVAVCKVVDYWSYDSKKETGYVGLKNQGATCYMNSLLQTLYHIPYFRKAVYHMPTTENDMPSGSIPLALQSLFYKLQYNDSSVSTKELTKSFGWDMHDSFMQHDVQELNRVLSEKLEDKMKGTVVEGTIQQLFEGHHMNYIDCNSNADLQLDVKGCQDVYASFDKYVEVEQLEGDNKYHADKHGLQDAKKGVLFIDFPPVLQLQLKRFEYDFMRDTMVKINDRYEFPLQLDLDRDDGKYLSPDADRNVRNLYTLHSVLVHSGGVHGGHYYAFIRPTLSDQWFKFDDERVTKEDAKRALEEQYGGEEELPQTNPGLNNTPFKFTKYSNAYMLVYIRESDKDKIICNVDEKDIAEHLRIRLEKDREEKERRKKEKAEAHLYTIIKVARDDDLKTQIGKDIYFDLVDHDKVPSFRIQKQMAFAQFKEEVAKEFGIPTQFQRFWLWAKRQNHTYRPNRPLCPQDEAHTDLKPLPLPDKTREDIFLLFKLYEPEKEQLRYFSYIPTHHYLSYTQYLIFCWIFTPLLDGFFRYVGRLFVKASGRPQDILPKLKMLAGFSQDDDIELYEEIKFEPNVMCEYIDNRLLFRSCQLEDGDIICFQKSSKADSADRYRFPDVPSFLTYIRNRQVVHFRSLEKPKEDDFFLEMSKIFTYDQVVEKVAEKLGVDDPSKIRLTSHNCYSQQPKPQPIKYRGVERLLDMLIHYNQTSDILYYEVLDIPLPELQALKTLKVTYHHATKDEVSVHSIRLPKNSTVGDVLNDIKTKVELSHPNAELRLLEVFYHKIYKVFAPNEKIENINDQYWTLRAEEVPDEEKNLGPFDRLIHVYHFTKDTQNQTQVQNFGEPFFMVIREDETLSSIKERIQRKLKVPDEDFSKVFSLYVSICVDFGTEFALSVLSVLTLFLLTSDLFKRNMYGAWEQYLGLEHPDTAPRKAHTINQNRHSFERPVKIYN

SEQ ID NO: 17598 - protein, 949 aa, Zea mays
  VARIANT 719..949: note = Derived polymorphism lacks residues 719 to 949
  VARIANT 494..949: note = Derived polymorphism lacks residues 494 to 949
MPTAVPTPKAVVHQRFGAKARYTVEEVREDVGGCPGLAPQTRNVYRCALDLPGLSVATPGTFLRKKDAEQAAAQIALDKLGIHPTANSPTTPQEAWAELIARISGFFIDENFLSSTHPLIGHLCVSLRRTGDLIGRLPLSAIAACDVKVNTLCKLIDHRAEFDPLLVLSLLYNAAKQSPGVSVSDSNFWIQSEKPYSPEAVDSALERWSGTTDPVEVEAVLVPHMLEDELKTVRINLRDNEHYMSYVAAELSAIDSSHVLVSRTIGKTSSEIRLYFAAANIHAVSDMSKHALDSLGDGDINWQVNKRASYICGQTIYGDALLANIGYTRRDSELHTEDVNLCSYYSTKLPIVLQSDTLTCFCLRILLGKLPDGNCKMSRDSILAAELPSAYSRFSWKGLSPRDLLCSFCRLQRLPEPHFAVSRVSCDTLMSAVSSEERGAPAGSAENQYTNDVRINKEKPDLFKCEVNIRSRKQEVLLEYSAADTWSKESDAIQNSSLKVLIWFNNYFKKLTSKTGKLYLSESTAGVKVHSNIFLQEFAMCLSVYGKNGCSDSAMCSAVGPFSMDTQKKHLESTAKLTHIEGPDSGVFPSHGSLTCISYTASLVTKDKAKTYLLESHNEFEFEIGTGAVSNQLESCVTQLSVNQTARFVAELPPRDLIMAASCEFSHDLSNVSSESCFLEFSVKVLQVTEPLEDRMEKALFSPPLSKQRVEFAVRHINELHATTLVDFGCGSGSLLDSLLEHPTTLEKLVGVDISRKGLTRAAKSLHQKLSKKSTTQTNVPTAVLYDGSITDYDSRLYGFDIGTCLEVIEHVEEDQATLFGNVVLSSFRPTVLIVSTPNYEYNPILQGSAMPNKDDEADESAGPCKFRNHDHKFEWTRLQFQCWATGLAVKHSYSVEFSGVGGSGEEPGYASQIAVFRRLVQGQEAMCLDEDGDQPYEVLWEWPNACVN

SEQ ID NO: 17599 - protein, 374 aa, Zea mays
  VARIANT 80: note = Ancestral polymorphism is D, Derived polymorphism is V
MGAYATTGMQMIATRPSIPAYRQILGSTSALSAFGRSICSRTGFAISSKATSAGPLVSSNCKRVVVRAMSQRGAQGLPIDLTGKRAFIAGVADDNGYGWAIAKALAAAGAEILVGTWVPALNIFETSLRRGKFDESRKLPDGSLMEIAKVYPLDAVYDTPEDVPEDVKANKRYAGASNWTVKEVVETVKNDFGSIDILVHSLANGPEVTKSLLETSRRGYLAAISASSYSYVSLLQHFLPIMNPGGASISLTYIASERIIPGYGGGMSSAKAALESDTRVLAYEAGRKGKIRVNTISAGPLGSRAAKAIGFIEKMIEYSYVNAPLQKELLADEVGNTAAFLVSPLASAITGSTIYVDNGLNTMGLALDSPTLST

SEQ ID NO: 17600 - protein, 127 aa, Zea mays
  VARIANT 120: note = Ancestral polymorphism is T, Derived polymorphism is I
  VARIANT 115..127: note = Ancestral polymorphism lacks residues 115 to 127
  VARIANT 48: note = Ancestral polymorphism is G, Derived polymorphism is R
  VARIANT 41: note = Ancestral polymorphism is G, Derived polymorphism is D
  VARIANT 38: note = Ancestral polymorphism is Y, Derived polymorphism is D
  VARIANT 35..127: note = Derived polymorphism lacks residues 35 to 127
  VARIANT 34: note = Ancestral polymorphism is K, Derived polymorphism is N
  VARIANT 29: note = Ancestral polymorphism is A, Derived polymorphism is T
  VARIANT 20: note = Ancestral polymorphism is H, Derived polymorphism is Y
MYNISLYYSYGEGLAQDPVHAKRWLPLAADCGHKKALYECDIKLCAAGDKVKCLMYLELATRHGEAAAAHMRDVILESFSVVNAQRAMSDADKWKPRTLHPRPRSVTINSNELFYVRAVTAVDHLLY

SEQ ID NO: 17601 - protein, 150 aa, Zea mays
  VARIANT 71: note = Ancestral polymorphism is A, Derived polymorphism is T
  VARIANT 49: note = Ancestral polymorphism is H, Derived polymorphism is D
  VARIANT 48: note = Ancestral polymorphism is S, Derived polymorphism is F
  VARIANT 34: note = Ancestral polymorphism is T, Derived polymorphism is I
  VARIANT 31: note = Ancestral polymorphism is R, Derived polymorphism is S
  VARIANT 25..150: note = Derived polymorphism lacks residues 25 to 150
  VARIANT 14: note = Ancestral polymorphism is A, Derived polymorphism is D
MELEYVVQVKKFIAIAKNHQESLGQTTTSTSVVTARDTKGHEDATLLSDLIRFGFFKDYTVWTFRVEGGDTSVGGSSSCGGNSSTTHVGGPPACTTFVGDINDADHRDYIIVNDLFGDNAGNIGAYEDVGATLLEPEDAELFKNIANRLH

SEQ ID NO: 17602 - protein, 581 aa, Zea mays
  VARIANT 66..581: note = Derived polymorphism lacks residues 66 to 581
MKYMKLGSKPDTFYTEEAVRSVVSDIPADLIIHVNNTKYQLHKFPLLLKCGLLQRLCSDTDDGDEEPVPVALHDIPGGEQAFELCAKFCYGISISISAGNLVPAMLAARFLRMTEAVAKGNLVAKLETFFDSCVLQGWKDSVAALQAAWRISGWNESRIVQPCIDSIVEKILLPPSKVTWSYTYTRPGYNSTRKPHQSVPKDWWTEDISDLDIEVFRSVISTVRASRLLPPPLIGEALHVYACKHLVDPLHVASDAGLTANGVLHQPPQSSDDGEEKLVAMQRRVLESIVTMVPGEPGSVTGRFLLRLLRVANYVSASSSTRAQLIRQAGSQLDEARAADLLIPLPSDPHAYDVGTAEAVLEHFLAQFQRPAPTDERRRMSAAMEKVARIFDEYLRTIALDRSFPVGKFVDLVECLPDIARSDHDGLYYAIDIYLKEHPELSKADKKRLCRLIDCRKLSPDVRAQAIANDRMPLRTIVQLLFVEQERTIGAAAGSHAASGGAADRASVGVISQLAAGTKDEEPASSAGHKSDVHRPRRDHARVADGASAMARSLSASTKTPPAARKERTPEETGSRMRNKQ

SEQ ID NO: 17603 - protein, 391 aa, Zea mays
  VARIANT 154..391: note = Derived polymorphism lacks residues 154 to 391
  VARIANT 130: note = Ancestral polymorphism is R, Derived polymorphism is C
MAHLPASAPAALTLCPPNLFPPAQSILCGATATPSPVPPPSVPRPPLSSPPARLSLPLSPSLLAAMNNLLTDSFELPRRDSSRDADIEMGMHQADASDNLKDFLKKVDAIESIIAKLSNLLNKLQACSFCHSFFTANEESKAVTKASSMKAIKQRMEKDIDEVGKIARQAKTKVDELERDNLSNRQKPGCGKGSAVDRSREQTTGAVKKKLKERMDDFQTLREAIRQEYREVVERRVFTVTGNRPDEEVSIAPFLMWLPLTLQTIDDLIETGKSEQIFKDAIQHQGRGQILDTVAEIQERHDAVRDLERKLLELQQIFMDMAVLVEAQGDMINNIETHVSNATNHIQQGVSALQNAKKLQKNSRKWMCYAIILLLVIVAVIVVAVIQPWKK

SEQ ID NO: 17604 - protein, 283 aa, Zea mays
  VARIANT 75: note = Ancestral polymorphism is K, Derived polymorphism is R
MGKDKEAANLKEGETEIKAKFVEKEEAKDSGGGAGSVGGKSKEGKKDRERKEEEKSVEHEYGEGDEKAIKKKDKKEKDKKKKEDDGDSGKAEKDKKDKKAKEKDGSELKGSSGEKQEKIKDKKETGDGKDVGEEDKRKKIGNKDKDKKDKKAKEKDGSEPKGDKDEDGKKKEADGDEDEEGKKEDKEKKEKKRKHKGAKEKTIDPVKLKAKLEKIDAKLHDLQAKREDILRQLKELEEGGKGNANEEEPAHVQEDKGKDVVPAQILEQVGESKVEEQNPVATA

SEQ ID NO: 17605 - protein, 111 aa, Zea mays
  VARIANT 103: note = Ancestral polymorphism is H, Derived polymorphism is Y
  VARIANT 79: note = Ancestral polymorphism is A, Derived polymorphism is V
  VARIANT 78: note = Ancestral polymorphism is V, Derived polymorphism is E
  VARIANT 67..111: note = Derived polymorphism lacks residues 67 to 111
  VARIANT 60: note = Ancestral polymorphism is R, Derived polymorphism is Q
  VARIANT 2: note = Ancestral polymorphism is A, Derived polymorphism is E
MEALSAPLRAIAAGSRVAASDPVKGWRRIPRRRIPRRRVRPRQEYSSGEKTKIDINGFGRIGRLVLRIATSRDDIEVVAVNDPFIDAKYMVRKLILILVIIFHMSDSGHFI

SEQ ID NO: 17606 - protein, 244 aa, Zea mays
  VARIANT 175..244: note = Derived polymorphism lacks residues 175 to 244
  VARIANT 57: note = Ancestral polymorphism is V, Derived polymorphism is M
MAAPSLSRGGCHRHLTLGARRARPQPCRAPALGPHWFRERSVTCAERGSTFGGGAAVDVRSYNASYARPQPRPPTSRVQRARSVSAWTRPAPLSVQRTGSTKSGAAAARPTPGLNLRSYSSRYLVVEDICRDIYRSGPEWKIILLRYFNPVGAHPSGYLGEDPRGIPNNLTPYVQQVAVGRRPALTVLGNDYATRDGTGIKSVVALDHLKIIFMLKLRRRLMSKREGPSKSIVQDIDHALIISK

SEQ ID NO: 17607 - protein, 1449 aa, Zea mays
  VARIANT 287..1449: note = Derived polymorphism lacks residues 287 to 1449
MAASPSPSTATATASPSASAAAVLAVNGERVELREGDVNPGTTLLEFLRTRTRFTGPKLGCGEGTSPRPPPPSPRALPFRGCGACVVLLSAYDAASGAVSHAAASSCLTLVHGLHHRAVTTTEGLGGGGRLHAVHERLAGFHASQCGFCTPGVCMSLAAALAGAEAEAKAKAGRRPAPPEGFARLTAAEAEWAVAGNLCRCTGYRPIADACKSFAADVDLEDLGLNSFWRKGDAHASKLPRYDEGSIGVFPEFLKAEIRASSGVDQYTPPALLGSATTWHRPRSVEEYYKLVDSELFDQSKTKVVVGNTASGVYRETEVYDRYIDLRCIPELNSVSKEANGVQIGAAVTISQAIEILRVEAGGCNDVIFCKIADHMEKVASPFVRNTASLGGNLVMAQRDQFASDIATILLAAGSSICIQASSKRLTVMMEDFLQMPPCDHKTLLLSICIPRWTPIGGLFSGDKTMAGTESKTGTSVLFETYRAAPRPLGNAVAYLNSAFLAQVSSDGTSSRLILREICLAFGAYGSQHAIRARNVEKLLVGKPITTSVLLEACRRLKETIVPKEGTRHAAYRSSLAVAFLFTFLYPVTEGTLKTVKEVHLNGYATFGTNGNPNCGPDAHVDVSLKKVIDVNSGSCTNERILEYSNQIIEINKDYFPVGIPTKKVGAELQASGEAVFVDDIPAPKDCVYGAFIYSTKPLAHVKSIELDLSLKQLKTLGVVTVKDIPECGSNVGANTIFGPEPLFGDPVTQCAGEPLGVVIAETQRFANIAAKKAVVNYSTENLDAPILSIEEAVKRCSYFETPPFLLPLKIGDFSKGMAEADQKIYSEVKLNSQYYFYMETQAALAIPDEDNCMVVYSSSQCPETAQNVIAKCLGLPCHNVRVITRRVGGGFGGKAVRSLPVATACALAAFKLHRPVRMYLDRKTDMIVTGGMTKDISLIIPHNFIEALKKYNWGAFSYEAKVCRTNLATKSAMRGPGEVQGSYVAEAIIEHVASTLSADANLVRRKNLHTVESLALFHSECTEDAMGYTLHSICDQVTASENYQHRLEIIQSFNKNNKWKKRGLSFVPIVHKVLSRPTPGKVSILNDGSVAVEVGGIELGQGLWTKVKQMTAFGLGQLCPNRSQELLERIRVIQADTLSNVQGGWTTGSTTSESSCEAVRLACNVLVNRLKPVKEQSQEKQDNVSWDELISKGRGGGDDSNGQRRVNEVVAMTLPLTEIGYMCRDEEAIMIGVDLSAREYYIPGPSGSYLNYGAAASEVEIDLLTGASTIVRSDLIYDCGQSLNPAVDLGQVEGAFVQGIGYFMSEEYVTNSDGLLISDGTWTYKIPTVDTIPKQFNVKLLNSGFHKKRVLSSKASGEPPLLLAASVHCATREAIRAARNEQHCSGSKPSPSHFDLEVPAIMPVVKELCGLDNVESSEFRQSDTDIRADHKNVLAAMELRLFSIFFGH

SEQ ID NO: 17608 - protein, 1079 aa, Zea mays
  VARIANT 532..1079: note = Derived polymorphism lacks residues 532 to 1079
  VARIANT 442..1079: note = Derived polymorphism lacks residues 442 to 1079
  VARIANT 428..1079: note = Derived polymorphism lacks residues 428 to 1079
METSISPPGTSKQSAVRKPSPGSSLKDLCLVSKQGSIAEVESALALLKKSGGNIDGRNAFGLSALHLATWRNHLPIVRRLLDAGADPDARDGESGWSSLHRALHFGHLCIAGVLLQFGASLALEDTKGRTPVDLISCPVSQANGDFPDAVATEVFSWGSGTNYQLGTGNAHIQKLPCKVEALHGSYIKTVAASKFHSVAVSSNGELYTWGFGRGGRLGHPDIHSGQTTAVITPRQVTVGLGRKRVNAVAAAKHHTVIATELGELFTWGSNREGQLGYPSVDTQPTPRRVGSLKQRIISVAAANKHSAAVADTGEVFTWGCNKEGQLGYGTSNSASNCIPRMVEYLKGKVLRGVSAAKYHTIVLGADGEVFTWGHRLVTPRRVVVARCLKKGGNTNLKFHRMERLQVISVAAGTTHNTALTADGALFYWVSSDPDLKCQQIFSMCGRNIVNISAGKYWTAVATSTGDVFMWDAKKRKDETPIFTRVHGVKRATFVCVGETHMLVLSSIYHPEYPPKPKSQGLKSMLEWNGGTEELGEDILFDDVQPNSGLSGSSGEMSKGVPSLKSLCEKVAVEYLLEPKNSIQLLEIADSLEAKELKKHCEDLAIRNLDYIFTVGASSIMNASSEILVNLEKLLDEKSSEPWSQHRLPTMTATYPAVIDSDVEEDEAREFPKTRKCGKSASRPSAMSSDDSFLQKDCTAEQAVSKQIRALRKKLQQIEILEAKQLAGHQLDSQQVAKLESRAALEGELAELGIPSEIYSTSSACPAEGRTNRKPEVSKKQKRKNKQSTQTPSVKNEPGQQIPITELQVLQVNVSAEKQEAYAADPIKPMEAAAFSNTKDTASPPEKKPSQPTPSKKKNRKGGLSLFLSGALDDTPKPSLPAPAVPATPKPEGPAWGGVKITKGPASLRDIQTEQSRTNEPASAKAKDRHENSPDSAGRATRLSSFIPDARSSPVAVVAPARAAAAPSSEGDRSTPPWSSSATSPNVSQPSLRDIQQMQQRHHGGVSHSPKTQTSGFCIPPHGGAPEAAGGGGVKDNVPNRWFRPETDAPSSIRSIQIEEQAMKDFRRFYSSVRIVKPQV

SEQ ID NO: 17609 - protein, 185 aa, Zea mays
  VARIANT 16: note = Ancestral polymorphism is V, Derived polymorphism is I
  VARIANT 20: note = Ancestral polymorphism is A, Derived polymorphism is V
  VARIANT 22: note = Ancestral polymorphism is L, Derived polymorphism is R
  VARIANT 24: note = Ancestral polymorphism is S, Derived polymorphism is T
  VARIANT 32: note = Ancestral polymorphism is D, Derived polymorphism is N
  VARIANT 106: note = Ancestral polymorphism is W, Derived polymorphism is C
  VARIANT 120: note = Ancestral polymorphism is K, Derived polymorphism is N
  VARIANT 166: note = Ancestral polymorphism is P, Derived polymorphism is L
MASANSKQVLLLLAAVACLASLASATQWTVGDVGGWRAKFNETGWTDGKTFTVGDTLLFVYPKENHTVVKVGKDAFAACDLSANLQLGNWTSGSDVVPLDQPGMVWFICNKPNHCLNGMNLAINVVDAATPGAPMAPMTPGAPMAPMTPAPSPAASSPPSAAVRCPVGGAVAAAAAVVVAAALAF

SEQ ID NO: 17610 - protein, 166 aa, Zea mays
  VARIANT 36: note = Ancestral polymorphism is A, Derived polymorphism is V
  VARIANT 40: note = Ancestral polymorphism is A, Derived polymorphism is V
  VARIANT 114: note = Ancestral polymorphism is L, Derived polymorphism is R
MMERENERAKLGLQPVNYHGKWPLKRASVFQEPLSAALSALTLVQFNGWLSFFLLLYYKLPLRPETHKTYYEYTGLWHIYGLLAMNSWFWSAIYHICDTIWTEKLYFSSDAAFLGYSLILTILRTSSLRDEASRVMVAAPILAFVTTHIMYLNFYELDKGNLGHDR

SEQ ID NO: 17611 - protein, 203 aa, Zea mays
  VARIANT 19: note = Ancestral polymorphism is A, Derived polymorphism is V
  VARIANT 57: note = Ancestral polymorphism is L, Derived polymorphism is Q
  VARIANT 58: note = Ancestral polymorphism is F, Derived polymorphism is L
  VARIANT 76: note = Ancestral polymorphism is A, Derived polymorphism is V
  VARIANT 89: note = Ancestral polymorphism is W, Derived polymorphism is C
  VARIANT 94: note = Ancestral polymorphism is D, Derived polymorphism is V
  VARIANT 123: note = Ancestral polymorphism is D, Derived polymorphism is H
MASSNSKQALLLAAVACLASLASATQWTVGDEGGWRARLNETAWTDGKTFTVGDTLLFVYPKEKHTVVKVGKNAFVACDLSANLQLGNWTSGSDVVTLDQPGMAWFICNKPTHCLNGMKLAIDVVGGTSGPAPMPFPGVPAVAPSPLVRFPFSDLAGPVPDLAALAPAPAPAASSPPSAAVRCPVGGAVAAAAAVVVAAALAL

SEQ ID NO: 17612 - protein, 74 aa, Zea mays
  VARIANT 31: note = Ancestral polymorphism is E, Derived polymorphism is K
  VARIANT 61: note = Ancestral polymorphism is E, Derived polymorphism is K
  VARIANT 72..74: note = Derived polymorphism lacks residues 72 to 74
MAKRLLPSLNRVLVEKLVQPKKTADGILLSETSKQLNAAKVVAVGPGERDKGRQSDPSCSEGRRHCSSAQIWWI

SEQ ID NO: 17613 - protein, 161 aa, Zea mays
  VARIANT 55: note = Ancestral polymorphism is L, Derived polymorphism is Q
MASKQVLLLLAAVACLASLASATPWTVGDAGGWRAKFNETGWANGKTFVVGDTLLFVYPKENHTVVKVGKDAFAACDLSANLQLGNWTSGSDVVTLDKPGKVWFICNKPNHCLNGMKLAIDVAESAAALAPAPASSSAPVSYTVGAAAAAAVVAAAAVLAF

SEQ ID NO: 17614 - protein, 155 aa, Zea mays
  VARIANT 131: note = Ancestral polymorphism is A, Derived polymorphism is T
  VARIANT 105: note = Ancestral polymorphism is G, Derived polymorphism is A
  VARIANT 103: note = Ancestral polymorphism is T, Derived polymorphism is S
  VARIANT 67: note = Ancestral polymorphism is G, Derived polymorphism is S
  VARIANT 45: note = Ancestral polymorphism is T, Derived polymorphism is N
  VARIANT 14: note = Ancestral polymorphism is A, Derived polymorphism is T
MASSSSRLALVLSAAMAMAVALHLGPASAEYYLVGDSAGWTLNYTIGWPENKTFKVDDFLVFRYPRGEYTVTEVDSQTFRECYRQGNAVHEWTSGNDTVRLDSPGRRWFFSSLDDHCDMGLKLFVDVVGSAPPAQHPLPPAQAPAPVVINNETWV

SEQ ID NO: 17615 - protein, 148 aa, Zea mays
  VARIANT 26: note = Ancestral polymorphism is A, Derived polymorphism is V
  VARIANT 90: note = Ancestral polymorphism is K, Derived polymorphism is E
  VARIANT 96: note = Ancestral polymorphism is A, Derived polymorphism is G
  VARIANT 107: note = Ancestral polymorphism is S, Derived polymorphism is I
  VARIANT 114: note = Ancestral polymorphism is N, Derived polymorphism is K
  VARIANT 122: note = Ancestral polymorphism is E, Derived polymorphism is K
  VARIANT 123: note = Ancestral polymorphism is I, Derived polymorphism is V
MASKRIQKELMDLQKDPPTSCSAGPAGEDLFHWQATIMGPSDSPYAGGVFFINIHFPPDYPFKPPKVNFQTKVYHPNINSNGSICLDILKEQWSPALTISKVLLSISSLLTDPNPDDPLVPEIAHMYKNQRQRYEETARAWTQKYAMG

SEQ ID NO: 17616 - protein, 169 aa, Zea mays
  VARIANT 18: note = Ancestral polymorphism is V, Derived polymorphism is I
MAPSSKKVVLVIVVVVTVAAVLTAPGPALAADLLVGDSQGWRLNVDYDEWADGKDFIVGDTLVFKYAKGQHTVVQATAASFAACSQSNSLGTWASGDDRVPLNTSGQWWFFCGVAGHCEQGMKFGVTVLPVVKLSSSSSSAPPALIAHGGGAAAGLAAAAVAAAAALLF

SEQ ID NO: 17617 - protein, 263 aa, Zea mays
  VARIANT 52: note = Ancestral polymorphism is P, Derived polymorphism is L
MSNPKGSKMLQFINYRMRVTIQDGRQLVGKFMAFDRHMNLVLGDCEEFRRLPPSKSSKTTGEREERRTLGLLLLRGEEVVSMTVEGPPPPDESRAKAAAAGGALAGPGIGRAAGRGVPTGPLLQAAPGLAGPVRGVGGPAPGMMQPQISRPPMPNLSAQPVSYPQVVRPPQGMPPPMRPGMPPQMQMPFRPPGAPPAPFPGAPPQQFMRGPPPMGPPQVRPGMPGPPPPGMRPGMPPPPFGQPRPGMPPPPPGPQQPGQNPPQ

SEQ ID NO: 17618 - protein, 378 aa, Zea mays
  VARIANT 269: note = Ancestral polymorphism is A, Derived polymorphism is V
MSLLPCLLVLSSLQAPAIVAASAAAGGRPPAMFVFGDSTLDVGNNNYLAGPGVPQANKPYYGIDFPGSVPTGRFSNGYNIADYLAKSMGFASSPPPYLSLAPSTGRLVLTARGSGVSYASGGAGILDSTNAGNNIPLSKQVQYFKSTKAQLVTKLGSRATHLLLSRSVFLFSVGSNDLFVFATAQASAHNNKSAADQQRDVATLYASLISNYSATITELHTMGARKFAIINVGLLGCVPVARLSGGTKTGACLDGLNELASGLDDALAVLLASLASRLPGFTYSLADYYGLSMATFDDPGASGYTDVADACCGGGRFGAEADCLPNATVCSNRDQHAFWDRVHPCQRGAMLTAQNFYDSRPGRYTAPINFKQLASTSL

SEQ ID NO: 17619 - protein, 267 aa, Zea mays
  VARIANT 7..267: note = Derived polymorphism lacks residues 7 to 267
MAAVLGRGGGDLGGPAHTFGWTPQEAKLHMVSEFFSEQEWKVVDEVLGPNPRQLSEIYMLKQKANSPEVLHDRNIEEIIDTYLAHLQVSVVNPAMEKALKMLQEFASDVREGKVPKIRSSFGAPWRHPPRDDNPDLSYKWAKIQLMDFIQSFVNTEFGVNYLADDSLEILDDPAAVAMMEVGLLYQQREPSFMRPITRGIQRCLARWFVLLLKYCDKWLCALILISISSRLAEQRLQLNIQETLAFFWQRLIRGRSYRHLMKEVGYK

SEQ ID NO: 17620 - protein, 42 aa, Zea mays
  VARIANT 15: note = Ancestral polymorphism is P, Derived polymorphism is L
  VARIANT 32: note = Ancestral polymorphism is R, Derived polymorphism is H
  VARIANT 37: note = Ancestral polymorphism is D, Derived polymorphism is Y
MVLWVFGYGSLIWNLGFDFDDKILGFIKGYNRTFNLDMDLDD

SEQ ID NO: 17621 - protein, 277 aa, Zea mays
  VARIANT 4: note = Ancestral polymorphism is G, Derived polymorphism is V
  VARIANT 15..277: note = Derived polymorphism lacks residues 15 to 277
  VARIANT 34..277: note = Derived polymorphism lacks residues 34 to 277
  VARIANT 56: note = Ancestral polymorphism is E, Derived polymorphism is K
  VARIANT 91: note = Ancestral polymorphism is T, Derived polymorphism is M
  VARIANT 96: note = Ancestral polymorphism is H, Derived polymorphism is L
  VARIANT 116: note = Ancestral polymorphism is I, Derived polymorphism is N
  VARIANT 149..277: note = Derived polymorphism lacks residues 149 to 277
  VARIANT 177: note = Ancestral polymorphism is A, Derived polymorphism is V
  VARIANT 219..277: note = Derived polymorphism lacks residues 219 to 277
  VARIANT 254: note = Ancestral polymorphism is A, Derived polymorphism is V
  VARIANT 257..277: note = Derived polymorphism lacks residues 257 to 277
MDYGLDPTIGKAIIQAAEEVAEGKLDDHFPLVIWQTSSGTQSNMNANEVIANRASEILGHKGGQKYVHPNDHVNRSQSSNDTFPTVMHIATVVEILSRFIPSLQQLHDSLHLKVLISVYRPDPHFPYSVTDHIFAMLPCFTVYNSELVQKAAINDIAESVMSFNMNYKDTGLFGVYAVAKADCLDDLAFAIMHEMSKLSYRVTEEDVIRARNQLLTYGRRIPTPELFARIDDVDASTVKRVANRFIFDQDVAIAAMGPIQGLPDYNWFRRRTYMLRY

SEQ ID NO: 17622 - protein, 499 aa, Zea mays
  VARIANT 57: note = Ancestral polymorphism is G, Derived polymorphism is R
MTGPGSAPTQTPPPEPKHNARRPVLLLGPPLLAVAVALLLGVSNNPLPRRFIRLLFGTRPSILRSSPPPDAAYEATGAVRTPCVLWMAPFASGGGYCSEAWSYVSALDAHAAAAGAGKNNFSLAIAHHGDLDSPEFWLGLPERSKHLAYRLASARCELSSAVVVCHSEPGAWYPPMYEALPCPPTGYDDPVFVIGRTMFETDRVSPEHVKRCNQMDAVWVPTDFHVSTFVKSGVDRTKVVKVVQAVDANFFDPAKHVALPLPIGVSVMEPEGSRFENGDSKRRDFVFLSVFKWEHRKGWDVLLRAFLQEFSGADDVVLYLLINAYHSDTNFSGKISRFVVESRIEMPMEGWGEIRVINEHVPQSVLPSLYKAANAFVLPTRGEGWGRPVVEAMAMELPVIVTNWSGPTEYLTEENGYPLDVDRLTEVTEGPFKGHLCAEPSVARLRDLMRHVVDDRDEARNKGKKAREDMIKRFSPEVVARIVAEKIQQVLIHTQLTNE

SEQ ID NO: 17623 - protein, 222 aa, Zea mays
  VARIANT 98: note = Ancestral polymorphism is P, Derived polymorphism is L
  VARIANT 72: note = Ancestral polymorphism is V, Derived polymorphism is G
  VARIANT 54: note = Ancestral polymorphism is I, Derived polymorphism is F
MSTPARKRLMRDFRRLQQDPPAGISGAPHDNNIMLWNAVIFGPDDTPWDGGSLIRNCAGGTVEIHGALRYLGATGTETRLFNGDRLTAICRDWSGVDPLAISGAAAGRPTSSQGPLVGHPCTFKLTLQFTEDYPNKPPTVRFVSRMFHPNIYADGSICLDILQNQWSPIYDVAAILTSIQSLLCDPNPNSPANSEAARLFSENKREYNRKVREIVEQSWTAD

SEQ ID NO: 17624 - protein, 410 aa, Zea mays
  VARIANT 7: note = Ancestral polymorphism is R, Derived polymorphism is L
  VARIANT 8: note = Ancestral polymorphism is P, Derived polymorphism is T
  VARIANT 18: note = Ancestral polymorphism is V, Derived polymorphism is I
  VARIANT 24: note = Ancestral polymorphism is V, Derived polymorphism is G
  VARIANT 82: note = Ancestral polymorphism is S, Derived polymorphism is W
MARMISRPAVLLSPLAMIVVAAAVMALAPAPVAATKYNITKILAPYKEYSKFNDMLSKTRLAYDINRRQTITVLAVDNSAMSALDHYSLQTIRHILELHVLVDYYGDKKLKKLAHGSTASSSMFQATGSASGMSGYVNITRKDGKVSFMTEDADDTAKPSRYVKSVKEFPYDIAVLQVSSIISSAEAEAPVPPPAPVDLEELLSKRYCKSFASLLSANAEVFRAVNETKDNGLTLFCPVDSAVAAFAATYKNLTAKAKAAILLYHAVPDYFSLQLLKSNNGMVTTLATASDKKMDYSYDVKNKGETVTLQTRVVTSSVTATVGDMEPLAVYAVNKFLQPKELFKVVEAPAPAPEPSKKKKAGRGGSDDDSSDDSGDSTADAEKGDAAPALLVRWLVTAVATAGVAYALMG

SEQ ID NO: 17625 - protein, 263 aa, Zea mays
  VARIANT 25..263: note = Derived polymorphism lacks residues 25 to 263
MEVCDLRKVWEIHELKTKLDAAGAQVTFDHVASQTTLGLCSSLRLLSSCATPPRATSSSTPRGLGFYSVRRSISFHADALALNKLATLLSSSVTAGGAGGNREQTRARHPRVASCRNRPRPWPRSWLPTNVLGTVGDLITSGAFRHVYLGMDLESSEILVVKQVVLFDQRYIGMTWEENTLNILLEFVPGGSIQSLLGRLGSFPEALIFRVFSVGHANKTSYNCFPAIIRHNQPEVWAFCLGNGYAGLKDALGSNDSRLQRIC

SEQ ID NO: 17626 - protein, 308 aa, Zea mays
  VARIANT 276: note = Ancestral polymorphism is E, Derived polymorphism is K
  VARIANT 242: note = Ancestral polymorphism is P, Derived polymorphism is L
  VARIANT 234: note = Ancestral polymorphism is G, Derived polymorphism is D
  VARIANT 153: note = Ancestral polymorphism is G, Derived polymorphism is R
  VARIANT 140: note = Ancestral polymorphism is D, Derived polymorphism is V
  VARIANT 137..308: note = Derived polymorphism lacks residues 137 to 308
  VARIANT 114..308: note = Derived polymorphism lacks residues 114 to 308
  VARIANT 109..308: note = Derived polymorphism lacks residues 109 to 308
MDWYLRVEWLRNESTIEENEIRITAQGLIRNYVSYATSVLQVPGLVLAIAVVYNVREVFLTDATSKLGRAIALYLCRKKIRVLMFTVSSERFLKIQREAPPEYQQCLVQVTKYQAAHNCKARGSKKHLKRLNAPKHWMLDKLGGAFAPKPSSGSHKSKECLPLILIIRNRLKYALTYREVISILMQHHVLVDGKMSFPSLRQTRTTGCFRLHPIRDEDAKFGQKGIPYLNTYDDRTILYPDPLIKANDTIKIDLETNKIMDFIKFDVDNVVMVTGKRNTGRVGVIKNREKHKGSFETIHVLLGAFCYV

SEQ ID NO: 17627 - protein, 507 aa, Zea mays
  VARIANT 2: note = Ancestral polymorphism is A, Derived polymorphism is D
MAPTGRLLAVAALSFLCLQGPWGDSGSAFAQSQPPLHRTVRAEANDGGGLMPELPPSGLMPMPELSPSGSPTPFVPFLAPAPLAPFFNNSTPKLSGKCTLNFTAVDKLMTTTAVDCFTSFAPFLANVICCPQLQATLTILIGQSSKQTGSLALDPTVANYCLSDVQELLLSQGASDNLHSLCSVHLSNVTEGSCPVSTVDAFESAVDSSKLLEACRKIDSVNECCSQTCQNAINEAAQKISSKDAGLTSYTGSPKTDSCRNVVLRWLSSRLDPRSAKEMLRQISNCNVNGVCPLSFPDTSKVAKECGGTMTNSTACCKAMLTYVAHLQKQSFITNLQALNCASFLGAKLQKMNVSMNVYSSCQITLKDFSLQESGCLLPSMPSDASFDSTSGISFTCDLNDNIAAPWPSSMQAPSSSCNKCMLSTCCAEHTLLFNNSVYMCIDFFSCQYPRATCCDIGTKWCEPQEPKAKTACLFGLPSSGALGTSLARSSCPIIAMIRSGELTGSQ

SEQ ID NO: 17628 - protein, 425 aa, Zea mays
  VARIANT 85: note = Ancestral polymorphism is G, Derived polymorphism is C
  VARIANT 29: note = Ancestral polymorphism is D, Derived polymorphism is G
MQQQQPLDLHSAALLFRMLRGLGIPASTDMLMSALLREESGKLAADSDGLLALYQASYLAFPGETELDQARAFAVAKLAGRRDDGSADSCPSSTHLSLPLHWTAPRLQAMWSLKDQVERGRPDHQDQAIILQLAQLDFNLVQALHRRELAEVTRWWKETSRLGEHAFARDRVVECFFCAACIAPEPRLAECREVLAKAGALIVHLDDIYDVYGTPDELRAFTDAVASWEHSATRTTHSPRRSWWRRSGSSRDSGHMPSFAQYVSNGWVTSTGPLLLLHALPAAAAIPRPPIITTAACTVDYYPRLVELSSTIFRLCNDCASHEAESERGDAPSSIACCMAEPWCAGGEEQARAAVQGVIAETWKLLNREVCCSCAEHEESLTTMANLCLNLARVIHCIYQDGDGITTPTHRMKRMVKDLLFNPIL

SEQ ID NO: 17629 - protein, 894 aa, Zea mays
  VARIANT 602..894: note = Derived polymorphism lacks residues 602 to 894
  VARIANT 502..894: note = Derived polymorphism lacks residues 502 to 894
  VARIANT 450..894: note = Derived polymorphism lacks residues 450 to 894
MLAAPAALHLLLPAPPLPPPHYHHHHVAFPAPPLHASLPCSRRPRRRPPRHGVARASAAMAEEASSSGPTKFSVRIPVGDREILVETGHIGRQASASVMVTDGETILYCSVCLSDTPNDPSDFFPLSVHYQERLSAAGRTSGGFFKREGKTKDHEVLVCRLIDRPLRPTMPKGFYFETQILSWVFSYDGIHSPDCLAITAAGIAVALSEIPNKQTIAGVRIGLINNQFIVNPTTEQMENSELDLMMAGTDSAILMIEGYCDFLTEEKLLEAVEAGQVAIREICKAIDVLVQSCGKKKMVDAISLPPPELYRHVEDISGDELMKALQIKGKIPRRKALSALEEKVISILSEQGYVSKDGLSGGTESLADIVEDEDEDEIVDDGEVDEGDVHIKPVSRKPLQLFAEVDVKLVFKEISSKYLRKRIVENVTLLSSNWKPVRQRGKRSDGRSPWELRPINSQCGLLPRAHGSALFTRGETQSLAVVTLGGYQMAQRIDNLVDTEDSKSFYLQYSFPPSCVGEVGRIGAPSRREIGHGMLAERALEPILPLEEDFPYTIRVESTITESNGSSSMASVCGGCLALQDAGVPIKFPVAGIAMGLVLDTQEFGGDGSPLILSDITGAEDASGDMDLKIAGNESGISAFQMDIKVVGITLPVMEKALLQAREGRQHILNEMLKSSPPPSKALSPHAPLIHVMKVKPNKVNLIIGSGGKTIKSIIEETGVDAIDTGDDGTVKITARDLTSLEKSKIIIANLTMVPKVGEIYRDCEIKSIAPYGAFVEIAPGREGLCHISELSSGWLAKAEDAFKVGDRIDVKLIEINDKGQLRLSSRALLPDVDSESNIGSTKEKVPQKDDVIKMTTKRPRRKKQPEPSGAENATTKALAKSAAAPAGSKGSEA

SEQ ID NO: 17630 - protein, 161 aa, Zea mays
  VARIANT 43: note = Ancestral polymorphism is A, Derived polymorphism is G
  VARIANT 75: note = Ancestral polymorphism is V, Derived polymorphism is F
MTPGSSAAGSGVVVPRNFRLLEELERGEKGIGDGTVSYGMDDADDIYMRSWTGTIIGPHNFMSSCINLFSYLKTVHEGRIYQLKLFCDKDYPEKPPSVRFHSRINLTCVNHETGVVDPKKFSVLGNWQRDYSMEYILTHLKKEMTSPQNRKLVQPPEGTFF

SEQ ID NO: 17631 - protein, 544 aa, Zea mays
  VARIANT 192: note = Ancestral polymorphism is Y, Derived polymorphism is C
  VARIANT 331: note = Ancestral polymorphism is L, Derived polymorphism is S
MNTDDLGSPRELTGLQRRRALYQPELPPCLLQGTRVEFGDPTTTIDSKCADIVAQAFPHTFGQRLVRFLEPHPDTVVSGSSDAQERPPVRTVDQIRTTEQVDAAKSACCDLNLDGLIIIGGVTSNSDAAQLAEFFAEHDCKTKVIGVPVTLSGDLRNQFVEATVGFDTVCKVNSQLISNVCLDAISAGKYYYFVRLMGGKASHVALECALQSHPNMVILGEEVAFSKLTLKEITNKICDGVEARADQGKYHGVLVIPEGLIESIPEMYALIQEINNLHSSNVTEADIPSQLSPWAAALFKFLPSFIRRELILHQESDNSAQLSQIDTEQLLAHLVEAEMNKRTKEGKCKGRKFSSVCHFFGSQARGSLPSNFDCNYAYIMAAGLNGYMATVTNLKDSTNKWRCAAVPLTAMMSVRRHLRGPGAVPIGRPVIHPSPIDLKAESYAVLREKASSFLLDDFYRTPGGIQFEGPGAGTKPITVTIEEQDYLGDIEILQDYLDKVRTILKPGCSREILKASISSIASVNDVLKFMSAPLNTELPLYHFS

SEQ ID NO: 17632 - protein, 282 aa, Zea mays
  VARIANT 195..282: note = Derived polymorphism lacks residues 195 to 282
  VARIANT 174: note = Ancestral polymorphism is N, Derived polymorphism is K
  VARIANT 101: note = Ancestral polymorphism is S, Derived polymorphism is R
MEMKPNRKPLGITLLATRHIKTQETKWKGQKAKEVENTGFKLWYSGIVANKNGVGILIDKTLKDGVVDVKRQGDRIILVKLVMGDVVLNIISAYAPQVGLSESEKRKFLEDLDGMVRAVPTNDKLFIGADLNCHVCSTNVGYELARGGFRYGSRHQEGEDILDFAVAYNLVIANTFFRKRYSHFVTFSSGHRSSQIDFVLIRREHNQACLDCKVIHGESVVPQHNLVVADFRFRISTHRVKQAKIVRMKWWKLKGETSKVFRGRVFVEGAWSEEEDANNMWV

SEQ ID NO: 17633 - protein, 1121 aa, Zea mays
  VARIANT 529..1121: note = Derived polymorphism lacks residues 529 to 1121
MARGRRGPGGRGRFGGGPLGDERPVRHGVRVEENPYFPLPRRASGWGVAPPSRHLWVGGLAPSVTASDLSELFLRCGDVEGVAREPGRNFAFVSFLREGDAVAAVRELQGARLAGAPVRIEFSKGVSVEHPLFIICLFNLTPSNYRCGVLLLSCVQNLSLSRKAEYQQLNLGFTALPPSQIGSKQSTLEFKNKNTVVASGLSPLPWRSPITVLLHCCTYQVVPGYLIYLNFQDKASGSSMDDRYMQRADERHSIERGRKRQPSPENTIDKHKRNRSTDPSDVLWIGFPPGLKVDETLLWEAFSPFGKVLRVTTFPGRTYAFVQYTSIAAACRAKEALQGKLFNNPRVSICFSRNEGAVPELGKQSFVAQYHPQPSARPVVGDQDYEDFPRARPFDSPPRNFRMSPPHFVPNSLPRDADDVGFSKGNYFEQETGIELGRVSNIEPFRTRELGQERRLPEEHEPHRQSPTARSDAPWKPWNNIPFDRPWRPLPFEDSWDVEDKSYLISKKLKGAQVHDTELPEYLFSGFDRGKVYPEYQRRPHHDLSEDGLQSRTSSSTDLHGRHHVHPLKNITPLTNKHEPWRAQESFDRRLGKMDRSTPDYNEPALKDEWKWNGTIAKGGTPICRARCFPVGKVLNFMLPEFLDCTARTSLDMLSKHYYQATGSWVVFFVPENDADMTAYNDFMSYLGDKQRAAVCKLGESSTLFLVPPSDFSEQVLRVPGNVSISGVILRFQQSNPDYSSPNRKPLDRAHPSSASNFNTDVRNCEDLHALRRLNPSDISTFPQGPDYVCSSGGSYTPANADFIPPYKPESAPPYVVPQSPQERPPAELPMGIAQGQHQQLPNRLPSGWSNNLDNPNPNPGSGNFSLAQGAISNRTQDPYTFAPGVVSTGTASGYASGEASNSMSWASMQYNSQQVARSDQPTIPVSLPPDQLAQLAALLARQNQPRKVGLPVDSSNNLSGFIQSPNPHGHATMMPGNSGSIPIQNSLPPVPSMQQLHANVPVSPIGSLPANPFNVPTSAPVLCNSTSPMLPSHALVNPAHSSMPMRPFIPPLPEGPPPFQQQTSSAVTVQPLGPSSQQSSQQLLAQDLDGDPQKRLQATLQLAATLLKQIQNQSNPGGQK

SEQ ID NO: 17634 - protein, 665 aa, Zea mays
  VARIANT 409: note = Ancestral polymorphism is L, Derived polymorphism is R
MSPHHRHFTSQFSSSYYAPVRPQRRRELKLLPLPDYSPTSCYHSGHLRLVSPAVPYERALSALVGRHSYPTSSHGGRDDNAIVETKESRRRPRKGKKTAPNQGVRAPSSSELSTRTAQSGDPLGRKELGQHVVHWLKQGMRQMASEFASSDQPETQGNKAFLWSDGGHAAHAGFVAQAQAHLSATPMPKGQDALCRTASAHYPTLFDNFQRELRDVLLRRLEKTRLMQARIDGFVQQMTGLLRLERDAELELAQDHEVSAAGTVMDGMPKKPVVAHGQAQEDGDTICNLRVISSSTGLTGQHLVLFRAEGSHRLPATRLSPGDTKRGLQKRNASIGVVATLFGDKEDATKPERNSLTDRRGPEAPDGGSLETHSHSFDTSQSRALALALDKERPVLVIQGPPGTGKTRLLSYLVARVVRRGERVLVTAPSNAAVDNMAESLSASGLKNIVRVGNPSRISPSVAPMSLGQIVATRLEKLTREFETRRSALRKDLKRRVQDGGDGSSVRQQLKRLGKDYRKEKKEAVREVLANAEVVLSTNTGAADPLVRGTGGCFDLVIIDEAGQAIEPSCWIPMLQGKRCILAGDHRQLAPVVLSREAMEGGLGMSLLERASSLHDGLLATTLTTQYRMHESIASWASKEIVITNKYVYHPYDLKKSPYLFHVNI

SEQ ID NO: 17635 - protein, 706 aa, Zea mays
  VARIANT 318: note = Ancestral polymorphism is R, Derived polymorphism is S
MLFRPFQAPAKGVMAAVGSLKPGMETLHVQDYKDAPPAKAAVESLQPAMESLHVQDYKDAPPAKGVAAAAVGSLQPGAENLQVQDYKDGNMYYGAYPAYAYGAYGGWGEYPYLSHDGAQTPTAGTYADMYYGYAPYGVATMGHDGQIYGSQNYQYPSTYTKQQNSTAKLSSNGISEKLTPAPQTDVSTIGVDEVKGLKNSNSVLKTDRNMPGSNGSYGRSSVRSGSYQNQTSWSHYPYYSSEMFSDKQQKFTGNHNSTSNPKTKGQSRNQNTRQYPHLMDGDIDEDVRCRILVVWLKWLHAFGVLYDKAVSKTRKFYRTVVGDVIWCGLLVDKKEGLQTPTSSVYSANGIYGYDGSYGPGLWYGSHMYNSGLYGGWNSLYDGKYRTRGRGNNGYYVYGNGSIDGFNELKRGPRSGMYKNQLGLEATTQAPAKEQDLLFANGSHPAMKDQYNQADFAETYSDAKFFIIKSYSEDDVHKSVKYNVWASTPNGNKKLDAAYQEAKEKSSETPVFLLFSVNASGQFVGLAEMVGRVDFEKTVEHWQQDKWTGCFPVKWHIVKDVPNSLLKHIILENNENKPVTNSRDTHEVKLEQGLQVLKIFKDHVCKTSILDDFGFYDNREKMMQERKAKQQQSLKKVIDVKLPSVTDMERSPKGETGSTELTGVGTDVLNKERLLGKAGEKNGEKGNDVAPQDLKTQTEKLAGLNGC

SEQ ID NO: 17636 - protein, 342 aa, Zea mays
  VARIANT 157: note = Ancestral polymorphism is H, Derived polymorphism is Y
MYSPKPESSFGPNPNSGTHQQQMELTGANMGPGNGANNNTNMAGRQRLRWTNELHERFVEAVTQLGGPDRATPKGVLRIMGVQGLTIYHVKSHLQKYRLAKYIPDASTDGNKTDNKDPGDLLAGLEGSSYEHIILIRLILLKKDIIQSLVIYSLMSHFGGLQISEALKLQMEVQKRLHEQLEVQRQLQLRIEAQGKYLQKIIEEQQRLTGVKSETPAGGASVTVSSDQFPDSERTEPSTPAPASESPTQVGASNRDTGDRTEATKSTCHGDSLSRNEPLTPDSNCQNGSPVASPNHERAAKRQRGSGTEFLDSEAEFSLPRHIFESSSGSEFQQYSMSYSGQ

SEQ ID NO: 17637 - protein, 173 aa, Zea mays
  VARIANT 6: note = Ancestral polymorphism is Q, Derived polymorphism is E
  VARIANT 72: note = Ancestral polymorphism is V, Derived polymorphism is G
MQIRVQCACGESSCPEWAVVELQGVVQPQASFAGDIRGLHIGRLCSSPSPASASSKARQLILTRRLLSLHLVSWLPWMCSFLMRLRWYQAGFTFTVGYHELAGTKVTLKKPLLVLRKKKVNAGAQEEEPPTAAEVELEVIGIIRHKILFKDRPKALISKPPTKEKKAVQPAAK

SEQ ID NO: 17638 - protein, 121 aa, Zea mays
  VARIANT 91: note = Ancestral polymorphism is P, Derived polymorphism is L
MVGSALTRLVQSFSVVFLYWFYVFSVNQLKDQNKQLSMALSITSQNLVAVQAQNSVLQTQKMELDSRLGALTEILWYMNSSTSTSTAPTNPAIANDFTAWSRASDILGGTSYSAIDLYQCF

SEQ ID NO: 17639 - protein, 41 aa, Zea mays
  VARIANT 17: note = Ancestral polymorphism is R, Derived polymorphism is G
MAQQQEKKQQQRGKLQRVLREQKARLYIIRRCVVMLLCWSD

SEQ ID NO: 17640 - protein, 168 aa, Zea mays
  VARIANT 41: note = Ancestral polymorphism is R, Derived polymorphism is C
MACHLAIAGATAAAARAPRISVLAAASASSAGEPARRIIRRRAPPGQQGSATAAPAPPAQPSVAEVRRAIGVSDDAASAAASMEKKNTAFMDLISTTPIGQPESEPERRLREAAEWVVDTTETRACEGQKSFLVLCMMTFPAWFLLLFLALGLFKLPFDIPVLDNLLM

SEQ ID NO: 17641 - protein, 157 aa, Zea mays
  VARIANT 62..157: note = Derived polymorphism lacks residues 62 to 157
MSAAACGHPFCGTCWRGYISTAISDGPGCLMLRCPDPSCAAAVGQDMINSLANVEDTEKYGRYLRRSYIEDNRKRPIAPVDLYRSICDSQLIGLSGYTKEGLPIFGIGVGHSTYDKASVITLMLAICLVGYNYSQNHKSVWFEAISTKPNKGTCYDS

SEQ ID NO: 17642 - protein, 544 aa, Zea mays
  VARIANT 462: note = Ancestral polymorphism is P, Derived polymorphism is L
  VARIANT 419: note = Ancestral polymorphism is T, Derived polymorphism is M
MTTSTEDMREAPTVTEVLYKWTNIGKGWQSRWFAIHDGVLSYSEWIHAFHRASYAKSWNSAMFLQCQQVQKDAARLVRKPMDTFPQPAAARGRRALVDVGNLMNGRPSLVNHQKQAVAAAATSHKPLNVGNKKPLVPQAAARGMRPLADVTNLMINDRAAPANRQKPLDAVFNRNGKAVKLKECKVKPEVIVTIPDSEKEKKGKLPGGQRVCRRVPTLFDNLTKCSRYEHKQNSKVKVVSFFFILRMPVYPFCVLCVFTKASDGITTPKKKDPYDIDAPDSCNELAVVEYVEDIYRFYKSTEGTCRPLSSYMSSQAEISERMRAILIDWIIEVQYRLTLMPETLYLTVYIIDQYLSMESVPRKELQLVGISAMLIASKYEEIWAPLVKDLMCLCDNAFTRDQVLTKEKAILDRLHWNLTVPTMYMFIVRYLKAAMCDTELENMAFFYSELALVHYAMLVYPPSVTAAAAVYAARSTLGMNPPWTDILEHHTGLAEPQLLECARRLISFHTLAPESKQKAVYRKYSKPKLGSVALQSPVKKLLSG

SEQ ID NO: 17643 - protein, 354 aa, Zea mays
  VARIANT 259: note = Ancestral polymorphism is S, Derived polymorphism is Y
  VARIANT 82..354: note = Derived polymorphism lacks residues 82 to 354
  VARIANT 57: note = Ancestral polymorphism is C, Derived polymorphism is Y
MAAAEASRTSEARRDAVFGRWVVFSPARSRRPTDLKSHNPTNPSPGPGADAPPKPSCPFCAGRESECAPQIFRVPPDGSLPWRIRVIQNLYPALRRDVDPPPVPEAEGDVSSDEPGERAVPGFGFHDVVIETPRHDVRLWDLDAEGVRDVLLAYAERVRQLGEHPAVQYVQVFKNHGASAGASMAHSHSQMLGTPFVPPSVTTRLNCMKEIFDRSGNCSLCEIRPKDILISETPNFSAIVPFAASYPFEIWIIPRQHISYFHEIDQDKALDLGSLLKTMLQKLSKQLNDPPFNFMVHSAPFKISSSCLPYTHWFLQIVPQLSVVGGFELGSGCYINPVFPEDAAKILRELDCSV

SEQ ID NO: 17644 - protein, 356 aa, Zea mays
  VARIANT 314: note = Ancestral polymorphism is T, Derived polymorphism is I
MVRMSSSSSASGVNLTEQIENVFDQLISKIEQADPDFDPRPFLKQLNVLGRYEPIKRNVYFTKRYIEDYGISCHCKPSPGSSVVCGRDCYCSMLFSCCSSQCECDIACTNKSFQHRPLTKTKLIKTEKCGHGLVAEDEIKKGEFVIEYVGEVIDDRTCENRLWTMKRLDDTDFYLCEVSSNMVIDATNKGNLSRFINHSCEPNTAMQKWTVDGETRVGIFALRDIKIGEELTYDYKFVQFGAAQVCHCGSSKCRKMLGTTKYSGSSQNHRTKKKKRKTSCENCIQQFLRLWHPRQKMYVGCWIVDFDQGTKMHTLQFIDHHTEKFDLKEEEWHFLEVLRCQRKMNKWMMLNEQGRL

SEQ ID NO: 17645 - protein, 164 aa, Zea mays
  VARIANT 52: note = Ancestral polymorphism is V, Derived polymorphism is D
  VARIANT 80..164: note = Derived polymorphism lacks residues 80 to 164
MAATVTLLHLPLARLSYHLRSIEEESAAEAEAPRSFVLPRLSQPKLSVKEDVPIKWPKSRDVVWKANIPHTHLAKEKSDQNWMVEAGEKIKFPGGGTHFHHGADKYISNIANILNFKDNNINNEGMLRIVLDVGCGVASFGGYLLSSNVIAMSLAPNDVHQNQI

SEQ ID NO: 17646 - protein, 223 aa, Zea mays
  VARIANT 14: note = Ancestral polymorphism is G, Derived polymorphism is E
METAAAAMLEAGVGRFSRAPAMAAALLAEMWAPLAVALAALATLPSLLRRLQVIVLRLRSRGKEAIQLHMGTYYSSCDDDDDDEDGDEDESSDDEVDASSSGDDGEDLKRIGFYEGAADGVFPWGGAVVRTWQGLPRRFTACASGVGAVGGASGGAFPAAVRLWGAGTASGQPWWACSADEGGCRDGAAAEVDQVVVGWRREHASQQRRRRERRAVPLAHTGN

SEQ ID NO: 17647 - protein, 384 aa, Zea mays
  VARIANT 51: note = Ancestral polymorphism is V, Derived polymorphism is D
MSPALLPLHGSELTSSASSSCSFLQPGQGGARDCGFRFRISGCKYNTNMEVAMTQLINFLPCTALASYFAAPEIVKEFKNPPQITVSLGSHLWSIWKRCVKMRPSVQKVRIFCSDPDATDSSDDEDGQIIAVKKMVMEILVPVTNSKTSNSLKTLVPCGAKDLEVSEKKGKSSRFRGVRRRRWGRWAAEIRDPVRKTRKWIGSYDSEEAAAAAYQAYAKQIREELLAIKNQRSVSERAALSSSSSVSCVSSSPPCEQTGHEPQTRVLVEKDPEPVDEVFLNFSLTPKGISMDDLLGRIDEIPVCDDPVSPTDELPLDNFTSLEDAFPISDFIGSRDEHLYEHYIGLADISHLPLPMDDPAFNLDAELDWSGFDFAAIEGELDVL

SEQ ID NO: 17648 - protein, 727 aa, Zea mays
  VARIANT 3..727: note = Derived polymorphism lacks residues 3 to 727
MPELRSSTRQACLRSKKLEDLQLGEPPAKPVSPAPPRAGKRAPTRAARGRKGATGKGVPPAPTTRRKRGNIVDLEADPACEDPPKAVKGLEVAAAAAPKNLPLKEVAEVGVLKMNGVSAEKIIGAEDESTATPVPERVQVGNSPEYITDRKLGKGGFGQVYVGRRVSGGAARTGPDAYEVALKLEHRNSKGCNYGPPYEWQVYNTLNGCYGIPSVHYKGRQGDYYILVMDMLGPSLWDVWNSMGQAMTPNMAACIAVESISILEKLHSKGFVHGDVKPENFLLGQPGSPDDKKLYLIDLGLVLFSHLPPPFVVVVVDMWYPNCTASKWKENNGHHVDYDQRPDIFRGTIRYASVHAHLGRTGSRRDDLESLAYTLIFLIRGRLPWQGYQGDTKSFLVCKKKMATSPEMLCCFCPAPFKQFLEIVTNMKFDEEPNYAKLISIFDGLIEAPASRPVRIDGALKVGQKRGRLHANLEDEQPKKKVRLGSPAAQWISVYNARRPMKQRYHYNVADSRLSQHIEKGNDDGLYVSCVASSANLWALIMDAGTGFCSQVYELSPVFLHKDWIMEQWEKSYYITAIAGSTNGSSLVVMSKGTPYTQQSYKVSESFPYKWINKKWKEGFHVTSMATAGNRWGVVMSRNSGFSTQVVELDFLYPSEGIHRRWESGYRITSTAATNDQAAFILSMPKRKPMDETQETLRTSAFPSSHVKEKWAKNLYIASICYGRTVC

SEQ ID NO: 17649 - protein, 306 aa, Zea mays
  VARIANT 1: note = Ancestral polymorphism is M, Derived polymorphism is I
  VARIANT 29: note = Ancestral polymorphism is T, Derived polymorphism is I
  VARIANT 44: note = Ancestral polymorphism is P, Derived polymorphism is S
  VARIANT 68: note = Ancestral polymorphism is A, Derived polymorphism is T
  VARIANT 73: note = Ancestral polymorphism is S, Derived polymorphism is R
  VARIANT 136: note = Ancestral polymorphism is R, Derived polymorphism is C
  VARIANT 158: note = Ancestral polymorphism is Q, Derived polymorphism is R
  VARIANT 169: note = Ancestral polymorphism is G, Derived polymorphism is D
  VARIANT 193: note = Ancestral polymorphism is A, Derived polymorphism is V
  VARIANT 271: note = Ancestral polymorphism is P, Derived polymorphism is L
  VARIANT 278: note = Ancestral polymorphism is K, Derived polymorphism is N
  VARIANT 281: note = Ancestral polymorphism is H, Derived polymorphism is Y
  VARIANT 284: note = Ancestral polymorphism is I, Derived polymorphism is T
MICDTTTLPLAMHHLSDKIMSQLDISKLIDKLRQGKVDSSALTPNEKYDTWEEIKIKSFTKTVSSMWAMTLLSLYVRVQVTILGRHLYLDFARDTTDAQLQAESDTFSENGHKSFLAMADYLVTDKITAFIMQMQRAATEVLKEKPLKDRMNMDQVLQTVIQILDTFMDLCEANSWINYLVPENPPVYAQLMAVSSSGFDDSSLLNDFRKLDQLMSETRIVLASDDFRNIMERSLRKIAEVVVGDLAVQTTLGSGLPLATLLPKVGHLSSPLLEEPNNNKYIQIIRSMPEVELFYTFLYANMPPET

SEQ ID NO: 17650 - protein, 381 aa, Zea mays
  VARIANT 14: note = Ancestral polymorphism is R, Derived polymorphism is C
MGITSAREYQMLWRHFAYQPYLSLFPPQPSLPRLPPPHPLLLHPPASTRVCTPPPSVASSCNQLSRIQDVRHHIGGESFRSYLAYQYQRIRILLAQFENHVCAVIRTSLCLARSLGLLCSYHNAGLLVTGHACVGATSPTTRASTPPHSGSTCGTRARWPSTLHPRRLWLPQGPPRAAPPNRARRCVHQDPGKKARLTTKCSQGRGRVCFGNRTRRSRAERATHVGSTEERVAASLERDWGLAAAAVVACRTRRAEAAARAVEMYSKSVTTPPTGTVKSVTPIHSLSYANGTVQTPEIICLSYVYAICLLKADKIFFLIGLCCETSGAGGTSTDKSNKNKWKAPLKRSKGSLGSLDVVAVKNNKSPAKPSTSSSNEGSSQR

SEQ ID NO: 17651 - protein, 978 aa, Zea mays
  VARIANT 803: note = Ancestral polymorphism is A, Derived polymorphism is P
MAALGAKMERLSSIDAQLRMLVPGKVSEDDKLIEYDALLLDRFLDILQDLHGDDLKEMVQECYEVAAEYETKHDLQKLDELGKMITSLDPGDSIVIAKSFSHMLNLANLAEEVQIAYRRRIKLKKGDFADENSAITESDIEETLKRLVVDLKKSPAEVFDALKSQTVDLVLTAHPTQSVRRSLLQKHSRIRNCLVQLYSKDITPDDKQELDEALQREIQAAFRTDEIRRTQPTPQDEMRAGMSYFHETIWKGVPKFLRRVDTALKNIGINERVPYNAPLIQFSSWMGGDRDGNPRVTPEVTRDVCLLARMMASNLYCSQIEDLMFERIGVDRLKCLQLSMWRCSDELRMRADVLHLSTKKDAKHYIEFWKKVPPNEPYRVILSDVRDKLYNTRERSRELLSSGHSDIPEEATLTNVEQLLEPLELCYRSLCACGDSVIADGTLLDFLRQVSTFGLSLVRLDIRQESDRHTDVLDAITTYLGIGSYREWTEERRQEWLLSELNGKRPLFGSDLPKTEEISDVLDTFHVIAELPSDNFGAYIISMATAPSDVLAVELLQRECHVKTPLRVVPLFEKLADLEAAPAALARLFSIDWYRQRINGKQEVMIGYSDSGKDAGRLSAAWQLYKAQEELIKVAKDFGVKLTMFHGRGGTVGRGGGPTHLAILSQPPDTIHGSLRVTVQGEVIEQSFGEEHLCFRTLQRFTAATLEHGMHPPNAPKPEWRALLDEMAVVATEEYRSIVFKEPRFVEYFRLATPETEYGRMNIGSRPSKRKPSGGIDSLRAIPWIFAWTQTRFHLPVWLGFGAAFKNVLQKDIRNLHMLQEMYNEWPFFRVTIDLVEMVFAKGNPGIAALYDKLLVSEELHPLGEKLRANYEETQKLLLQVAGHRDLLEGDLYLKQRLRLRDAYITTLNVCQAYTLKRIRDPDYHVALRPHLSKEIMDSTKAAAELVKLNPGSEYAPGLEDTLILTMKGIAAGLQNTG

SEQ ID NO: 17652 - protein, 89 aa, Zea mays
  VARIANT 81: note = Ancestral polymorphism is S, Derived polymorphism is N
  VARIANT 73: note = Ancestral polymorphism is T, Derived polymorphism is I
  VARIANT 54: note = Ancestral polymorphism is G, Derived polymorphism is S
  VARIANT 51: note = Ancestral polymorphism is R, Derived polymorphism is W
  VARIANT 18: note = Ancestral polymorphism is S, Derived polymorphism is L
  VARIANT 10: note = Ancestral polymorphism is G, Derived polymorphism is R
MAKGEVPAIGIDLGTMYSCVGVWQHNRVKIITNDQGNHTTPSYVAFTDTERLIGDAAKNQVAMNPTNTVFAITACIFFDHSWKDVIPVA

SEQ ID NO: 17653 - protein, 239 aa, Zea mays
  VARIANT 3..239: note = Derived polymorphism lacks residues 3 to 239
  VARIANT 16: note = Ancestral polymorphism is D, Derived polymorphism is N
  VARIANT 22: note = Ancestral polymorphism is K, Derived polymorphism is N
  VARIANT 117: note = Ancestral polymorphism is Q, Derived polymorphism is K
  VARIANT 202: note = Ancestral polymorphism is P, Derived polymorphism is R
MTQFLKDEGVVLSPEDENKREKVIRELKKIVMHWANAVAYEQSVPQGLATATVLTYDSYTLGVGRMAGQFAKPRSEPLEERDGVKLPSYRGDNVNGDDFTEKSRVPDPQRMIRAYSQSVATLNLLRALATGGYAAMQRVTQWNLDFMDHSEQAHMLWVGERTRQLDGAHVEFLCGVANPLGIKVSDKMNPSDLVKLIEILNPSNKPGRITIITWMEAENMRVIEILNPSNKPGRITIIN

SEQ ID NO: 17654 - protein, 308 aa, Zea mays
  VARIANT 16..308: note = Derived polymorphism lacks residues 16 to 308
  VARIANT 155: note = Ancestral polymorphism is S, Derived polymorphism is F
MMRSPSRFSPSRFSPQSSLPLLRLNLRGNRLSGPTVPPPFSHEAEQGRAAQIETPSRPSGALHLHLGHPPARVEDELLPCLCQLCAPSFAACLPRPQGGCVGVASDKAKAPSTGASPSSPCRASTGAPSASEGCQWSPAKGGLGNSNKSATWDHFSRLFTQYNVQQVLEMEWHDLYCMLLVNHSLYLMLCSQSSEGKARFFSVLMLTWGLVADVDIESEKYSATIQDADRTNLQKNGSPVSGRKNRVKLAMDRAPLKERLQKGNMQVKDSDGNHEISPAEKHKGNLIKRIQSNCICCQMMLRYQRKLP

SEQ ID NO: 17655 - protein, 222 aa, Zea mays
  VARIANT 107: note = Ancestral polymorphism is S, Derived polymorphism is L
  VARIANT 84: note = Ancestral polymorphism is P, Derived polymorphism is R
  VARIANT 17: note = Ancestral polymorphism is E, Derived polymorphism is D
MPPASTDANNAIQKLYDVCRASLSEKGPLSPRDSLDNVRAALDMVTPSDVGLEREAGATADMRYMQIGMFCMPASSIIPLHNHPGMTVLSKVLYGAAHVRSYRWIESAGSSINLSKARPAKVVRDGEMSAPCGAMVLRPEEGGDVHALRAITPCAILHILTPPYSSQDGRHCSYFRRRPRSHPSGVLLNRTGGSEFVWLEEYQPRHNFIIRRDLYTGPALKL

SEQ ID NO: 17656 - protein, 413 aa, Zea mays
  VARIANT 33: note = Ancestral polymorphism is S, Derived polymorphism is F
  VARIANT 40..413: note = Derived polymorphism lacks residues 40 to 413
  VARIANT 43: note = Ancestral polymorphism is F, Derived polymorphism is L
  VARIANT 45: note = Ancestral polymorphism is A, Derived polymorphism is P
  VARIANT 46: note = Ancestral polymorphism is R, Derived polymorphism is T
  VARIANT 114: note = Ancestral polymorphism is G, Derived polymorphism is S
  VARIANT 119: note = Ancestral polymorphism is L, Derived polymorphism is P
  VARIANT 159: note = Ancestral polymorphism is P, Derived polymorphism is L
  VARIANT 224: note = Ancestral polymorphism is G, Derived polymorphism is A
  VARIANT 294..413: note = Derived polymorphism lacks residues 294 to 413
  VARIANT 357: note = Ancestral polymorphism is L, Derived polymorphism is F
  VARIANT 374: note = Ancestral polymorphism is T, Derived polymorphism is I
  VARIANT 385..413: note = Derived polymorphism lacks residues 385 to 413
MGVIELANTWGHPPEGILEHIFSYLPSYADRASCACVCRQWYFYAREKESTTPLFPCLLRPSISGASCFHLFSRTCTSMPTVPAARFCGSMEGQWFVVARDQWRGYALLHLASGTQILLPQGLLQEDGDRFNFNDLWVGLESTDLIIRAATAFRAPRYPDGDEHYFVAAITLGEHRAAACLSGNGRWALLEPDQGIICPDLDKMLVMYEEMEDVIYYSCSGLDGFFFLTTEEHLMVFLPDDDGEGHITGEVLAYLFRGHTMASPPEAGHVVAARYLVESEGRLLMVKRFVSPCQGQQSTVSFQVFTLMWDNWNRKVPRWEKSSPTSAPLLGKMLFVGRGCSRAIGTGRTGPAFIYFLDDAVASPYELLTTIIRTEKEYRCSDMGWCRYDQQYIGKDWPQGPPADCSPWIWLYR

SEQ ID NO: 17657 - protein, 231 aa, Zea mays
  VARIANT 166: note = Ancestral polymorphism is V, Derived polymorphism is E
  VARIANT 74: note = Ancestral polymorphism is L, Derived polymorphism is P
  VARIANT 60: note = Ancestral polymorphism is A, Derived polymorphism is V
  VARIANT 36: note = Ancestral polymorphism is G, Derived polymorphism is V
MANHQLVSYHELARATENFSDANLLGSGSFGKVFKGQLSNGLVVAVKVIHMHMEQAAARALVLQYMPNGSLEELLRSVNGGMRLGFVERLDIVLDVSMAMEYLHHEHCEVVLHCDLKPSKLRHETLKQQLCRKLINGVSVHNHVPGQSSVIPPETNSISMHDLKAEIDQMKACMSRSPKKQLLSCHILFLCTWLRPVVLVDYGGTMPQLQENLCGLLYLARQFKLCKVRSV

SEQ ID NO: 17658 - protein, 169 aa, Zea mays
  VARIANT 68: note = Ancestral polymorphism is A, Derived polymorphism is V
MRVHPAPRKRTIAVQRCATAAAAAAAGALGGKKLRRLPHIFAKVLELPFAADADVSVEEDAAALRFVAAAVDGVSPDGARAHAVEIHPGVTKVVVRGLSPADGGGGVDDDGAAAFELDRWRFRLPPCTRPAMATATYSQGELVVTVPKGAGPDDAAAVLGGTERVLVLV

SEQ ID NO: 17659 - protein, 208 aa, Zea mays
  VARIANT 24: note = Ancestral polymorphism is T, Derived polymorphism is I
  VARIANT 137: note = Ancestral polymorphism is S, Derived polymorphism is L
MMSELNAPSSPLPPVTPAPRLASTMIARNKLTSMRELLKADFDKQLTSHPPKNIESEILREHIKKEREAAKAGKRSYYLKKSELCERKLVNKYNELKVKSTRFKGMLVNIDTNNGDPQVGWTCIVASGGFNFDAKLSVPLSYDSCSVKKWNSTNIGFFCGNRRRESTKVEDMFVAHISEIDTLAHGLHNVAKLIEVGICCSVMFGIVP

SEQ ID NO: 17660 - protein, 522 aa, Zea mays
  VARIANT 46: note = Ancestral polymorphism is G, Derived polymorphism is R
  VARIANT 239..522: note = Derived polymorphism lacks residues 239 to 522
  VARIANT 315: note = Ancestral polymorphism is R, Derived polymorphism is W
  VARIANT 487..522: note = Derived polymorphism lacks residues 487 to 522
MAGGFIGGGGAAAGRAELYEGKITGYFILACIVGSFGGSLFGYDLGVSSGVTSMDDFLRKFFPDVYRRKQAHPHETDYCRYDSQLLTLFTSSLYFAGLVSTFGASYVTKRRGRRASIMVGATSFFLGGAINAAAVNIAMLIVGRVLLGVGIGFGNQAVPLYLSEIAPYRIRGAVNQLFQLTTCLGILVADIINYFTDRLHPWGWRLSLGLAMGPATAIFVGALFLPETPNSLVERGHLEEARRVLEKVRGTRKVDAEFEDLKEASEAARAVPGTFRNLLALRNRPQLVIGALGIPAFQQLSGMNSILFYSPVIFRSLGFGSSAALYSSIITGSMLVVGALLSMVAVDRLGRRFLFIEAGIQMISSMVVIAVILALKFGKGEELSKGVSTVLVVAICLFVVAYGWSWGPLGWLVPSELFPLEMRSAGQSVVVCVNLFWTAAVAQCFLAALCHLRWGVFMLFASLIFVMSIFVILLLPETKQVPIEEIWMLFDRHWYWKRIVRRDPKYQQGNLHHQQQEMSSRA

SEQ ID NO: 17661 - protein, 112 aa, Zea mays
  VARIANT 68: note = Ancestral polymorphism is S, Derived polymorphism is Y
  VARIANT 4: note = Ancestral polymorphism is I, Derived polymorphism is M
MEFIPDSCWNAGMPSAPMTSCGRLRRASRFLNVPGTARAASLASLRSSNSASTLRVPRTFSSTRRASSRWPRSTRLLGVSGRNSAPTKMAVAGPMASPSERRHPHGCSRSVK

SEQ ID NO: 17662 - protein, 95 aa, Zea mays
  VARIANT 87: note = Ancestral polymorphism is S, Derived polymorphism is R
MDVEVLAALFDLNMQPPSEDGLGFDLNLEPPVDEIGFDLNMHANVFEYDDVLDLTLDEPNPFDGIVKRKDAPQEIKKQVYMELLRRSRNGSVLPK

SEQ ID NO: 17663 - protein, 133 aa, Zea mays
  VARIANT 33: note = Ancestral polymorphism is R, Derived polymorphism is G
  VARIANT 29: note = Ancestral polymorphism is R, Derived polymorphism is H
MDPTPQSPLSSDESDPSWFWRNPARQAARAAQRSARAAAAARAAAEAREELEERAVVAVREDGAAARSAAVARPTPAHASASRRVRHHPYSRASRQRGVKLRVPSDDEGEVVGPAKVEEGDNKVMKNEDAMKP

SEQ ID NO: 17664 - protein, 134 aa, Zea mays
  VARIANT 49..134: note = Derived polymorphism lacks residues 49 to 134
  VARIANT 30: note = Ancestral polymorphism is R, Derived polymorphism is W
MAPAEERGPRFSEESSASTMHRLTTLALARAYTARRLAVGWEHLTSADWAAVAAAAPSKTDRQCRHKVEKLCRCLRSNRRRPCPLLDAIDLLDVPSPPFFSKSQSRSTSRSSSPPLQAAVVGCVVSPFPSRILA

SEQ ID NO: 17665 - protein, 172 aa, Zea mays
  VARIANT 75: note = Ancestral polymorphism is A, Derived polymorphism is V
  VARIANT 77: note = Ancestral polymorphism is S, Derived polymorphism is P
  VARIANT 109: note = Ancestral polymorphism is S, Derived polymorphism is F
MAPARAAPVRTRPSASAPVAARCPTGPSQIPSTALKLRSVTRAVINVVLPLPDLVQTVSPANPASTAEEYTHMVALSRRVVTLYRQVVTLAAGTACRSLSPVTPSALDSGGCGATGSKTIEKRKLVIDVKYFFFYVHSEPHDICGETSCLASGDFMLSHQQTLLGFTPLGTY

SEQ ID NO: 17666 - protein, 229 aa, Zea mays
  VARIANT 148..229: note = Derived polymorphism lacks residues 148 to 229
  VARIANT 80..229: note = Derived polymorphism lacks residues 80 to 229
  VARIANT 71: note = Ancestral polymorphism is S, Derived polymorphism is L
  VARIANT 34: note = Ancestral polymorphism is G, Derived polymorphism is R
  VARIANT 3..229: note = Derived polymorphism lacks residues 3 to 229
MIQGGTRYHVEFLDGCGATSCHETSSGGNLLMFGITMQGRGSKVWDVVLDTSTIEISCGCRKFERMGLLCSHALKVFTLQNVNTIPEKYVLKRSTKDARRSMYTLAQDDSTQQECTEAELAYRNRAMHYAYNLIIKSQELEESRKIFWDSLETGEKALEVFFEMRNMRTQAAKDADKSVKKKKKHQKEQTQRDLTSGVKPSNVCWWDSMKSPDARHEVSPQMSWGSECT

SEQ ID NO: 17667 - protein, 125 aa, Zea mays
  VARIANT 20: note = Ancestral polymorphism is S, Derived polymorphism is F
MSCKENIIKECEEEAGITRSISTNATSVGAVSYMDIEGFRYKRDVLFCYDLQLPADFVPNNEDGEVDSFRLVPVIHAANIIRRTDFFKPNCNLVIIDFLFRHGYINPDSRCYLDLLQSLRSGDCS

SEQ ID NO: 17668 - protein, 55 aa, Zea mays
  VARIANT 5: note = Ancestral polymorphism is A, Derived polymorphism is V
  VARIANT 6: note = Ancestral polymorphism is G, Derived polymorphism is R
  VARIANT 14: note = Ancestral polymorphism is R, Derived polymorphism is H
  VARIANT 16: note = Ancestral polymorphism is L, Derived polymorphism is I
  VARIANT 20: note = Ancestral polymorphism is V, Derived polymorphism is M
  VARIANT 28: note = Ancestral polymorphism is F, Derived polymorphism is V
  VARIANT 35: note = Ancestral polymorphism is G, Derived polymorphism is S
  VARIANT 37: note = Ancestral polymorphism is G, Derived polymorphism is D
  VARIANT 39: note = Ancestral polymorphism is R, Derived polymorphism is H
  VARIANT 43: note = Ancestral polymorphism is I, Derived polymorphism is F
MSLIAGEDFQHILRLLNTNVDGKQKIMFALTSIKGVGHHFSNIVCKKANIDMNKQ

SEQ ID NO: 17669 - protein, 96 aa, Zea mays
  VARIANT 8: note = Ancestral polymorphism is R, Derived polymorphism is H
  VARIANT 13: note = Ancestral polymorphism is P, Derived polymorphism is L
  VARIANT 19: note = Ancestral polymorphism is K, Derived polymorphism is T
  VARIANT 29..96: note = Derived polymorphism lacks residues 29 to 96
  VARIANT 50: note = Ancestral polymorphism is R, Derived polymorphism is G
  VARIANT 56: note = Ancestral polymorphism is G, Derived polymorphism is R
  VARIANT 70: note = Ancestral polymorphism is V, Derived polymorphism is M
  VARIANT 82: note = Ancestral polymorphism is R, Derived polymorphism is I
MTVVANPRQFKVLDWFLNKKDYKDGRFSQVVSNALDMKLRDDLERLKKIGTLCYPGTTEVSVTTRACVSMASTPRLLEGVERLLVCQRRDKLLEAY

SEQ ID NO: 17670 - protein, 412 aa, Zea mays
  VARIANT 74: note = Ancestral polymorphism is G, Derived polymorphism is E
  VARIANT 78..412: note = Derived polymorphism lacks residues 78 to 412
  VARIANT 106: note = Ancestral polymorphism is G, Derived polymorphism is D
  VARIANT 117..412: note = Derived polymorphism lacks residues 117 to 412
  VARIANT 147..412: note = Derived polymorphism lacks residues 147 to 412
  VARIANT 230..412: note = Derived polymorphism lacks residues 230 to 412
MATQELTAGFYGPEASPVAAHGRLWAGGVSIAASADVDSRPVSAPRAAAVGSGGGGEAAATADEEEEECDLFDGEWVWAGAGGGYPLYHSSDCPFLDVGFRCAKNGRPDASYTKWRWQPSRCHLPRFVSSLQFSPATFLSLSHARRQLSHRRRCPVSVAQVLGVPFSNSSSDPLSAMSTHQGFHGSVTCVSLKNVYKEGKMFCPGYNLVVIIEGFKSYKEEISTEPFSPKVNVVAIRFVLSDMFQNLRSEDRGALLHEGAGHSVVSAFVEIVFDNSDNRIPEQMVAEKERELEEGEAQKSPSKIVADSLSQISRSSTFLPNIGVPTTSKTGRSTSLAAQAHMQAQFEEKLQAKREEAARKQEELQAQLQAQQAALEENQSLLRQTQEVVKGMHTKFEETNALLGAILKLQKD

SEQ ID NO: 17671 - protein, 190 aa, Zea mays
  VARIANT 148: note = Ancestral polymorphism is R, Derived polymorphism is S
MGSASASVMTTSLLALALAALAFVSRAAAQGNGCSSVMMTLAPCMDFISSKASEPGISCCSVLAGVVQTDPRCLCMVLDGTATSFGIAINQTRALELPGVCKVKAPPLSQCTGMSCVRRPCGTCTDASRRTSSGSGGRSRHSCRCPFSKWSLKLHKLKECSELTASHLRIAVCLLISGDTTSLAMSPCRN

SEQ ID NO: 17672 - protein, 84 aa, Zea mays
  VARIANT 72: note = Ancestral polymorphism is A, Derived polymorphism is V
  VARIANT 54: note = Ancestral polymorphism is A, Derived polymorphism is V
  VARIANT 46: note = Ancestral polymorphism is T, Derived polymorphism is N
  VARIANT 39: note = Ancestral polymorphism is R, Derived polymorphism is K
  VARIANT 34: note = Ancestral polymorphism is A, Derived polymorphism is V
  VARIANT 12..84: note = Derived polymorphism lacks residues 12 to 84
  VARIANT 4: note = Ancestral polymorphism is C, Derived polymorphism is F
MEDFTVGGFHVRRGTMMILVNAWLIHGDPKLWEAPEEFRPERFLDNTMVTMVTAPLLLFGLGWRRCPGEGMAMRLLGLTLAALL

SEQ ID NO: 17673 - protein, 146 aa, Zea mays
  VARIANT 14..146: note = Derived polymorphism lacks residues 14 to 146
  VARIANT 15: note = Ancestral polymorphism is D, Derived polymorphism is Y
  VARIANT 36: note = Ancestral polymorphism is M, Derived polymorphism is I
  VARIANT 48: note = Ancestral polymorphism is L, Derived polymorphism is V
  VARIANT 49: note = Ancestral polymorphism is E, Derived polymorphism is D
  VARIANT 53: note = Ancestral polymorphism is P, Derived polymorphism is S
  VARIANT 65..146: note = Derived polymorphism lacks residues 65 to 146
  VARIANT 66: note = Ancestral polymorphism is F, Derived polymorphism is I
  VARIANT 111..146: note = Derived polymorphism lacks residues 111 to 146
  VARIANT 114: note = Ancestral polymorphism is T, Derived polymorphism is M
MVYLHADFASPLAWDIDHWFPCARGGKTVPSNQRIMQWQVCRKKQNKLEFLMPWWDLQLGVSVNQFLSIFASKNSDFRNRALAFLFTHGASEELSSLQVVEAHAFPQHFSEMKTKVGLAPAAIVSSRGSDNSVLTIYFRCNARAPI

SEQ ID NO: 17674 - protein, 385 aa, Zea mays
  VARIANT 13: note = Ancestral polymorphism is R, Derived polymorphism is W
MSGERPRSSLPPRPEPFRFWLPYRSSVGSWRQQPPPPSPVLSTMPSSPRPQPPSPPPPPTPVGPVHQRPAPHTTVEDIPLQAEPSHESDTISVQSSDSSQLRGGRPSTADLELTLSGAPPAGQEQRSGVDDGNRRNDTKIAISGFPRSRLFDGARAPYRREIEDGLKSLAARETPAPRPESGHGYRVITLAGHNVGASMVLGYGGGLTEAPAPLPRAAEPGVPVPGPGSRPSAVAANVNSNVQSVNNSSMEESTCTAGNPGVHVDIKNAREELAAVTPTPIQMEEEKPKEPVRRPPLAVTPQQKSSAAGGAEVAPARPRPRRCLRALMMENGSNTEAARKPRPSACRFQCVTDHAPTATATPSNGGGAGDKNAEDGGKSSTEGAS

SEQ ID NO: 17675 - protein, 101 aa, Zea mays
  VARIANT 48..101: note = Derived polymorphism lacks residues 48 to 101
  VARIANT 5..101: note = Derived polymorphism lacks residues 5 to 101
MADGQESRTASRKVRGGLAFWSLLLPESGEGDEVRLESFHRSKWKRPQEPKGPGSENKGEVETNVERKGGHRKRQSNRTSDRVNAYGGLRRDDAGDTIYHG

SEQ ID NO: 17676 - protein, 398 aa, Zea mays
  VARIANT 340: note = Ancestral polymorphism is C, Derived polymorphism is R
  VARIANT 230..398: note = Derived polymorphism lacks residues 230 to 398
  VARIANT 216..398: note = Derived polymorphism lacks residues 216 to 398
  VARIANT 210..398: note = Derived polymorphism lacks residues 210 to 398
  VARIANT 86..398: note = Derived polymorphism lacks residues 86 to 398
  VARIANT 14..398: note = Derived polymorphism lacks residues 14 to 398
  VARIANT 13: note = Ancestral polymorphism is G, Derived polymorphism is R
MATFGDGGAALIGWIKTSSVESENVSKALYETIGKLSIHKEEARLIGQLCSGMLANLIGCCRERGCCNLYFVQSRIVVAENLPEDQKHQTLMKIFSAVGNVKSIRTCYPQDISLAAANKTSRIEMIFANKLHSFVEYSTVGDAEKAVAEFGGGGNWREGIRVRSLLGCLKHGLGQGRKGGDEEYAADEDGPDTTDHPRDFGTDVTAQISEAHFDHQAEDGTHDKGGMRQQGRGRGRGGRGRGRGQHYGHNSRDGHHPIGTPPSEHPAVLKPPLGPRITDGTKGFVFKILVLNIFLVNGSSYCCGSLQQVTRHMRLPAVLLCLLVINNKCYDGAKGDLCSCGVIFFVLMAGYLPFKDSNLMSLYKKIFKADFSCHPGSPQVQRSSSRRYLILMLTLCLD

SEQ ID NO: 17677 - protein, 215 aa, Zea mays
  VARIANT 154: note = Ancestral polymorphism is R, Derived polymorphism is W
  VARIANT 6: note = Ancestral polymorphism is S, Derived polymorphism is A
MLKKASAGRAAAATGRGDPAAPASRPSPTAKVAEGGACSARPASRLLSTRSVPSLFAESPMTTSPAASAPELLSRAPLRSGGSPGAAGLAGVLVAEEADERGSLLRNGRRVLRGTRLRVQLPPPPPIEFGVKNREAQLALLSPVQRSPARLARRRSEVEEELAGEDYTCVIARGPNPRMTHIFEDRVVESSTSTSSSTSCDGCNKDAALLLVLER

SEQ ID NO: 17678 - protein, 225 aa, Zea mays
  VARIANT 213: note = Ancestral polymorphism is L, Derived polymorphism is S
  VARIANT 196: note = Ancestral polymorphism is V, Derived polymorphism is G
  VARIANT 187..225: note = Derived polymorphism lacks residues 187 to 225
  VARIANT 186: note = Ancestral polymorphism is P, Derived polymorphism is S
  VARIANT 164..225: note = Derived polymorphism lacks residues 164 to 225
  VARIANT 154: note = Ancestral polymorphism is W, Derived polymorphism is R
  VARIANT 150: note = Ancestral polymorphism is P, Derived polymorphism is L
  VARIANT 135: note = Ancestral polymorphism is G, Derived polymorphism is E
  VARIANT 131: note = Ancestral polymorphism is A, Derived polymorphism is T
  VARIANT 121: note = Ancestral polymorphism is G, Derived polymorphism is D
  VARIANT 119: note = Ancestral polymorphism is Q, Derived polymorphism is L
  VARIANT 115: note = Ancestral polymorphism is M, Derived polymorphism is L
  VARIANT 102: note = Ancestral polymorphism is T, Derived polymorphism is I
  VARIANT 90: note = Ancestral polymorphism is L, Derived polymorphism is S
  VARIANT 89..225: note = Derived polymorphism lacks residues 89 to 225
  VARIANT 46: note = Ancestral polymorphism is I, Derived polymorphism is N
  VARIANT 41: note = Ancestral polymorphism is A, Derived polymorphism is V
  VARIANT 25: note = Ancestral polymorphism is R, Derived polymorphism is W
  VARIANT 15: note = Ancestral polymorphism is T, Derived polymorphism is I
MGRGKVELKKIENPTNRQVTFSKRRMGLFKKANELAILCDAQIRVIIFSGSGRMYEYSSPPWRIASVFDRYLKALAPVSRRWTSSSKSYSTSSCSRSAKGYTTFQPPIRRLEMHMPAEQGGYLCLMNLAAATASGQHQQAGEMMGINPRPFLWWDVGASGSGSQSQQLLHGRDAAESSMMVLGLSPQMHRFALVVGVRPQQDETTLNVQLLLLRYVHSRVFDHVS

SEQ ID NO: 17679 - protein, 1161 aa, Zea mays
  VARIANT 606..1161: note = Derived polymorphism lacks residues 606 to 1161
MPHGHAAAVVDRLLRRLGSAACRLEVPPNIDGDLAHVWTTLARLQDMLVSLEIRPELQEWMGDIKQVAYDVEDLVDELEDHNSMESQMSGCVAVGEETRWCCSCSFLMHSTRADRMKTIKRRLDFLVKDSVIFSLMQYPFPDVERFDNEAFDRAAVVGRDNDKAKIKDMILQSNAQKFSIIPILGLVGLGKTTLARLIFLDQGEGWDFDLRIWISLNRKLNIKMIASDIISQCNHREEKLLDVRTDMEIQENFQLLKRCLQEALHEKHCLIVLDDLSSTDKNQLDELKEMLKGTNESIKVLVTTSSEITAELLHTIPPYKLCPLSEDDSWKIFSQKAFGNCDGDNTDLKKIGKEIVKRCEGIPLLTHSLGLVVQNEVTNVWLAARDEEIWKLERRVATKIELFSPLYQIYNDFSSTIKLCFLYLSIFPKGSTIDKEKLIQQWIALEIIGSKHDSLPPYVNGEMCIQDFLSIYFLQVRDTHSSTFSHSTLTRTRALHIMNSEAITFPREAFELLKHLRVLNLSGCCIEELPASIGCLKRLKYLDVSGVQIQTLPFPNLKYLNMQGCDKLQNLPLSLGHLQRLEQLRLSCCRCIAMLPDSLCNLINLRILDLSRCTMLRHLPALFGNLVNLEDLSLSSCFNLKQLPESFGNLYFLRFLNLSSCYELQQFPESVTNLEKLEVLILRRCCRLRILPPSFAMIKYLRILDLAGCEALHVSTEMLTTNLEYLNLQRCLNLQTQPYYFENFNKLKFLNLSHCLPTVDCLESISYLFNLEYLDLSETSLDIPMSFARLQKLHTLNLTGCAPMHPSSNVHQTWPGILAKITSLKSVLTMDPVLAASLQGHTECSADYDYHSLTTTDELVIKEITGGSRGLRIAEQLNLQNRLEVCFLKLEWVPRSQSAQDQLLEYTDEEVLEKFQPNETLEHFMLVKYTGNVFPTWMMNKLTSLPYLVNLCLFHLHNCSALPPIGHLQNLRYLHIKDMPNLTNLEMGLSGGPVSLGKLTHLKLEALNLEELSILLSANNESPCFMFPNLEELSVLSCSKLVFKPSVPKCAKYVIKESNMVLSCWQPLGPFSSPPIEKVEISGCVMPSGWLQWLRSIQTLEKVVIDGEALSSFELQKIYAFQEASGSKISKETDGALKAIGIDNSTIKHIPRFNTTSELSG

SEQ ID NO: 17680 - protein, 416 aa, Zea mays
  VARIANT 161: note = Ancestral polymorphism is R, Derived polymorphism is L
  VARIANT 239: note = Ancestral polymorphism is D, Derived polymorphism is G
MFELFCLIIFFSVDTISSSKVSTPSKEIPSTLRRPDKSKMPALIPGDGSLNLSLKQVQKVTHNFSPLFELGEGGTWAVYRAVLSDNQVVIIRRAKKGHVQEAKHLMEVKLLTKINHWSLVRFLGFIDEKDECIRITEYVPNGTLREHLHDQRKRILNFNQRIVIALDVAIALTYLHLCSGDALICYNLRTSNILLTESYRAKVCCSELSKSGNIVLLKGTGGYIDPEYLETSELTAKSDVYSFGIILLEIISSHGPQDWDVLMNHRQSSVVQWALEKFYDDLMNEILDYRMEDRVDGDVVRDLLSLALSCVVSRGADRPSIVVVGERLWKIWQDHRRNVGEQHEYQGSWAEFIEQEGILRHHKCVLKRSWEPSTTQQDWSVYVRQIELVQEAYDTPWGEEIFSGSVSLDDITVYSR

SEQ ID NO: 17681 - protein, 132 aa, Zea mays
  VARIANT 24: note = Ancestral polymorphism is G, Derived polymorphism is R
  VARIANT 107..132: note = Derived polymorphism lacks residues 107 to 132
MDVDSRMATESDSDSDARGGSGSRSETPTASLSPFVGLEKYVMTKLFDRTFGTSTEDAVSDMDISEKIGLLQLFVKPHHLDIPKVVHNEASWLVTHSELEASTMRFQSLMLVINTPNGIFALTVPALLDCSR

SEQ ID NO: 17682 - protein, 107 aa, Zea mays
  VARIANT 89..107: note = Derived polymorphism lacks residues 89 to 107
  VARIANT 67: note = Ancestral polymorphism is G, Derived polymorphism is C
MHIVSSALLLCSCGLQIGFLIFLLIAHLQNLIDLAGSESSSAETTGVRLKEGSYINKSLLTLGMVGGSIGSNGRLQGRIEVSRAFGDCQFKKDSFLHKANIQIESIK

SEQ ID NO: 17683 - protein, 133 aa, Zea mays
  VARIANT 63: note = Ancestral polymorphism is P, Derived polymorphism is R
MQQQQEEEAAGGAGLQLQTRGKEEDEEEPVLATWDCGSPLYDSFEVASLHYVLEKHTMILPFPDAAAGSRSRRRTQQRRHHRGGHRAAMAPDVAKTGNRRVGAGAARRTWGWWGSKAAAAIFRAVTCAGGARL

SEQ ID NO: 17684 - protein, 192 aa, Zea mays
  VARIANT 46..192: note = Derived polymorphism lacks residues 46 to 192
MFLTGVPDSAPGSTEKHLFVKCGVRGDTSPGCNAVGMIDRKILGIQHLYGRPVYARSKQCSIDSPQNGPLPSDAPSWCQAPFDPEGLLRTSITIESLTERSCSSPGLHMNKPLYTLSYTLGTAGAGGLLFSGIYTLVDIYGYRRADRRHGMDGMHALMIYVLIACNVLPIFIHGFYWKEPKNNLLKFIGIGA

SEQ ID NO: 17685 - protein, 306 aa, Zea mays
  VARIANT 66..306: note = Derived polymorphism lacks residues 66 to 306
  VARIANT 90: note = Ancestral polymorphism is P, Derived polymorphism is S
  VARIANT 126: note = Ancestral polymorphism is S, Derived polymorphism is G
  VARIANT 148..306: note = Derived polymorphism lacks residues 148 to 306
  VARIANT 150: note = Ancestral polymorphism is C, Derived polymorphism is Y
  VARIANT 158: note = Ancestral polymorphism is S, Derived polymorphism is P
  VARIANT 168: note = Ancestral polymorphism is A, Derived polymorphism is V
  VARIANT 169: note = Ancestral polymorphism is G, Derived polymorphism is V
  VARIANT 179: note = Ancestral polymorphism is E, Derived polymorphism is V
  VARIANT 203: note = Ancestral polymorphism is S, Derived polymorphism is L
  VARIANT 204: note = Ancestral polymorphism is D, Derived polymorphism is E
  VARIANT 210: note = Ancestral polymorphism is E, Derived polymorphism is K
  VARIANT 213: note = Ancestral polymorphism is A, Derived polymorphism is S
  VARIANT 223: note = Ancestral polymorphism is A, Derived polymorphism is T
  VARIANT 269: note = Ancestral polymorphism is C, Derived polymorphism is F
MRRWERGSGAGAWAWWGTTWWLARSCKLLTRGRAALGGLRSMVCRGWATQRWVGARAVGLRKGSSWKLHGEDHRANPVLRRVTSDTLANPPNDTLAHIIELVLKSSEDRGRREMKSLVLKLFKESSNGSANSSSADSSCITTLYECFQNCQDSLLVLPREATGADELAVEEELSSGSKVQAFRKIGKIDLEADNLLWLAEILSDRHAVDELASIWARQTELAAELHTRIPVMHRHLVSCVTARLLVVVGRGATLPSRETRFLKAGGDGFPNKQRAFEVWWRRTFIRQYAEQPGSGRSSWSSSSRQH

SEQ ID NO: 17686 - protein, 152 aa, Zea mays
  VARIANT 133: note = Ancestral polymorphism is S, Derived polymorphism is W
  VARIANT 144: note = Ancestral polymorphism is S, Derived polymorphism is P
MSRRFQLPPILSFLITVLISGTASADTPDCPYPCLPPPSAAGAINGYPPPQPSTGGGGGLGGSYPPPPPGSFQLTPPGAMPAGFSPPYSGFPSGPAPPPPNPVLPWFPWYYQRTNPITGSTTSASSPAMDARWTVTVAVLFHLPLLVLLRVL

SEQ ID NO: 17687 - protein, 220 aa, Zea mays
  VARIANT 181..220: note = Derived polymorphism lacks residues 181 to 220
MMATTTRSRPMLLALAAVVATLLVVAAPAPASGQPGPGGVVGGAMSCTASLVTSFTPCLNFITNGSASPTDDCCRSLGALMRASTGCACLILTGSVSVGVPVNRTLAVRLPRACNSTSLQLQCRDASSAQSPAPGPVADAPAPSLSTAPLPPPATAAAAPEPDEAPAPATPTAAAPVSQGQTRPTVVPGASSSSSSTASSDAPATAGFVLLLAIGAALMT

SEQ ID NO: 17688 - protein, 1550 aa, Zea mays
  VARIANT 58..1550: note = Derived polymorphism lacks residues 58 to 1550
  VARIANT 7..1550: note = Derived polymorphism lacks residues 7 to 1550
MAYLVLQMVDLVAVFSGTASPEDDGNGDAAKALELAQMVVGLAAGVHYYARSSTMPRQGLRPAPTGACTRPASQIVCACQSTTRRNDLLLVYRFRSVRIKEGTSPTSSPVFLLPSRPGGGGMDDAGEIHALGSLRRDGSVWSAASDTVFSSLSSRADGGVDDEEALRWAALEKLPTYDRARTAVLAMPEGDLRHVNVQKLDPQERHALLQRLAWVGDDHQRFLSKFKDRVDRVGIDLPKIEVRYQNLNVEAEAYVGSRGLPTILNTYANVLEGIANALHITPSRKQKISILHNVSGIIKPHRMTLLLGPPGAGKTSLLLALAGTLPSSLKVTGNITYNGHTMDEFEARRSAAYVSQHDLHMGELTVRETVNFSARCQGSGHRYDLLVELSRREKDAGIIPDKETDTYMKAAATGDQKADVVTNHILKVLGLDVCADTIVGNNMLRGISGGQKKRVTTAEMLVTPGRAVFMDEISTGLDSSTTFQIVNSIRETIHIVGGTAVIALLQPAPETYDLFDDIILLSDSQVVYSGPREYVLEFFESVGFKCPQRKGVADFLQEVTSKKDQRQYWKHGDDTYRYVPVKEFAEAFQSFHVGEAIRNELAVPFDKSTSHPAALKTSRYGASVKELLKANIDREILLIKRNSFVYIFKAVQLTLMALITMTVFLRTNMHRDSISDGRIYMGALFFGVLMVMFNGLAEVGLTIAKLPVFFKQRDLLFYPAWTYSLPSWIIKTPLSLLNVTIWVFITYYVIGFDPNVERLFRQFLLLLLMNEASSGLFRFIAGLARHQVVASTLGSFGILICMLLGGFLLARENVKKWWIWGYWISPLMYAQNAISVNEFLGSSWNKQVIPGSAEPLGKLVLESRGLFPEAKWYWIGVGALLGYVLLFNILYTICLTFLKPFDSNQPTISEEALKIKHANLTGEVLEASSRGRVASTTTTGTLDESNDEAASNHATVNSSPVNKGMAIRAQGVTETRLELLKGISGSFRPGVLTALMGVSGAGKTTLMDVLAGRKTSGYIVGNITISGYPKKQETFARVSGYCEQNDIHSPNVTVYESLAFSAWLRLPADVDSSTRKMFIDEVMELVELLPLKDALVGLPGVSGLSTEQRKRLTIAVELVANPSIIFMDEPTSGLDARAAAIVMRAIRNTVDTGRTVVCTIHQPSIDIFESFDELFLMKRGGEEIYVGPLGMHSCELVKYFEGIEGVNKIKDGYNPSTWMLEVTSTMQEQITGINFSEVYKNSELHRRNKTLIKELSTPPEGSSDLSFPTEYSQAFLTQCLACLWKQSMSYWRNPPYTGVKYFYTTVIALLFGTMFWGVGRKRDSQQDLFNAIGSMYASVIFMGVQNSGSVQPVVSVERTVFYRERAAHMYSPLPYALGQVVIELPYIFVQSLIYGVLVYAMIGFEWTADKFFWYLFFMYFTLAYYTFYGMMVVGLTPNYNVSSVASTAFYAIWNLFSGFLIPRTRIPVWWRWFYWICPIAWTLNGLVTSQFGDVTETFSDGGVRISDFVEDYFGYHHDLLWVVAVVVVAFPVLFALLFGLSLKIFNFQKR

SEQ ID NO: 17689 - protein, 152 aa, Zea mays
  VARIANT 112: note = Ancestral polymorphism is P, Derived polymorphism is L
  VARIANT 54: note = Ancestral polymorphism is R, Derived polymorphism is C
  VARIANT 38: note = Ancestral polymorphism is R, Derived polymorphism is W
  VARIANT 30: note = Ancestral polymorphism is T, Derived polymorphism is I
  VARIANT 2..152: note = Derived polymorphism lacks residues 2 to 152
  VARIANT 1: note = Ancestral polymorphism is M, Derived polymorphism is V
MRPSSARRSQRRRWEVKEDVVLTKQPEEGTNDLISEFRDLPSRLHETLMPDLARLSQYSKAFLSAANAGIANSVRLILSGRLHGISGGAAGAAALHAHRAGAAHGPVPAAPPVLLLAQTYLAIYFATLALTAAATGLEPLRFVHAASPAAYA

SEQ ID NO: 17690 - protein, 265 aa, Zea mays
  VARIANT 12: note = Ancestral polymorphism is R, Derived polymorphism is G
MLRTHLLPEAWRRPLPQEAGARHQSPRISFHRAAPRSGIQGGQVRCGGPELRWLSSSRNSSSDSQPWTTMCVNADYTTPADSVATSEQAGGEAEATLETGGEAAATLEQTGGETEEPTIVAPANEYTEQEAAPQQKCAKIHDFCLGIPFGGLLLSMGLIGFLFWRSPASLTFGVAPGLAILALAVLSLNVWRSGKSSLPFILAQAGIAAAVAWKHGQAYTTTRKLLPWGFYVALSAAMICFYSYVLLAGGNPPPKKAKAKAKAAA

SEQ ID NO: 17691 - protein, 302 aa, Zea mays
  VARIANT 34: note = Ancestral polymorphism is G, Derived polymorphism is D
MASVIDGNGGSRLVVTELGHLKELAMQLEGHLGGSSPDLCKHLASQISSITDRSISLLITATSSSPHGGASDAPPFIRATTKKRKRMDKKRHEVRVGSAGGGGGDHPADDGYSWRKYGQKEILGAKHPRGYYRCTHKSSQGCAATKQVQRTDEDPAFFDVVYLGDHTCVQSQRAAATAGRQAAADAQAPEYDANLMVKTEGPALEPEQQRRGWEDAPTPFLFSSTPACLVPERSPFSAPSTSENWGVSPATSDSNHVVSFPPFEVAAAAAAQFEFEEVMSAIDRADGEFLEDLDIYVSSFLA

SEQ ID NO: 17692 - protein, 263 aa, Zea mays
  VARIANT 27: note = Ancestral polymorphism is E, Derived polymorphism is G
  VARIANT 38: note = Ancestral polymorphism is H, Derived polymorphism is R
  VARIANT 49..263: note = Derived polymorphism lacks residues 49 to 263
  VARIANT 57: note = Ancestral polymorphism is V, Derived polymorphism is G
  VARIANT 61: note = Ancestral polymorphism is R, Derived polymorphism is S
  VARIANT 66: note = Ancestral polymorphism is G, Derived polymorphism is V
  VARIANT 126: note = Ancestral polymorphism is G, Derived polymorphism is E
MSSVIRSNFRFVEAANRYKNHKLPFLEVFNSISLYFSHSNVHDKLLRFRLNTILVIVIVVRSKLMGSHVTSIQIAPVYYLGLPSHPEHDIAKIQMTAVSFEVAGDFDASRKFIVSVKIPYHAPSFGGCESIIDQSAIMYYCHPNSEDKKGGEGGRESSSLSEDEEGWGQQGLPRAHVSDEPTMPSLPERRKALSIAKGSRSDRRLRAAVGEHGRKQHEAAASDGREPGVGRSRSPGLPPDGEHGLEHHEVVGIHGTKHVRGGL

SEQ ID NO: 17693 - protein, 177 aa, Zea mays
  VARIANT 90: note = Ancestral polymorphism is G, Derived polymorphism is R
  VARIANT 46: note = Ancestral polymorphism is G, Derived polymorphism is D
  VARIANT 42..177: note = Derived polymorphism lacks residues 42 to 177
  VARIANT 31..177: note = Derived polymorphism lacks residues 31 to 177
MAYVSPATDDTSTDLDTDEKNQMGLPSGRSSASSAASLHQRQPQSDIHSHEYHQLSLLLMLASLTSIFHPLVCLVDTQMAKPEYQAMETGRESKETTPRFVNVSGMAKPQPDASLSFLLPPDAAAEGLHDMILNARDDLDVLSPWSGSLLKQLANKSISGGVAVVLAETNNLDKPEV

SEQ ID NO: 17694 - protein, 604 aa, Zea mays
  VARIANT 3..604: note = Derived polymorphism lacks residues 3 to 604
MTEESAKKSKLSWSKSLVRKWLNIRPRAQDFHADFDAGHQGMVDASLWPSRHDTSGGCSPFLPFLPARDGGGGGGGSWRPSCSSSEASASTAKKSRADRPSSKRSAERARRGRNNFDLARLTEVQDYRIFAATWNVGGKSPPRGLNLDEWLHTSPSADIYVLGFQEIVPLNAGNVLGTEDNLPAKKWVSLIRRTLNKNPGSSGCGGGYHTPSPVLDPVVELDADFEGSARRQDNFSFFHRRSFHNLSRSLRMDGDLMFPQPRLDRRFSVCDPVNLGGRPSDFDGSLRCPGSPDEDTIDMEMGDSVQVSPFPHSYSASAPSEQNDDQSNSSRYCLVASKQMVGIFLTVWVRNEIRDDVRNLKVSCVGRGLMGYLGNKGSISVSMCLHQTSFCFVCCHLTSGEKEGDELRRNSDVLEILRKTRFPRVRGAGDVRSPETILEHDRVIWLGDLNYRIALSYCSAKALVEMHSWKQLLEKDQLRMQQRYGRVFQGWKEGRIYFPPTYKYSFNSDRYAGEGRHPKEKRRTPAWCDRILWHGNGLSQLCYVRGESRFSDHRPVYGIFLAEVGVVRQRRRNNAGYFGSRVEVEELLPRSRSYRLRDDEVLLS

SEQ ID NO: 17695 - protein, 462 aa, Zea mays
  VARIANT 53: note = Ancestral polymorphism is P, Derived polymorphism is L
MPPSVDAMPAPGDAAGAGDVRMISSKELRAHASADDLWISISGDVYDVTPWLPHHPGGDLPLLTLAGQDATDAFAAYHPPSARPLLRRFFVGRLSDYAVSPASADYRRLLAQLSSAGLFERVGPTPKVQLVLMAVLFYAALYLVLACASAWAHLLAGGLIGFVWIQSGWMGHDSGHHRITGHPVLDRVVQVLSGNCLTGLSIAWWKCNHNTHHIACNSLDHDPDLQHMPLFAVSPKLFGNIWSYFYQRTLAFDAASKFFISYQHWTFYPVMCIARINLLAQSALFVLTEKRVPQRLLEIAGVATFWAWYPLLVASLPNWWERVAFVLFSFTICGIQHVQFCLNHFSSDVYVGPPKGNDWFEKQTAGTLDILCSPWMDWFHGGLQFQIEHHLFPRLPRCHLRKVAPAVRDLCKKHGLTYSAATFWGANVLTWKTLRAAALQARTATSGGAPKNLVWEAVNTHG

SEQ ID NO: 17696 - protein, 441 aa, Zea mays
  VARIANT 409: note = Ancestral polymorphism is P, Derived polymorphism is L
  VARIANT 337: note = Ancestral polymorphism is S, Derived polymorphism is L
  VARIANT 315: note = Ancestral polymorphism is R, Derived polymorphism is L
  VARIANT 302: note = Ancestral polymorphism is T, Derived polymorphism is I
  VARIANT 271: note = Ancestral polymorphism is G, Derived polymorphism is D
  VARIANT 264: note = Ancestral polymorphism is A, Derived polymorphism is V
  VARIANT 263: note = Ancestral polymorphism is S, Derived polymorphism is L
  VARIANT 250: note = Ancestral polymorphism is R, Derived polymorphism is G
  VARIANT 173: note = Ancestral polymorphism is R, Derived polymorphism is H
  VARIANT 12: note = Ancestral polymorphism is V, Derived polymorphism is E
MATRRMEQCAWVAEVERAVADGGASSEESSRWRQQCIYRVPTCIKNLNRKAYQPQVVSLGPFHHGEPQLRPMDTHKRRALVHFLRRARKPLAAFAGAVAAAGERLEAAYEGLGDEWRVGGGAAERFVELMVTDGCFLLETMRTATGWEVNDYDGEDPVFSAHGLLYNVPYIRRDMLMIENQLPLLVLDRLLAVENGKDGNEDVINRIVLLFLSPTAAWPLTTGTGLALHPLDMFRRSLLCGSPTPSGGPRAPPPDSPDDIIRSAEELYEAGVRFRRSATSSFLDIRFHRGTLYLPAIVVDDTTEYVLLNLMAFERLHVGAGNDVTAYVFFMDNMVDSARDVALLTSRRIVYNTVGSDKAVAKLFSGLSRDVVLEPHSALDDVHREVNAYCRKRRNRWRANLVHTYFRSPWSFLSLAAAVFLLVMTVLQTVYTLLPYYSDKS

SEQ ID NO: 17697 - protein, 111 aa, Zea mays
  VARIANT 18: note = Ancestral polymorphism is H, Derived polymorphism is R
  VARIANT 26: note = Ancestral polymorphism is E, Derived polymorphism is D
  VARIANT 28: note = Ancestral polymorphism is S, Derived polymorphism is L
MILEIGIGFSSSMTIAKRIASEIGVEASFLIKRKAQRKKHFDENEYNEEILQAEKDFELTKNRFEELQTFKSIFGFLLSSTTLKTLNDTELEACCSEFTKTFSSLDSFDVE

SEQ ID NO: 17698 - protein, 411 aa, Zea mays
  VARIANT 1: note = Ancestral polymorphism is M, Derived polymorphism is V
MAMVPSDSSHHGAVDNSPNGFTQGRREEARKLGPSWYFSRKEIEEHSPSRRDDIDLKKECSLRKSYCSFLQDLGMKLKVPQVTIATATVFCHRFFLRQSHAKNDRRIIATVCMFLAGKVEETPRPLKDVILVSYELIHKKDSTAGQRIKQQKEIYDKQKELILLGERIVLVTLGFDLNIDHAYKPLVEAIRRFNVGSKSSLPQVAWNFVNDGLRTSLCLQFEPHHIAAGAIFLAAKFLKVKLPSDGDKVWWQDFDVTPRQLEEKNKSGGKSDAGMDRFCHEKSPPGHHYSKVSHESHNPVEEQKPHQSHDNPNERIDGILGGNEVPGVSTSRIDAMNKIDKGKVKAALEKRRKTKGDITTKVDVMDDDDLLERELEHGVELAIEDEKIKQDKMQNLSHIKDKKITQDNMQN

SEQ ID NO: 17699 - protein, 116 aa, Zea mays
  VARIANT 10..116: note = Derived polymorphism lacks residues 10 to 116
  VARIANT 12..116: note = Derived polymorphism lacks residues 12 to 116
  VARIANT 15: note = Ancestral polymorphism is C, Derived polymorphism is Y
  VARIANT 20: note = Ancestral polymorphism is C, Derived polymorphism is Y
  VARIANT 41: note = Ancestral polymorphism is S, Derived polymorphism is F
  VARIANT 58: note = Ancestral polymorphism is T, Derived polymorphism is I
  VARIANT 76: note = Ancestral polymorphism is G, Derived polymorphism is V
  VARIANT 87..116: note = Derived polymorphism lacks residues 87 to 116
MAELVGPRVYSCCNCRNNVCLHDDILSKAFQGRYSRAFMFSHAMNVVVGAKEDRQLTIGLHKVADIYCSDCREVLGWKYERAYEETQKYKESSYLRSQRLSKKTGSVQIVTQQTFW

SEQ ID NO: 17700 - protein, 405 aa, Zea mays
  VARIANT 343: note = Ancestral polymorphism is D, Derived polymorphism is G
  VARIANT 322: note = Ancestral polymorphism is L, Derived polymorphism is H
MAKHHPDLIMCRKQPGIAIGRLCEKCDGKCVVCDSYVRPCTLVRVCDECNYGSFQGRCVICGGVGISDAYYCKECTQQEKDRDGCPKIVNLGSAKTDLFYERKKYGFKKRKFSVDRLKLETPPLPPPTRAPMAATAISVRLHPTAARHVASARRARLGAVRAQSAPAAAAAALTQDDLKRLAAVRAVEQVKSGMVLGLGTGSTAAFAVAEIGALLAAGKLEKIVGVPTSKRTFEQAQSLGIPLSTLDDNPLIDLAIDGADEVDPDLNLVKGRGGALLREKMVEAASDKFIVIVDETKLVDGLGGSGLAMPVEVVQFCWKYNLVRLQELFKEEGVEAKLRFEGDKPYVTDNSNYIVDLYFKTPIKDALAAGQEIAALEGVVDHGLFLNMASSVIIAGTDGVSVKTK

SEQ ID NO: 17701 - protein, 267 aa, Zea mays
  VARIANT 106: note = Ancestral polymorphism is D, Derived polymorphism is G
MAAVGEEFFRLPAEEKLPFYSEDANKATRLFSGTTYETGGEKYWRDCLRFAYDFGAGDRIKDWPDKPRRLREVAENFTVLTRGLAMDLLRLLCEGLGLQHDYFEGDLTGGDVTLDINHYPPCPNPSVTLGLPPHCDRDLIAVLLPGPVPGLEVVYKGEWVKVVADPTVPHALVVNLGQQLEVVTNGVLRSIEHRVMTNSAMARTSVALFVAPTEDCLVGPAEKFLSQENPPCYRTLKFHEFKRTYNVVKLGSSINQRTNLRNTQKEI

SEQ ID NO: 17702 - protein, 502 aa, Zea mays
  VARIANT 426..502: note = Ancestral polymorphism lacks residues 426 to 502
MPLPLSSPRDSQVTHAPLHSVHYFHLIATTTSTWNLEERETMACRPPCPCGCFCFYMVFFLGLLLVEAVHGTGRSEVAAAAPTPSLVPAEASVLRRIAARLGVSSWDFTAGAGPCDHGDSGVHCDCSFSNGTVCHVTEIFLKGQNFSGELPPDFADLPYLLQLDLSRSLFHGGVPHQWARMKLQGLSLMANRLSGPFPMVLTKITTLTNLSIEGNEFYGPIPPEIGYLIRMEKLILSTNEFTGPLPAALSLFSNLTDLRISSTNFSGRIPDFWGNLKRLDKLQIEGSFLEGPIPSSLSELKNLSDLRISDLRGSGSSFPDLSGMTYMNKLVLRNCSISGSIPPYIGTWTSLKHLDLSFNKLSGEIPPSFASMGAVDYIYLSGNSLTGNIPGWLLRRNKIANASMTHVMIEIALNQLSFLPMSTLVYLVTAKREKNVQYLDISFNNFTMGSSGPSQCLQGSVNLVESYSAEVNRLNSIHPCLKRNFPCVASNGQCKLISSIHS

SEQ ID NO: 17703 - protein, 381 aa, Zea mays
  VARIANT 359: note = Ancestral polymorphism is K, Derived polymorphism is E
  VARIANT 100..381: note = Derived polymorphism lacks residues 100 to 381
  VARIANT 86: note = Ancestral polymorphism is L, Derived polymorphism is P
  VARIANT 54: note = Ancestral polymorphism is P, Derived polymorphism is L
MDREALRMLCSPQFWRMAVLWALSLLHSYLLVFHCGRADAPRRRRPRPAEGRCPICVVTGATSGLGRAAAAALAREGYHVVLGESLASVPVLLLALAFRRAAGRSTQLLYEQTVQEIQRQQPDAHLKEFQVDLASFKSIKKFGSSLKQWVHEKNVEPSIQLLVNNAGILAKSHRITEDGLDEMIQTNYIGPFMLTNILLPLLKNSSVPSRVVNLTSFTHRCVSGLDVCEDALRGMKFGRCSIGESYPLASTYEYTKLCMLMFSYELHRQLHMSSGVSVIAADPGVVETKIMRELPECLSWFAFLALRSLKLLQEPDTGVGAVLDAALALPEESGKYFFGGKGRTIRSSRLSYDAEVAKKLWAESSAVFKELQLRGGDFGDS

SEQ ID NO: 17704 - protein, 482 aa, Zea mays
  VARIANT 22: note = Ancestral polymorphism is R, Derived polymorphism is H
  VARIANT 168..482: note = Derived polymorphism lacks residues 168 to 482
MALKQKDTDAAATATGTKKRRRVFFSDTDELVKPLSISYCCADAGVEANECMKVFLVWNPGEVSSVDCTAIQPFDLNHFFGEDGKIYGYKNLKINVWISAKSFHGYADVSFDETSDGGKGITDLKPVLQNIFGENLVEKEEFLHTFSKECEYIRTAVTNGSAIKHDGSYESDPAVEIVRVELQGAAAFLYSRLVPLVLLLVEGSTPIDIGEHGWEMLLVVKKATQEAGSKFELLGFAAVHNFYHYPESIRLRISQILVLPPYQGEGHGLGLLEAINYIAQSENIYDVTIESPSDYLQYVRSSIDCLRLLMFDPIKPALGAIVLSLKETNLSKRAQSLRMVPPADLMETVRQKLKINKKQFLRCWEILIFLSLDSQDHKSMDNFRACIYDRMKGEILGSASGTNRKRLLQMPTSFNKEASFAVYWTQEIEDEDEQTVEQQPEDLKTQEQQLNELVDIQIEEIAGVAKNVTSRCKDKMTELVVQ

SEQ ID NO: 17705 - protein, 281 aa, Zea mays
  VARIANT 25: note = Ancestral polymorphism is P, Derived polymorphism is L
MIVVPQTTTVNMVLAFLVLLLLFAPVAVSQQGTSLSLHCMHSHIWPRSELDDEPYIVWRTGFLSIDCGLDASYSGYKDKVTGIVYVSDGSYVDAGENHRIAPDLEGSFQGRAQTLRSFPSGQRNCYLLPTVAGTRYLARATFAYGNYDGKNSSALEFDLHLGANYWQTVYPNARSSDVYEAVFVAWAGWAPWCLVNTGHGTPFVSVLELRPLGAELYPLVTPGLVVSMFARINMGGSVSMTRYVFLHYCGTHREVGGPPCFKRTSVSCLLRGLANFFQVSS

SEQ ID NO: 17706 - protein, 1129 aa, Zea mays
  VARIANT 175..1129: note = Derived polymorphism lacks residues 175 to 1129
  VARIANT 186..1129: note = Derived polymorphism lacks residues 186 to 1129
  VARIANT 191..1129: note = Derived polymorphism lacks residues 191 to 1129
  VARIANT 222..1129: note = Derived polymorphism lacks residues 222 to 1129
  VARIANT 322..1129: note = Derived polymorphism lacks residues 322 to 1129
  VARIANT 499..1129: note = Derived polymorphism lacks residues 499 to 1129
  VARIANT 786: note = Ancestral polymorphism is N, Derived polymorphism is K
MVMVPPGEWVPHVEAYVDVSRPAVQHSASVDALAALVNKDKLTLFDLVSKMDLYLTTTDHIVRSRGILLLGETLSRISFKYLDVITITTLSDFFISRLSDWQAIRGALVGCLALLHRKHGVGCIVIADVKRLVESFLQNVPVQSLAAADRKLCFEILSCILDRYPEAVKQMDGEQLYGICEAIDEEKDPECLMLSFHVVEVVMKLFPDPSGLAAQFAGDVFEILSKYFPVYFTHGVGNGLDTTREDLSRALMHAFCSTQYFEPFVIPLLLDKLSSSLPLAKIDSLKYLDKCIRFYGADRMVRHASAVWYKLKEVIFNLSSDQLLISEALNCLKTAIMYTDSSDKDLFINLILLDEDIVNKIHSVSSVEKTILSSLEDLAQLHALGSVISILAESSTYFCTRVLQEHFAHLVDIVGTKADYESWQLNNCNGSSSAPVNYGALYLSVQLLSSCREVALVSYEDFSSVKLAKGSWWLILQKKLEQLIHLLRSIFAIASQSMQPNFRQEYVSCAVKGLLTLATFPEQCSPLPANAYEDILLMFTSIIINKFENLDLWRLSLKALASIGSSIAKFHASEREVVYYRTVVDKIVSLAESYDTSMPLGLRLEASYEVGTAGLNYMLRVAKSLEVAVVTNISESEANGRMECADHVAHLFECYSNRVLPWLLASGGVNELALSFALHLLDETEDLTVLDRISSQGLLDSLMTGMKLLVGVCTEEQQSLIVQKAHSTISSMLSLPMELMTDRLLPVDELVPLHSVSETALISMFSSIIIGLRPQTPVPDMMVMIKLFTVFLLNGKMPAAYALASIFNKYLHNPEFSHENQMDKILDDILERCFSTVLANSCSKTSQSCAGTSDVNFSDVSSRNKLSKINILSSLAWIGKGLLMRGDEKVKDISMFLLKILFSDEILSTVPSHQEEPYGGDSSDTSLAISAASAFHVMMSDSEMCLNKKFHARIKPLYKQRFFSIMMPIFLSKIKETTVVTTKLALYRAFGHIISNAPVPAVITEAHQILLVMVDSLAKLSMDVGDKDLVYSLLLVFSGMLMDEKGKECILDNIQITISVLTELVSYPHMMVVRETALQCLVAFSTFPHSKIYPVRRKVVQAAVRALDDKKRAVRRVAVRCRHTWQSFT

SEQ ID NO: 17707 - protein, 243 aa, Zea mays
  VARIANT 68: note = Ancestral polymorphism is K, Derived polymorphism is M
  VARIANT 93: note = Ancestral polymorphism is E, Derived polymorphism is V
  VARIANT 96: note = Ancestral polymorphism is K, Derived polymorphism is E
MSMIDVITRVDAICKKYERYDTDKHGDPFSRLYAAVDAGIDAAIEVSGLPSLGLPLAALKTKSARAAKKKKNRAASVTLDADVRRTKARLLEVVVKLQKVAARKVNGLSPEEKVSRAAERLEEGYFQTSEESEQFRREYEMRRMKQTEFRWDVQDEGLDFVSQGLDTLKNLAEDMNQELDRQVPLIDEIDTKVDKASLEIRRTNVRLRQTVNQFRSTRNFTIDIILICIILGIATYLYNILSQ

SEQ ID NO: 17708 - protein, 174 aa, Zea mays
  VARIANT 23..174: note = Derived polymorphism lacks residues 23 to 174
  VARIANT 28: note = Ancestral polymorphism is E, Derived polymorphism is K
  VARIANT 33..174: note = Derived polymorphism lacks residues 33 to 174
  VARIANT 40: note = Ancestral polymorphism is Q, Derived polymorphism is H
  VARIANT 105..174: note = Derived polymorphism lacks residues 105 to 174
MWSSSTPRVYRSWVRIQNKFRGWKGRKEFMLIWQKIVKIQVRKNYRKVVWSVGIVEKVILRWRRKGRGLRGFQPEKQLEGPSWQIQPAKAEAEDEYDFLKDGRKQATGRLDRALARVRSMNQYPEARDQYRRLQACAMQDRMLADSAGTDGGDFMTELEELCRDDGDAPMSTIS

SEQ ID NO: 17709 - protein, 144 aa, Zea mays
  VARIANT 3: note = Ancestral polymorphism is E, Derived polymorphism is K
  VARIANT 10: note = Ancestral polymorphism is R, Derived polymorphism is C
  VARIANT 14: note = Ancestral polymorphism is D, Derived polymorphism is N
  VARIANT 15..144: note = Derived polymorphism lacks residues 15 to 144
  VARIANT 27: note = Ancestral polymorphism is L, Derived polymorphism is V
  VARIANT 34: note = Ancestral polymorphism is T, Derived polymorphism is I
  VARIANT 36: note = Ancestral polymorphism is T, Derived polymorphism is M
MIEYISPRPRVELDQAATTLQKAYKFLKLLTRATATATTCTSTTTSGARAPAASPSSTGWMLAKAETCIARNAHEASSTHSSSCTSDQTRGQRHGGRPGAVQAERRSGEHERGVQVDLRAEHQQVADGAVAPMELDGVIRLDWV

SEQ ID NO: 17710 - protein, 313 aa, Zea mays
  VARIANT 291: note = Ancestral polymorphism is R, Derived polymorphism is W
  VARIANT 249: note = Ancestral polymorphism is L, Derived polymorphism is F
  VARIANT 219..313: note = Derived polymorphism lacks residues 219 to 313
  VARIANT 173: note = Ancestral polymorphism is G, Derived polymorphism is S
  VARIANT 31..313: note = Derived polymorphism lacks residues 31 to 313
MEGVTTWRRSRGAAGGGGGRAVAAGAKAGRQVEAGGRPAQGQGRGDVPIAGAGVPPVPRRAGAIHELHGGRECPFDEASTQRLMLKGCEPQPRHRCRPRTPAEYVEPTPLSASLWAVPPDTGIVWDAYTCKSYAASRGAARPRTTTTARTALTSASGRRTARGSVRIGLDIGGGSRTFVARMREHGVMVVTTSVNFDGPFNNFIASRGLVPMHLSVASRLPFFDGTLNVVHSMHVLSSWIPDAMLESAFFDVFRVLRLGGVFWLDHFFCLGSQLDATYLPMFDRIGFKKLWWNAGKKLDRGIHMDEWYISALL

SEQ ID NO: 17711 - protein, 432 aa, Zea mays
  VARIANT 364: note = Ancestral polymorphism is R, Derived polymorphism is C
  VARIANT 336: note = Ancestral polymorphism is R, Derived polymorphism is C
  VARIANT 322: note = Ancestral polymorphism is R, Derived polymorphism is C
  VARIANT 315: note = Ancestral polymorphism is R, Derived polymorphism is C
  VARIANT 292: note = Ancestral polymorphism is R, Derived polymorphism is C
  VARIANT 271: note = Ancestral polymorphism is Q, Derived polymorphism is L
  VARIANT 178: note = Ancestral polymorphism is K, Derived polymorphism is M
  VARIANT 176..432: note = Derived polymorphism lacks residues 176 to 432
  VARIANT 95..432: note = Derived polymorphism lacks residues 95 to 432
  VARIANT 68..432: note = Derived polymorphism lacks residues 68 to 432
  VARIANT 65..432: note = Derived polymorphism lacks residues 65 to 432
  VARIANT 34..432: note = Derived polymorphism lacks residues 34 to 432
MEGGKPTIVTNAEAARTTPSVVAYTKSGDRLVGQIAKHKVVVNPENTFFSVRRYISRKMNEVDEESKQVSYPVIRDDNGNDKLDWPALGKQFAAEEISAQLNLYLVLLPLDGQRGVVVDVPLTDSSSATVEEISQPNPKDGSPGVASAIPETDLPEIVQVIRSCRDGIHKVVELLQHKFPNVSKTQLNRKVKKEVLDKLGLDSSPVKSKKNKSIAMFLDKAAVEMADDKSRRRLASAWRLCTVTQVEDLKCVLRLLPVWASGIVFAAAYTQMTTTFVLQGDTLDLHVGGGFRVPAAALSVFDTLSVMLWVPLYDRLVVPLARRATGHRRGFTQLARMGAGLLVLAAAMLATGALEVARRHVVARHGVYYDTHTGAARYLPLSIFWQVPQYVVVGASEVFTLIGQIEFFYDQAPDAVRSICSGLSITSFALGN

SEQ ID NO: 17712 - protein, 195 aa, Zea mays
  VARIANT 82: note = Ancestral polymorphism is L, Derived polymorphism is F
MTGKKRKAEAARLEETDQALYGAFRGAANSLSQLYTLAMGAQKASFNAGERHAMEKLYEWILRQHENGLRLTVADVASRIQLEIQYGGDNASASPRPQYPSQSTAPTVHIPNTSNQQPSPSLFAPGNPGLTQSKNSMVFSNALSSPIRRSLQPYHLEQDGDTGYFVNGASRDMNPTASNDSSMDMHSDSPVHDSY

SEQ ID NO: 17713 - protein, 307 aa, Zea mays
  VARIANT 116: note = Ancestral polymorphism is G, Derived polymorphism is D
MATTVMASATASSPAFSAPGARARRAARLPAGFRGRVAAPPRRLALLARASQQADDAAADTSASAAPAARKLGLWDALAFSGPAPERINGRLAMVGFVSALAVEATRGDGILSQAGNGAGLAWFAYTAAVLSAASLVPLLQGESAEGRSGRFMTADAELWNGRLAMLGLVALAVTEYLTGAPFVNRKRRRRRPRPPPPPSFSSPHTPAAAAAPTARAKAAGPRLWDALAFGGPAPERTNGRLAMVGFVSALAVETDAGSGLACDSAEVRSGAVMSADAELWNGRFAMLGLVALAFTAHRRPAHQRLD

SEQ ID NO: 17714 - protein, 95 aa, Zea mays
  VARIANT 86: note = Ancestral polymorphism is R, Derived polymorphism is Q
  VARIANT 56..95: note = Derived polymorphism lacks residues 56 to 95
  VARIANT 39: note = Ancestral polymorphism is F, Derived polymorphism is L
  VARIANT 26..95: note = Derived polymorphism lacks residues 26 to 95
MLQSTRWPLLRRQYRVEQMQPEYNLQLKIFIGRIVFSSFNAESSFGLEAELWIIGWHLAALAPGVPLISFSSSRLFLVHIAGVETRRSRSRLYAS

SEQ ID NO: 17715 - protein, 683 aa, Zea mays
  VARIANT 453..683: note = Derived polymorphism lacks residues 453 to 683
  VARIANT 579..683: note = Derived polymorphism lacks residues 579 to 683
  VARIANT 549: note = Ancestral polymorphism is P, Derived polymorphism is L
MGMSAASHLCASSSLRALTVLFVLAAFVSDVEGRHRRHVCPPYFSCGGLSNISYPFRRQGDPSGCGVQSYELVCTDTDATIRIGSGTYKVLSINSTYSYFWVVDADLDIQSSCPLPRWDYPARWINRNSHRWRIEFSHYYLYSSFYTVSRWAIFVNCSQPIENNDICNNIYDDDVYGPVSCLSNSSFIYLLVTDNWDVISAGDLEPSCGYLAKTPLGGPGMTVPSNTSYPDVVKFMRNGFALGFPFSIRSYPTIRECLAENMRTFHKEPRNSTGIRQQILDILTFETLWFCVIEQLGSTNNGVKSVLIDIIQQIPYVLSSLKSAHVICRFVLMPLAVFVFLAYKYWKTQITIDAVEKFLRMQNMLVPMRYAYTNIIAITGHFRDKLGQGGYGTVYKGVLLPGEIHVAVKMLGNSNCNGEEFISEVATIGKIHHVNVVRLIGFCSEENIRALIYEFMPRGSLDKYIFSSEKTFSWDKLNEIALGIARGLNYLHHGCDMQIVHFDIKPHNILLDSNFVPKVADFGLAKLFPRDDSFVPLSAMRGTIGYIAPEMVSRSFGIISSKSDVYSFGMLLLEMTGGRRNADPHAGSSSQAYYPSLVYRQLSQGDANRISEGVDMHELEKKLCIIGLWCIQMKPQDRPTMSEVIEMLEAGVDGIQMPPRPYFCDEEGDSSYSTISELDTIEE

SEQ ID NO: 17716 - protein, 691 aa, Zea mays
  VARIANT 51: note = Ancestral polymorphism is T, Derived polymorphism is M
MAAASASTRQATAEACSSHVHHAHLAALLNASARLPPLPLSRLHLPLSLPTASRLVASFPPLPLLVCFLRALRLLPSSPPRPFDSLIKSYASLPNRASLAAAALAFARSAGYVPSVLAYNAVLLALSDASLTSARRFFDSMLSDGVAPNVYTYNILIRALCGRGHRKEALSILRDMRGAGCGPNVVTYNTLVAAFFRAGEVDGAERLVGMMLDGGLKPNLVTFNSMVNGMCKAGKMEDARKVFDEMMREGLAPDGVSYNTLVGGYCKAGCSHEALSVFAEMTQKGIMPDVVTFTSLIHVMCKAGNLEWAVTLVRQMRERGLQMNEVTFTALIDGFCKKGFLDDALLAVRGMRQCRIKPSVVCYNALINGYCMVGRMDEARELLHEMEAKGLKPDVVTYSTIISAYCKNCDTHSAFELNQQMLEKGVLPDAITYSSLIRVLCEEKRLSDAHVLFKNMIKLGLQPDEFTYTSLIDGHCKEGNVERALSLHDKMVKAGVLPDVVTYSVLINGLSKSARAMEAQQLLFKLYHEEPIPANTKYDALMHCCRKAELKSVLALLKGFCMKGLMNEADKVYQSMLDRNWNLDGSVYSVLIHGHCRAGNVMKALSFHKQMLQRGFAPNSTSTISLIRGLFENGMVVEADQVIQQLLNCCSLADAEASKALIDLNLNEGNVDAVLDVLHGMAKDGLLPSPR

SEQ ID NO: 17717 - protein, 648 aa, Zea mays
  VARIANT 486..648: note = Derived polymorphism lacks residues 486 to 648
MADGASSSGGAQNGGESVVIDYGRRRTTCGYCRSSGPTSISHGMWANSLKADDYQALLDRGWRRSGCFLYKPEMERTCCPSYTIRLKANDFICSKEQARVLKKIQRFLDGELDPQIGSPQCKASPTKRSLGEPLNSPTSKVSKVSAEEFQKGTSPNILKEDDIICCLANKINEATATCFRGGVFGSVQLPKAVVKTVKPQVKRKVGEAVQEKKVGEAVQALVYTCNISFQIVAAVRRALPKENGATQTEVPADLSPNSVAEKLSVAMERLGELAGFEVKACNGHLNFYLASNQAMQNHTSVVVPVQASDKSSGSKPSSVNQTNAKYPLKRKNLEIRLSTSHFDPEEFALYRRYQTKVHKEKAVTESSYKRFLVDTPILFVPPKTGDNTVPPCGFGSFHQQYRIDGKLVAVGVVDILPKCLSSKYLFWDPDLPFLSLGKYTALKEIDWVKTTQEHCPSLQYYYLGYYIHSCNKMRYKAAYRPSELLCPLRYEWVRYDLAKPLLDASQYSVLSDYATMQGEVPQPQICGPSDDSSAKVDHHESPSDEDEDDDDEDFDNYESDMMVDEETIHSEKPDTAEGSSEINDINNITLDLKGSRVKFKVHTQNLTSNRKDDDGPMRSVRRNKGTSSGGTKIAFVVFIRKFASFFCH

SEQ ID NO: 17718 - protein, 107 aa, Zea mays
  VARIANT 5: note = Ancestral polymorphism is F, Derived polymorphism is L
  VARIANT 22: note = Ancestral polymorphism is R, Derived polymorphism is K
  VARIANT 66..107: note = Derived polymorphism lacks residues 66 to 107
  VARIANT 69: note = Ancestral polymorphism is F, Derived polymorphism is V
MGGSFPLNGTYFQVNEVFSNHRSSHNPIHVKREQLWNLQRCMVFFGTSVPTIFRGLTTEEIQHCFWRGVVCVRGFDRETRAPRPLCPHLHIVARPKVRKTAATEQVL

SEQ ID NO: 17719 - protein, 165 aa, Zea mays
  VARIANT 75: note = Ancestral polymorphism is T, Derived polymorphism is I
MLIRVHLFVFKDKDVIGISAVSRMKVIAAYLLAVLGGNTSPTADDVKSILESVGAEADEEKLEFLLTELKDKDITEVIAAGRERLSSVPSGGGAIDMGAPAAVAGGGAAPAEEAKKEEKNLRIRKSNFGQKTGIENFGTKLKSLTTYEEGDTTLEGQDMGFSLFD

SEQ ID NO: 17720 - protein, 591 aa, Zea mays
  VARIANT 26..591: note = Derived polymorphism lacks residues 26 to 591
  VARIANT 188: note = Ancestral polymorphism is D, Derived polymorphism is G
MYMNWYSVLNGRKVFEGMLKRNVVTWTSLLTGYIQAGVLLDVMSLFFRMRAEGVWPNPFTFSSVLSVVASQVWLLLHCVCVQFSDEMYAKCGLLVEEARVVFCRMETRDMVSWNTLMAGLVLNGRDLEALKLFHDSRSSITMLTESTYSTVIKLCANLKHLGLARQLHSSVLKRGFHSYGNVMTALMDAYSKAGQLDKALDIFLLMSGSQNVVSWTAMINGCIQNGDIPLAAALFSRMREDGVAPNDLTYSTILTVSEASFPPQSHAQVIKTNYECTPIVGTALMVSYSKLCGTEEALSIFKMIDQKDVVSWSAMLTCYAQAGDCNGATNAFIKMSMHGLKPNEFTISSAIDACASPAAGVDLGRQFHAISIRHRCHYALCVSSALVSMYARKGSIENAQCVFEKQTDRDLVSGNSMLSGYAQHGYNQKALDVFRQMEVEGIEMDGLTFLSVIMGCTHAGLVEEGKWKEKDEVRKLMDTKKVKKEAGCSWIQIKNKVHFFIASDKSHPLSEQIYAKLRSMTAKLKQEGYCPDTSFVLHDVAEDQKEAMLAMHSERLVLAFGLIAIPPGAPLHIFKNLRGVRGRPYSDENGL

SEQ ID NO: 17721 - protein, 194 aa, Zea mays
  VARIANT 59..194: note = Derived polymorphism lacks residues 59 to 194
  VARIANT 46..194: note = Derived polymorphism lacks residues 46 to 194
  VARIANT 16: note = Ancestral polymorphism is A, Derived polymorphism is V
MRNPSDDPVYSGYRVAVDASAQEETLLGFAIWEPSHGPYKTMNYPWRTFTKVSGALRHCSFAVMALHGCILSEIQAPPESRRVFSAEIQRVGQEGAKVLRELGSRVKTMTKLSSSGILFEVHMAAEELQKKIDEKSYLLVNTERWDASKQAQGIKEVVNGTRAVETENKNKEILLHRINTFQRNAKAKLQSDNC

SEQ ID NO: 17722 - protein, 515 aa, Zea mays
  VARIANT 144..515: note = Derived polymorphism lacks residues 144 to 515
  VARIANT 320..515: note = Derived polymorphism lacks residues 320 to 515
MAAQLLFSNASSCHCPLGISRINVGKTLLGESASFQRKKSFSGGSYRFSRFDCSANSRRAGPRRTKDTLYDLHPEISLLYGEDNGAATLSSKEQGIDTTAERLVDTSPSYRYNEPRIKVIGVGGGGSNAVNRMIESSMKGVEFWIVNTDFQAMRMSPIEPENRLQIGQELTRGLGAGGNPEIGMNAAKESQELVEQAVAGADMVFVTAGMGGGTGTGGAPIIAGIAKSMGILTVGIVTTPFSFEGRRRALQAQEGIASLRSNVDTLIVIPNDKLLTAVSPNTPVTEAFNLADDILRQGVRGISDIITVPGLVNVDFADVRSVMSDAGSSLMGIGTATGKTRARDAALNAIQSPLLDIGIERATGIVWNITGGNDLTLTEVNAAAEVIYDLVDPGANLIFGSVIDPSYTGQVSITLIATGFKRQEESESRSSQVSIATSFVCFPLECIFMSSNSTLCPGWRRQQPRSLGLVFSHFPGGRSCIADPGVPTEERASRVSTSLNTLWFNVFLVIVWYDV

SEQ ID NO: 17723 - protein, 405 aa, Zea mays
  VARIANT 38: note = Ancestral polymorphism is V, Derived polymorphism is A
MAMARAELRTVTVRSSPLPRCVLSRLLPLLLSVSAIGAASAAPLKFGINYGQIANNLPQPTQVSGLLQSLNVNRVKLYDADPIVLTAFAGTGVEFIIGNDDLYNLTDARKARAWVAQHVQPFLPSTRITCITVGNEVLSGKDTTAMQSLLPAMQTVYQAVVALGLGGQVNVSTAHSVNILASSYPPSSGAFREELGQYIQPILNFHAEVGSPFLINAYPFFAYKASPGSVSLPYVLFEPNPGVVDPNTNLTYDNMLYAQIDAVYAAMEAMGHSDLTVRISETGWPSRGDEDEVGATVANAAAYNGNLMKRIAMGQGTPLKPHVPVDVFVFALFNEDMKPGATSERNYGLFYPNGTPVYSLGFNGASFSPSPTYSSSSKLVITFQMAVVVLLASFSILHTAVPCHA

SEQ ID NO: 17724 - protein, 95 aa, Zea mays
  VARIANT 4: note = Ancestral polymorphism is A, Derived polymorphism is T
  VARIANT 10: note = Ancestral polymorphism is V, Derived polymorphism is M
  VARIANT 11: note = Ancestral polymorphism is R, Derived polymorphism is Q
  VARIANT 26: note = Ancestral polymorphism is S, Derived polymorphism is L
  VARIANT 27: note = Ancestral polymorphism is S, Derived polymorphism is A
  VARIANT 35: note = Ancestral polymorphism is D, Derived polymorphism is N
  VARIANT 36: note = Ancestral polymorphism is V, Derived polymorphism is I
  VARIANT 37: note = Ancestral polymorphism is V, Derived polymorphism is I
  VARIANT 39: note = Ancestral polymorphism is R, Derived polymorphism is C
  VARIANT 40: note = Ancestral polymorphism is G, Derived polymorphism is D
  VARIANT 42: note = Ancestral polymorphism is F, Derived polymorphism is L
  VARIANT 46: note = Ancestral polymorphism is V, Derived polymorphism is G
  VARIANT 47: note = Ancestral polymorphism is R, Derived polymorphism is H
  VARIANT 62: note = Ancestral polymorphism is K, Derived polymorphism is M
  VARIANT 69: note = Ancestral polymorphism is D, Derived polymorphism is Y
  VARIANT 73: note = Ancestral polymorphism is H, Derived polymorphism is Y
  VARIANT 79: note = Ancestral polymorphism is R, Derived polymorphism is W
  VARIANT 81: note = Ancestral polymorphism is R, Derived polymorphism is M
  VARIANT 94: note = Ancestral polymorphism is P, Derived polymorphism is L
MEDAMGNKIVRTTQASATEYYLHDLSSTYNLVLLDVVSRGRFLKSVRCKHDEGLLLVKVYFKRAGESIDLKEHERRLERIRNAFKGIEGSHVWPF

SEQ ID NO: 17725 - protein, 166 aa, Zea mays
  VARIANT 156: note = Ancestral polymorphism is E, Derived polymorphism is K
  VARIANT 154: note = Ancestral polymorphism is R, Derived polymorphism is W
  VARIANT 151..166: note = Derived polymorphism lacks residues 151 to 166
  VARIANT 141: note = Ancestral polymorphism is R, Derived polymorphism is C
  VARIANT 135: note = Ancestral polymorphism is K, Derived polymorphism is M
  VARIANT 132: note = Ancestral polymorphism is A, Derived polymorphism is T
  VARIANT 130: note = Ancestral polymorphism is P, Derived polymorphism is H
  VARIANT 129: note = Ancestral polymorphism is V, Derived polymorphism is I
  VARIANT 117: note = Ancestral polymorphism is S, Derived polymorphism is F
  VARIANT 104: note = Ancestral polymorphism is P, Derived polymorphism is L
  VARIANT 98: note = Ancestral polymorphism is V, Derived polymorphism is A
  VARIANT 93: note = Ancestral polymorphism is A, Derived polymorphism is T
  VARIANT 83: note = Ancestral polymorphism is V, Derived polymorphism is I
  VARIANT 68: note = Ancestral polymorphism is A, Derived polymorphism is T
  VARIANT 57: note = Ancestral polymorphism is S, Derived polymorphism is L
  VARIANT 53: note = Ancestral polymorphism is G, Derived polymorphism is S
  VARIANT 22: note = Ancestral polymorphism is H, Derived polymorphism is D
  VARIANT 19: note = Ancestral polymorphism is A, Derived polymorphism is D
MDPPPPSTSWTPWLATPRAPPHHPKLLLVFVYRAQAVVGSGEKIWQDEAKGTGDSDSAFFPVILDLLACRDQHGLPARRIAIVDDLSDDSAFAGKWTVQNYLFPENVVVLLHVRPTSVLYDIDWGSIAIHVATAMDVRRHRQGVPSKEEMQKKREEGYDVFTSTKV

SEQ ID NO: 17726 - protein, 751 aa, Zea mays
  VARIANT 384..751: note = Derived polymorphism lacks residues 384 to 751
MAVRATVSRFPATPEALESCAVQWGVAVTPFAAADEHGQPPTTGAGGDRVPRCEHCWAYLSSHCDLERWGWTCALCGTLNGFDDEAERRFQRPDVCPELKSSFVDLEILVDEAEGGGDGVQALPVYVAAVDLACSEEFLELVKSALLAALEALVPGSLFGLMTFSHKIGLYDVQGPIPLVKNVFIPPDLEEDGLPVALEDAMPLLCFLAPIVNGQVDTCKDQIAAVLETLRPTSSWERGVASGQEEDTVLLGRRGFGTAMSALIEYLSSEYGSTFALARVFAFLSGAPDYGAGVLDTRRYGEQYASKGVDADLALLPEQIPFYRDLAAVAVQSGVCIDIFAVTDEYTDLASLKFLSIESGGSLFLYASTDDSTVPQDIYRLLSRPYAFGCVLRLRTSSDFEPGNSYGHFFPDPQYENVQHIICCDSFATYAYDFEFAHNDGFSRHTDPAVVQIAFQYSVIEPVKETSGNGSQPSASYKFCLKRRLRIRTLQYRPTNNISEIYDSVDPEVVLHILVHKVILESLDKGVREGRHQVHAWLSLLAARYNQALSSDVRPLSSIDIDFSQCPQLQTIPQLVFALLRSPLLRLHEEGVHPDYRIYLQCLFSALEPSSVAKAIYPVLISYSSPDKQAFPRHTLSHAALIMSESPIFLLDTFTNLIVYYSSTADPSVPFPPPHDCLLRKTINGLKQDRCITPKLTFIHGGKDDSTLFESYLIEEQDVDGSGLTTGSGFVAFRESVRNVAGEIIQEEIGS

SEQ ID NO: 17727 - protein, 237 aa, Zea mays
  VARIANT 36: note = Ancestral polymorphism is R, Derived polymorphism is Q
  VARIANT 37: note = Ancestral polymorphism is R, Derived polymorphism is W
  VARIANT 54: note = Ancestral polymorphism is E, Derived polymorphism is D
  VARIANT 74: note = Ancestral polymorphism is D, Derived polymorphism is N
  VARIANT 80: note = Ancestral polymorphism is A, Derived polymorphism is V
  VARIANT 89: note = Ancestral polymorphism is P, Derived polymorphism is L
  VARIANT 101: note = Ancestral polymorphism is A, Derived polymorphism is V
  VARIANT 121: note = Ancestral polymorphism is A, Derived polymorphism is V
MRDPWRQSNAAPSPSLAPATPPAPATSSPAALLRPQREAFEHGLLPIPKLIFPEGMLAQTLAQLKEKLAASVPDGRVRAAALAKAQQIPQEQAALALGTLAAMLPAEDPVLGDGAMDGAAADIRDVLLFLYIQSYKRLVHLRVRWVPLCALPDPGAALGALSNKLVRSNSRRFMPSQANEEIHQLSFLQKHMANILTLLADSVEGEGDDSLGYWQNFTIGIVPGFHELQHLTSSLAS

SEQ ID NO: 17728 - protein, 283 aa, Zea mays
  VARIANT 32: note = Ancestral polymorphism is G, Derived polymorphism is A
MAEPAPGFRFYPTEEELICFYLRNKLSGTRRGDDIERVIPVADLTTTMALRHTTHAYADEAHRGAYSGDEEPWFYFCPRQEREARGGRPSRTTPSGYWKAAGTPGLVYAADGRPIGTKKTMVFYCGRAPGGTKTKWKLNEYKAFQYEDDDEVAVVAAPAPPTTPSHALQTRSEYSLCRLYTKSGSPRQFDRRPSSSAAVVAAGGGGSEHPARPPSAAALPDGEQTRQRRKRAAPPSDDDTSSSSYDDGSTQQQQLLLADRGTDNDGIVEDMADWSEFLDGWII

SEQ ID NO: 17729 - protein, 512 aa, Zea mays
  VARIANT 308..512: note = Derived polymorphism lacks residues 308 to 512
MAEGETSAEEKRRRTGPPEAQELEETKRRRTGPPEAQELEERLDSLRDKIAAARLVAGSRFGEEQRRSLLREWLRLASAKLDLDLSGMSELDRSAEALPWLVPPEEADKRTTHTRQEVQELEERMTCLQLLSEDAADDRILARRELGAAADEFLLRLTTRQRALAREYSRLANLKRPPDLSGMTEADRGAEAERLREEMLQKARQLQDQGDMSGARESEGLARIIDFDVKQGGEYLNSICCVGNIYTFDHTEESPVGPMRFTNRPWQDKMCVNCASINILSVKIACSDIDFPIQVYGTVVARDCIDYKCVYLFRRDNDHCQLISSNEESLILTGPKRGLALWYDADYVQTDLWVKDRQGHCKQFSKGIVRIPGNQVFDKCEPETVSLATRLSTVDVTYDVVECAVEATVAAEVTQGEFYGAMTAHTTRSKRRIVLFDSQVGGDKCHGLIQLMRPVVSVSVMDKLKIFATTAAGVSTGVEVTPRWNGGHEFVLTLGDATICVKVTWSMVDPRL

SEQ ID NO: 17730 - protein, 512 aa, Zea mays
  VARIANT 321..512: note = Derived polymorphism lacks residues 321 to 512
  VARIANT 320..512: note = Derived polymorphism lacks residues 320 to 512
  VARIANT 315..512: note = Derived polymorphism lacks residues 315 to 512
  VARIANT 207..512: note = Derived polymorphism lacks residues 207 to 512
MAEGETSAEEKRRWTGPPEAQELEETKRRRTGPPEAQELEERLDSLRDKIAAARLVAGSRFGEEQRRSLLQEWLRLASAKLDLDLSGMSEFDRSAEALPWLMPPEEADKRTTHTRQEAQELEERMTCLRLLFEDATDDRILAREELGAAADEFLLRLTTRRQALTREYSRLANLKRPLDLSGMTEADRAAEAERLREEKLQKARQLQDQGDMSGARECEGLARIIDFDVKQGGEYLNSICCVGNIYTFDHTEESPVGPMRFTNRPWQDKMCVNCASINILSVKIACSDIDFPIQVYGTVVARDCIDYKCVYLFRRDNDHCQLISSNEESLILTGPKRGLALWYDADYVQTDLWVKDRQGHCKQFSKGIVRIPGNQVFDKCEPETVSLATRLSTVDVTYDVVECAVEATVAAEVTQGEFYGAMTAHTTRSKRRIVLFDSQVGGDKCHGLIQLMRPVVSVSVMDKLKIFATTAAGVSTGVEVTPRWNGGHEFVLTLGDATICVKVTWSMVDPRL

SEQ ID NO: 17731 - protein, 300 aa, Zea mays
  VARIANT 64: note = Ancestral polymorphism is P, Derived polymorphism is S
  VARIANT 69: note = Ancestral polymorphism is A, Derived polymorphism is S
  VARIANT 145..300: note = Derived polymorphism lacks residues 145 to 300
  VARIANT 216..300: note = Derived polymorphism lacks residues 216 to 300
MSPSSVVATGGSGESTVSAPQSQSFPTPSPSSLARTWAWLPHPRTRAWLPGTSGSAQRTSAIVPIFYASGFQVDQTEWIQSCSELASCVNKQTPICYSLHGHAVKPSADAAWEGCTCNSKTISLYAMEIFHVKDLVFPVNMHLGQHFTKPPPRYSEGALIKKLEELGIGKPSTYAFIMNVLLELLDICVLFVVLITMVFTDLIKTAVGRPRPDFWRCFPDGKQLYDQVTGDVICHGEKNFLQDGRKSFPSGHTSRSREATVDLFLKSAEYLDYAVHHVLIHIPPQRRLINSVFYCINSEH

SEQ ID NO: 17732 - protein, 104 aa, Zea mays
  VARIANT 3: note = Ancestral polymorphism is G, Derived polymorphism is R
  VARIANT 25: note = Ancestral polymorphism is T, Derived polymorphism is A
  VARIANT 33: note = Ancestral polymorphism is K, Derived polymorphism is N
  VARIANT 50: note = Ancestral polymorphism is L, Derived polymorphism is P
  VARIANT 53: note = Ancestral polymorphism is E, Derived polymorphism is K
  VARIANT 54: note = Ancestral polymorphism is P, Derived polymorphism is T
  VARIANT 60..104: note = Derived polymorphism lacks residues 60 to 104
  VARIANT 62..104: note = Derived polymorphism lacks residues 62 to 104
  VARIANT 65: note = Ancestral polymorphism is I, Derived polymorphism is S
  VARIANT 73: note = Ancestral polymorphism is A, Derived polymorphism is V
MVGRAKQDSKNKNAHNKSMEEGIQALEVKNKAKDMLTLNLQEKANPTQYPVMEPNPIDTQSGFNIRLSIIIYVIRTYHQLAMCGTHNRRCCCLRIIALTFSRIF

SEQ ID NO: 17733 - protein, 405 aa, Zea mays
  VARIANT 345: note = Ancestral polymorphism is A, Derived polymorphism is T
  VARIANT 313: note = Ancestral polymorphism is R, Derived polymorphism is C
  VARIANT 312: note = Ancestral polymorphism is D, Derived polymorphism is A
  VARIANT 294: note = Ancestral polymorphism is Y, Derived polymorphism is C
  VARIANT 283..405: note = Derived polymorphism lacks residues 283 to 405
  VARIANT 276..405: note = Derived polymorphism lacks residues 276 to 405
  VARIANT 257: note = Ancestral polymorphism is G, Derived polymorphism is E
  VARIANT 236: note = Ancestral polymorphism is K, Derived polymorphism is N
  VARIANT 227: note = Ancestral polymorphism is S, Derived polymorphism is N
  VARIANT 223: note = Ancestral polymorphism is N, Derived polymorphism is T
  VARIANT 212: note = Ancestral polymorphism is A, Derived polymorphism is V
  VARIANT 190: note = Ancestral polymorphism is G, Derived polymorphism is R
  VARIANT 189: note = Ancestral polymorphism is L, Derived polymorphism is P
MASRLPPPLTTSTHWATTTWMAATSTSSGYGKRAVDVALEPDVDIADAEDVEENGQHPRPVVLLKLTEAHRRGRQRLTSVLNSKVALRTKWLRNLLGRHDLSSEAFDNLQIHFARQSLQHIIVPGSAGGAPALPDNLNENARERCARPFAPPRSQAGCSNKELGLALYTESNSKSSQTCLDPDASASVLGIILGGGAGTRLYLLTKKHAKLAVPLGVNYRLINIPISNCLNSNISKIYVLTQFNSASLNRHLSTTYGSNIGGYTNEGFIEVLVAQQSPDNPNWFQGTTDVVRQYLWLFEEHNVTEFLILAGDRLYWMDYEKFIQAHREIDADISVAALPMDEKRATAFGLMKIDVEGRIIEFAKKPKGEQLKEMIVDTTILGLDDVRAKAMLYIASMDIFVFSQV

SEQ ID NO: 17734 - protein, 376 aa, Zea mays
  VARIANT 255: note = Ancestral polymorphism is R, Derived polymorphism is S
MADEDIQPIVCDNGTGMVKAGFAGDDAPRAVFPSIVGRPRHTGVMVGMGQKDAYVGDEAQAKRGILTLKYPIEHGIVNNWDDMEKIWHHTFYNELRVSPEDHPVLLTEAPLNPKANREKMTQIMFETFECPAMYVAIQAVLSLYASGRTTGIVMDSGDGVSHTVPIYEGYTLPHAILRLDLAGRDLTDHLMKILTERGYSLTTSAEREIVRDIKEKLAYVALDYEQELETARSSSSVEKSYEMPDGQVITIGSERFRCPEVLFQPSLVGMESPGVHEATYNSIMKCDVDIRKDLYGNVVLSGGSTMFPGIADRMSKEITSLAPSSMKVKVIAPPERKYSVWIGGSILASLSTFQQMWISKGEYDETGPGIVHMKCF

SEQ ID NO: 17735 - protein, 152 aa, Zea mays
  VARIANT 50..152: note = Derived polymorphism lacks residues 50 to 152
MLYLYYSLRERERGRRRLPGEELKIRQRKMTISTVGVPNTIKMLASHKLQSTLAVSLHAPNQKLRETIVPSTKSYPLGALMDDCKSYFLETRRRVSFEYTLLGSEYKRPYRKVVQAFVDALEACGQLRNEFQKNPLLEIEPSPSTERTLITA

SEQ ID NO: 17736 - protein, 122 aa, Zea mays
  VARIANT 2: note = Ancestral polymorphism is S, Derived polymorphism is N
  VARIANT 20: note = Ancestral polymorphism is S, Derived polymorphism is L
  VARIANT 35: note = Ancestral polymorphism is P, Derived polymorphism is L
  VARIANT 71: note = Ancestral polymorphism is A, Derived polymorphism is V
  VARIANT 72..122: note = Derived polymorphism lacks residues 72 to 122
  VARIANT 75: note = Ancestral polymorphism is R, Derived polymorphism is L
MSRDNGKVGSKLRLSLSRSSSGATGGRPGGGGGSPRRLSSSSSSTASPPRSCVSLEGSPEAEAGDAPMILAWCPRCMMYVMLSRVPQHRVLLDFSTTPLLPGPPTRATPALPIRKGKGGKRG

SEQ ID NO: 17737 - protein, 577 aa, Zea mays
  VARIANT 58: note = Ancestral polymorphism is D, Derived polymorphism is Y
MVAATATATAMATAASPLLNGTRIPARLRHRGLSVRCAAVAGGAAEAPASTGARLSADCVVVGGGISGLCTAQALATRHGVGDVLVTEARARPGGNITTVERPEEGYLWEEGPNSFQPSDPVLTMAVDSGLKDDLVFGDPNAPRFVLWEGKLRPVPSKPADLPFFDLMSIPGKLRAGLGALGIRPPPPGREESVEEFVRRNLGAEVFERLIEPFCSGVYAGDPSKLSMKAAFGKVWRLEETGGSIIGGTIKTIQERSKNPKPPRDARLPKPKGQTVASFRKGLAMLPNAITSSLGSKVKLSWKLTSITKSDDKGYVLEYETPEGVVSVQAKSVIMTIPSYVASNILRPLSSDAADALSRFYYPPVAAVTVSYPKEAIRKECLIDGELQGFGQLHPRSQGVETLGTIYSSSLFPNRAPDGRVLLLNYIGGATNTGIVSKTESELVEAVDRDLRKMLINSTAVDPLVLGVRVWPQAIPQFLVGHLDLLEAAKAALDRGGYDGLFLGGNYVAGVALGRCVEGAYESASQISDFLTKMQEYEATEALKRMKESKSMGSDDIRIEKVNYGSHFLNKASDEAT

SEQ ID NO: 17738 - protein, 169 aa, Zea mays
  VARIANT 17..169: note = Derived polymorphism lacks residues 17 to 169
  VARIANT 46: note = Ancestral polymorphism is K, Derived polymorphism is R
  VARIANT 98..169: note = Derived polymorphism lacks residues 98 to 169
MNSSMHLHSTSGGTISQKANKDKEMRSLMEPACENMKNSQSFMKRKELASEAHGTHVSHLCVEAEAATSKSGMRTSGQPLLSTNHSFRKPSNGHGGHQRLVNHHGTTSFQPALTHAWGMKLYRRNYLLLSTYMTYTKYKNLYNNFMLGQAQLVQTWMNKNVISACLFDC

SEQ ID NO: 17739 - protein, 503 aa, Zea mays
  VARIANT 253..503: note = Derived polymorphism lacks residues 253 to 503
MEMQSTAAGTLAQSQAAAAGTGNSFTYADLHAITDGFSDEIGRGGFGVVYRGKLPQPDGEEVAVKRLTTTTDNNNPKQPAGDDDDEQFEKELGAVRSIQHENIVEFVGYCNGYTPSSTVLPDGRPVYRKIRALCFKYMEKGSLRKHVADESLDWQSRYEIIKGVCEGLNHLHSKGIVHRDLKLDNILLDGAMKPKIADFGLSRFMGAQETTRITRNIVGTFGCMPPEFFCDGQYSKSFDVYSLGTVIKEILAGPAAADDGSIYGYYDPLKKARRLSLFVAIYMHKQASEYWEQRLVEDADVQRVKACIELVPLCWGLDRKKRPTIERVLDTLNYTDISVQKEQHYYCSRSSGPQPEKSRLEGGAGGELRDIDMEVTPPPHRLKAVWLKHGAVIDSLQFSYTDCDGREQGAGPWGSQDAWDKVLQLEPYEFLVGVSGTTGGYAGLPTSVIRSLTFVTNVRTYRTRGAPVGDPFALEAPAGSCIVGFHARAGHFLDALGVYHRPI

SEQ ID NO: 17740 - protein, 108 aa, Zea mays
  VARIANT 47..108: note = Derived polymorphism lacks residues 47 to 108
MGNCGTKPKTSDGDDAPPPVEAQVAAGAAEGERKDDEEVAAPEGTSQALVAPQTEEVTTTTVEEKEHAEPNEKTEEFGKEDADHGEEKETPPPTEAPELPASTPASVA

SEQ ID NO: 17741 - protein, 224 aa, Zea mays
  VARIANT 170: note = Ancestral polymorphism is S, Derived polymorphism is F
MSQDQENGGTNGQHAADVMEVEPKRRAPRLNERILSSLSRRSVAAHPWHDLEIGPEAPAVFNVVVEITKGSKVKYELDKKTGLIKVDRILYSSVVYPHNYGFVPRTLCEDNDPMDVLVLMQEPVLPGAFLRARAIGLMPMIDQGEKDDKIIAVCADDPEYRHYNDISELSPHRLQEIRRFFEDYKKNENKEVAVNDFLPAAAAREAIQYSMDLYGQYIMQTLRR

SEQ ID NO: 17742 - protein, 376 aa, Zea mays
  VARIANT 297: note = Ancestral polymorphism is G, Derived polymorphism is R
  VARIANT 292: note = Ancestral polymorphism is R, Derived polymorphism is C
MDHAAEAQRTDLMTITRHVLNEQSRHPESRGDFTILLSHIVLGCKFVAAAVNKAGLAKLIGLAGETNVQGEEQKKLDVLSNEVFVKALVSSGRTCVLVSEENEEAIFVDPALRGKFVNPLLLHPDLVKVPQRRTVAFPDRVLVLSLSLFRYCVCFDPLDGSSNIDCGVSIGTIFGIYMVKDKDNVTLEDVLQPGTNMLAAGYCMYGSSCTLVLSTGNGVNGFTLDPSLGEFILTHPNIKIPRKGKIYSVNEGNAKNWDGPTAKFVEKCKYPEDGSPPRSLRYIGSMVADVHRTLLYGGIFLYPADQKSPNGKLRVLYEVFPMSFLMEQAGGQAFTGKQRALELAPAKLHDRSPVFLGSYDDVEEIKALYASMSNSG

SEQ ID NO: 17743 - protein, 423 aa, Zea mays
  VARIANT 94: note = Ancestral polymorphism is A, Derived polymorphism is P
  VARIANT 96: note = Ancestral polymorphism is S, Derived polymorphism is L
  VARIANT 141: note = Ancestral polymorphism is P, Derived polymorphism is L
MGANGHHEPRRGCNGTVCNGSIRPLDYFGDVDPWTAWAYKPRTISLLLTGTCLLIWASGALDPERSSSADRVWSVKRGVFAMIAVFLAYSFLQAPSTGLIRPHPAIWRLVHGMTVVYLVALTFLLFQTRDDARQFMKYLHPDLGVELPERSYGTDCRIYVPDHPKSRFNNVYEIIFDEFVIAHILGWWGKAIMIRNQPLLWVLSIGFELMELTFRHMLPNFNECWWDSIVLDILICNWFGIWAGMKTVQYFDGRTYEWVGLSRQPNIISKVKRMLGQFTPAQWDKDEWQPTLGPWRFIQVLSLCVVFMAVELNTFFLKFCLWIPPRNPLVVYRLVLWWLIAIPTIREYNTYLQDSKPFKKVGSFCWLSLAICIVELLICIKFGHGLFPRSMPSWLVTFWSAVALLLALFVWTWKYRTVKRKRV

SEQ ID NO: 17744 - protein, 263 aa, Zea mays
  VARIANT 236..263: note = Derived polymorphism lacks residues 236 to 263
MPEDKEYAPVPLGQAAAEAAAPDSEDPAKSPPRPSSPGTSTRKAFFAVLQSWVSRKFMTGCVVLLPIAVTFFITWWFIQFVDGFFSPLYAKLGFDIFGLGFLTSLVFILLVGIFVSSWVGSTVFWVGEWFIKKMPFVRHIYSASKQVSTAVSPDQNTTAFKEVAIISHPRVGEYAFGFITSTMVLQTDKGDEELCSVYVPTNHLYIGDIFLVNSAEIIRPNLSIREGIGWFLALFLSLPLLLLSTKKMSERKLLRPGGGVHPP

SEQ ID NO: 17745 - protein, 357 aa, Zea mays
  VARIANT 9: note = Ancestral polymorphism is A, Derived polymorphism is E
MADARRQAARWLAAEPEEHDDGGGGGAAAAETAGVLSGEYQALETSTLVSALAHVVASGGEGYPPWSGARRGDDSRRPTATMVAPVGTGGHGYSAATAPTPPAHFFGAGGEQAAHDVQGAAAMEGHYSPTASAAEAGGERRFRGVRQRPWGKWAAEIRDPHKAARVWLGTFDTAEAAARAYDEAALRFRGSRAKLNFPEDARLTTAPSAAVAPAAAGSTTTMAVAASAGGSYQQEASAAVVSADYLQYQMMLLQGATSGQGSSSHGGYPLYYDYGGHGGAGAGAGGGAMSSSYSFPASTVTVASVPSSSASSAPSYGEAAQWAGSWPESSAWSYPATTASWSGSSQYEYPPSTRPPQ

SEQ ID NO: 17746 - protein, 114 aa, Zea mays
  VARIANT 13: note = Ancestral polymorphism is V, Derived polymorphism is A
  VARIANT 23: note = Ancestral polymorphism is P, Derived polymorphism is T
  VARIANT 44: note = Ancestral polymorphism is R, Derived polymorphism is H
MDGKMLLGRKIAVVFVEENRKKPSDMRAREKISGRGRSYDGRLRSRSPGLYDSPRVDHGPKAEATRQHFSESTIQGYLNVYYVGIPKSLMSEVSCEPMNLDVGRADQCAGAYVV

SEQ ID NO: 17747 - protein, 562 aa, Zea mays
  VARIANT 145..562: note = Derived polymorphism lacks residues 145 to 562
  VARIANT 230: note = Ancestral polymorphism is L, Derived polymorphism is S
  VARIANT 338: note = Ancestral polymorphism is G, Derived polymorphism is R
  VARIANT 353..562: note = Derived polymorphism lacks residues 353 to 562
  VARIANT 409..562: note = Derived polymorphism lacks residues 409 to 562
  VARIANT 438: note = Ancestral polymorphism is G, Derived polymorphism is A
  VARIANT 451: note = Ancestral polymorphism is A, Derived polymorphism is V
  VARIANT 502..562: note = Derived polymorphism lacks residues 502 to 562
  VARIANT 505..562: note = Derived polymorphism lacks residues 505 to 562
MCSIGHIRPLLKTKFVRKKRAVGISPYMDVRIYGNYFDMDPLNPNSYRKRNYNNACYAPSTLSHAEARRKRKRVLDQRKLASAGSSMPSHHTPTLQCGHFDPDFVKTIQASYHDRSYYGRPSYQCIHCSALFWYNERIRSSVGTRSVIYNNCCKGGKVCIPAYRPRPEPLLSLARFDGDVVSKTFMQNIRQYNCLFAFTSMGAHIDRSLNDGRGPPVFKPRIVHELLQMLDTHNPFAKKFRIAKERLTEHADEEFIIRIIGAKEGDPVQYDMPTTDDLAMLVIGDFSLETFKWDIIIETRNSELKRISSLHPAYMALQYPLLFPYGERGFQIGVMYSGIQNRQANSRVHMTMQDYYCYQFHYKPGQPNLFLSYGILSNQAKVDARACIDENRLTYILNNQDKLRIENLQGISDAVSRGCINGEEMGKTIVLPASHIGGRRYMIQNYHDSIAICRVHGPPDFFVTFTCNAKWPEIIESLYHCGQKNSDAPDIAIRIFHMKLQELLQDIKSGNLFGPCKAELDPKSTNAAIRVCIIRKWEFRGATNDGPLRHVNLILADEQVQS

SEQ ID NO: 17748 - protein, 219 aa, Zea mays
  VARIANT 113: note = Ancestral polymorphism is T, Derived polymorphism is S
MDPAAMLRSPCSIVSPGSLLTAPLLPVRLAVQPRRRVPGFIAPSGRPSVARRAAAGDKFEAETPIEKSFPPFPTVMDINQIRDILPHRFPFLLVDRVIDYKPGEYAVAIKNVTINDNFFPGHFPERPIMPGVLMVEAMAQVGGIVMLQPEVGGSRENFFFAGIDKVRFRKPVIAGDTLIMRMTLIKLQKRFGIAKMEGKAYVGADLVCEGEFLMATGSE

SEQ ID NO: 17749 - protein, 116 aa, Zea mays
  VARIANT 37: note = Ancestral polymorphism is A, Derived polymorphism is V
  VARIANT 48..116: note = Derived polymorphism lacks residues 48 to 116
  VARIANT 49: note = Ancestral polymorphism is E, Derived polymorphism is K
  VARIANT 61..116: note = Derived polymorphism lacks residues 61 to 116
MSASTACDGLPHLIPLLAWAAGAAAGHEGCEAGVAPAEMRSPPWSASWEFGYGLALCRKRQMLTKLARREKTTNIKPDHDIDVYMKILDLEVCADTLVGKEMMRGISGGQRKHVTI

SEQ ID NO: 17750 - protein, 134 aa, Zea mays
  VARIANT 3: note = Ancestral polymorphism is A, Derived polymorphism is E
  VARIANT 11: note = Ancestral polymorphism is E, Derived polymorphism is K
  VARIANT 12: note = Ancestral polymorphism is V, Derived polymorphism is I
  VARIANT 21: note = Ancestral polymorphism is D, Derived polymorphism is G
  VARIANT 24: note = Ancestral polymorphism is Y, Derived polymorphism is C
  VARIANT 28: note = Ancestral polymorphism is N, Derived polymorphism is K
  VARIANT 32: note = Ancestral polymorphism is R, Derived polymorphism is H
  VARIANT 41: note = Ancestral polymorphism is R, Derived polymorphism is H
  VARIANT 42: note = Ancestral polymorphism is Q, Derived polymorphism is R
  VARIANT 43: note = Ancestral polymorphism is R, Derived polymorphism is W
  VARIANT 48: note = Ancestral polymorphism is G, Derived polymorphism is S
  VARIANT 56: note = Ancestral polymorphism is A, Derived polymorphism is V
  VARIANT 64..134: note = Derived polymorphism lacks residues 64 to 134
MRAILIEWLVKVAEEYRLAPDTLYLTVNYIDRYLSGNEINRQRLQLLGVACMLIAAAYDKVFLEVLFCSATTLWTCTDVAHVLLQFSLAWYGKLIRYACAVAAHYVRSVKGLCFDLFIIRGGNSAFNAGWRCAM

SEQ ID NO: 17751 - protein, 190 aa, Zea mays
  VARIANT 107: note = Ancestral polymorphism is A, Derived polymorphism is V
  VARIANT 97..190: note = Derived polymorphism lacks residues 97 to 190
  VARIANT 54: note = Ancestral polymorphism is R, Derived polymorphism is C
MLQCILALHASPAVLSSLRLLWCSFSRSALACHHCRLARCSPAPCLADGCRLLRSLHRLHHILAIWHRVPSGSDFGYDSLSQYRCLQVPLRDVLHRRVRQMAGMARVGDVVVGELWFSLLYDPIIHNSNKIIMPASTYESHSICQSYSIQFYSWNNNNEQSYAGTVTTLFFLICFDVAYFSYTRYVLLEF

SEQ ID NO: 17752 - protein, 186 aa, Zea mays
  VARIANT 114..186: note = Derived polymorphism lacks residues 114 to 186
  VARIANT 102: note = Ancestral polymorphism is T, Derived polymorphism is I
MSLACLVCHGMSSSSHSLRSYSVSSSEEESRCGAAVACLARRVTPAGTSTSAGTSKVTPFPPIVSGQVGTEGTPRLQRSRAVSRDLVRDWNFDEVYTMSGLTYWVRILCFNPVWLLGTNEGRNKAFELDFLNGSENMNEDVPWESSPDLIIKHERSGHLLSYQAVYIASPLTWGLIRAGQYNFVHL

SEQ ID NO: 17753 - protein, 200 aa, Zea mays
  VARIANT 7: note = Ancestral polymorphism is R, Derived polymorphism is C
  VARIANT 10: note = Ancestral polymorphism is L, Derived polymorphism is P
  VARIANT 20..200: note = Derived polymorphism lacks residues 20 to 200
  VARIANT 32: note = Ancestral polymorphism is R, Derived polymorphism is G
  VARIANT 35: note = Ancestral polymorphism is H, Derived polymorphism is R
  VARIANT 42: note = Ancestral polymorphism is P, Derived polymorphism is L
  VARIANT 67: note = Ancestral polymorphism is D, Derived polymorphism is Y
  VARIANT 88: note = Ancestral polymorphism is A, Derived polymorphism is V
  VARIANT 106: note = Ancestral polymorphism is C, Derived polymorphism is Y
  VARIANT 112: note = Ancestral polymorphism is T, Derived polymorphism is M
  VARIANT 114: note = Ancestral polymorphism is L, Derived polymorphism is V
  VARIANT 132: note = Ancestral polymorphism is F, Derived polymorphism is L
  VARIANT 157: note = Ancestral polymorphism is K, Derived polymorphism is N
  VARIANT 166: note = Ancestral polymorphism is D, Derived polymorphism is N
  VARIANT 186: note = Ancestral polymorphism is P, Derived polymorphism is S
  VARIANT 189: note = Ancestral polymorphism is P, Derived polymorphism is L
MAEALVRLLLLRDRALGPAQRYAQLLTFVIRRYLHDRRGLAPHAAVLMGFYRPTDVGAGNANAAPEYDKGEGGDEGEMACTAEVSFDAVGAPGAPPTPPLNFPYICNMTVKTPLRRRGIGKQLLKACKDLVFKMNDKRRVYLHYRIIDRVPFNMYTKAGYSIIQTDSILVWLSLQKRKYLMSKELPQAPVVSETSTKNFE

SEQ ID NO: 17754 - protein, 94 aa, Zea mays
  VARIANT 43: note = Ancestral polymorphism is R, Derived polymorphism is P
  VARIANT 19: note = Ancestral polymorphism is L, Derived polymorphism is F
MAKASSRLLFSLSLVVLLLLVETTTSPHGQADAIDCGASCSYRCSKSGRPKMCLRACGTCCQRCGCVPPGTSGNEDVCPCYANMKTHDGQHKCP

SEQ ID NO: 17755 - protein, 564 aa, Zea mays
  VARIANT 320: note = Ancestral polymorphism is P, Derived polymorphism is L
MPSGDDSDPLLAPADGIRFAALDYRDHPADRGATGGWRSALFIIAVEISERFTFYGVSSNLINYLTGPLGEGTAAAAAAINTWNGVAQLLPLLGGALADKWLGRYRTIVVASLLYVIGAGMLAFSTLLSSGSGHQCTTAGGQTCAPSTIKVTFFYVSLYIVAVAQGGHKPCVQAFGADQFDQSDPKETVSRSSFFNWWYFGMCAGTAVTLLFLNYVQDNIGWGLGFGIPCAVMAAALAVFLLGTRRYRYYVTAGERGLFARAGEAFVEWRSRRKALQHGDRPVAEGAPGFSAGVDEEEQAAVSHDAGLVKETKDILRLFPIWATCLLYAVAFSQSSTFFTKQAATLDRRVGRHLQVPPAALQSFISITIVVFIPLYDRVLVPVARRYSGNPSGITMLQRIGTGMFLSLLSMVIAALVEKHRLRVAVDAGLVDKPMVPLPMSLWWMVPQYVLFGAADVYTMVGLQEFFYDQVPDKLRSLGLALYLSIFGVGSFISSTLVSIIDSVTTARGGSWFSNNLNRGHVDYFYWLLAALSALELLAYVFFAVTYKYKNKATVHATVVGQSL

SEQ ID NO: 17756 - protein, 247 aa, Zea mays
  VARIANT 206: note = Ancestral polymorphism is D, Derived polymorphism is N
  VARIANT 136: note = Ancestral polymorphism is L, Derived polymorphism is P
  VARIANT 95: note = Ancestral polymorphism is G, Derived polymorphism is R
  VARIANT 90..247: note = Derived polymorphism lacks residues 90 to 247
  VARIANT 65..247: note = Derived polymorphism lacks residues 65 to 247
  VARIANT 64: note = Ancestral polymorphism is A, Derived polymorphism is V
  VARIANT 63: note = Ancestral polymorphism is A, Derived polymorphism is V
  VARIANT 32..247: note = Derived polymorphism lacks residues 32 to 247
MAAPPPPTLPLQSFHPSPPRSCLGLRANDWVRPEASSSDSTITHTHTSSLSLFDLCDVGLVGAAQVYLLFMTMGVVVAALREHHQEPRIQYEEFGEEFVDMLDGIISFVLLDTRQKSFVAAHDAVAICPLYMGWCLDETPVAIHFCRTLKKGNILGNIVDLNNWNLDEIEAARMAAINKEIKRVLTEVLSKFTLLNPSKRCKVIPDWLASYPFFITYRIDYLKAGQKVHEESERLRACDSRNMSRLQ

SEQ ID NO: 17757 - protein, 356 aa, Zea mays
  VARIANT 146..356: note = Derived polymorphism lacks residues 146 to 356
MTPAPSNAAGDLFAANLTGALLAVASSAFIGVSFIVKKKGLRRAATAGARAGVGGYGYLLEPLWWIGMVTMLIGEIANFVAYMFAPAILVTPLGALSIIVSAVLAHFTLNEKLQRMGVLGCVLCIIGSTIIILHAPEEETPSSVTQIWQLATQPAFLCYAASALTISLILIFHCAPRYGQTNIVVYVGICSVIGSLTVMSIKAVGIAIKLTIEGINQAGYFQTWLFATVSATCIIIQLIYLNKALDTFNTAVVSPIYYAMFTSLTILASAIMFKDWSGQSISSIASEICGFLTVLTGTVVLHSTREHDPTLTSDLYAPLSPIYWHIQGNGETGGKLKEDDLLSGNFITVVRQDYFV

SEQ ID NO: 17758 - protein, 476 aa, Zea mays
  VARIANT 354: note = Ancestral polymorphism is D, Derived polymorphism is G
  VARIANT 38: note = Ancestral polymorphism is Y, Derived polymorphism is D
MACEKKPVSSFTVRLGLALLAGCVLVAMISLAAMFRHDAVPLQTLSLLFSVGPVSSVMWGEERLGSHRFGRNRVPVLCDFSSSRSDVCELRGDVRVLPNATIVLHHPLARRQSWRMKPHGRKNDRHALARVTEVTVTVATASASPHHTSGAAAAAAPRCTANHTAPAVVFSVGGYAGNMFHDLTDVLVPLFITARRFGGDVHLLVGDAQPWWLDKFRPLLGGLSRHAVVDMSRGSSSGGVLCYPHVILGLEFHKEMSVDAARTAGGGEYSMADFTLLARRSYGLPRDKAIRVHGRGGGGVRPRLLLISRKSTRAFTNAGSIARAAASLGYEVVVGEPARHADLASFARVVNSCDVLVGVHGAGLANLVFLPAGAVVVQVVPLGGLDAMAADDFGAPARDAGLRYVHYGIAEAESTLATRYPRDHRVLRDPAAVRSEGWMALRAAYLVGQNVTIDVRRFSGALRRAMELLRQTHDHE

SEQ ID NO: 17759 - protein, 245 aa, Zea mays
  VARIANT 17: note = Ancestral polymorphism is S, Derived polymorphism is L
  VARIANT 98: note = Ancestral polymorphism is L, Derived polymorphism is R
  VARIANT 155: note = Ancestral polymorphism is S, Derived polymorphism is R
  VARIANT 162: note = Ancestral polymorphism is G, Derived polymorphism is V
  VARIANT 163: note = Ancestral polymorphism is S, Derived polymorphism is P
MGSTVDDDEACELVSGSDLVIGEGDDSVSAYLFKAVKNNNGTGILLLSDIFGFQDSATRDFAYRVACNGYNVLVPDLFRGNPWKLNVPFDGDSFERWRAGQAPGRVSGDIDACTRWLVDEFKAAGVSKKLGVIGFCYGGGRLVETLARDAESCFSAGVCFYGSRMDASLGDRVAAPVLFVCGDGDPLCPVETVRELEGRARGARAAVYAGRGHGFAHRPQSVEEDGDAEDAFNAMRGWLHDHLLA

SEQ ID NO: 17760 - protein, 539 aa, Zea mays
  VARIANT 296: note = Ancestral polymorphism is R, Derived polymorphism is H
  VARIANT 312: note = Ancestral polymorphism is P, Derived polymorphism is S
  VARIANT 317: note = Ancestral polymorphism is M, Derived polymorphism is I
  VARIANT 329: note = Ancestral polymorphism is P, Derived polymorphism is L
  VARIANT 353..539: note = Derived polymorphism lacks residues 353 to 539
  VARIANT 387: note = Ancestral polymorphism is P, Derived polymorphism is L
  VARIANT 400: note = Ancestral polymorphism is C, Derived polymorphism is Y
  VARIANT 410..539: note = Derived polymorphism lacks residues 410 to 539
  VARIANT 481: note = Ancestral polymorphism is T, Derived polymorphism is I
  VARIANT 508: note = Ancestral polymorphism is G, Derived polymorphism is D
MADETKQEVAAPAVELVVTEAEKNAEDPALVAEKKAVEAAEEKAMEAEENATEADSEEEKKAEEAAAGDEAAVIDGTGSFKEESNLVSELPDPERTVLAQLKELVATTLANGEFNLPPPPPVKEETKKEEPAKEEAPADKEDEPKAEEAPRSLPKRSSRQRRRRETKPAEPVLEEKTVVVADEPAKEELKEEATMEAVVEETKPAYPVPEEKTVVVAEEEATKTVEAIEETAAAASEPEAEAAPSPAAEPKEELIWGVPLVGDDERTDTVLLKFLRAREFKVKEAMAMLKSAVLWRKRLGIDELLGADLGLPDLEKMVFYRGANRKGHPVCYNVTDLKNSPPMLGKHRGVTRQALALLQDNYPEFVAKKVFINVPWWYFAANKVMSPFLTQRTKSKIVFCSPGRYVAPEQVPVQFGDLYKEDDTEFSASNAVIKLIVKPSSKETVEVPATEGSTVVWELRVLGWEVSYDAEFTPDAEGGYTVIVQKTRKVPAHEEPIMKGSFKAAGPGKVVLAVDNRASKKKMLLYRFRVKSTAAEPAT

SEQ ID NO: 17761 - protein, 222 aa, Zea mays
  VARIANT 174..222: note = Derived polymorphism lacks residues 174 to 222
  VARIANT 149: note = Ancestral polymorphism is R, Derived polymorphism is C
  VARIANT 145: note = Ancestral polymorphism is S, Derived polymorphism is F
  VARIANT 121: note = Ancestral polymorphism is I, Derived polymorphism is N
  VARIANT 109..222: note = Derived polymorphism lacks residues 109 to 222
  VARIANT 66..222: note = Derived polymorphism lacks residues 66 to 222
  VARIANT 58: note = Ancestral polymorphism is G, Derived polymorphism is E
  VARIANT 2: note = Ancestral polymorphism is H, Derived polymorphism is Y
MHWLARAGDVDGAMRVWAEMKAKSRPTVVSYTACVKILFDFGRAEEARRVFKEMVAEGLRPTCKTYTLLIENLADTALRMYLLVHIIEEWNGYLTILEELAFYFESWTWLTPENFEATLDNIDKLKEACVKPDKALCNILVQKCSRAYRRPSCGLAVMRYGLGVGCDLGRPETGIRLLPKRKNEYEMASSVSWSVLMKIPYVNICFVAFMGASSRWIECSYH

SEQ ID NO: 17762 - protein, 699 aa, Zea mays
  VARIANT 355: note = Ancestral polymorphism is F, Derived polymorphism is S
  VARIANT 461: note = Ancestral polymorphism is I, Derived polymorphism is T
MDVASTIPFQGLAYLITGEVRENAVYSMLGVLRLWRLRRVKQFFTRLEKDIRFSYFWIRSARLVAVTLFLVHCAGCLYYLIADRYPDRQKTWIGAVIPNFRQASLRIRYISSIYWSITTMTTVGYGDLHAQNNVEMIFNIFYMLFNLGLTAYLIGNMTNLVVEGTRRTMEFRNSIRAASSFVGRNHLPPRLKQQILAYMCLKFRAESLNQQQLMDQLPKSICKSICEHLFVPVVKDVYLFRGVSREMLLSLVTKMKPEYIPPKEDVIVQNEAPDDVYVVVSGEVEVILFDGIYEQVQATLGARDIFGEVSALSDRAQAFTFRTRTLSQLLRLKQATLKEAMQSRPEDSVVVIKNFLKHQVEMHGMKVEDLLGDNTGEHDDDANVLTVAAMGNSGLLEDLLRAGKDADVGDAKGRTALHIAASKGYEDCVLVLLKHACNVNIRDAQGNTAMWNAIAAGHHKTFNLLYQFGRASNPRAGGDVMCLAARRGHLGALQELLKLGLDVDSEDHDGATALRVAMAEGHADAARFLILNGASVDKASLDDDGSGSGSGSGAARLAMSPTELRELLQKRELGHSITIHDSPAVVPNGGSSGHSRPGRLQSTSSDSQRWPRVSVYKGHPFLRNRTSEAGKLINLPGTMEEFRAIVGEKLKVDAEKALIVSDEGAEIDSIDVIRDNDKLFMVTEEDLRRLASMDWLSCE

SEQ ID NO: 17763 - protein, 238 aa, Zea mays
  VARIANT 32: note = Ancestral polymorphism is W, Derived polymorphism is C
  VARIANT 60: note = Ancestral polymorphism is G, Derived polymorphism is D
  VARIANT 78: note = Ancestral polymorphism is V, Derived polymorphism is G
  VARIANT 97: note = Ancestral polymorphism is H, Derived polymorphism is Y
  VARIANT 131: note = Ancestral polymorphism is A, Derived polymorphism is V
  VARIANT 161: note = Ancestral polymorphism is T, Derived polymorphism is I
  VARIANT 186..238: note = Derived polymorphism lacks residues 186 to 238
  VARIANT 189: note = Ancestral polymorphism is R, Derived polymorphism is L
MGSSGGSCEHFLGQLSSSDGGSAPHQLLQREWDCGTGTGSRRGSRRWSRKKGRARGHRRGGGFCRTEEAAAASRKRVVVVVDQSSGAKHAMMWALTHVANRGDFLTLLHVLPPHSGSGGGGRGAGEEDASALANSLGALCKACKPEVEVEALVIQGPKLSTILSQVKKLEASVLVLSQRKPSPFCCFLRSRSSSEEEELVEECINRAECLTLAVRRRSKGVGGYLVSTRWQKNFWLLA

SEQ ID NO: 17764 - protein, 820 aa, Zea mays
  VARIANT 271: note = Ancestral polymorphism is R, Derived polymorphism is L
  VARIANT 272..820: note = Derived polymorphism lacks residues 272 to 820
MAAAEIVVVAVVTLLLGLTSCMAESSVWREEDRRVRGEVTYEQRALVLDGARRMLFAGEMHYPRSTPEMWPKLIAKAKEGGLDVIQTYVFWNVHEPIQGQYNFEGRYDLVRFIKEIQAQGLYVSLRIGPFIESEWKYGGFPFWLHDVPNITFRSDNEPFKQHMQRFVTDIVNMMKHEGLYYPQGGPIITSQIENEYQMVEPAFGSSGQRYVSWAAAMAVDLQTGVPWTMCKQNDAPDPVINTCNGLICGETFVGPNSANKPALWTENWTSRYLIYGNDTKLRSPQDITFAVALFIARKNGSYVSYYMYHGGTNFGRFASSYVTTSYYDGAPLDEYGLIWQPTWGHLRELHAAVKQSSEPLLFGTYSNLSIGQEQEAHIFETETQCVAFLVNFDQHHISEVVFRNISLELAPKSISILLDCKQVVFETAKVNAQHGSRTAEEVQSFSDISTWKAFKEPIPQDVSKSAYSGNRLFEHLSTTKDATDYLWYIVGYEYTPSDDGQLVLINVESRAHILHAFVNNAYVGRIHGSHGGPANIIFSTNISLQEGPNTISLLSAMVGSPDSGAHMERRVFGIRKVSIQQGQEPENLLNNELWGYQVGLFGERNNIYTQDSKITEWTTIDNLTYSPLTWYKTTFSTPVGNDAVTLNLTGMGKGEVWVNGESIGRYWVSFKAPSGNPSQSLYHIPREFLNPQDNTLVLFEEMGGNPQLITVNTMSVSRVCGNVNELSAPSLQYKDKEPAVDLWCPEGKHISAIEFASYGGPTGDCKKFGFGRCHAGSSESVVKQACLGKSGCSVPVTPIKFGGDPCPGIQKSLLVVANYR

SEQ ID NO: 17765 - protein, 191 aa, Zea mays
  VARIANT 60: note = Ancestral polymorphism is I, Derived polymorphism is T
MARNPGCTVFIGNLDDKVPERVLYEILIQVGRVVDLHIPRDKETSRPKGYAFAEYETEEIAQYAIKLFSGLVRLRNKTLRFAISGQDKPSLNGNIPVIPSLNSVPQPKPPHQHMRSSDTPLPQHTAVSGRSAGYGISQNHSYDTHTQAPSSGLPSRGLSNGTYEYSRRVFGSVLNDVSRRATREPIPYPSC

SEQ ID NO: 17766 - protein, 250 aa, Zea mays
  VARIANT 193: note = Ancestral polymorphism is R, Derived polymorphism is W
  VARIANT 221: note = Ancestral polymorphism is P, Derived polymorphism is L
MRKQLHEAREQLVRQRLLPPKTGPRWLTIMALSVHKVTVKSSSMGWKTLSSTIIITISEIQMAPHTRLREFLNLQNIFRELLLAFVERSKQRPKQLIFYRDGVSEGQFKQVLEQEIHEIEKAWTTLYNEKPKITFVVVQKRHHTRLFPNKPKDRQYADKSGNIRAGTIVDNNICHPTEFDFFLCGHAGAKRKWCGLVEYQTLPAYLRDNEYIHRHYRCEWPLLQGNSVSTTKYSILTFLPKGLFEQGLQM

SEQ ID NO: 17767 - protein, 264 aa, Zea mays
  VARIANT 95: note = Ancestral polymorphism is E, Derived polymorphism is G
  VARIANT 23: note = Ancestral polymorphism is G, Derived polymorphism is V
MAQEAAPARPVGPTRLVYFDDMGALHHSSATVLSVHQEEGGRVAVVLDATVFHPQGGGQPADTGVISAGGARFLVEDVRAKDGVVFHYGRFEGTEQGCGTVFKEGGTVSLQVDAERRSFNSRLHSAGHLLDICVHNVGLFHLEPGKGYHFPDGPFVEYKGIIPPDQIPVKKNELEREANRLISEGAKVLASVFPYEEAAILCGGSLPSYISKDSNPRIVKFGDNPGGPCGGTHVADISIINSLKMALMPPNLAYTETVRTDKRI

SEQ ID NO: 17768 - protein, 330 aa, Zea mays
  VARIANT 138: note = Ancestral polymorphism is P, Derived polymorphism is S
  VARIANT 86: note = Ancestral polymorphism is F, Derived polymorphism is S
MEDASSRVSSLLGLLLAAHCALLLLLRLAGAAHGHGYAPAPGGGVALSSAFYDESCPSAYDVVRRVIQDARVSDPRIPASLIRLHFHDCFVNGCDGSLLLDDDLPAIQSEKHVPANDKSARGFEVVDGIKSALEEACPGIVSCADILALAAEISVELAGGPRWRVLLGRRDGTTTNIEGANNLPSPFDPLDKLQEKFRNFNLDDTDLVALQGAHTFGKVQCQFTQENCTAGQPEETLENLDQVTPNVFDNKYYGNLLHGAAQLPSDQVMLSADPVAEMTTAPIVHRFAGNQEDFFRNFAASMVKMGNISPLTRNDGEIRKFCRRINSEGY

SEQ ID NO: 17769 - protein, 245 aa, Zea mays
  VARIANT 91: note = Ancestral polymorphism is E, Derived polymorphism is K
MASSACLLQASTAFAPRFSLPSRPQPPLHLRLRGSPNRRRGISLTASSAASPEVEKESSPSSSPQESLSAVADSVKVLKVAAKTRKVPAPEILSALSKIKKAKLDTSAFFETLGGTESPGRTWMLIFTAKGRLEKGQYFPVTAVQRFDAAGKRIENGIYLGPIGCLTFEGRLSWKKKILAFIFERVRIKVGPFGPLEISLGSGDGGREPSTKDPFFVWFYVDEEIAVAQGRGGGVAYWCRCQRVP

SEQ ID NO: 17770 - protein, 542 aa, Zea mays
  VARIANT 433: note = Ancestral polymorphism is T, Derived polymorphism is K
  VARIANT 294: note = Ancestral polymorphism is Q, Derived polymorphism is L
MVSPGGPSRVALRGGVGGPGSPRVSSSSAATAFAALRRRWRWAPSGAPTLERAARAFLLASAALVLACALYLYVLRYVGRGGRAFAAAGFVGGSVLGLGGEACDVFDGAWVPDDTGRHPLYNSSECPFAERGFDCLANGRNDTGYLKWRWKPRRCEVPQFAARTALERLRGKRVVFVGDSMSRTQWESFICMLMAGVDDPRTVFEVNGNEITKTIRHLAVRFASHGLTVEFFRSVFLVQEHPAPRHAPKRVKSTLRLDRMDSFSRKWVNSDVLIFNTGHWWTPTKLFDRGCYFLAGRSLKLGTSSNAGFRMALKTWASWVLKRVDLNRTHVFFRTYEPSHWGDTSQKVCEVTEQPSSEAKGNDKSEFGAILSDVVTNMKVPITVLNVTLMGAFRSDAHVGTWSYPPTILDCSHWCLPGVPDAWNELVFSYLLTNGEFIVMLMSIFISVNPVVGETCRAEIYGSIAQSTPTFCILIFDITSMMVGDNNRRGSKRSLPCSGSNEIATSTYHSVLVDDVTDTAAAFATAVSARNKQIRLELTGIS

SEQ ID NO: 17771 - protein, 514 aa, Zea mays
  VARIANT 327: note = Ancestral polymorphism is L, Derived polymorphism is F
  VARIANT 326: note = Ancestral polymorphism is G, Derived polymorphism is S
  VARIANT 317: note = Ancestral polymorphism is L, Derived polymorphism is P
MSKKVDKMSFQAPTRIQAQAIPVAISGQHMLVKAATGTGKTLAYLAPIVHVLQMREPRVDRTHGTFGISILIATPGRLLDHLQRTASFSYSNLQWIVFDEADSILELGFGKAVEDILEHLGSRNGATGQIKNKGGHIRRQNLLLSATLNEKVNRLAKISLKNPVMIGLDDQSKPSGKSNNVGNNHTSLLSDEDDEILEKQNDLMEHAVDDFKLPTQLVQRYVKVSCGSRLAVLLMILKSLFERQVSQKVVVFFSTCDSVDFHHTALSQLEWSSGPQRDMDKKQKFLSCKVFRLHGNMEQDDRKKSFLGFGSEKSAILVSTDIAARGLDFPKVKYIIQYDSPGEASEYVHRVGRTARIGEKGEALLFMQPIELDYLKDLELHGVSLTEYPLQRVLDSFPVNGQKPHKRKQISLDMHPCIMSLQRSLEGFVAAEDATKKLARDAFCSWVRAYTAHRGELKKIFMVKKLHLGHVARSFGLKEQPSLVGRSHQVSLKKRKKEQKRERPAKRRKLPSKK

SEQ ID NO: 17772 - protein, 615 aa, Zea mays
  VARIANT 577..615: note = Derived polymorphism lacks residues 577 to 615
MAPSKLRQALGAVKDQTSIGLAKVGSGGSLEADLDVAIVKATRHSESFPADERHIREIVTLTRLSRVYVGSCVSSLSRRLGRTRSWAVALKTLVIVHRLLAEGDPAFEQEVFYATRRGTRMLNMSDFCDSSRADAWDFSAFVRTFAAYLDDCLECRMQGKQQGGGGAAPRGGGRPLHEEMYASPGNRFACGIAAFNGRQEDAADAEAQRTVALVARDPPTREMTVDQLLVKANQLHHLLDRFIACRPVGAAKANRVVGVSLYPLIKESVQLYCELTEVTATLIEQFAEMETADCERVHALFCGLAKQMEELETFYAWCKVACVCRQSDVPEVVEAVTQKKLELMDEFIRDRHAADSQQRLSPPDPEPMASPEPAPVEEDNDDMNATKALPAPEEPAAAAAQEESTAGKAEPDASLIVADDPVEEEADFLNLSADAMSGQEHGRQLELALFDGNAAPEGSVFQGSSADWETELVHSASALANQRAQLGGGLSMLVLDGMYNHAAAATNAQTTFSGSASSVALRPPPGPHMLALPAPPGGGSAVAGADPFAASALVPPPTYVQMSDMQTKRQLLTQEQQMWRQYGKNGMQQGALAMPNQNQQLLPHVGHNYAGYRTT

SEQ ID NO: 17773 - protein, 275 aa, Zea mays
  VARIANT 53: note = Ancestral polymorphism is H, Derived polymorphism is R
MDAKKFLQLVEEKKRRILEKKEAPLKWQQKLEAAVNVKADAEAKAKKLKSRKHRRRGDSSSDSDSDYDSDVDRKHRRRKDRRRNKKHEHSDSDDARRGKRRSKKGSDSSDESNREYESGSEEEHTKKKRLHRRRHHRHSSRSDSEDNSDEEERRSAKDHSQPRRRHHQSSDDGSDKVRLRHGKRLRSSDENARPDSNSHKHLRSQSLEESSDDRDDDGPEKIRNGKRYHKNHHRHHHHHRHHRHHHERHNNSAEPNDRRQVLKDDQRALEGSSAD

SEQ ID NO: 17774 - protein, 212 aa, Zea mays
  VARIANT 43: note = Ancestral polymorphism is V, Derived polymorphism is I
MGRGKIEIKRIENSTNRQVTFSKRRAGLVKKAREIGVLCDAEVGVVIFSSGGKLYDYCSPRTSLSRILEKYQTNSGKILWGEKHKNLSAEIDRVKKENDNMQIQLRHLKGEDLNSLQPRELIAIEEGLQNGQTNMREKQMDYWRMHKTNGKMLEDEHKILTFRMHQQAVDLSGGMRELETGYHQVQHDRDFISQMPFTFRVQPNHPNLQEDE

SEQ ID NO: 17775 - protein, 200 aa, Zea mays
  VARIANT 44: note = Ancestral polymorphism is P, Derived polymorphism is R
MGNTPSCIPLAPAGGGGASSSSSAAATTTKVIHADGAVTRLARPVRASELMLEHPGQFVCDPRRLAVGCRVPGVAAAELLQPRRAYFLLPMDMLYSVLTDEEMAALSESHSHAASSWKRIAAAARRHHGRLRRSGKDEACGGGARVCPMLGLLETGGLGADNSKRDELRASPAGKSGGGGAGLRRHRSWQPVLDTIEEVP

SEQ ID NO: 17776 - protein, 256 aa, Zea mays
  VARIANT 26: note = Ancestral polymorphism is A, Derived polymorphism is T
  VARIANT 33: note = Ancestral polymorphism is R, Derived polymorphism is P
  VARIANT 40: note = Ancestral polymorphism is D, Derived polymorphism is E
  VARIANT 97: note = Ancestral polymorphism is T, Derived polymorphism is I
MGRGKIKIKRIENSTNRQVTFSKRRAGLVKKAREIGVLCDTEVGVVIFSSGGKLYDYCSPRTSSVHCPLILFILLLVYYRPSSFLLCCVQAKLIEKTQIWFVGRLSRILEKYQTNSGKILWGEKHKNLSAEIDRVKKENDNMQIQLRPVHLKGEDLNSLQHRELIAIEEGLQNGQTNMREKQAMDYWRMHKTNGKMLEDEHKILTFRMHQQAVDLSGRMRELEIGYHQVQHDRDFISQMPFTFRVQPNHPNLQEDE

SEQ ID NO: 17777 - protein, 650 aa, Zea mays
  VARIANT 229..650: note = Derived polymorphism lacks residues 229 to 650
MPTPTMVRPFPLFFFIVVVLLVRSPAGAAADGGGNATTDSCPLDLGYVRTFPWDPLPCAGGAPNVTACCQTLLSLFGIGLAERLRGTGRFRLPSAAASTACIESFTDLISAAPASLSGSSLVAECFPDPSQFAITSSYCAGVSTATEFVAAVGNDSAQALNSSCGPDLASPATCALCYSAGVAATAHLTSAAANDSKSGSCFYLTVLYAAGISNSAGPTYPPTAACALGLGLLSPAPTPSKSSHAAVYAATIPIAFVLLASLFGFFLWRKRTRANSKKKKNHKICEEGSGDRRSHLRPNTGSVFFDIADLAKATGGFAERNLVGRGGFGAVYRGVLADGSVVAVKKMLDPDMEGGDEEFANEVEIISHLRHRNLVPLRGCCITDEDVEEGKQRFLVYDFMPNGALEDFIFRDREAATKLPPLAWAQRRSIIMDVARGLEYLHYGVKPAIYHRDIKSTNILLDSEMRARVADFGLARRSREGQSHLTTRVAGTHGYLAPEYALYGQLTEKSDVYSFGVLLLEIMSGRRVLDMTAPAGPVLITDWAWTLVKAGQAREVLDEALSTAESPRSGVMERFVLVGILCAHVMVALRPTIGDAVRMLEGDMDVPELPDRPLPYGHNAMFSEAGSTFSISPAFSGPLAPFIDNGDMLR

SEQ ID NO: 17778 - protein, 416 aa, Zea mays
  VARIANT 217: note = Ancestral polymorphism is S, Derived polymorphism is C
MSGDLDDGHGAAAVGNVVAAAAGGEAAAEVAAAVDAHDNDVVMPGFRFHPTEEELIEFYLRRKVEGKRFNVELIAFLDLYRFDPWELPAMAVMGGKEWFFYVPRDRKYRNGDRPNRVTASGYWKATGADRMIRGENSRPIGLKKTLVFYSGKAPKGVRSSWIMNEYRLPPPPTDADPFIPKSEISLCRVYKRSGIDDTHGQSSSSTQFASSARRTSSRTGAPTVIRHGSSPSPSSTPLSPTQQLSSFHLLQGECSSASPPAPMMDQVVTVHSAPQQLLTHPSPCTYAPATTISISTAEAVPEWAQGAEAAFASSYSLFNMAAAAGPMAAGSSRSSVDELSTLVGHSQAYANLSAATGGHLLPLLTPPPPPMLQTMPLGALPIVAPPSSSVADKLSWDWNQIPDTTGRDYNNTSGFK

SEQ ID NO: 17779 - protein, 387 aa, Zea mays
  VARIANT 175: note = Ancestral polymorphism is N, Derived polymorphism is Y
MAAVAAHHHLHPSSVAARTPTLGRRHRFSSLPLAARPSSQGRFSFRAATRVLTRAGSTGASSAASPAATTASSLSLEELRGGCTTWTWRGMRVNYLARGQGPPVLLVHGFGASVAHWRRNIGVLSESYTVYAIDLLGFGASDKPPGFSYTMETWAELILDFLEEVVRRPTVLVGNSVGSLACVIAASESSREAVRGLVLLNCAGGMNNKAIVDDWRIKLLLPLLWLIDFLLKQRPIASALFNRVKNRDNLKDILLSVYGNKDAVDDELVEIIRGPADTEGALDAFVSTVTGPPGPSPIALMPRLADLPVLVLWGDRDPFTPIDGPVGKFFSKLPSELPNVTLYMLEGVGHCPHDDRPDLVHDRLLPWLEALLPPAAGAVTTTTTTVV

SEQ ID NO: 17780 - protein, 162 aa, Zea mays
  VARIANT 142: note = Ancestral polymorphism is V, Derived polymorphism is D
MDPGAGAHYSVRTAEEVFRDFRGRRAGMIKALTNDVEKFYQLCDPEKENLCLYGYPNETWEVTLPAEEVPPEIPEPALGINFARDGMNEKDWLALVAVHSDSWLLAVAFYFAARFGFDKEARRRLFNMINNLPTIFEVVTGVANKQNKEKGPNSTSKSNKTS

SEQ ID NO: 17781 - protein, 99 aa, Zea mays
  VARIANT 13: note = Ancestral polymorphism is R, Derived polymorphism is W
  VARIANT 2: note = Ancestral polymorphism is A, Derived polymorphism is T
MTILVILGFLLSRLVFYVWPLVLAGDPQTFNDDKKAEAQPKGHTGKTVLFVLLGVGAVVLLSFFIFKYWQKKKREEQHARLLKLFEEDDDIEVELGLRD

SEQ ID NO: 17782 - protein, 139 aa, Zea mays
  VARIANT 39: note = Ancestral polymorphism is W, Derived polymorphism is C
MEESGFAITSINGRINMAVWGPLNRTIVTARVDATIHIWDSEEAQEDEERERVCQKQGHQREGNHGGVVDAELDFGKKIPSFFFIQKRMAFSDDGKMKPNLFRTRGNRRIAMTNNGAEKKNKRSSNGRCAKVGAIEQSE

SEQ ID NO: 17783 - protein, 108 aa, Zea mays
  VARIANT 79: note = Ancestral polymorphism is Y, Derived polymorphism is H
MIFFFCALQGTKMVYKHLATLYFVFVFDSSENELAMLDLVQVFVETLDRCFKNVCELDIIFNFNKVPYVHMILPFLSFYNRIVCLSRMQGFYPAENSIYDSSIACCMF

SEQ ID NO: 17784 - protein, 256 aa, Zea mays
  VARIANT 142..256: note = Derived polymorphism lacks residues 142 to 256
  VARIANT 84: note = Ancestral polymorphism is S, Derived polymorphism is L
  VARIANT 40: note = Ancestral polymorphism is C, Derived polymorphism is F
  VARIANT 24..256: note = Derived polymorphism lacks residues 24 to 256
  VARIANT 14: note = Ancestral polymorphism is H, Derived polymorphism is R
MAIIVTFLCRKAIRTQNGEDILIQIISRLIGLMKDHCMICHMGFHKTMINMRWSSSHRILRYDLGGIGGRGNDGQYTDHAPEWSESGRGGWNEGSGNNHREGLMSYKQFVQELDDDVSPVEAQSSQIGRCDKACKCLFGKSQDKLKAASEELGHKIRGFSSENFALQPSNLPSADHEEGDDFYELQPADYYNLISKLLKENVNRQPEQPDYYVVRNHIVVLWCSSPCTNWMSIATFLLLLILETAFSTSFWTKFVG

SEQ ID NO: 17785 - protein, 115 aa, Zea mays
  VARIANT 40: note = Ancestral polymorphism is D, Derived polymorphism is Y
  VARIANT 32: note = Ancestral polymorphism is P, Derived polymorphism is H
  VARIANT 11: note = Ancestral polymorphism is A, Derived polymorphism is V
MEGLVPLLYKAIKERRSNAGGRRGYRTGGALPSSAPVDLDDSEQRRQWLQLQELRSPAHAAAAVAVAETEGSLLHRRNLSLEELAGEVGFSPDRRLRVPLPKARSVRAFACMGAA

SEQ ID NO: 17786 - protein, 89 aa, Zea mays
  VARIANT 4: note = Ancestral polymorphism is A, Derived polymorphism is V
  VARIANT 26: note = Ancestral polymorphism is L, Derived polymorphism is H
  VARIANT 35: note = Ancestral polymorphism is I, Derived polymorphism is N
  VARIANT 36: note = Ancestral polymorphism is A, Derived polymorphism is V
  VARIANT 51: note = Ancestral polymorphism is W, Derived polymorphism is C
  VARIANT 75: note = Ancestral polymorphism is I, Derived polymorphism is T
MESAIRDHSLWANATDQEIDHALEMLKNAGFSHVIAEDRTDQVYLSKQMRWLDFVKLAFYTDTSLACIELVITVIRRSASWRKNVKQNL

SEQ ID NO: 17787 - protein, 95 aa, Zea mays
  VARIANT 13: note = Ancestral polymorphism is D, Derived polymorphism is G
  VARIANT 32: note = Ancestral polymorphism is D, Derived polymorphism is G
  VARIANT 42..95: note = Derived polymorphism lacks residues 42 to 95
  VARIANT 80: note = Ancestral polymorphism is P, Derived polymorphism is R
MLAQMIGITSPIDMEMLELGQETQKYFTDDYDLFTENEETDQLEYLIPEKSSLRQHIQCPDSEFVDFLSYLLQINPRKRPTADEALHHPWLSFSY

SEQ ID NO: 17788 - protein, 574 aa, Zea mays
  VARIANT 527: note = Ancestral polymorphism is S, Derived polymorphism is Y
  VARIANT 370..574: note = Derived polymorphism lacks residues 370 to 574
  VARIANT 321..574: note = Derived polymorphism lacks residues 321 to 574
  VARIANT 245: note = Ancestral polymorphism is R, Derived polymorphism is W
  VARIANT 234: note = Ancestral polymorphism is R, Derived polymorphism is W
  VARIANT 188: note = Ancestral polymorphism is N, Derived polymorphism is I
MAPRQLSFHRHPRVLVASQNIANVIVTRGPLVLASSVLIPHHSLASAVRAVARLTESSEVEDDVINAAQPPPRPVVASSLPTIPSTVPGHCKKSRDTILSDSAAGSDSGGITRLVSPAPPLLPLPVPAVARLATVAPPQSCKSFLNAVLSPAKAPPRQPRQNLRLPPATSSCFRCLAADHQGDLLLKNRLAFAFLDNPAATPDISSFIDAALGSACPGIRVELLPSSRGVKLLRFANNSDRERLRALSPISFGGLSLSLERPEETSNRFIRTPEWLALVALTDFPPEQWSDASIRRCFTAGAEVLEINPDCLDGHNYGPLQLVLQVNHYLDIPYEILVSEPCGLSREGSLVQPAFSASTPTVPGGVVTAWDSAVLELTSSISRSFSLTTTFSSHFANAPLTITNVYAPSNHQDSPTFLDELSDLLPSISGPWLLIGDFNMLRGAADKNQGHLDNHLCTMFNSTIDSLVVAELQLQDCLFTWSNMRSVPTLARLDRAFVNNSHTSSFPSTSLTTLPRQTSDHKPLLVSMSTSIPKSQIFRFENAWLHHPLFLPEVLPAWHQEFPCSDAAARLAGF

SEQ ID NO: 17789 - protein, 97 aa, Zea mays
  VARIANT 2: note = Ancestral polymorphism is T, Derived polymorphism is N
  VARIANT 8: note = Ancestral polymorphism is T, Derived polymorphism is M
  VARIANT 9: note = Ancestral polymorphism is T, Derived polymorphism is I
  VARIANT 10: note = Ancestral polymorphism is A, Derived polymorphism is V
  VARIANT 14: note = Ancestral polymorphism is A, Derived polymorphism is V
  VARIANT 15: note = Ancestral polymorphism is T, Derived polymorphism is I
  VARIANT 97: note = Ancestral polymorphism is S, Derived polymorphism is L
MTDATATTTANRIATIANLVCVAVDACAEPDLVDALKVSGFPEILFTNAGRIIHREKVVRSAEAWSRMMAFFYYKAARPPFLCEADGKGQEKVPLMS

SEQ ID NO: 17790 - protein, 255 aa, Zea mays
  VARIANT 218..255: note = Derived polymorphism lacks residues 218 to 255
  VARIANT 234: note = Ancestral polymorphism is D, Derived polymorphism is Y
MTFTEKMVLAVFRDLTILWMTKRLMDDIHGWGVLFDGRVGDRTITVYIWNGEEPKPNKGHLAWADAFVITADSISMLSEACSTGLILKNVASLFMNKDSLKVEADTRLGELIKSVSEAAHGGCQVSSKGQKCRPCGRAAWARGEVQVAAVRACKEPGRQQPCEMFMLDMLVVLLIRRRESTNVEDMFLAHIFGMDTLARGLHNVVKLIEMIFSAKRYQSFDSEIGALIEDGKGDFEMLKKKVLECSALFHPASRN

SEQ ID NO: 17791 - protein, 273 aa, Zea mays
  VARIANT 2: note = Ancestral polymorphism is A, Derived polymorphism is V
  VARIANT 5: note = Ancestral polymorphism is D, Derived polymorphism is N
  VARIANT 8: note = Ancestral polymorphism is A, Derived polymorphism is E
  VARIANT 159..273: note = Derived polymorphism lacks residues 159 to 273
MAVLDSLEALKRPALALLLAGVLLAAASAGGPHAAALAASGGRVGGSAFSSRSSSPRSYGYSAPAPRGGYTAAPFYSPSPFVSVGPALGIGFGGSGFLVTLMGFAAFLYLAWTRTRRRRTVPPRGATEGRPAMARRWGCRWGSTGLGRRQRVRPCRWTWAGWAKAGEEDPDASTTDDADARCSSGEAGKGAAVGMSAGLLGSGRRPWVRPHRWTRPRLGSGTVQRNQRQRGYLIGRAGGRGGREGGWRQRGRHREGRRARWDCGREAGGKIRM

SEQ ID NO: 17792 - protein, 296 aa, Zea mays
  VARIANT 235: note = Ancestral polymorphism is D, Derived polymorphism is H
  VARIANT 225: note = Ancestral polymorphism is K, Derived polymorphism is N
  VARIANT 165: note = Ancestral polymorphism is N, Derived polymorphism is Y
MAASASRPLALLACTSASLGAGRRAWARLAVSSYSARSALPRLRGRRSFATSARGAVMGNPGPGAVDADVGMDAVQRRLMFEDECILVDEQDNVIGHESKYNCHLMEKIEAGNVLHRAFSVFLFNSKYELLLQQRSATKVTFPLVWTNTCCSHPLYRESELIEENCAGVRNAAQRKLFDELGIVADELPVDQFILLGRMLYMAPSDGKWGEHELDYLLFMVRDVKLNPNPEEVADVKYVNRDQLKELLRKADAGEDGVKMSPWFRLVVDNFLMGWWDHVEQGTLQGAADMKTIHKL

SEQ ID NO: 17793 - protein, 298 aa, Zea mays
  VARIANT 145..298: note = Derived polymorphism lacks residues 145 to 298
  VARIANT 79: note = Ancestral polymorphism is G, Derived polymorphism is S
MREILHIQGGQCGNQIGSKFWEVVCDEHGIDPTGRYMGTSDVQLERVNVYYNEASCGRFVPRAVLMDLEPGTMDAVRTGPYGQIFRPDNFVFGQSGAGNNWAKGHYTEGAELIDSVLDVVRKEAENCDCLQGIDLSSSELNPIIQCFGISVALSVSNDLFVPSGFQVCHSLGGGTGSGMGTLLISKIREEYPDRMMMTFSVFPSPKVSDTVVEPYNATLSVHQLVENADECMVLDNEALYDICFRTLKLTTPSCEGMDEMEFTEAESNMNDLVSEYQQYQDATADEEADYEEEEAAAE

SEQ ID NO: 17794 - protein, 262 aa, Zea mays
  VARIANT 43: note = Ancestral polymorphism is A, Derived polymorphism is D
  VARIANT 52: note = Ancestral polymorphism is P, Derived polymorphism is L
  VARIANT 53: note = Ancestral polymorphism is G, Derived polymorphism is E
  VARIANT 61: note = Ancestral polymorphism is A, Derived polymorphism is T
  VARIANT 83: note = Ancestral polymorphism is S, Derived polymorphism is T
  VARIANT 86: note = Ancestral polymorphism is V, Derived polymorphism is I
  VARIANT 99..262: note = Derived polymorphism lacks residues 99 to 262
  VARIANT 103: note = Ancestral polymorphism is S, Derived polymorphism is L
MAGSESRRAGAVEQPKIGSGNVFAVLETLKKKKKPADKGAKPAAREDPKPDPGTRWLRARAAGKQQVREFELVRGRAHTGKKSWIVSFDGINNLDEARQIVGSAILVKARDRPEIEDDEFYSLDLVGMRVIVKDTGKLVGIVGQGFNFGGGDLLQVIMGSSEGTAVDPDSENQDSNSSREHVWIPFAEDIVPDVDMASREMRITPPKGLLELNSRSNKRSKKERHAMVRSASSFSSIHARIYSHDLHLKRNKECVRSIVLKC

SEQ ID NO: 17795 - protein, 320 aa, Zea mays
  VARIANT 119..320: note = Derived polymorphism lacks residues 119 to 320
MTELQWDLDLRFNQLWPLIHVSLALAEVDFIRLDDDLLQPIATMDNQFNSEEWSLPVASAMMELEKYNLTGAFTRSMHNMGVPIQPVNLAINASSRHHPTEDPEVQEVYRSQVSNNKGKKKVAQRGKSFTKEEDRAICSAFLHVSTDPIVGEPKWHEKMAESNTSQKVNQKHSLNDSEIEINSMHTNSAIPERPEGRDNAKKRCRVMADTSSSSTAVEMLQKMHERGEKNDEKEDQLRQEMFQMERERLELQKLNWEKKWAIMESNAKLRQNEYELNQWNADLLVMSQDLDKLAPPLRAMYEQKQMEIMKRRGINTPSAS

SEQ ID NO: 17796 - protein, 194 aa, Zea mays
  VARIANT 15: note = Ancestral polymorphism is R, Derived polymorphism is H
  VARIANT 25..194: note = Derived polymorphism lacks residues 25 to 194
  VARIANT 30: note = Ancestral polymorphism is R, Derived polymorphism is H
  VARIANT 35: note = Ancestral polymorphism is A, Derived polymorphism is V
  VARIANT 43: note = Ancestral polymorphism is V, Derived polymorphism is I
  VARIANT 44: note = Ancestral polymorphism is M, Derived polymorphism is L
  VARIANT 46..194: note = Derived polymorphism lacks residues 46 to 194
  VARIANT 47: note = Ancestral polymorphism is Q, Derived polymorphism is L
  VARIANT 90: note = Ancestral polymorphism is N, Derived polymorphism is I
  VARIANT 93: note = Ancestral polymorphism is D, Derived polymorphism is E
  VARIANT 112: note = Ancestral polymorphism is C, Derived polymorphism is Y
  VARIANT 114..194: note = Derived polymorphism lacks residues 114 to 194
  VARIANT 129: note = Ancestral polymorphism is C, Derived polymorphism is Y
  VARIANT 139: note = Ancestral polymorphism is L, Derived polymorphism is S
  VARIANT 140: note = Ancestral polymorphism is H, Derived polymorphism is Y
  VARIANT 144: note = Ancestral polymorphism is A, Derived polymorphism is T
  VARIANT 149: note = Ancestral polymorphism is G, Derived polymorphism is E
  VARIANT 152: note = Ancestral polymorphism is A, Derived polymorphism is V
  VARIANT 160: note = Ancestral polymorphism is L, Derived polymorphism is R
MRSPSWRLTWRKTTHGGMPSHLANWKATLRRKAAAEKNVVVAVMGQQILLAICFVRVRSEINVFNNLAQIGIAACVADRTISLFVFSFCNFLEDREVLSFMSILPVLSISHCFWPNDICLLSHSGKAACHNSMVRVLTLHEALAGQLRGTHAFLQKDLVLGTMLQFYFPVLHVLGHHLNHTTGFIEISGGLLYT

SEQ ID NO: 17797 - protein, 366 aa, Zea mays
  VARIANT 330: note = Ancestral polymorphism is G, Derived polymorphism is R
  VARIANT 136: note = Ancestral polymorphism is P, Derived polymorphism is L
  VARIANT 84: note = Ancestral polymorphism is K, Derived polymorphism is E
MAPAIAQQQPQVQPIGVGGRKVVDEVSGWLRVLDDGSVDRTWTGPLEALPLMEPVAPYAQPRDGHTLHDLPGEPNLRVYLPEMEAGDGARLPVVLHLHGGGFCISHPSWLMYHHFYARLARAVPAAVVAVELPLAPERRLPAHVHAGVAALRRLRSIALSASESESEDGALDDGPAAALLRQAADVSRVFLVGDSSGGNLVHLVAAHVAREAADDAGSWAPLRVAGGVPIHPGFVRAARSRSELETKADSVFFTLDMLDKFLALALPEGATKDHPFTCPMGPQAPPLESVPLPPMLVSVAENDLIRDTNLEYCDALRAAGKEVEVLINRGMSHSFYLNKYAVDMDPATGERTRELIDAIKSFISRH

SEQ ID NO: 17798 - protein, 121 aa, Zea mays
  VARIANT 107..121: note = Derived polymorphism lacks residues 107 to 121
  VARIANT 93: note = Ancestral polymorphism is G, Derived polymorphism is R
  VARIANT 92: note = Ancestral polymorphism is T, Derived polymorphism is I
MGRTTRSSGVVSMEMRTTLPPSLLYRLPSTVQGTDSSLRSFNLATRVAIPEAMEQQTISIAKAAITIILILGTSFLAAANPIARCYDALKVTGKVVEKILDWERSAQKQVKIMLKPAHVIL

SEQ ID NO: 17799 - protein, 609 aa, Zea mays
  VARIANT 468: note = Ancestral polymorphism is G, Derived polymorphism is A
  VARIANT 156..609: note = Derived polymorphism lacks residues 156 to 609
  VARIANT 124..609: note = Derived polymorphism lacks residues 124 to 609
  VARIANT 40: note = Ancestral polymorphism is T, Derived polymorphism is I
  VARIANT 6: note = Ancestral polymorphism is E, Derived polymorphism is V
MGDLKEVFRSLQELFPEVDHRILKAIAIEHRKDVDSAVVTVLDEVMPFMTGSAGVDGSVGNLSSMDGSVGNLFGNHSTHEVGSSSSVCDCCHKLGRDICINEIDASVYSVQYTSYGDVKTGKQENINNTYVGRLASIEGVNEQLNLHSYPIPNGGQHDLLPNLDVLSSNTDPEKTLANTDNEVGYSGLFSECFSQPPTGEDGGNIIAPQPCDQDPNGMIPVGDYFPQNSSMEFFSGYEDYNFDDGLLPIGSNDQISFRILGTEKDPFAPVLDVPGRDKEESSTETSGFIESSNNVADMLPDLNLNHFTSTASTHSNHSVSIESLEDSVADARSNKLMLSDSDSSVAFSDVEASPYSGGGAFDQPAFAGLGTAFLDTSVAPTGCSSPPVLETKWQHGRIQYPFPFDSYKACTGYGFTEEWLRRHSGVLLRGSRIQPQLQLVHEWHPRLGVRGVFDLHGWQPADASDEQGWEFLDHLTNCGSLQVLALDDNKLGGQLPGSIAQLLREIQALDIGKTRISGSIPPAIGDLIGLTTLGLESNLLNGTIPAGIGDMKNLTKLALQGNRLTRPIPSSISDLTQLLELDLSSNALSGFIPDTLANLTSPSSPTLLS

SEQ ID NO: 17800 - protein, 292 aa, Zea mays
  VARIANT 20: note = Ancestral polymorphism is T, Derived polymorphism is I
  VARIANT 62: note = Ancestral polymorphism is A, Derived polymorphism is T
  VARIANT 117: note = Ancestral polymorphism is P, Derived polymorphism is L
  VARIANT 219: note = Ancestral polymorphism is D, Derived polymorphism is G
MDADHSHGQPPPPPPSSTEILMAALLNVPAVQLPGLARALAADARRLQSRLAFLLLSPPHFTRALARLRSMPLPAKAALLGRALLRSLLLLLPVLCPDGGSGGGGSTHHHHLLLQPPDLDAALLLLAMCDSYSPAAAAPSPVDWRAVIVDGVVASALSVSGLGGTPWAALGPYVDAAAKCRRFADAVAAVAGDGGTKDGEGSGAASYAAVLALIPVAVDGAPCAICREEMAAGGRGVCGLRPCGHQFHWRCALRWLARRNTCPCCRAELPAEDPLKETRRLWRSVERMARGG

SEQ ID NO: 17801 - protein, 328 aa, Zea mays
  VARIANT 241: note = Ancestral polymorphism is K, Derived polymorphism is M
  VARIANT 209: note = Ancestral polymorphism is Y, Derived polymorphism is N
  VARIANT 127: note = Ancestral polymorphism is R, Derived polymorphism is I
  VARIANT 92..328: note = Derived polymorphism lacks residues 92 to 328
  VARIANT 33..328: note = Derived polymorphism lacks residues 33 to 328
MGELQVVAIAVFSALGFAFYVFFVPFVGTKPFQIVAMAIYTPLITCVVVLYIWCAATNPRDPGIFDSTKNLKLDKNEKHSYVNSDQGINHGGRPLSETFGTADNSEKLSSMLERNDSPSIFWNSWPRFSGIISLVCLPFSCLCKRCLHSDSLSSEHKMCEEGMFFCSLCEADVYAGEWDEVEKYLSGFTKVDDNRYSMKIFFEITKKKYLEALHRHDRAKAVDILVNDLKVFLTFNEEFYKEITQLLTLENFSVAAAVEPKLWCLLKADMAAVFCELVAQGEALQNFQHGAGFWSAMTSNITFQSRNVLSKKFMVYPYMPSLFEMKPN

SEQ ID NO: 17802 - protein, 373 aa, Zea mays
  VARIANT 73: note = Ancestral polymorphism is A, Derived polymorphism is V
  VARIANT 98: note = Ancestral polymorphism is M, Derived polymorphism is K
  VARIANT 166: note = Ancestral polymorphism is A, Derived polymorphism is T
MAAASDLVNGGVAALQIEEPEESKNNAAAVVALAPVPWLPAVAERYERRENLGEGMFGDVYKAWDRVHDRIVAVKRLSGRTDDRFVKTSIPDLAREVMSLAACRGHPSVVQLLATHVDGSRADGDCYLVMEHAGPMNLRQYMAVRRLNGQPFGEDEVRDVMRQLLAGAEHTHKAGVLHRDIVPENVIVCMDGDSATGRMVYTICGFGMSKPAGQTEKDDSGLLASPSPYRAPELFLGCKDYDGRVDTWSLGCIMAELVTGTGVPFFGGALDKEVFDKMMHVVGTRGIAKWQGLERVAPREKVAGLRKTASQERGYLLKMFPPRMLSPAGFKVMEGLLQSNPDHRLSAADALRKPWFRRRFSLGACCFMPHAAA

SEQ ID NO: 17803 - protein, 350 aa, Zea mays
  VARIANT 254: note = Ancestral polymorphism is K, Derived polymorphism is M
MAGSDEVNRNECKGAVPIHTWVLISNFKLAYNMLRRADGTFDRDLAEFLDRRVAPDARAQEGVSSFDHVIDTSTGLEVRIYRAAANNNGGGGATLPILDFLGGTPAASTPFPVILFFHGGSFAHSSSGTAIYDNLCRRLVRLSKGVVVSVNYRRAPEHRYPCAYDDGWAALKWATSQPSLGSGSSGGARVFLSGDSSGGNIAHHVAVRAAVAGIRVRGNVLLNAMFGGAERTESERRLDGKYFVTLQDRDWYWKAYLPEDADRDHPACNPFGPNGRRLAGLPFPRSLIIVSGLDLTCDRQLAYADGLREDGHHVKLVYREKATVGFYLLPNTNHYHEVMEEIADFLRANL

SEQ ID NO: 17804 - protein, 75 aa, Zea mays
  VARIANT 73..75: note = Derived polymorphism lacks residues 73 to 75
  VARIANT 48: note = Ancestral polymorphism is A, Derived polymorphism is T
  VARIANT 45: note = Ancestral polymorphism is R, Derived polymorphism is Q
  VARIANT 43: note = Ancestral polymorphism is A, Derived polymorphism is T
  VARIANT 41: note = Ancestral polymorphism is E, Derived polymorphism is K
  VARIANT 20: note = Ancestral polymorphism is A, Derived polymorphism is T
  VARIANT 15: note = Ancestral polymorphism is V, Derived polymorphism is M
  VARIANT 11: note = Ancestral polymorphism is E, Derived polymorphism is K
  VARIANT 9..75: note = Derived polymorphism lacks residues 9 to 75
  VARIANT 3: note = Ancestral polymorphism is P, Derived polymorphism is H
  VARIANT 2: note = Ancestral polymorphism is Q, Derived polymorphism is H
MQHFSPVVQFEQDPVQILDTLLPLYLNSQLLRALQESLASELTARMSAMSSATDNAIKLHKNLSRRSILLLGRSR

SEQ ID NO: 17805 - protein, 177 aa, Zea mays
  VARIANT 4: note = Ancestral polymorphism is R, Derived polymorphism is Q
MRLQRHKMGVDDFELLTIIGRGAFGEVSKETIIDSQLAQQKDYTLKKPSAYHYNILVLGFVVLLYGLLGIPPSNGVLPQSPMHTKSLAVLKRQLLSKKMVDTAKESIGGSATSLEIYGKMEEVFIKMDSEENTDSVDKELKNFKDAVLQEGNEEGRLAREFDPRKHIEAHLPVRVNE

SEQ ID NO: 17806 - protein, 510 aa, Zea mays
  VARIANT 22: note = Ancestral polymorphism is R, Derived polymorphism is C
  VARIANT 48..510: note = Derived polymorphism lacks residues 48 to 510
  VARIANT 85..510: note = Derived polymorphism lacks residues 85 to 510
  VARIANT 94: note = Ancestral polymorphism is G, Derived polymorphism is C
  VARIANT 100..510: note = Derived polymorphism lacks residues 100 to 510
  VARIANT 102: note = Ancestral polymorphism is G, Derived polymorphism is E
  VARIANT 105: note = Ancestral polymorphism is P, Derived polymorphism is L
  VARIANT 106: note = Ancestral polymorphism is R, Derived polymorphism is W
  VARIANT 154: note = Ancestral polymorphism is W, Derived polymorphism is R
  VARIANT 275: note = Ancestral polymorphism is R, Derived polymorphism is C
  VARIANT 282..510: note = Derived polymorphism lacks residues 282 to 510
  VARIANT 286..510: note = Derived polymorphism lacks residues 286 to 510
  VARIANT 329: note = Ancestral polymorphism is N, Derived polymorphism is Y
  VARIANT 374: note = Ancestral polymorphism is T, Derived polymorphism is I
  VARIANT 379..510: note = Derived polymorphism lacks residues 379 to 510
  VARIANT 425..510: note = Derived polymorphism lacks residues 425 to 510
  VARIANT 461..510: note = Derived polymorphism lacks residues 461 to 510
  VARIANT 477..510: note = Derived polymorphism lacks residues 477 to 510
  VARIANT 478: note = Ancestral polymorphism is R, Derived polymorphism is W
MAALTSALLFTALLVAAQYMLRLLHSFLWVPFRLERRFRRQGIRWPPRSLVSGNAADYRDLLGAARSAPLSSFRHNGVVARATPQYAVWLARYGRPFVYWFGPRPRLVISDPELVKAVMTDSTGGFDKAASGGNNPLARQLIGEGLVGLSGETWARHRRVISPAFNMERVKSWIPEIAAAASSVLDKWEAEGGSRTEFEIDVHKAFHTLSADVISCVAFGSSYEEGKRIFQLQEEQMQLALLAMRTVYIPGFRFVPTKKNRKRQRLNQEIQCSLRKLIEINGTKCEDSKNLLGLMLSASKAGSEYKMGIEEIIHECKTFYFAGKETTANLLTWATLLLALHQEWQVKARDEVLKVCGKHEHPNAENLSDLKIVTMVLKETLRLYPPATFINRTATRDIKLGKLDIPAGTRLDFPIIHIHRDHEVWGMDAEEFNPSRFADGSSYHLGAYFPFGIGPTICVGQNLAMVEAKVALAMTLQRFAFTVSASYAHAPMLVFTLQPQFGAQVLVRKI

SEQ ID NO: 17807 - protein, 1183 aa, Zea mays
  VARIANT 913..1183: note = Derived polymorphism lacks residues 913 to 1183
MARFEVNGKSVQGVDLLRRRHWASRLDFWPFLALYALWLLLAVPALDFTDALIVLAALSAAHILAFLFTAWFVDFRAFIGYSKARLKSLSLAILQVKNICAANVCKVTPAKFLGSKEIVPLHIQRNVASTSVAGETAEIYFDFRKQRFIYSAEKDNFLKLRYPTKELISHYAKGTGYGTEAKISTAVDKWGRNVFEYPQPTFQKLMKEQIMEPFFVFQVFCVVLWCLDEYWYYSLFTLFMLFLFESTMAKNRLKTLTELRRVKVDSQIVLTYRCGKWVKIPGTELLPGDIVSIGRSTSGEDRSVPADMLLLAGSAIVNEAILTGESTPQWKVSIAGRSPDDMLSIKRDKNHILFGGTKVLQHTADKSVNLRAPDGGCLAFVLRTGFETSQGKLMRTILFSTERVTANNKESGLFILFLLFFAIIASGYVLVKGLEDPTRSRYKLLLSCSLIITSVIPPELPMELSIAVNTSLIALARRGIFCTEPFRIPFAGKVDICCFDKTGTLTSDDMEFQGIVTLEDDTELISDANKLPLRTQEVLSSCHALVFVDNKLVGDPLEKAAIKGIDWIYTSDEKAMSKRPGGQPVQIVHRYHFASHLKRMSVIVRIQERFYAFIKGAPETIQERLVDLPAAYVETYKKYTRQGSRVLALAYKLLPEMPVSEARSLERDQVESDLTFAGFAVFNCPIRGDSGAVLQELGQSSHDLVMITGDQALTACHVASQVHISSKPVLILTRIKTGGFEWVSPDETDRAPYSAVEVAVLSESHDLCINGDCFEMLQSTEAVLQVIPYVKVFSRVAPEQKELVLTTFKSVGRVTLMCGDGTNDVGALKQAHVGIALLNAEPVQKVNSKSKAENKSGKLKKQKPGNEASSRVTPATNSSAKASSSRPLTAAERQQEKLQKLLDEMNDESDGRSAPIVKLGDASMASPFTAKHASVAPTLDIIRQGRSTLVTTLQMFKILGLNCLATAYVLSVMYLDGVKLGDVQATISGVFTAAFFLFISHARPLQTLSAERPHPNIFCAYVLLSILGQFAMHILFLITAVNEASKHMPEECIEPDSDFHPNLVNTVSYMVNMMIQVATFAVNYMGHPFNQSISENKPFKYALYGAVAFFTVITSDMFRDLNDYMKLEPLPEGMRGKLMLWAILMFCGCYGWEWLLRWVFPGKMPAWEKRQKQAVANLEKKRD

SEQ ID NO: 17808 - protein, 401 aa, Zea mays
  VARIANT 330: note = Ancestral polymorphism is G, Derived polymorphism is R
  VARIANT 208..401: note = Derived polymorphism lacks residues 208 to 401
  VARIANT 51: note = Ancestral polymorphism is W, Derived polymorphism is C
  VARIANT 30: note = Ancestral polymorphism is G, Derived polymorphism is W
MPRGFLPTNDTLPKTLDALLSPRSRTHAVGKQGPIVLDLKSSAFDPKEKVCTKFPPEGSKCTLPTILVTSDGRITAPRTLRKLFKVDAADYMLSLCGNEALMELSSPGKNGSFFYLTNDDRYMIKTMKKSEVKMLLKMLPAYYNHVRAFENKMMKFGRLSILATTLLLIVDNFGRIAIAYLLAAVCEIWLKGDDDVDSGYGLLRRYRYQLFVGLVLSIAYSILLYGIYVPDWEYQIAGPGSSSTKKSFFVKCGVRGDTRPACNAVGMVDRTILGIDHLYRRPVYVRTKECSIDYLENGPLPPDAPSWCQAPFDPEGLLSFVMAIVTCLIGLQFRHVIIHFEKHRGRIASWLVPSFSMLALAFVMDFVGMRMNKPLYTMSYTLAAGAAGLLFPGIYVLVGPS

SEQ ID NO: 17809 - protein, 124 aa, Zea mays
  VARIANT 9..124: note = Derived polymorphism lacks residues 9 to 124
MLSPFAASQHLNTPAYVVCGIRGHKQEDPGPRDVREGQGGVGADSLHDDLRLEGKDKACQHDEKEVEGKQNAKTQEKDQCEGQGKRDVREGQGVVGVDSLHDDLRLGGKDKAGQRAILQTNWGY

SEQ ID NO: 17810 - protein, 420 aa, Zea mays
  VARIANT 362: note = Ancestral polymorphism is G, Derived polymorphism is E
  VARIANT 256: note = Ancestral polymorphism is L, Derived polymorphism is F
  VARIANT 215: note = Ancestral polymorphism is V, Derived polymorphism is L
MMTRRLGHSIWYWRWAPGPEIPAALKYYNPRGQATGMFASICRRRLLRLCQIPFGTGAIPSDALPHCHSLATIADAPVSEPCAALVSCGLSPAAAVAHRLPIRSTAKADAVRALLRSYGFTDAEVADLVRRLSQILSVDPDRIRPKLDLFASLGVKPRRLARYPALLTRSLDKHLVPCIQFLRNILSTDEDVCLAISRTPRALSAGLEKIMRPALDTLRRLGLPDESISKLVVIEMGVLMMSPDRICQIFEALKELGLGVTEKRFPYGIRALCCISREKWLHRVALYRSFGVSEGELQRAFKKQPNIVNFSDEIIKKKIRFFLDVLKVELSEVMEQPAIIGYSLERNIIPRCAVLSLLMREGKIGPNVKLISALLGSANMFSTRYVLRYANELPDVVKAYEGKITFDGFREQDLLVPLKL

SEQ ID NO: 17811 - protein, 210 aa, Zea mays
  VARIANT 77: note = Ancestral polymorphism is G, Derived polymorphism is R
  VARIANT 61: note = Ancestral polymorphism is I, Derived polymorphism is N
  VARIANT 54: note = Ancestral polymorphism is A, Derived polymorphism is T
  VARIANT 26: note = Ancestral polymorphism is R, Derived polymorphism is C
MDRQQGRAPRTHHLPLAAGRAAGKPRRRTSGFFVTIWIATVMFKSNDILCKQTALKRERKITVLVGITILFVVHVSGFYWCYKNGDLIRPLMMLPPKEIPPFWHAIFIILVNGSNVDDCGIFSTFVLCIIAYTCVVPFFPEQGVWKPIFVSNHWLVSHFQVDICCGKDWKRMVRSCKREDILLLCSQEGCKGSVMISCCFGFLPCNISYF

SEQ ID NO: 17812 - protein, 1009 aa, Zea mays
  VARIANT 276..1009: note = Derived polymorphism lacks residues 276 to 1009
  VARIANT 324..1009: note = Derived polymorphism lacks residues 324 to 1009
MSMGAVSREVSSACERLCFICPSLRTRSRHPVKRYKKLLAEIFPRTQDEGPNDRKIGKLCEYISRNPMRVPKITVYLEQKCYKEFRAERYGSVKVVMAIYRKVICSCQEQLPLFANSLLTIVETLLEQNRQDDLRKLACQTLFDFINSQVDSTYMFNLENQIPKLCHLAQEMGEKEKICILHAAGLQALSSMIWFMGEHSHMSAELDNVVSAVLENYESPYANADNDAAVEDIRTQWVDEVLKAEGHEPPAVTILTRVPSWKVIRAVHGELSLTIEESTSPNFWSGICLHNLARISRETTTTRRVLEAIFRYFDNNNLWSPSKGFALCVLLDMQIVMEKSDLHPCMPGQNAHILLSMLVKHLEHKNVLKQPDMNLDIIEVTSRLAEHSKAQSSIALMSSISDMVRHMGKSMQSLASDAGPGDNMVKWNSRYGKAVDECLVQLSRKVGDAGPILDTLAVVLENISSSMIVARSTISAAYRTAQIVASLPNLSHQSKAFPEALFHQLLLAMLYPDCETHLGAHRIFSVVLVPSSVAPFSFADTSQTRKIDLRRTLSRTTSVFSSSAALFGKLKRDMLSFRESALQDNTKLLPISENANEISANDAKLFKSQTIQRMVSTRDISLPSSTDTSTSSEPTSYQEKDAVTLMLSVRQANLLLSSLWTQALSPENVPRNYEAISHTYSLMLLFSRAKGSGAEVLVGSFQLAFSLRSVSLQAGFLPPSRRRSLFTLATSMLVFFSKAFNVLALIPVVKQVLTESTVDPFLCLIEDCRLQALDSANESCTKLYGSKEDDELALKSLSNIDMNENQSKETSVPLILDSLEDMSESELSAIRKQLLEEFSADDSCLGSHFTETPSQYPAQNGKLHHKSMEVIPLGFVFEDDTLAEASDSSVEPHLQHPPCNNILDVNRLLDSVLETSQHVGRSSVSTNQDLPFKDVANQCEALLIGKQQKLSACMSVCEKEAGESSVEQSSRQDPQADTFLCTADEQWHPNSCKLPALCPYDRFLATSGC

SEQ ID NO: 17813 - protein, 119 aa, Zea mays
  VARIANT 52..119: note = Derived polymorphism lacks residues 52 to 119
  VARIANT 53: note = Ancestral polymorphism is E, Derived polymorphism is D
MGEVEQVVVLDVAEDIRLSLAHGVRLVASSKRAVHQLFIYVLDNRIALPWKQEKAAIEYIHSLSRAQPARSLNGAGLCPASRSLSTQATTTSSTPQLKAHPMSSSQAATMLSKTEDGKN

SEQ ID NO: 17814 - protein, 767 aa, Zea mays
  VARIANT 284..767: note = Derived polymorphism lacks residues 284 to 767
  VARIANT 279..767: note = Derived polymorphism lacks residues 279 to 767
  VARIANT 244..767: note = Derived polymorphism lacks residues 244 to 767
MEAEQQKQQPQRPRRKGLKRKLEDEASAAVAAAATSAAASAAAASLGSAGADDDNEEEDGSAGTPEICCRHSHAALAREVRAQVDALVRCASSWRHADRAAAKRATHVLAELAKNEEVVNVIVEGGAVAALVCHLEEPAVAAPTQEEQQLRPFEHEVEKGAAFALGLLAVKPEHQQLVVDAGALPPLVKLLKRQKNTTNSRVVNSVIKRAADAITNLAHENSNIKTSVRMEGGIPPLVQLLESQDLKVQRAAAGALRTLAFKNDENKTQIVQCNALPTLILMLRSEDAAIHYEAVGVIGNLVHSSPKIKKEVLNAGALQPVIGLLSSCCTESQREAALLLGQFASADSDCKVLNKYGVLTVYKSSVNFANLLVHIVQRGAVCPLIEMLQSADVQLREMSAFALGRLAQDTHNQAGIAYNGGLVPLLKLLDSENGSLQHNAAFALYGVADNEDYVSDFIKVGGVQKLQDGEFIVQATKDCVAKTLKRLEEKINGRVLKHLLYLMRVGEKSVQRRVALALAHLCAPEDQSSVFIDNNGLDLLLDLLISMSSKHQQDGSAALYKLANKAAALSPMDAAPPSPTPQACKRIIKFKFTLYYVYLGEQYVNSSTLSDVTFLVEGWYYFMTLISSEKDARDIEIPNIRWDVFELMMRFIYTGSVQVTSEIAQDLLRAGDQYLLEGLKRLCEYTIAKDVNLDNVSDMYDLSEAFHAVSLRHTCILYILEHFNKICTRAGSAQLIQRVIPELRNFLTKALSSSRSPSTTDDRNLQT

SEQ ID NO: 17815 - protein, 236 aa, Zea mays
  VARIANT 57..236: note = Derived polymorphism lacks residues 57 to 236
  VARIANT 40: note = Ancestral polymorphism is S, Derived polymorphism is N
  VARIANT 37: note = Ancestral polymorphism is R, Derived polymorphism is C
  VARIANT 27..236: note = Derived polymorphism lacks residues 27 to 236
  VARIANT 6: note = Ancestral polymorphism is A, Derived polymorphism is T
  VARIANT 4: note = Ancestral polymorphism is A, Derived polymorphism is T
MTDAGAARARRPGSGGDGDLPLRPPKSPRDPLEFLSRSWSVSPFAANDVSRARAPVQASVSAIAEDVAEDLDAASRSSFSFVSAAHHRRHPRPVESRPRHPHRASSCAVLLPRWDPHASSSPTSRNRPGSHHDRRGRRQGQEDGQRRRRGPPAPPAEVTAGPTGVPVPLLEHVSSAANNVSRARAPALASGSAIVEDVAGDLDAASRSFSFVSAAHHRRHPRPVESRPRHPRRASR

SEQ ID NO: 17816 - protein, 266 aa, Zea mays
  VARIANT 26: note = Ancestral polymorphism is F, Derived polymorphism is I
  VARIANT 193: note = Ancestral polymorphism is S, Derived polymorphism is A
MASSQCCDNPPALNPACGKGKVVDSFGGLKAYVAGPEDSKAAVVLVADVFGTSSFLLPLEIVRLWYGTLQVKSLLSPLAGFEAPILRNIADKVASSGYFVVVPDFFHGDPYVPENAEKLIPVWLKSHTPEKGFEEAKPVIAALKEKGVSAVGAAGYCWGAKVVVELAKANELLQAAVLFFFSNITPEVKCSISILGAEMDVRSPPELVKQFEQALSVNSGVGHFVKVFPGVAHGWSVRYSLDDAAAVKSAEEAFADMLDWFNKNLK

SEQ ID NO: 17817 - protein, 395 aa, Zea mays
  VARIANT 69: note = Ancestral polymorphism is P, Derived polymorphism is S
  VARIANT 75: note = Ancestral polymorphism is A, Derived polymorphism is T
  VARIANT 195: note = Ancestral polymorphism is R, Derived polymorphism is Q
  VARIANT 243..395: note = Derived polymorphism lacks residues 243 to 395
  VARIANT 271..395: note = Derived polymorphism lacks residues 271 to 395
  VARIANT 301..395: note = Derived polymorphism lacks residues 301 to 395
MSIAKAIAIVMDRNPQLRQEGIAHEVLQWYLCRMEGWFATDADSISLQGCDQEVLLPGGHGLMVRGYRPVINTLARGLDIRLNHKVLEIVRHQNKVEVTVSSGQTSVADTAVVTVPSPWKKGRAGKKGSSSCGYEDKTDWGTEIGWIYCSVTEDILTGFKMHARGWRSIYCMPKRPAFKGSAPINLSDRLNQVLRWALGSIEILFSRHCPIWYGYGGRLKFLERFAYINTTIYPLTSIPLLLYCILPAVCLLTGNFIIPKISNLESVWFISLFISIFATGILEMRWSGVGIDEWWRNEQFWGLLKVLAGIDTSFTVTSKATDEEGDFAELYMFKWTTLLIPPTTILIINLVGVVTGISYAINSGYQSWGPLFGKLFFAFWVIVHLYPFLKGLMGK

SEQ ID NO: 17818 - protein, 68 aa, Zea mays
  VARIANT 32: note = Ancestral polymorphism is G, Derived polymorphism is S
MDVRSPPELVKQFEQALSVNSGVGHFVKVFPGVAHGWSVRYSLDDAAAVKSAEEAFADMLDWFNKNLK

SEQ ID NO: 17819 - protein, 224 aa, Zea mays
  VARIANT 12: note = Ancestral polymorphism is V, Derived polymorphism is G
  VARIANT 20: note = Ancestral polymorphism is P, Derived polymorphism is L
  VARIANT 27: note = Ancestral polymorphism is G, Derived polymorphism is C
  VARIANT 31: note = Ancestral polymorphism is S, Derived polymorphism is L
  VARIANT 40: note = Ancestral polymorphism is R, Derived polymorphism is C
  VARIANT 93: note = Ancestral polymorphism is T, Derived polymorphism is I
  VARIANT 105: note = Ancestral polymorphism is H, Derived polymorphism is Y
  VARIANT 126: note = Ancestral polymorphism is G, Derived polymorphism is E
  VARIANT 127: note = Ancestral polymorphism is G, Derived polymorphism is C
  VARIANT 144: note = Ancestral polymorphism is T, Derived polymorphism is M
  VARIANT 160..224: note = Derived polymorphism lacks residues 160 to 224
MALRKAFEKAVVKRLMTYVPFGVLLSGGLDSSLVAAVAVRHLAGTEAARRLGTKLHSFYVGLEGSPDLKAAREDDIDAIEDVIYHTEAYDVTTIRASTPMFLMSHKIKSLGVKMVISGEGSDELFGGYLYFHKAPNKEELHRETCRKYDCLRANKATPAWGLEARVPFLDKEFINAAMNIDPEWKMVQPDLGRIEKWVLRKAFDDEEQPFLPKVVANLRFSCFY

SEQ ID NO: 17820 - protein, 73 aa, Zea mays
  VARIANT 1: note = Ancestral polymorphism is M, Derived polymorphism is T
  VARIANT 5: note = Ancestral polymorphism is S, Derived polymorphism is P
  VARIANT 13: note = Ancestral polymorphism is R, Derived polymorphism is K
  VARIANT 21: note = Ancestral polymorphism is E, Derived polymorphism is K
  VARIANT 32: note = Ancestral polymorphism is H, Derived polymorphism is R
  VARIANT 33: note = Ancestral polymorphism is G, Derived polymorphism is S
  VARIANT 37..73: note = Derived polymorphism lacks residues 37 to 73
MGRHSCCYKQRLRKGLWSPEEDEKLMNHIVKHSHGCWSTVPKLAGLQRCGKSCRLRWINYLRPDLKRGAFSQE

SEQ ID NO: 17821 - protein, 570 aa, Zea mays
  VARIANT 50: note = Ancestral polymorphism is E, Derived polymorphism is K
MEGGGVGDAYGEDRATEEQLITPWAFSVASGYTLLRDPRHNKGLAFSEAERDAHYLRGLLPPALASQELQEKKLMHNLRQYERPLHRYIAMMDLQERNERLFYKLLIDNVEELLPVVYTPTVGEACQKYGSIYRRPQGLYISLKDKGKILEVLKNWPERSIQVIVVTDGERILGLGDLGCQGMGIPVGKLSLYTALGGVRPSACLPITIDVGTNNEALLNDDFYIGLRQRRATGEEYHELVEEFMAAVKQNYGEKVLTQFEDFANHNAFDLLEKYRESHLVFNDDIQGTASVVLAGLLAALKVVGGTLADHTYLFLGAGEAGTGIAELIALEMSKHTGSPIEECRPKIWLMDSRGLIVASRKESLQAFKKPWAHEHGAVETLLEAVRSLKPTVLIGTSGKGGTFTKDVVEAMASQNERPVVFALSNPTSHSECTAEQAYTWTEGRAVFASGSPFPAVELDGRALVPGQSNNAYIFPGFGLGVVISGAIRVRDDMLLAASEALAEQVTEAHYAKGLIFPPFTNIRAISARIAAKVAAKAYELGLASRLPRPDDLVKYAESCMYTPTYRSYR

SEQ ID NO: 17822 - protein, 228 aa, Zea mays
  VARIANT 155: note = Ancestral polymorphism is T, Derived polymorphism is A
MAWNARFGDDEEGSGLELSLGLPGYFSGSPDQAAGFEEKASRGSAAAPPPPPPAAARAKGSDGFKARPAAAAPVVGWPPVRAFRRNLATSSSKPSSHGGKEPAASADGGNKGLFVKVNMDGVPIGRKLDLAAHAGYDTLSAAVDSLFRGLFAAQAAGPGGEQQAVAGILSGGGGGEHTLVYEDDEGDQMLVGDVPWPMFVATARRLRVLKSSDLSPSSLRAARAAAEC

SEQ ID NO: 17823 - protein, 695 aa, Zea mays
  VARIANT 401..695: note = Derived polymorphism lacks residues 401 to 695
  VARIANT 233: note = Ancestral polymorphism is G, Derived polymorphism is C
MEVRGLGQLLAALAAAFFVRAIAGPGPALLPPAEDTETDEADAEAGEGGGGGVPPVTIRWARITCALKNKRGEVARFLLSNVSGEAKPGRLLALMGPSGSGKTTLLNVLAGQLAASSSLHLSGFLYINGRPISKGGYKIAFVRQEDLFFSQLTVRETLSLAAELQLPDLWAPERKESYVNDLLLRMGLVNCADSIVGDAKVRGISGGEKKRLSLACELIASPSVIFADEPTTGLDAFQAEKVMETLRQLAQDGHTVICSIHQPRGSVYGKFDDIVLLSDGETVYMGPAKEEPLTYFSSLGYQCPDHMNPAEFLADLISIDYGSTESVQSSQKRIENLIEAFSNKSVVTEGNNLIAIPEDPELSAKLVRKTTVKKRHGWWRQFRLLFKRAWMQVHLNISVLWLTISRHPLLFVMCRIFCVQAFRDGPTNKVRSRMSVASAVIFGSVFWRMGKSQTSIQDRMGLLQVAAINTAMAALTKTVGVFPKERSIVDRERAKGSYALGPYLSSKLLAEIPIGAAFPLIFGSILYPMAKLHPTFSRFAKFCGIVTVESFAASAMGLTVGAMAPTTEAAMALGPSLMTVFIVFGGYYVNPDNTPVIFRWIPRISLIRWAFQGLCINEFKGLQFEQQHSYDIQTGEQALERFSLGGIRIADTLVAQGRILMFWYWSTYLLLKKNRPKYQQLLPPLEQDKNKPQVE

SEQ ID NO: 17824 - protein, 208 aa, Zea mays
  VARIANT 20..208: note = Derived polymorphism lacks residues 20 to 208
  VARIANT 31: note = Ancestral polymorphism is P, Derived polymorphism is L
  VARIANT 47: note = Ancestral polymorphism is V, Derived polymorphism is I
  VARIANT 66: note = Ancestral polymorphism is A, Derived polymorphism is D
  VARIANT 170..208: note = Derived polymorphism lacks residues 170 to 208
MQLCAATPKRTSWHMPTPYWGAGAAAFPQTPERSPRFTGDARLGHCVHDVAERYGCAEDAGEVARAVRTLERAHFEHFFIHLQAYLPYGIPRLMQKVVYTVGGHLFSAVFIEYVILKMKSPSHRPQMVFLSLVQGSASHPPEDQDYENYYPKGKKEVPKGDCTNKSESKQESNTDEGWNFQDNAMKQMQNFLAPLLIQCHLAPQTRRR

SEQ ID NO: 17825 - protein, 206 aa, Zea mays
  VARIANT 94: note = Ancestral polymorphism is W, Derived polymorphism is R
  VARIANT 72..206: note = Derived polymorphism lacks residues 72 to 206
  VARIANT 57..206: note = Derived polymorphism lacks residues 57 to 206
  VARIANT 36: note = Ancestral polymorphism is G, Derived polymorphism is S
  VARIANT 28..206: note = Derived polymorphism lacks residues 28 to 206
  VARIANT 10..206: note = Derived polymorphism lacks residues 10 to 206
  VARIANT 7: note = Ancestral polymorphism is P, Derived polymorphism is S
MDYIMLPITQGDSMDWSVSEHVFIVCSLFAEQVQKGNRPNTHLNVVGYTEVSSRFFQITGIELSKTQLKNKWEKLKCDLTAWRKLMRRQTGTGWDHLRQTIETDPEWWRKIKAEIPGCAKFKKGPLQNEADLSKMFDKITNEENDHWNPMTENPIIPENHEPIINLESDFADVECELPNEFASASSDVVQEVSPSVGNGKKDLGLS

SEQ ID NO: 17826 - protein, 301 aa, Zea mays
  VARIANT 112: note = Ancestral polymorphism is G, Derived polymorphism is S
  VARIANT 111: note = Ancestral polymorphism is D, Derived polymorphism is A
  VARIANT 96: note = Ancestral polymorphism is V, Derived polymorphism is L
MAEITLEPSDLMAQTNKRIVPKFTEIFPVEDANYPYSAFIASVRKDVIKHCTDHKGIFQPVLPPEKKVPELWFYTELKTRTSSITLAIRMDNLYLVGFRTPGGVWWEFGKDGDTHLLGDNPRWLGFGGRYQDLIGNKGLETVTMGRAEMTRAVNDLAKKKKMATLEEEEVQMQMQMPEAADLAAAAAADPQADTKSKLVKLVVMVCEGLRFNTVSRTVDAGFNSQHGVTLTVTQGKQVQKWDRISKAAFEWADHPTAVIPDMQKLGIKDKNEAARIVALVKNQTTAAAATAASADNDDDEA

SEQ ID NO: 17827 - protein, 261 aa, Zea mays
  VARIANT 171: note = Ancestral polymorphism is K, Derived polymorphism is M
  VARIANT 127..261: note = Derived polymorphism lacks residues 127 to 261
  VARIANT 83: note = Ancestral polymorphism is D, Derived polymorphism is H
  VARIANT 26: note = Ancestral polymorphism is A, Derived polymorphism is V
MALEPLRHGLVSLLVLLLLLVHAASAARARDLHLEMVTTSAATARAVPSCASWRLGVETNNIRDWYSIPAECRGYVRDYMYGDLFRQDCAVVAREAAAYAEGLELGGDGKEVWVFDVDDTTLSNLPYYADTGFGAEPYNATYFDEYVANATAPPLPEVLQLYETLLSLGIKVVFITGRHDYEKEPTIKNLRSAGYHTWDKLVLKPSSLGSSVVPYKSGERQKLVDAGYRIVGNMGDQWSDLIGAPEGDRTFKVPDPMYYVG

SEQ ID NO: 17828 - protein, 139 aa, Zea mays
  VARIANT 65: note = Ancestral polymorphism is D, Derived polymorphism is V
MRWHHFVFANLSKKKLFSPENSSTCAGICIAKNKLGEECQLSVNYLSVLAGQRCKLNALEKVVNDDYLVASTDGVGTKLKLAFESGIDDTIGIDLVAMSVNDIVTLGAKPLFFLDYYATSKLDVDLVEKVIKGIRDGCE

SEQ ID NO: 17829 - protein, 402 aa, Zea mays
  VARIANT 171: note = Ancestral polymorphism is H, Derived polymorphism is L
  VARIANT 191..402: note = Derived polymorphism lacks residues 191 to 402
  VARIANT 235: note = Ancestral polymorphism is W, Derived polymorphism is S
MGAADKWLLPLVSVSFVSLLLFLSALSGFSASSALFARLPPPSYVRRGAAAPPSFAYLLAGGRGDGRKLLRLLLAVYHPRNRYLLHLSADAPASERAELAAAVARAAPAVRAFSNVDVVGRPTAGTPMGSSGLAATLRAAAAMLRLDAEWDWFITLNAADYPLLTQDDLIHVFSSVPRHLNFIDHTSDIGWKESQRVQPIIVDAGVYLAGRNQFFQATEKRDTPDSFKFFTGSPWVILNRRFVEYCIFGWENLPRTLLMYLTNVMLPLEGYFHSVACNSDFRNFTVNNDLRYMIWDNPPQMEPHFLNVTHYDELVGTGVPFARKFKENEPLLDKIDDQVLRRWHQRPVPGAWCTGRRRWFSDPCSQWSNVNIVRPGPQAEKFRTYINQIMEESKSGNNSCKQ

SEQ ID NO: 17830 - protein, 397 aa, Zea mays
  VARIANT 178..397: note = Derived polymorphism lacks residues 178 to 397
  VARIANT 170..397: note = Derived polymorphism lacks residues 170 to 397
  VARIANT 140..397: note = Derived polymorphism lacks residues 140 to 397
  VARIANT 127: note = Ancestral polymorphism is G, Derived polymorphism is S
  VARIANT 117: note = Ancestral polymorphism is P, Derived polymorphism is S
  VARIANT 113: note = Ancestral polymorphism is G, Derived polymorphism is S
  VARIANT 109: note = Ancestral polymorphism is Y, Derived polymorphism is H
MMMMGEGAHAPPWQQSPAASGIMDADEVSPYALLAELKHYLPSNEVMAYDEDDEEALAAAAAVDAYACDEFRMYEFKVRRCSRGRSHDWTDCPYAHPGEKARRRDPRRYHYSGAACPDFRKGGCKRGDACELAHGVFECWLHPSRYRTQPCKDGTGCRRRVCFFAHTPDQLRVPQAQQSSPRGASAASPLAEPSYDGSPLRRQAFESYGYLTKSGVMSSSPTSTLVSPPRSPPSESPPMSPDAAAAALRRGSWPGVGGSPVNEVLASLRQLRLGGGGSGGSPRSAPSGGSFLAGGYPFGSPKSPAGLYSLPSTPPTRPCPVMVTTASGATIMTVERLNLGLLVDEEPVMERVESGRALREKVFERLSKETAVPNDTAASANVEGAAPDVGWVSDLIN

SEQ ID NO: 17831 - protein, 357 aa, Zea mays
  VARIANT 81: note = Ancestral polymorphism is P, Derived polymorphism is L
  VARIANT 92: note = Ancestral polymorphism is R, Derived polymorphism is C
  VARIANT 116: note = Ancestral polymorphism is P, Derived polymorphism is L
  VARIANT 140..357: note = Derived polymorphism lacks residues 140 to 357
  VARIANT 141..357: note = Derived polymorphism lacks residues 141 to 357
  VARIANT 181..357: note = Derived polymorphism lacks residues 181 to 357
  VARIANT 187..357: note = Derived polymorphism lacks residues 187 to 357
  VARIANT 191..357: note = Derived polymorphism lacks residues 191 to 357
MWEKNFCTDACAIPWAKLCETKRLMSLYKSVVDWDDSAALEAFNDAKARFCAIYHGQHYDIPLPDPDMFIDIINPDEYVDPELVADLEKSRRRVPRKDDGVPDVWESFIFSDKPVPVIGWVTRRPVSLMASSQATCSNNWSAKLRETAGSNQQPGEQTNSCISLSIMRDGSQDAWKHDYGWDPTAIQTDLWDNHQGSYEVPDGQGVPYGHWTHWRRRNNDSGRRNTRNSGGPISSKPMKSKDQTDEHNVAINGWRNCRVRNVLSANHHQQKNLQPAWSRMNNIVTDYLCHNNNKSKGHDNEDQGSIAGLNIPRSQILSYGFLQSFLLLHVTFLKHNYMGFTIQPFGSTADGVKLLLY

SEQ ID NO: 17832 - protein, 145 aa, Zea mays
  VARIANT 9: note = Ancestral polymorphism is A, Derived polymorphism is P
MRQVGVLCAAAHVAVRDTVGKLADDHKNAKALAVWVLKLLCLVGFIFLEGLKKIEQITVDSASVETNMFKLCKVRSVLFGQKGIPYLNTYDGRTMRYPDPLIKANDTIKIDLETNKIMDFIKLYLPFHGLHQVIYLVRLNVSTNS

SEQ ID NO: 17833 - protein, 166 aa, Zea mays
  VARIANT 45: note = Ancestral polymorphism is S, Derived polymorphism is L
  VARIANT 50: note = Ancestral polymorphism is A, Derived polymorphism is P
  VARIANT 114: note = Ancestral polymorphism is Q, Derived polymorphism is R
  VARIANT 116..166: note = Derived polymorphism lacks residues 116 to 166
  VARIANT 143..166: note = Derived polymorphism lacks residues 143 to 166
MPACGRTAVTPAGATPALLRVLSLDLSPQCGNPRLGLLGDFRWCSSDVGALKQKNTRSRRQKKLKAYDLSALSESLPEPCAPKQKPEAKLNCKSRQTLVLREAAHLKVVLGKMQFQLDPFAAIHQHLLATQPPAAAKGDAVKQGKDSKNKKRRKKGASSSSQAMDI

SEQ ID NO: 17834 - protein, 122 aa, Zea mays
  VARIANT 80: note = Ancestral polymorphism is P, Derived polymorphism is L
MLASPVSAPAENAGSGPRAGDDVASSQPPKRAKVGCTEADTAKPSVALAEVGTVAGPLPNTAGLQALTGAMDKLEALLRPKEGQSNPAGHKRGTNDKDITTKIKRAMDLSEDLSAKIKENQG

SEQ ID NO: 17835 - protein, 364 aa, Zea mays
  VARIANT 337..364: note = Derived polymorphism lacks residues 337 to 364
  VARIANT 263..364: note = Derived polymorphism lacks residues 263 to 364
  VARIANT 174: note = Ancestral polymorphism is L, Derived polymorphism is P
MSAMTVATLQAMDALSRWGIMLRDSLRRSQGNTNGMVTILGSLNHRLSALEAAMHPTHGLRVARSRPRAVGVHEPPVLQACRYYPDQRCRMERQLANLESQMDRYIKYHVQEFDRAFRERFPACTLAAKRHIDSTTTILDVQGVGFKNFSRTARELVNRMQKIDSDYYPEVIILFEGVLGSNYQSRLLEVIDSSELPEFLGGSCTCSDKGGCLGSNKGPWNDPYILKLIHNLEAGCMRETTKPVSEGGERSSSSFRLEQMKWQGMLSDTSNAESGSDVDDFGPSFVHKVSGYGCLTLVREEVKGTDCATYLSCDDQSHPDMVPEFYHGVQRTTEMVQKQMADFRQYSTNRRPHDLGILFSYHSG

SEQ ID NO: 17836 - protein, 216 aa, Zea mays
  VARIANT 136: note = Ancestral polymorphism is R, Derived polymorphism is M
  VARIANT 183: note = Ancestral polymorphism is E, Derived polymorphism is D
  VARIANT 197: note = Ancestral polymorphism is I, Derived polymorphism is N
MRVSSSHNKSPSCVTCGILAPCRRALTRLFRVPAPANLSIRAFRFRSLRKAATRMSPRRRRRHRTFRSVRAVFWPLVPMSTAPATSTAEGEAARRAAPAPAPQTVVHETPVIAVAPVSSTETPAYMKVVARLRSERIAARGGGEDEDKEKEEEEEEACRSFESYLMEMLVEEGKARDLKDVEELLQCWERLRSPVFIELVWSFYGELCNDLFHARG

SEQ ID NO: 17837 - protein, 234 aa, Zea mays
  VARIANT 8: note = Ancestral polymorphism is M, Derived polymorphism is L
MDTGAQAMFIISLVLWCTTSFALDDAAATRIPIVGTLPLSMKENPQLCQLCEEFASEALFYLNENETQTEIIDTLHQACSKFGSFKLECTRLVDYYVPLFFTKIASLSPEEFCASASFCGGVTFIRLPRHEDTCTLCHEVVDEVVTNLEDPGMEVFACYTIIISFYATQFLYEDYVQKVKLTIECKRLIIQNAPIIMENIKKFLEKRDFCNSIHVCGSKSVRAGSQVLRSLSSA

SEQ ID NO: 17838 - protein, 231 aa, Zea mays
  VARIANT 35: note = Ancestral polymorphism is R, Derived polymorphism is Q
  VARIANT 87: note = Ancestral polymorphism is T, Derived polymorphism is P
MLDKEDRTRMVPKSSSQTKTLLAAMEEERASTANRRFLCKDDASSVSNPSFRVYYGVASAGSVPFMWESAPGTPKHAMSSATLPPLTPPPSYYKGAAKTKFAKSQSSKKLLSSKPPSSFVQSILPKLRRSHTMPVPSRSPSAPAPAPPRESAQVQCARSRGNRLLLASPRSSFSSNSRGDDDNDDEDAGAAATASPTSTLCFRTRHSRRGTGRLHGLLASVVGGGQGTAAS

SEQ ID NO: 17839 - protein, 169 aa, Zea mays
  VARIANT 77..169: note = Derived polymorphism lacks residues 77 to 169
  VARIANT 107: note = Ancestral polymorphism is S, Derived polymorphism is W
MDDTEREKEKEKEKHDCGTDVEDEEEDEEGNKRVVVLGPQVPLKEQLELDKDDESLRRWKEQLLGQVDTEQLGDRTWSFPSRSRRTTRAMRLLSRTAAPTASASPSSSPTTSCPASSTPTLSGRLASKMLDQQSLYIMPRRSQFVDDDGKCFLEMSYYFEIRKEWPGGQ

SEQ ID NO: 17840 - protein, 105 aa, Zea mays
  VARIANT 19: note = Ancestral polymorphism is E, Derived polymorphism is V
MEGANGVGGSESERKPLSEVVGDCVQRWFQDAYKEARKGDIANQVLVAQMFFSGYGTPKNEYKGKQWMDRASRFRSSALKVGMKRPGYNASDSDSDDDANDDANQ

SEQ ID NO: 17841 - protein, 216 aa, Zea mays
  VARIANT 1: note = Ancestral polymorphism is M, Derived polymorphism is I
MARSAPGLPPQHYAAAGAGRRSSSSPAASCILAVLFLLLAACVAAVLLFVFFRPRAPAIAVTAVQLPAFAVANGTVAFTFQQLASVRNPNRSPLTHYDSSLHVAYAGGEVGSMYIPAGQIDGGRTQYMATSFTVPAFAVSATGAAAQPTTISVPASGPSPHVTAALVQPPVMEVDSLLRVKGKVTVLKVLTHHVEAAKVCRIGVSPADGRVLGFRC

SEQ ID NO: 17842 - protein, 485 aa, Zea mays
  VARIANT 341..485: note = Derived polymorphism lacks residues 341 to 485
MSCWAAGRRSSASAMAENTGARGAKEAVVTSGKRVALGNLTNVFRGSWGSGAANSASDAKLSSTKPDDVKKGSYACLRNVNTERGSSRRLASEQFDQAVSLLQKNTSLPSVPDVVSTGCSSPGLSQDCSVSMEDAMSTCNSTESSDVEYLNNNDDPSMTSSSHWWASDRPHFSDSMDVAEFNWRKHSPNHYTYKDPRLSTTLACEIYESLREAETRKMPPTNFLETTQTDMSKTMRAILIDWLVEVTEEYRLVPETLYLTVNYIDRYLSVKEISRHRLQLVGVACLLIAARFVHMMIEEYEVREALKMIREGKVISSNVILIEERVIEHGLRGTTRIFLNQFGFMLERKYEEICPPLVEELCYITDYSYTKEEVLQMEASVLNNLKFEMTVPTAKCFLRRFVRVAQVPDKGSSLHLEFLVNYICELSLLEYSLLCYLPSMVAASSVFLAKFILMPIKNPWVYVPNLIFYESSLLNSMFAFFTPKT

SEQ ID NO: 17843 - protein, 359 aa, Zea mays
  VARIANT 85: note = Ancestral polymorphism is S, Derived polymorphism is F
MPTGCTSDAGDDTRNRRQEPEVDAMAAPAHPPPPLVNSKRECDINEKEVCAYKKRRSSIAAAAAAAGATPSPIVQEPTEEKLAASVFSLDSLHRDWEVSIPNNASSSSSCRHDHDHQRYGCPSTMAVCAGSNGSAEPTQNQERTSRARSNPVQEANKAGGQHGQETANTAAGGQHGRETDVPMRPFMGLSYGPRFLGVTDVTLVLAKNLTASDCCSGQSRLQFSPKEIMDSPLFSILTAAERASVEQRDGQDGLPLEAIDRHGHSYNMRFKYIHSAKRYRLMQAWVPFLRRNGVRNGDLVEVWAFRVDGRPMLWLLNYAGQGWVPEEIEAAEGLLMLSGCNNGTDKPEKFSFSDDVIVE

SEQ ID NO: 17844 - protein, 348 aa, Zea mays
  VARIANT 193: note = Ancestral polymorphism is R, Derived polymorphism is S
  VARIANT 133..348: note = Derived polymorphism lacks residues 133 to 348
  VARIANT 15: note = Ancestral polymorphism is V, Derived polymorphism is A
MRCGGRWRRGRGTVAVRSGELAWGDLVTPPLFDIGTPSPRPLPDSIVGAPRSCPLLHRRFRRPCPFVVSCLLATEPPLVASPTRPRPASVDGWVGRQGRGVPSPRARAGAAISSLTVPPTPTCALPRRILPLYADIDTNKACGLGLGDRIGSRGTSHWCRGGGSEQHSCLWGGDSEAAGLKVQDDEQQQWWRRRRPWFRHGPGVPDVPLGCRDGKSFTYNSSINIAIAVAIDGGLITSVLQDAGKLIAGEIKIKGVELQESCSLSFFSMVGIFIGFIQLFSVDVYKKIVSKNKMLLFHEGVIETETVGTRVKESEAVVVEKEVELIDEPQIQESPPVPALLDDEVDFA

SEQ ID NO: 17845 - protein, 360 aa, Zea mays
  VARIANT 38: note = Ancestral polymorphism is L, Derived polymorphism is P
MLSSSLPSRRHHSSRVVDRSQEMGASGGEKLGTLVCVLAHVSLLLVLVLAPCVCKATGGDYGGLSNDHYTESCPELETIVKKSLAPIFAVDITSPAALLRLLFHDCQVHGCDGSILLNSDERRHITSELGSRKNLGIRHVGTVGLVKAAVEAACPGRVSCADIVVLAAREAVAHTGGPRVASVPLGRRDATTTSTQAADAQLPSCFLGIDGALDIFTSRGMTVEETVAILGSHTLGGGHCVNIDTGRARRDKAFEALLHLQCPKTMPPLITEAVVFVPSDLTPTWFDTHYYRGAAAGRGLFNVDDEASTYARTAGYVRRFAEDREGFFGVFASAFVKLSGFGVLTGEQGEIRKKCDVVNY

SEQ ID NO: 17846 - protein, 311 aa, Zea mays
  VARIANT 278..311: note = Derived polymorphism lacks residues 278 to 311
  VARIANT 43: note = Ancestral polymorphism is R, Derived polymorphism is G
MSHSPLPPPVFQNISLRFSESFSLQGTETTGAFTPPAFPSPPGTTGLLAIIRPSMAKLVNKLVDSFDHHEAPAPDVGCVRAVLAELVLTFLFVFTGVSASMAAGAGGKPGEAMPMATLAAVAIAHALAAGVLVTAGFHVSGGHLNPAVTVGILVRGHITKLRALLYVAAQLLASSLACILLRYLSGGMVTPVHALGAGISPMQGLVMEVILTFSLLFVTYAMILDPRSQVRTIGPLLTGLIVGANSLAGGNFTGASMNPARSFGPAMATGVWTNHWVYWIGPLLGGSLAGFVYESLFMVYKTHEPLLNGDI

SEQ ID NO: 17847 - protein, 329 aa, Zea mays
  VARIANT 277: note = Ancestral polymorphism is N, Derived polymorphism is Y
  VARIANT 251: note = Ancestral polymorphism is V, Derived polymorphism is A
  VARIANT 247: note = Ancestral polymorphism is R, Derived polymorphism is L
  VARIANT 245: note = Ancestral polymorphism is Y, Derived polymorphism is H
  VARIANT 224: note = Ancestral polymorphism is R, Derived polymorphism is S
  VARIANT 221: note = Ancestral polymorphism is R, Derived polymorphism is C
  VARIANT 210: note = Ancestral polymorphism is D, Derived polymorphism is H
  VARIANT 145: note = Ancestral polymorphism is V, Derived polymorphism is I
MSPPLELDYIGLSPPAAAAAAENDELKGTELRLGLPGSGSPDRRVVAATATTLDLLPAKGAKRGFSDEAPPPSPVATAGKGKKVAEEEYDEKKVAATPQPAAKAQVVGWPPVCNYRKNTMTTTQLEGSKEDGDAKQGQGFLYVKVSMDGAPYLRKIDLKTYKNYKDLSTALEKMFSGFSTGKDGSSEYRKDGEYVLTYEDKDGDWMLVGDVPWEMFAGSCRRLRIMKGSDAIGLGMFVLLLCLVYRRANHVVLLQGQPISPRTATRTVASYPYTVRYEGGDAVTCRDLYENRKSLLTAMTCEKNSGLWSALEWLGTSSMDKTRYSINCC

SEQ ID NO: 17848 - protein, 426 aa, Zea mays
  VARIANT 287: note = Ancestral polymorphism is H, Derived polymorphism is R
MNRGQFRASPLQQQVIWSADTATASSSSVVMSAFNFNSCHEDQEAFSPNNLPSLSSPSLLFSHDQQQSFPHTGTTTTSPGHQLLANRGAAAGGCLPSLHDGGQENHHMPESWSQMLLAGLVGGDQERCTAALLSKGMDDWGDHAATASAACMVGGGGTKKDEGSAVPQQPPYSFYGSHGHLAAGGDEHEMPAPASKAQLSQMLLASSPRSCVTTSLGSNMLDFSNSAPPMELKRHHHHSDNSSECNSTATAAGSAVKKPRVQAASSSAQSTLKVRKERLGDRITALHQIVSPFGKTDTASVLQETIGYIRFLLGQIEALSYPYMGHGNLTSSSTQNGPAGSERNPAGLFPEYPGQLLNHNHNTGAQQQQPAAVQQPPDEKQGVDDEVKRDLRSRGLCLVPVSCTSHFGGDNAADYWAPAALGGMFR

SEQ ID NO: 17849 - protein, 164 aa, Zea mays
  VARIANT 6: note = Ancestral polymorphism is R, Derived polymorphism is H
MMPQLRSLVALVLVATAIAAAPGVGFVVTGRIYCDNCRAGFETNVSHAIQGATVEMECRHFESQQVHDKAEATTGPGGWYRMEISGDHQDEICDVRLLKSPEADCAEIDHSRDRCRVPLTRNDGIKQSGVRYANPIAFLRKEPLPNCGELLRAYDLYNETSENS

SEQ ID NO: 17850 - protein, 273 aa, Zea mays
  VARIANT 78: note = Ancestral polymorphism is G, Derived polymorphism is C
  VARIANT 48: note = Ancestral polymorphism is G, Derived polymorphism is D
  VARIANT 18: note = Ancestral polymorphism is K, Derived polymorphism is E
  VARIANT 4: note = Ancestral polymorphism is Q, Derived polymorphism is L
  VARIANT 1: note = Ancestral polymorphism is M, Derived polymorphism is I
MAQQLLLLLPAPSRTFLKALPSPFLSYLPRRHLVPVTAVPVAPGIRRGLLRYATKRSSLVEELEIAKEKQPHSRRANGIFWILLLNFGIYMADHLFQIRQIKSLYLYHAFPSWFQFVTSTFCHANWNHLSSNLFFVYIFGKLVEEEEGNFALWMSYILTGAGANLISWLALPTSSVSLGASGAVFGLFTISVLVKMSWDWRKILEVLILGQFVVDKVLEAARATTITGQSFQVNNVAHVSGALIGAALVFLVSRIPFSSNDDNPKATKRVNRK

SEQ ID NO: 17851 - protein, 147 aa, Zea mays
  VARIANT 89..147: note = Derived polymorphism lacks residues 89 to 147
  VARIANT 69..147: note = Derived polymorphism lacks residues 69 to 147
  VARIANT 56..147: note = Derived polymorphism lacks residues 56 to 147
  VARIANT 54..147: note = Derived polymorphism lacks residues 54 to 147
  VARIANT 52: note = Ancestral polymorphism is S, Derived polymorphism is L
  VARIANT 46: note = Ancestral polymorphism is A, Derived polymorphism is T
  VARIANT 36: note = Ancestral polymorphism is G, Derived polymorphism is R
MFDILRLSFAQTVENVFALSFLVKDGRVEITVDDSRHIVRPRNAPAASAIASGEVSYSHFVFRFDFKDWKLMKEVVTEGEELLPHRTSQSNLCNEENDQINLEARAQITPIRKLTRNRGLVLQDHVVEETPEENQAFKRRRLFRNQD

SEQ ID NO: 17852 - protein, 533 aa, Zea mays
  VARIANT 68: note = Ancestral polymorphism is D, Derived polymorphism is V
  VARIANT 116..533: note = Derived polymorphism lacks residues 116 to 533
  VARIANT 169..533: note = Derived polymorphism lacks residues 169 to 533
  VARIANT 188..533: note = Derived polymorphism lacks residues 188 to 533
  VARIANT 191: note = Ancestral polymorphism is R, Derived polymorphism is W
  VARIANT 216..533: note = Derived polymorphism lacks residues 216 to 533
  VARIANT 234: note = Ancestral polymorphism is S, Derived polymorphism is F
  VARIANT 241: note = Ancestral polymorphism is R, Derived polymorphism is W
  VARIANT 292..533: note = Derived polymorphism lacks residues 292 to 533
  VARIANT 365..533: note = Derived polymorphism lacks residues 365 to 533
  VARIANT 384..533: note = Derived polymorphism lacks residues 384 to 533
  VARIANT 385..533: note = Derived polymorphism lacks residues 385 to 533
  VARIANT 393: note = Ancestral polymorphism is R, Derived polymorphism is H
  VARIANT 502..533: note = Derived polymorphism lacks residues 502 to 533
MEGAAPAILAPLPATRGASLCRIFYLFTSKVPGTEPSRILEISHWHLVTVSGGWALDAAGRYRCLELDHPCEAPWCDGPLGVLENNGWVYSAHCSFKLFATDASWRCLDGKWLFFWGDSNHVDTIRNLLTFVLGITDTSAVTRRFDAVFTNPSGGAGTLRITSIFNGHWNMSMNYLGLHSLRNRGFRQLIRSYFMSGDRVPDVVVLNSGLHDGCYWTSVRIYAQAADFAAQFWSGVMDKVRARGHAVPRVFYQTQMPQGGIDAGKNQATPFTELRDEAGVTYSHPQGWVTLQTLPNEVLVVLQKGVISVHRAPAALRSSLGRETPRQRLDVLFPSSRPHAAARSSLHLSLHDGCGAGVKEVRLLQLLEAGDRLLKGVVLDGLLRQRGRVVLSHGLGRGRKHSLVSQELLEAVEQERNIRSNPSRNTAVFHHPMLGDFEIPIGADDAELEERIIQHLAATAVVRRSHRHHNRRDGHQSRSGASSHPHFLETCNTQQEQIQTFQKQLAVATEKLKLKVIGDGGDPNGHYDKDDHQ

SEQ ID NO: 17853 - protein, 250 aa, Zea mays
  VARIANT 207: note = Ancestral polymorphism is M, Derived polymorphism is L
  VARIANT 142: note = Ancestral polymorphism is A, Derived polymorphism is V
MAVSFANVNAEAGLKKLDEYLLTRSYITGYQASKDDLAVYSSFLADPSSKYINVARWFNHIDALLRLRYPVSSECANNPYYFSGVTAEGLGVKVEPSAVPSASILDVADGQAPAADEDDDDDVDLFGEETEEEKKAAEERAAAAKASGKKKESGKSSVLLDVKPWDDETDMAKLEEAVRSVQMEGLLWGASKLVPVGYGIKKLQIMMTIVDDLVSVDTLIEDHLCAEPVSEYVQSCDIVAFNKICKSFIT

SEQ ID NO: 17854 - protein, 74 aa, Zea mays
  VARIANT 40: note = Ancestral polymorphism is G, Derived polymorphism is R
MAMGSLAFATALVFVFVFAIAVPAVAAAAQAPAPAPTSDGTSIDQGIAYLLMIMALVLTYLIHPLDASAPYKLF

SEQ ID NO: 17855 - protein, 12 aa, Zea mays
  VARIANT 9: note = Ancestral polymorphism is R, Derived polymorphism is K
MRFLSPFPRRKQ

SEQ ID NO: 17856 - protein, 146 aa, Zea mays
  VARIANT 87..146: note = Derived polymorphism lacks residues 87 to 146
MEAKCKHLGLQKPKIVSPSSTNFWVDKILSKMGEGTFERVLECRDRETCEYVAIKVVRSIRKYCEAAMIEIDVLNRLAENEKYRSLSFVLYPSLYCFFCSATNMINMAGRGLEAALGESKKSESAMSKLMTRSLLLEPSLLKNTPG

SEQ ID NO: 17857 - protein, 105 aa, Zea mays
  VARIANT 31: note = Ancestral polymorphism is A, Derived polymorphism is V
MEKYLDGEIKAQKKALSAQGLKSGGIVQQHAYRLFLLKTNAHHLIRYLATAVVVNKRRRNMLKELIKVIQQEHHSYKDPVTECLECLYVNYDFDGAQQKLIECEQ

SEQ ID NO: 17858 - protein, 800 aa, Zea mays
  VARIANT 587..800: note = Derived polymorphism lacks residues 587 to 800
MSRRVAAALVVLCAATTVAVLAGDEDDITLPGCRSRCGNMSIPYPFGVEAGCYLPGFNVTCRRRNGDGPAAAADELLFLGDGTVQVLEISIPNATVLINSSAGYFDGDKYVSLSSPGTWSGALGSGDGDGVGVYSLAWGRNKLFAMGYNVQVRLEADNETSSVCVSLFFEGNFAAPTDDCAGFLCCQSPIWDQRTSYRFKALSLNGSAASLESDTYAWILDSELRFQYGAPQKDALTLPALLDWRINHTTCHANASSPACRSRHSFCHDGSLEVCRRNDSLCHNSTAGFGRAHICRCDEGYRGNPYLPNNGCKDVNECDHPDTYPCHGICTNTDGGYKCECVPGFAGNASVPTGCKDIDECAHPHLYPCYGVCLNKMGSFDCQCKRGTYGDPFTKGGCSYLTVWEMGLAIGGGTGFLLLALGAPIISRKIKLHKAKRKKERFFKQNHGLLLQQLVSQNSDISERMIITIGELEKATNNFHPSHEVGGGGHGVVYKGLLDLQVVAIKKSKIIVKREIDDFINEVAILSQINHRNIVKLLGCCLEAEVPLLVYEFISNGTLSHHLHVEGTISLSWDDRLRIALEISKALAYLHSSATTPILHRDIKSSNILLDDNLTAKVSDFGASKYIPIDRTGVTTDVQGTFGYLDPMYYYTSRLTDKSDVFSFGVLLIELLTRKKPYAYRSDDGDGLVSEFSSLLDQGTLVDIIDPQIMEEDKQVDEVAKLAAKCTKLSGEDRPTMREVEMALQNLRATEKHAHNNTTSTNKYEKGKTSQYMPFGGLAIETSRQYTMEEEMLLSARYPR

SEQ ID NO: 17859 - protein, 197 aa, Zea mays
  VARIANT 140: note = Ancestral polymorphism is D, Derived polymorphism is E
MVGLVGGSTARAEHVVANAGGEAEYVRRMHRHAPTEHQCTSTLVKHIKAPVHLVWELVRRFDQPQRYKPFVRNCVVRGDQLEVGSLRDVNVKTGLPATTSTERLEQLDDDLHILGVKFVGGDHRLQNYSSIITVHPESIDGRPGTLVIESFVVDVPDGNTKDETCYFVEAVIKCNLNSLAEVSEQLAVESPTSLIDQ

SEQ ID NO: 17860 - protein, 623 aa, Zea mays
  VARIANT 547: note = Ancestral polymorphism is T, Derived polymorphism is M
MAMNVIALLGLLALASVVRTASGAGGHDYASALKKTILYFEAQRSGVLPPNQRITWRENSGLFDGKANGVDLVGGYYDAGDNVKFGLPMAFTVTMMSWGILEYGRQMAAVGELRNAMDAVKWGTDYFIKAHPEPEVLYGEVGDGDTDHGCWQRPEDMSTSRQAFRIDPQNPGSDLAGETAAAMAAASLVFRSTYPGYANLLLQHAKELFQFADKYRGKYDASITVARNYYGSFSGYGDELLWAAAWLYEATEEGCYLEYMARNGDALGGTGWFINQFGWDVKYPGVQVLAAKFLLQGRAGAHAATLQRYRQNAEFFVCSCVGKGAVNVPRTPGGMMYHQRWNNLQFVTSASFLLTVYADYATALPGSGGGALRCPAGAARPFEILAFVRSQVNYILGDNPRGTSYMVGYGASFPRQVHHRGASIVSVRTDPSFVSCQEGYSAWYPRQAGNPNVLEGAIVGGPDEYDDFADERNNYEQTEAATYNSAPLLGVLARLAGACGTGLEEYQLHPPEEATANQTSSSRLRQPSSPIEIEQNVTRTWAMRRATYYRYSVTLTNRSRKTVRELHLGVSELRGRLWGLDKARYGYVPPKWLPALRAGKSLRFVYVQHGTPANVRVIGYKLL

SEQ ID NO: 17861 - protein, 957 aa, Zea mays
  VARIANT 173..957: note = Derived polymorphism lacks residues 173 to 957
  VARIANT 249: note = Ancestral polymorphism is I, Derived polymorphism is N
MRKGQLLLLLLLFAAGSTTASAKTDPQDEAALRSLMKRWKNVPASWGKSSPCDMPWDGILCDENGRVTSLNLFGMGMGGTLSDDIGSLTELTILDLSSNRDLGGPLPAAIGKLFKLESLALIGCSFSGPVPSELGNLSQLTFFALNSNKLTGSIPPSLGKLSNVTWLDLADNQLTGPLPTSRDNRTGLDQLLNAQHFHFNRNMLEGSIPDSLFSSSMHLKHILFDLNRFTGQIPASIENLLYSLLAVSIISGSCLYIMLSEYSRLNNNGFMGPVPALNNLTNLQVLMLSNNKLSGPIPNLTGMGSLENVDISNNSFDPSNVPSWFSDLKSIMTLTMQSVGLSGQLPQKLFSFPQLQHLVLSDNELNGTLDMGNNMSKHLDLVDIQNNKITSVTVYNSFKNLKLEGNPLCNDSLLSDTSPCMGLQTEAPPQPYQFDVQCAYPFIETIVFRAPSFANVFEYLPELQKNLSKQLNSCTPNWLGLVPYFDEDAYLNVNIKACPVKQKRFNYSQVLNCFNLTRQTYKPPEMYGPYYVNAHPYAFHDKTSRAVLIGIVTGSVLLVVGLTLVVFYAVNQKKRAQRLVSINNPFASWGSLGEDIGAAPQLKSAKFFSLEELKLCTNDFREINAIGAGGYGTVYRGKLPDGQLVAIKRSKEGSMQGGLEFKTEIELLSRVHHNNLVGLVGFCFEKGEKMLVYEFIPNGTLSEALYGMKGIQLDWSRRLKIALDSAKGLAYLHDHANPPIIHRDVKSTNILLNEKMTAKVSDFGLSLLVTDSEEGQLCTNVKGTLGYLDPEYYMTQQLTAKSDVYSFGVVLLELIVGKPPIHNNKYIVREVKMALDEDDGTHYGLKDVMDPVLQKIGGLFGFPRFLKLALQCVEEVATARPSMNSIVREIEAIMLDNGLTPGSMSTSSSFSIESRTMKVGPKHPYSSSSMSTSTFDMDSRAFEYSGVFPSSHGSLKP

SEQ ID NO: 17862 - protein, 304 aa, Zea mays
  VARIANT 78: note = Ancestral polymorphism is T, Derived polymorphism is N
  VARIANT 73: note = Ancestral polymorphism is S, Derived polymorphism is L
MQAAEALGVPLLPPFLSSRQPPQDMSRGANFAIVGGTALDVGFFLRRNAASVPPFRSSLRVQIGWFRRLKKRLLCNANATAPTRSLFVVGELGSNDYAYILAGGKSLREAKSFVPEVVKAICTGIERLVEEGARYVVVSGTLPAGCLPMALTKYGAEEKQLQAGTRGKNATEYYDRRTGCLRRLNGLAEYHNWMLREAVGRLRRKYPTTKLVFADFYRPVARLLRRPAKFGFTEEPIRACCGGGGPYNYNPGAACGSPGATVCRDPSAHVHWDGIHLTEAAYKYIADGWLSGLYAYPPVLDLLQ

SEQ ID NO: 17863 - protein, 331 aa, Zea mays
  VARIANT 250: note = Ancestral polymorphism is Y, Derived polymorphism is H
MATTGGGKAALVLGRLLLLLCVLGHGAAQRYNAIWSFGDSISDTGNLCVGGGCPSWLTTGQPPYGETFFGRPTGRCSDGRVIVDFLAEHFGLPLLPASKAGGDLKKGANMAIIGATTMDFDFFKSIGLSDKIWNNGPLDTQIQWFRQLLPSVCGKDCKNYLSKSLFVVGEFGGNDYNAALFSGRSMAEVRGYVPMVVSKLVRGLEAIVRSGAVDVVVPGVLPIGCFPIYLTLYGTSNAADYDRDGCLRAYNGLSSYHNALLRRSLSGLRRTYPHARIMYADFYTQVTHMIRAPHNFGLKYGLKVCCGAGGQGHCSIGEEGVAGVSAVWWEQ

SEQ ID NO: 17864 - protein, 201 aa, Zea mays
  VARIANT 179: note = Ancestral polymorphism is D, Derived polymorphism is N
MISCWIIIADGPEVRQELILLLRYLKQCMYFSKKPYSVFLDYGGYGQNDVLIKKSKARILKPAFTIVCDRSSQCFLLFIRGAISVKERLTAATGAEVPFHHVVVQEGRVSNLVLGYAHCGMVVAARWIAKQAIPCLSKAIEQFPEYEVKTGGYSEDMIPTVGFNMRKVTKGNVTIKLWDLGGQRRFRTMWERYCRGVSAIL

SEQ ID NO: 17865 - protein, 538 aa, Zea mays
  VARIANT 483: note = Ancestral polymorphism is G, Derived polymorphism is R
  VARIANT 221: note = Ancestral polymorphism is E, Derived polymorphism is V
MAAATATVTFSPSPPSFLNSHIPRGHRPASTTTIAFARRFRGVKPSPDRSRGKVDQVAHPDDGFGALEAELWRLRRLVELKIHRLGTEADAAYRDLRSAVREVSGDRVVLTFRRSSLRYLTGALLFLLACAIAARLLLGMVLRAWQRRGLRRGLWGEGGRAVVRRRDRSLGGKEVVVAVSSPPKEAARTSRVAEPAKEVWRGYSQAKLPDWWPNVGATVMEPGPEMEKWARMANRLVRGDAAVASCFLTPLAITDQEKTRIMICNPVVVDEAPLISLNKLRQLCKISGVKVCFDTENARDSFYRAAVNFVLDDCSRAAKDIGAAKLNGEDPRDFLAGLASNIGLDKFRAATLVCASVATRTRTCFLQCWALEIQGKRPEALDELVKICRIHYIFPPEDNSAEMEMVAAGLEKNLHVAERVHLLYLYRSVCTAGNLKTAAQALGLVKAAEHAAEMEATVVVAAAVEAEEEEAAAAAASTPQRSGRKRPRAIGSGRYRSVSRWEPEPPEDPLLLGQETHTATGTLFSSSDDSGGHCSGQA

SEQ ID NO: 17866 - protein, 127 aa, Zea mays
  VARIANT 29: note = Ancestral polymorphism is E, Derived polymorphism is V
  VARIANT 41: note = Ancestral polymorphism is R, Derived polymorphism is Q
  VARIANT 43: note = Ancestral polymorphism is E, Derived polymorphism is K
  VARIANT 48: note = Ancestral polymorphism is R, Derived polymorphism is I
  VARIANT 77: note = Ancestral polymorphism is R, Derived polymorphism is S
MKEILGDYDAIHVRRGDLLKNRKDRFGIERSLHPHLDRDTRPEYIIKRIAQWIPPGRTLFIASNERTPGFFSPLSDRYKLAYSSNFSSILEPIIENNYRLFMVERLMMQGAKTFIKTILAELTLLAT

SEQ ID NO: 17867 - protein, 254 aa, Zea mays
  VARIANT 237: note = Ancestral polymorphism is R, Derived polymorphism is W
  VARIANT 208: note = Ancestral polymorphism is R, Derived polymorphism is Q
  VARIANT 195: note = Ancestral polymorphism is M, Derived polymorphism is I
  VARIANT 169: note = Ancestral polymorphism is F, Derived polymorphism is I
  VARIANT 160: note = Ancestral polymorphism is S, Derived polymorphism is N
  VARIANT 132..254: note = Derived polymorphism lacks residues 132 to 254
  VARIANT 112: note = Ancestral polymorphism is T, Derived polymorphism is A
  VARIANT 9..254: note = Derived polymorphism lacks residues 9 to 254
MSGFRQEYQMSSLFVLVDQDTCGGEGQLALALWATHWLKTLTTLRFTRNDFTEDDKATFNDFTEDNKATFNEARCMTKARRLGVPTPVLYVVDPVLHTLTFEHVDGLFVKDALLRFGSNGVNEECLNDIATQIGNAIGKLHDGGLVHGDLTTSNMMIKNSNNQLVLIDFGLSFTSTIPKDKAVDLYVLERALISMQSSCGEVVRRLNRYSTLILMMNQMEKILAAYRKASKQWCSTRNKLAQVRQRGRKRTMVG

SEQ ID NO: 17868 - protein, 450 aa, Zea mays
  VARIANT 20: note = Ancestral polymorphism is G, Derived polymorphism is R
  VARIANT 29: note = Ancestral polymorphism is G, Derived polymorphism is R
  VARIANT 157: note = Ancestral polymorphism is S, Derived polymorphism is F
  VARIANT 217: note = Ancestral polymorphism is P, Derived polymorphism is H
MDIKDMKTRGKTLTERYELGKLLGKGAFGKVHYGRDLESNQDVAIKIMDKDRVLKAGLSEQVKCEITTMRLVTHKNIVRLHEVMATRNKIYIIMEYAKGGELFEKIKRSDRLTEADTHKYFQQLIDALDHCHSRGVYHRDLKPENLLLDENGDLKVSDFGLSAFSESRRTDGLLHTVCGTPVYIAPEVIKKTGYDGAKSDIWSCGVVLFVLAAGYLPFQGPNLMEIYRKIHDRDFRCPSWFSHKLKRLLYKILNPNPSMRPSIQEIKESTWFRKGPREISAVNEKVLSENATTTNAAPVLPSRRKEIAHEDMKSLVATNLNAFEIIALSAGLDLSGLFIKECRKETRFTSDKPALSIIAKLEDVAKALNLRIRKKDNNTISIQGRKEGGNGVLKFDTQIFEITPSCHLVQIKQTSGNLLEYEKLLEEGIRPGLKDVVSAWHGDDLQQKQK

SEQ ID NO: 17869 - protein, 148 aa, Zea mays
  VARIANT 44: note = Ancestral polymorphism is G, Derived polymorphism is R
  VARIANT 15..148: note = Derived polymorphism lacks residues 15 to 148
  VARIANT 14..148: note = Derived polymorphism lacks residues 14 to 148
  VARIANT 11: note = Ancestral polymorphism is D, Derived polymorphism is Y
MVVIVKVLKIDRSWWYNACKKCLRTTKPHGDTYKCTNNSCDSIRSPTPRLNTLYDNAKIHRYPAHVRDTPSGAHNTPGANTLRLLPLKLANSQVDAYSVLDGSTNKTHKSVTGKRSRTSPSKKAAKKLFKDEDITDDDAAGSTDVDAE

SEQ ID NO: 17870 - protein, 203 aa, Zea mays
  VARIANT 76: note = Ancestral polymorphism is T, Derived polymorphism is S
  VARIANT 121: note = Ancestral polymorphism is S, Derived polymorphism is L
  VARIANT 166: note = Ancestral polymorphism is G, Derived polymorphism is C
  VARIANT 175..203: note = Derived polymorphism lacks residues 175 to 203
  VARIANT 176: note = Ancestral polymorphism is M, Derived polymorphism is T
  VARIANT 192: note = Ancestral polymorphism is K, Derived polymorphism is M
  VARIANT 194..203: note = Derived polymorphism lacks residues 194 to 203
MENPPALPSPEPEPETEVSQAPPRRLLRLRCAVQHYEWGQRGAASLVARLADHNNPDPARPYAELWMGTHPSGPSSLVDDGSLLRDWLARNHDALGPAVAARWGGDLPFLFKVLSVAKALSIQAHPDKKLAEVLHALRPSTYKDENHKPEMAIAITEFRALCGFAGIEVSLLRKEMRKIMCINNVNCVCYLKSGKQIGMELTS

SEQ ID NO: 17871 - protein, 528 aa, Zea mays
  VARIANT 159..528: note = Derived polymorphism lacks residues 159 to 528
MGSGSSKATTSSTSPTAAEAGGEGKRPNGSEKARRGRSLLPLPSSSCFRGSTTPCDCDVSAVAVDVECNKGGETASLPSLTHTTKSDEDVLATPKSHPGEEITLPSSDRERDQDDGVLQNAAATNTLTAASQLTDPSGRSRPRFGVNFGLSRAVSLGSSVACSILSSGLPTSANPGEGRGDVDDSSDTVISQQGSAPTAGIDSTLDMLRDSVTAQARAARQARRNLQESEDAILRNSYRRMGSQEPFEGSVRFSRTLSVGRLRDRVLKRPPFSDGLFTPALLYDRAVWLSGNASARQDSAVMQRTNSDRSSESRSDPSTNGLYNLSSERQASNSDLLERRSVFLERRRRIRSQVRALQRLGSRFENLSGHERSCILSGQHRTGTCNCRTGSRQGNPDEETSTRASISRIVMLAEALFEVLDEIHHQSAALSSSRPAFSSIGSVPAPREIVERLPAKVYRRPLKYHSEEAAQCYICLVEYEEGDCLRILPCHHEFHLTCVDKWLKEIHRVCPLCRGDVCRSDALIGKVS

SEQ ID NO: 17872 - protein, 81 aa, Zea mays
  VARIANT 5: note = Ancestral polymorphism is P, Derived polymorphism is S
  VARIANT 30: note = Ancestral polymorphism is S, Derived polymorphism is N
  VARIANT 59..81: note = Derived polymorphism lacks residues 59 to 81
MSSLSKWVGCLTFIKLKGLNPVMADASSISVMFPEYAARNRSVKPIFKQTKEIDDHLGWVFPAAANEEPGAGPTLSTAPGA

SEQ ID NO: 17873 - protein, 111 aa, Zea mays
  VARIANT 54: note = Ancestral polymorphism is G, Derived polymorphism is S
  VARIANT 59: note = Ancestral polymorphism is A, Derived polymorphism is V
MLGYVVARATELIGRRLRPRRPGVAGCHHEGVTAYLHASLEDLLRSERGSAHGGMGDSAVLVHWLQRGRPLGGDCGGALAVWSQRCCCVLGLQSGLTAVASFPAIGEWLLC

SEQ ID NO: 17874 - protein, 543 aa, Zea mays
  VARIANT 433: note = Ancestral polymorphism is R, Derived polymorphism is S
MMQLPQHHKPSAHSCCPSWIRRSPPSPPPPPHKKLGGGRSRYACRLVPLLVLTVYSVVTVLRIPSASLVVSTADSERVDRREDLEALKTHLPSNQNSLEAREETRSVASLPCSAFISGEAGHGEEGVLCCDRSHYRSDVCYLRGDVRTDPSTSSVLLYNAARGSGPEKVRPYTRKFEDSVMSSIDEVTIVPVPGGHNASASALRRRCDVRHPRGVPAVVLSTGGYTGNVYHEFSDGLIPLFVTAQRFGGEVVLVVLEYHYWWLGRYGAVLEQLTNYKVVDFRSDRRVHCFDEMIVGLRIHGELVVDPKLMPNGKSIKDFQALLHRSYSRTTTTPSASPPVPVPLPLAPPSRSRSRACPRPAAKPKLLIFIRKQNRVLLNLPHVVTACRRAGFAPHVMNLRRQTPLAAIHAALASADAMVAVHGAAVTHFLFMRPGSVLLQIVPVGLDWAADAFYGKPAQQLGLEYLEYKVAPEESSLAAEYGLDSTVLRNPWVISSRGWWEMKKVYMDRQNVTVNIKRFGELLRTARTHLKNTTACAAAAALR

SEQ ID NO: 17875 - protein, 244 aa, Zea mays
  VARIANT 15: note = Ancestral polymorphism is S, Derived polymorphism is F
  VARIANT 177: note = Ancestral polymorphism is V, Derived polymorphism is I
MMNMKEYDGVSEVKSTLQSAFAKLMTASKDMVSEAVAKLISRLNTESKIRTLTDKEQLLLSLERQYQDDVGVLAALFFNYVKLSPGEALYIGANEPHAYLSGECIECMATSDNVVRAGLTPKYRDVQTLCSMLTYKQAFPEILRGVPVQPHVRRYTPPFNEFEVDRCLVPPGGSLVVVPPVPGPSIFLVMTGAGEIQLDSASDGEKADEGDVFFVPAYTEVKISACGPESLQLYRAGVNSRFFS

SEQ ID NO: 17876 - protein, 245 aa, Zea mays
  VARIANT 175..245: note = Derived polymorphism lacks residues 175 to 245
MPPPRPRRRPRPGFSLPVHVHDFLSKADHASLYAPPAILADMLALLSPSEILALAPSMEVWNRPALLHRAASLTGKSSSASSSTVDPTATGSNTLPSSFFSDLLTSDDVGTLARRTPWTSDSCLYNNLFERHLSVQGEFNNYSGCGNNFNCNHHVVCEFIVDCLRHFLNQSFLCQSMDPVNVYGNPMEGGSEFYDSDRYEARLDLDGMDSTCVQGEEARDWLAGGIFVFNFSYGSCYLSCQVTQI

SEQ ID NO: 17877 - protein, 1979 aa, Zea mays
  VARIANT 1450..1979: note = Derived polymorphism lacks residues 1450 to 1979
  VARIANT 1418..1979: note = Derived polymorphism lacks residues 1418 to 1979
MVAEFDLVDDTSGLGLFNVLIDSLESFGLNIDDIRGQGYDNGSNMKGKHQEVQKQLLDKNPRAFYMPCAWHSLNLTLCNMEKSCSKVVSFFGIVQIIYTLFSGSTKRWKVLLDHVPSLTVKSLCNTRWESRIKSVATIRYQAPHIRAALFELHHAYDTDPMAKSDAKSLYDLIGTFEFILGMVIWHDILYAVNVVSKKLQSSSMCLHSTLEQIDGIMSYFDKYRNEGFASSMVVAKDIASVMGVEASFPVKRRALRKKHYDENDCNNEANLQGEKDFEGTAPPETVGAGAMRVPCCSLCNVRYDEEERTPLLLHCGHGFCRACLSRMLAAAPGATLPCPRCRHPTAVGNSVSALRKNFPILSLLSASPSSPSFLHSDSGSSSDGSEDEDDFFARPTRRPAPAPAAASPGCSSFDLASHPDLKLARRIGSGPPGPAGQDVWVGTLSRGGGGVKRCKHQVAVKRVPQTAGDGLEVVQEEVERLRRASTWCRNVCTFHGAVRVGGHLCFVMDHYVGSVQAEMRQNGGRLTLEQILRYGADIARGVAELHAAGIVCMSIKPSNILLDAHGHAVVSDYGLSAILKNRRVPDDSGAGIDAMLLSPNYTAPEAWGPLKKSLNMFWDSANGISPESDAWSFGCTLVEMCTGAVPWAGLTAEEICKSVAKEKKPPPQYSRVVGVGLPGELWKMIGECLQFRASRRPSFQDMLKIFLRHLLDIPRSPPASPENDFANENLPNGMEPPTTSILEMVRYNPNALHHLVCEGDAAGVRDLLAKVASERNGGFIRSLLEAQNTDGLTALHLACRRGSAELVEAIVAYQENVDILDKDEDPPIVFALAAGSPRCVRALVGRSASINSRLREGLGPTLAHVCAHHGQPECMQELLMAGADPNAVDGEGESVLHIAVARRYTDCAIAILENGGCRSMGISNSQHKTPLHLCVETWNTTVVRRWVDVASLEDIAEAIDVPSPVGTALCMAAALKKEHEKEGRELVRILLAAGADPTAQDDPHCRTALHTAAMINDVELVKIILEAGVDVNIRNAQNTTPLHVALNRGANSCVGLLLASGANCNIQRYGSHGHFALWHCYIFLHGYMIQESEVKEALKRMKGGKAIGPDGISIEVMERYKEQKKDLHMVFIDLEKAYDKIPRNLMWWALDKHKVPTKYVTLIQDMYDKDDDGDNAFHIAADAAKMIRENLTWIAQMLLQPSPAVDVRNHRYEVADWVKFRRTVTSPAFGWQGAGPRSIGFVQSVVDNDHLAVSFCTGEAHVLTSEVIKVIPLNRGQHVQLKPDVSEPRFGWRGQSRDSIGTVLCVDDDGILRVGFPGASRGWRADPAEIERVEEYKVGNWVRIRPSLTVAVHGMESITPGSVGIVYSIRPDSSLLLGLCYLSNPWLCEPEEVEHVDPFKIGDQVCVKRSVAEPRYAWGGETHHSVGKIIDIESDGLLIIDIPNRAAPWQADPSDMEKIENFKVGDWIRVKVTVPSPKYGWEDVTRNSIGIIHSLQDDGDVGVAFCFRSKLFLCSVADIEKAQPFEVGEKVHVSPSISEPRLGWLNETAATIGAISRIDMDGTLNIKVSGRKSLWKVAPGDAERLSAFEVGDWVRPKPSIGSRPTYDWNSVGRINIAVVHSIQDSGYLELAGCFRHGKWLTHNTDIEKVQTVKIGQHVRFRAGISEPRWGWRDANPDSRGIIAGVHADGEVRVAFFGVPGLWRGDPADLEIENIFEVGEWVRLRNDVEQWRSLKPGSIGVVHGVGYQGDAWDGTIHVAFCGEQERWIGPSSQLEGVSKFVVGQRVRIRGCIRQPRFGWSNHSHSSIGTISSIDADGKLRIHTPAGARAWLTDPAEVEKVEDEEEVCIGDWVKVKDSVGTPVYQWGDVNHSSIGVVHRADDGELWIAFCFCERLWLCKAWEVEKVRPFRQGDKVRIRSGLVSPRWGWGMETYASKGEVVGVDANGKLRIKFRWRDRLWIGDPADVVLDDAHLLTEASNGF

SEQ ID NO: 17878 - protein, 81 aa, Zea mays
  VARIANT 4: note = Ancestral polymorphism is D, Derived polymorphism is A
  VARIANT 6: note = Ancestral polymorphism is A, Derived polymorphism is V
  VARIANT 8: note = Ancestral polymorphism is V, Derived polymorphism is I
  VARIANT 11: note = Ancestral polymorphism is P, Derived polymorphism is L
  VARIANT 25: note = Ancestral polymorphism is R, Derived polymorphism is W
  VARIANT 40: note = Ancestral polymorphism is S, Derived polymorphism is C
MCAAEAVIQLLGSIVFVLHPMAGLRLLLCPSQLFRTISHSHMQAIVYPILQQLESSLIERDLKGKGRCKDIVSRRRMEDWK

SEQ ID NO: 17879 - protein, 335 aa, Zea mays
  VARIANT 191: note = Ancestral polymorphism is R, Derived polymorphism is M
  VARIANT 120: note = Ancestral polymorphism is A, Derived polymorphism is V
MAADGGGGVDWESLAEATSGAIGSLVSTTVLYPLDTCKTKFQAELQTHQGAQKYRNLSDVFWEAIRKKQFLSLYQGLNTKNIQSFVSSFFYFYGYSYFKRLYLEKSGAKSIGTTANLLVAAAAGACTVIVTQPLDTAASRMQTSVFGKSKGLRETLAEGTWMEAFDGLGISIILTCNPSIQYTAFDQFKQRILHRQRRKNAGSAEDNSGVALSAFSAFLLGAVSKSIATVLTYPLIRCKVMIQAADPDEDDDDEPGRPSKSRTPKTMLGALHAIWSKEGIPGFFKGLNAQILKTVLSSALLLMIKEKISKFTWVSLLALRRYLFVSQKRIKSATV

SEQ ID NO: 17880 - protein, 251 aa, Zea mays
  VARIANT 75: note = Ancestral polymorphism is D, Derived polymorphism is Y
  VARIANT 165..251: note = Derived polymorphism lacks residues 165 to 251
  VARIANT 186..251: note = Derived polymorphism lacks residues 186 to 251
  VARIANT 194: note = Ancestral polymorphism is W, Derived polymorphism is S
MLRPFLSPPLTALPPPPASTAAAAGAAAMRPASSSSSRSSAGGGGAHHHQHNHGGHSISVSPPTCRHAPSSATLDLLILLLVLFSLAFLLASSLSHVARSLSPLLATPPAAAALAYATAALPYLAAAAVLVATAFLSCRRLPRRRCRNPRCRGLRKALEFDVQLQTEGALRAGAGSTAGGAEASMWREIEALPWKGGQGGNNPDYECLRAELRRMAPPNGRAVLLFRNRCGCPVAKLEGWGAPKSKRRNKK

SEQ ID NO: 17881 - protein, 135 aa, Zea mays
  VARIANT 59: note = Ancestral polymorphism is Q, Derived polymorphism is H
  VARIANT 66..135: note = Derived polymorphism lacks residues 66 to 135
  VARIANT 75: note = Ancestral polymorphism is G, Derived polymorphism is S
  VARIANT 79..135: note = Derived polymorphism lacks residues 79 to 135
  VARIANT 82: note = Ancestral polymorphism is G, Derived polymorphism is R
MPTPNQVIVGLLQLSLHHLLQGLGAPPPQSGCTVLPSTPVPVTSSWALALPWPLAQLLQNTLLAFLTTVVNLTVGWRNGIRGSALGPQFVAKPLAPDNPPLKDLNWQLATLVIVISKVHKDPKLSYFVDILPAAA

SEQ ID NO: 17882 - protein, 209 aa, Zea mays
  VARIANT 186: note = Ancestral polymorphism is G, Derived polymorphism is V
MHIDDLRALAPLWLSKIEEVRQDKSNWSTNITGDIYGMGWISEMYGYSFGAAEVGLWHKINDDIMIYPGYTPRPGIEPLILHYGLPFKVGNWPFSKLEHHEDGIIYDCNHLFDPPPFPREWSKYLSFLKSRMFSELTKSKYWKGEQVDSIMTMQHVALSKANNEYPKIHTLFSIECSSYFDWQTVGLMYSGQPGNITRLLLPALCSCSS

SEQ ID NO: 17883 - protein, 294 aa, Zea mays
  VARIANT 5..294: note = Derived polymorphism lacks residues 5 to 294
  VARIANT 22: note = Ancestral polymorphism is P, Derived polymorphism is L
  VARIANT 34: note = Ancestral polymorphism is G, Derived polymorphism is V
  VARIANT 36: note = Ancestral polymorphism is V, Derived polymorphism is I
  VARIANT 105..294: note = Ancestral polymorphism lacks residues 105 to 294
MVTGKKRTFVLYPSLGVGHLIPMVELAKHLLRHVHIALIAVANPPDTDAVSAAAVERLAAANPAIAFRLLPVPASPDAGADWVKRDLDTLRLANPVLRDFLLRSQPAAALILDMFCVDALDVATELGVPAYFFFASAAGDLAMFLNLPYLYPTLPPFRDMGEALVRCPGMPPVRAMDMPLTVQDRDSDWTKVRMYQFRRIPEGRGVLVNSFAWLEPRALRALGDGVCVPGRSTPRVFCVGPLVNDGSSTTGSGGRHECLAWLDAQPKRSVVFLCFGSKDACSVLIALFLYHQFY

SEQ ID NO: 17884 - protein, 787 aa, Zea mays
  VARIANT 396..787: note = Derived polymorphism lacks residues 396 to 787
MGCAQSRIENEEAVARCKERRQLMKAAVASRNAFAAAHSAYACSLRDTGSALSEFAHGEGLPPPPPPEASADKAAPVAAQGGIGAAATGASASGSDAIMPPPPPLDSLLPPPPPLPDFSPSPAKIHRSISMPLPPSSGNRNPAMLRSDSIREEDEDEAEREEEEEDDGHLDDRRQRLRHRPPLPPPLSPPPPDTPVTPQPPPPPPPPPSSEMKAGVATWDYFFSMDEGMASIAPDDEEIMAGPEEKYVPPLPPRPPHSPPLAAVPLSEEFEEEPRTPEMPIPPASLPPKPPKRSSKKKGKEKLKAAHHQHTESAPLVTLVTGGKAGKLVTAEMPRVDLLRVLAEIDERFLKASESAGEVSKALEANRMHYHSNFADNRDRGQELVSQRLVVVGLLQSQVSSHTPLSHFSQQLMKTASALKFIEPWNHCGGWLLYIRWEEFWTLVAPNNMAGEIMKLEYQRKVALLNRQKKHNAAIEVLEKTKAAVTHLHTRYIVDMQSMDSTVSEIQYLRDNQLYPRLLDLTDRMAKMWEDMKIHHANQLKIVLNLKSVDIPDSNIETSDYHHSHTRQLRDIVDKWITNFTDFMNCQKEYINALYGWLKLNLIPIESSLKEKVASPPRMQQPPIKAFLYAWHEHLAKLPDDLAKTAIVTFRAVLDTILGVQDEELKQKEICEQTRREYIRKARAFEDWCHKHPQPRAIDVDPDSGEGTGHKDVVTEKRFAVESLKSKLDDEIESHNKLSKQVREKSLSILKAHLPELFRALTDFSDASFEMYSKLRLMSLMQDQGNN

SEQ ID NO: 17885 - protein, 218 aa, Zea mays
  VARIANT 19: note = Ancestral polymorphism is G, Derived polymorphism is V
  VARIANT 32: note = Ancestral polymorphism is S, Derived polymorphism is R
  VARIANT 33: note = Ancestral polymorphism is V, Derived polymorphism is E
  VARIANT 40: note = Ancestral polymorphism is E, Derived polymorphism is K
  VARIANT 42: note = Ancestral polymorphism is W, Derived polymorphism is C
  VARIANT 68: note = Ancestral polymorphism is S, Derived polymorphism is L
  VARIANT 70: note = Ancestral polymorphism is L, Derived polymorphism is H
  VARIANT 72: note = Ancestral polymorphism is L, Derived polymorphism is F
  VARIANT 78: note = Ancestral polymorphism is L, Derived polymorphism is F
  VARIANT 85..218: note = Derived polymorphism lacks residues 85 to 218
  VARIANT 89: note = Ancestral polymorphism is S, Derived polymorphism is L
  VARIANT 93: note = Ancestral polymorphism is P, Derived polymorphism is T
  VARIANT 123: note = Ancestral polymorphism is E, Derived polymorphism is K
  VARIANT 138: note = Ancestral polymorphism is D, Derived polymorphism is Y
  VARIANT 166..218: note = Derived polymorphism lacks residues 166 to 218
MNDSRILDFVNSICNIQYGMIDFEEFSAAAISVYQMEGLETWEEHAQKAYELFDKEGNRPIVIEELASELGLGPSISLHVVLKDWIRHSDGHPGSLWVGLLTFMFEFGRLSLSQVGKGLLKDENAQKLALQHWLEAIDSRHRYGHNLHCYYDCWLHFESKQPFFYWPHLKKSYISLRKNSKLKERKLLGSRKSCKHNYKLNRPHLKKTKVCCARPKRK

SEQ ID NO: 17886 - protein, 243 aa, Zea mays
  VARIANT 11: note = Ancestral polymorphism is A, Derived polymorphism is S
MASRILARSKALPLVAALTPAAAKAATPIAGARALSSLPRYPSAPSPHGLGKGISFIVDALTGVQNSKEEGKWLFKVLGYEPTSHLSGPQVLPRWFSSLASNGSQVQKSQISETYKSGGEMKQSETRKSSEEATPKVVAFSPLEAAIAKPRSSPLTSESSKVRRSEIATQVTFYMIPALLLASKNSISTSLLVGAVFHQVYMFHKEILLDYVHHDITRKWALIYFKLLLLVMAKDTIMYFNLF

SEQ ID NO: 17887 - protein, 474 aa, Zea mays
  VARIANT 372..474: note = Derived polymorphism lacks residues 372 to 474
MGCLPCFGSAGEGAAKEGGARKDGTSDLRVTRVESDKSKPQGGLDSKKDAVILREGNNQHIAAHTFTFRELAAATKNFRQDCLLGEGGFGRVYKGRLENGQVVAVKQLDRNGLQGNREFLVEVLMLSLLHHDNLVNLIGYCADGDQRLLVYEFMPLGSLEDHLHDIPPDKEPLDWNTRMKIAAGAAKGLEYLHDKASPPVIYRDFKSSNILLGEGFHPKLSDFGLAKLGPVGDKTHVSTRVMGTYGYCAPEYAMTGQLTAKSDVYSFGVVFLELITGRKAIDNTKPHGEQNLVAWARPLFKDRRKFPKMADPSLQGCFPMRGLYQALAVAAMCLQEQAATRPFIGDVVTALSYLASHTYDPNAPAQHNRSNSSTPRVSRGGGSNDQRRLRSSNHHSPDLRREVTTASRYDDEVSRANSGTGSGRRSGLDDADMSGSQLGSPAHTGRKRGSPRTSESQHAIAEAKTYGENSRGRK

SEQ ID NO: 17888 - protein, 230 aa, Zea mays
  VARIANT 13: note = Ancestral polymorphism is P, Derived polymorphism is A
  VARIANT 35: note = Ancestral polymorphism is C, Derived polymorphism is S
  VARIANT 42: note = Ancestral polymorphism is A, Derived polymorphism is S
  VARIANT 48: note = Ancestral polymorphism is I, Derived polymorphism is T
  VARIANT 79: note = Ancestral polymorphism is R, Derived polymorphism is I
  VARIANT 175: note = Ancestral polymorphism is L, Derived polymorphism is V
MELSPVGRWADLPEDIAVAVASCLQEADVCALGGCSRSWRRACDADCIWERLFRCRWPSAVASASPVQGWKALYISQHRRMAVAISNVVEFVGSSLNNESLESEYYLKAIADLALIPDIGFLDVQFFLFSRNHSAIINLIGLHYSIASLHVLPTEVSKALQAHRVAERVVCVNLVIRWFYGFRLPDEYECHRISLGELTVAEGAEFFAILNRGAVHTVFLLRISLVNVDK

SEQ ID NO: 17889 - protein, 380 aa, Zea mays
  VARIANT 338: note = Ancestral polymorphism is C, Derived polymorphism is Y
  VARIANT 128: note = Ancestral polymorphism is S, Derived polymorphism is R
MGSEDMLVEIHPRELRFLVEVKKQSSCCIHLVNKSDQYIAFKVKTTSPKKYCVRPNIGVILPLASRDFTVTMQALKNVPPDLQTKDKFLVQTTVVPFGTADEDIVPAFFSKETDQYIEEKKLKVVTVRVSEPQVEKLINGVPHAKETAGVTVAEQTLDSVNEAPNVVNEVRHSLKASFPSLSGTPATFNENSSSVNECPTILQEFLVPSKQASFALSESASNLQESSVASIETLFSSTEASVDLKESPPLEYTPAPSEVPSLSDKESTNADNVYIPQVTKDFQNLQMKLNNLEVKLDEAKTLIVKLREANRTTILERDKLQKEMVKFYCVDKDHKLFYSNFLVFLKRAEAAARSQSIGFPLLFVIYVAVVGILLGYLLHL

SEQ ID NO: 17890 - protein, 511 aa, Zea mays
  VARIANT 70: note = Ancestral polymorphism is L, Derived polymorphism is P
MAAVALSLGSGSGGRRRRSCRAARRGDGGGAGAGAGCRHFHVHYQYHIPRQAVWASSPPAVAPVRYLLILPVIFLAALAFLVCFGWLTLVYLASSSLWSRSVDRAGDASGFAGEDEREERPVMPVTDTEHAAGRSGVSGVCAGEGKTEIGEAGDGISEERRYVSTMVSTGICFSDDERASDEKIVKEVMVFEPCKAKAFAELDGSSEEEEHQLLLMDIPIDCFLEEVINTRQFSISLSNATKLLDALSVGEVIAADTKEVSDLSSTEIWKFVDRHDTAAEKIPVHGAGADFVIPEATYSADSTLHGLEDEYESEIKQEQSLAELSADTVPGNVTDEWQETQTSVTEHNNKQAEPEAASSEGYRKQVVGVSDESHDSVRENISENEAASNAPFHQTNSDEDTELQEGLFPNKRAEASTSASAVCDFADNHWRTAEELAGSADEGNVHGEGRTSVLETAQDGDEDRDNHVSMVSCRSFGGPQHRGGAFVEFLMRLQAVKTDKISRCRQSTREY

SEQ ID NO: 17891 - protein, 242 aa, Zea mays
  VARIANT 87..242: note = Derived polymorphism lacks residues 87 to 242
  VARIANT 57: note = Ancestral polymorphism is R, Derived polymorphism is W
MDAVASSRNTVALAAPAAVPLEAHAQNPSIAIANPPSPEMEATAEALTQEEVLRRRRRRAARLAGVYRRLYWAMAEEVRARHRQYVWDLARSPLEAEQPPAPPGGPVPAAVGEPPKPAPVPRRKKCGFTGCKVRAMATTRFCHSHILSDPKQMLYKPCASIIKSGPQGGLVTCGRPIIKSAAPSLCNMHLQKCQKNIAAAYRKVGFNPSLTGKVTPKFSVLVAECVRQIQDKRRKSLKATAQ

SEQ ID NO: 17892 - protein, 287 aa, Zea mays
  VARIANT 39: note = Ancestral polymorphism is L, Derived polymorphism is V
  VARIANT 41: note = Ancestral polymorphism is P, Derived polymorphism is A
  VARIANT 107: note = Ancestral polymorphism is L, Derived polymorphism is I
  VARIANT 159: note = Ancestral polymorphism is V, Derived polymorphism is A
  VARIANT 186: note = Ancestral polymorphism is Q, Derived polymorphism is L
  VARIANT 245: note = Ancestral polymorphism is R, Derived polymorphism is K
  VARIANT 246: note = Ancestral polymorphism is I, Derived polymorphism is T
  VARIANT 257: note = Ancestral polymorphism is E, Derived polymorphism is D
MSYPRSSKSDPTTKKQAAAAAVASEEQQAKMINEVRELLRPAEMPGFLTDSTVRRFLHARSWSAAQATKAVKETVKWRRQYRPDEIRWDDIPGREHEVKRAYIADYLDKDGRTVVVTVPAIKVIIIKLLATGCTRSMASQISAKEQVKLLVYTLESCTAGSENGQESVVWIADFRGWTLSSTPLAQSRQSMNIIQKHYPGLIAAAILFDPPKIFESFWKMLSYFIEPELEKKVKFVYTDNPESQRIMADMFDMEKLDSAFGGRSASGIDVAKYSERMRTGDQIRGLR

SEQ ID NO: 17893 - protein, 392 aa, Zea mays
  VARIANT 193: note = Ancestral polymorphism is F, Derived polymorphism is S
MSSDDEVREEKELDLSSNDVVTKYKTAAEILNNALKLVVSECKPKAKIVDLCEKGDSFIREQTGNVYKNAKRKIERGIAFPTCVSVNNTVCHFSPLTTDDAVLEENDMVKIDMGCHIDGFIAVVAHTHVIANGPVTGRAADVLAAANTAAEVAMRLVRPGKKNKDVTEAIQKVAAVYDCKIVEGVLSHQLKQFVIDGNKVVLSVSNADTKVDDAEFEENEVYAIDIVTSTGEGKPKLLDEKQTTIYKRAVDKNYNLKMKASRFIFSEISQKFPIMPFTARALEEKRARLGLVECMNHELLQPYPVLHEKPGDLVAHIKFTVLLMPNGSDRITSYPLQELKPTKSIEDNAEIKAWLALGTKSKKKGGGKKKKGKKGDAAGDPMEATNDATSQE

SEQ ID NO: 17894 - protein, 169 aa, Zea mays
  VARIANT 14: note = Ancestral polymorphism is G, Derived polymorphism is D
  VARIANT 25: note = Ancestral polymorphism is T, Derived polymorphism is M
  VARIANT 27: note = Ancestral polymorphism is V, Derived polymorphism is M
  VARIANT 33..169: note = Derived polymorphism lacks residues 33 to 169
  VARIANT 56: note = Ancestral polymorphism is G, Derived polymorphism is S
  VARIANT 62: note = Ancestral polymorphism is G, Derived polymorphism is S
  VARIANT 65: note = Ancestral polymorphism is R, Derived polymorphism is H
  VARIANT 67: note = Ancestral polymorphism is R, Derived polymorphism is W
  VARIANT 71: note = Ancestral polymorphism is G, Derived polymorphism is D
  VARIANT 80: note = Ancestral polymorphism is V, Derived polymorphism is L
  VARIANT 82: note = Ancestral polymorphism is V, Derived polymorphism is A
  VARIANT 83: note = Ancestral polymorphism is M, Derived polymorphism is I
  VARIANT 99..169: note = Derived polymorphism lacks residues 99 to 169
  VARIANT 100: note = Ancestral polymorphism is W, Derived polymorphism is S
  VARIANT 103: note = Ancestral polymorphism is L, Derived polymorphism is P
  VARIANT 118: note = Ancestral polymorphism is V, Derived polymorphism is A
  VARIANT 132: note = Ancestral polymorphism is A, Derived polymorphism is D
MLLLVATARALRLGMSGVPDEEAVTIVGKTSDWMTRLMSAYRLSVLTIAERKMVEGRRSEDGGRREREEDGAAVGCPMAVLVMARLEATTEGGAWLGEWWIDPIQLSWGKGENTVHVVMFGDNVPQERAESAKEAARTCDALLAMLITKVRAGTGANEVGIWAGDLVGR

SEQ ID NO: 17895 - protein, 129 aa, Zea mays
  VARIANT 115: note = Ancestral polymorphism is D, Derived polymorphism is G
  VARIANT 103: note = Ancestral polymorphism is C, Derived polymorphism is R
  VARIANT 101..129: note = Derived polymorphism lacks residues 101 to 129
  VARIANT 70: note = Ancestral polymorphism is A, Derived polymorphism is V
  VARIANT 62: note = Ancestral polymorphism is V, Derived polymorphism is I
  VARIANT 58: note = Ancestral polymorphism is A, Derived polymorphism is V
  VARIANT 57..129: note = Derived polymorphism lacks residues 57 to 129
  VARIANT 55: note = Ancestral polymorphism is E, Derived polymorphism is K
  VARIANT 50: note = Ancestral polymorphism is R, Derived polymorphism is Q
  VARIANT 41: note = Ancestral polymorphism is R, Derived polymorphism is H
  VARIANT 40: note = Ancestral polymorphism is R, Derived polymorphism is H
  VARIANT 38: note = Ancestral polymorphism is A, Derived polymorphism is T
  VARIANT 13: note = Ancestral polymorphism is A, Derived polymorphism is T
  VARIANT 9: note = Ancestral polymorphism is R, Derived polymorphism is Q
  VARIANT 4: note = Ancestral polymorphism is A, Derived polymorphism is T
MRAALQEARRRHARGVVAAVGRAAEARLRAAEAELERARRRGADLEERLRQLAGEGQAWLGVARSHEAVAAGLRATLDKVLQQPAVAAAGGGECGVAEDAQSCCFVASPSGLVAGDSLLYALSLSSPSC

SEQ ID NO: 17896 - protein, 221 aa, Zea mays
  VARIANT 21..221: note = Derived polymorphism lacks residues 21 to 221
MADKEPVVERPEAGEEEEDASAAAAAGEEEDTGAQVAPIVRLEEVAVTTGEEDEDVLLDMKAKLYRFDKDGNQWKERGTGAVKLLKHKQTGKVRLVMRQAKTLKICANHLVASTTKMQEHAGSDKSCVWHAADFADGELKEEMFAIRFGSVENCKKFKELVEEIAESLTKNEGKEGEDGGSTAGLLAKLTVSEGKSEGSGKSESTDSGKVTETKADTAPAE

SEQ ID NO: 17897 - protein, 82 aa, Zea mays
  VARIANT 66: note = Ancestral polymorphism is R, Derived polymorphism is I
  VARIANT 62..82: note = Derived polymorphism lacks residues 62 to 82
  VARIANT 53: note = Ancestral polymorphism is R, Derived polymorphism is S
  VARIANT 45: note = Ancestral polymorphism is G, Derived polymorphism is A
  VARIANT 38: note = Ancestral polymorphism is A, Derived polymorphism is V
MPGTEGWCYGWCDPWARTTRRSYVSGVYGSITASGVLAVVLRWSGRLYPGLVRYPVSATLPQIGSRLFLTWGVFWSFPEVID

SEQ ID NO: 17898 - protein, 64 aa, Zea mays
  VARIANT 60: note = Ancestral polymorphism is V, Derived polymorphism is M
  VARIANT 47: note = Ancestral polymorphism is R, Derived polymorphism is W
  VARIANT 37: note = Ancestral polymorphism is G, Derived polymorphism is D
  VARIANT 35: note = Ancestral polymorphism is C, Derived polymorphism is Y
  VARIANT 27: note = Ancestral polymorphism is R, Derived polymorphism is W
  VARIANT 22: note = Ancestral polymorphism is V, Derived polymorphism is M
  VARIANT 14: note = Ancestral polymorphism is E, Derived polymorphism is A
MAAARPLYGRVAGEAVYVVEPVSAPARRGSPTKGCLGAMRLVAGPRRGWSAEAHYGFLVVALKG

SEQ ID NO: 17899 - protein, 876 aa, Zea mays
  VARIANT 553..876: note = Derived polymorphism lacks residues 553 to 876
  VARIANT 429..876: note = Derived polymorphism lacks residues 429 to 876
  VARIANT 415: note = Ancestral polymorphism is G, Derived polymorphism is C
  VARIANT 413..876: note = Derived polymorphism lacks residues 413 to 876
  VARIANT 390..876: note = Derived polymorphism lacks residues 390 to 876
  VARIANT 348..876: note = Derived polymorphism lacks residues 348 to 876
MEKDTAMDITQVLIAAQSPDANLRTVAEGNLTQFQEQNFPNFLLSLSIELSNDEKPPESRRLAGIILKNSLDAKDSAKKELLTQQWVSVDPSIKLKIKELLLVTLGSSVHDARHTSSQVIAKVASIEIARREWQDLVAKLLGNMTSAGAPAPLKQATLEALGYVCEEISPQDLEQDQVNAVLTAVVQGMNQTELSPEVRLAAVKALYNALDFAESNFANEMERNYIMKVVCDTAVSKEVEIRQAAFECLVAIASTYYSHLEPFMETIFYLTANAVKGDEEPVALQAVEFWSAICDEEIALQDEYEGSEDGNSAIHFRFIEKALPLLVPLLLETLLKQEEDQDQDDNAWNISMSGGTCLGLISRTVGDAVVPLVMPFVETNITKPDWHCREAATFAFGSILEGPSVGKLAPLVQAGLDFLLNTMNDANSQVKDTTAWTLGRVFELLHSPAGINSIINGSNLPRIMSVLLESTKDAPNVAEKVCGAIYFLAQGYEDAESTSSVLTPYLSNTIAALLSAADRAETTHFRLRASAYEALNEIVRVSNIPETSGIIAQLLQEIMRRLNLTFDLHILSSGDKEKQSDLQALLCGVLQVIIQKLSSTDAKSIISQTTDQLMVLFLRVFACHNSTVHEEAMLAIGALAYATGPDFVKYMPNFFTYLEAGLQNYEEYQVCSISVGVVGDICRALEDKSLPFCDRIMTVLLKDLSSSMLNRSVKPLIFSCFGDIALAIGENFEKYLPYAVPMLQGAAGLLGTLDLSDDDMVDYGNQLRRGIFEAYSGILQGIKGPKAQLMIPYATHLLQFTEAVSKDRSRDDSVTKAAVAVLGDLADTLGQSSKDLFKTHLFHVEFLRECQAQELDDEVRETAQWAQGMINQAVVS

SEQ ID NO: 17900 - protein, 442 aa, Zea mays
  VARIANT 57..442: note = Derived polymorphism lacks residues 57 to 442
  VARIANT 46..442: note = Derived polymorphism lacks residues 46 to 442
MGGGGRGGGGGGGGGRRRRGGRGGGGGGGGSGGGARGNAPTPGPQQGAPWPTFHHPWSGRISMWSFQGPGSEAHPPTAMFDGAQPGFTSPPGYASRPCPPTSTSAFGFYRITSSESGMRSATSAAVASAVSSVVHSAEGPVKGSELVASVPISAEMPKGRMDTLVPSAPYLPDVERLILGLLLLPAVPMKPGSGDCAMCREFLPTEVLLILPVCSHMFHQSCIITWLCRTTPPCCPFCRASITIPGCNKTKVDPSFCSVEYDIESQMLMPIPPGEVVAEAVGGSHGWLRSSLDRLSGSWRICSSNRATPAVVPVSSRRTTGSWSHGNDSDCSKVQKPLPVPDGKEVPEEVRRSIGWLGSLATLSGSWSGCSSSCSSEMGLMVTLRHVKETLTSSGHSETDKWSMRWDLEAATPTPERPSLYGYARWFFRSSGKLNCRLTFPS

SEQ ID NO: 17901 - protein, 177 aa, Zea mays
  VARIANT 67..177: note = Derived polymorphism lacks residues 67 to 177
  VARIANT 62..177: note = Derived polymorphism lacks residues 62 to 177
  VARIANT 5..177: note = Derived polymorphism lacks residues 5 to 177
  VARIANT 4: note = Ancestral polymorphism is R, Derived polymorphism is W
  VARIANT 2: note = Ancestral polymorphism is G, Derived polymorphism is W
MGRRWVFMQTEASRVLGMDLDRGDNTHTFIRSDSPPLLTRNSINQSPKLLHPVPQPCLQGLRAQGLQRPEKEAPPTRNCSMWKQQVVVSWPHAHMVTAVGGHNGYPGGKVFVSAEQLGHGDYSASRTKVFRMVNTLGVNNEAKQTIQVLQAELNETKERLHTVEELKGQTAHYLYCS

SEQ ID NO: 17902 - protein, 424 aa, Zea mays
  VARIANT 90: note = Ancestral polymorphism is M, Derived polymorphism is L
  VARIANT 191: note = Ancestral polymorphism is D, Derived polymorphism is G
  VARIANT 364: note = Ancestral polymorphism is A, Derived polymorphism is S
MAMSWIRSVVRRALIAPKPRGSRQFTVTAAGGGATQTERVAAEMVRYALGGAVHRSSPEEAMRILEQGASNLQGGGEGSAEAVGLLMLAMSTLLYRSGRRQDAVEKLKATQQVAPSAVFRVAAWEALMGLHMEAGQEMSYLISPNDSVDLSIKYDSKWSDQDHLKFRVNAVRGLVTLLNGETESAAQLFDGWCRDFSRGENQTENAAVSYGEYLHCVGDFQMAAQVYEKILEAFCMDDMSGNLLAAGNMVPEEASLGATCSYGQLLSHSGKFAEAEDYLTRALQKAEEQFGANHPKVGIILTCVARMYKLKAKSEGSTSIMVQEGLYRKALEVLKAPAINSEGKNNDLLSMISSYKANYLLLVATGEYAELLLIQSNRKAEGERMKQWAEDAWRNRRLTLAQALEFSEPSKPTVVVDTRIGRVV

SEQ ID NO: 17903 - protein, 498 aa, Zea mays
  VARIANT 12: note = Ancestral polymorphism is A, Derived polymorphism is G
  VARIANT 59: note = Ancestral polymorphism is R, Derived polymorphism is W
  VARIANT 133: note = Ancestral polymorphism is H, Derived polymorphism is L
MQTTTTTSSVVAELEGALLRSADTFPYFMLVAFEASGLPRFALLLALWPLLRLLELAGRRGLALRAAAFVATAGVPRAEVEAVSRAVLPKFMADDVDPAAWAAFGSCEGTRVVVTRMPRVMVDRFAREHLGAHAVVGCDLEYSRLRRSTGLLRGASYEDVATRVRALFAGDGCRPALGIGGSKMARSFLTFCEEQLRQPFPAPNETNAPPFRPVIFHDGRLVCRPTPFMSLVILLWLPLGVLVAFVRIAVGLMVPIWTVPYIAPVFGGAVITHGRAPPPAKLGGGSPSGVLFVCTHRTLMDPVVLAAVLGRRVAAVTYSISRLSEVLSPIPTVRLTRDRDADAARMRAELARGGDVAVCPEGTTCREPFLLRFSKLFAELSDSIVPVAMNYRVGLFHPTTARGWKAMDPIFFFMNPRPVYEVTFLNQLPAESTCAAGKSPVDVANYVQRILAATLGFECTTLTRKDKYTVLAGNDGVVNAKPACWQSRVKDVLGFLLH

SEQ ID NO: 17904 - protein, 815 aa, Zea mays
  VARIANT 21..815: note = Derived polymorphism lacks residues 21 to 815
  VARIANT 30..815: note = Derived polymorphism lacks residues 30 to 815
  VARIANT 119..815: note = Derived polymorphism lacks residues 119 to 815
  VARIANT 272: note = Ancestral polymorphism is R, Derived polymorphism is M
MTLASLARALGRSARSSRPRQGFQLGGLRQPPAPPLPPPVHGGEGGAAGFVRSYLTAASSAALGKPSAGKTVDWRYVLASPHFRRLFSDGSKKNYENYYPKGKKEVPKGDGTNKSESKQESNTDEGWNFQDNAMKHMQNFLAPLLILGLMLSSMSSSSADQKEISFQEFKNKLLEPGLVDRIVVSNKSVAKVYIRSSPHPKSQGQDSDIHITTTDAPGKPAPSRCKYYFNIGSVDLFEEKLEEAQEALGIDPHDFVPVTYVAEVNWFQEVMRFAPTALIVGLLYFTGKRMQSGFNIGGGAGKGRGGIFNIGKATVMKMDKNSKNKVFFKDVAGCDEAKQEIMEFVHFLKNPKKYEDLGAKIPKGALLVGPPGTGKTLLAKATAGESGVPFLSISGSDFMEMFVGVGPSRVRNLFQEARQCAPSIVFIDEIDAIGRARGRGGFSGSNDERESTLNQLLVEMDGFGTTSGVVVLAGTNRPDILDKALLRPGRFDRQIAIDKPDIKGRDQIFRIYLKKLKLDNKPSFYSQRLAALTPGFAGADIANVCNEAALIAARSEETQITMQHFESAIDRIIGGLEKKNRVISKLERRTVAYHESGHAVAGWFLEHAEPLLKVTIVPRGTAALGFAQYVPNENLLMTKEQLFDMTCMTLGGRAAEEVLIGKISTGAQNDLEKVTKMTYAQVAVYGFSEKVGLLSFPQKDGGFEMSKPYSNQTASIIDDEVREWVGKAYKKTVELITEHKEQVAQIAELLLEKEVLHQDDLTRVLGERPFKALEPTNYDLFKKGFEDGGDNSQAPAENAELPDDSSPPVGDVVPT

SEQ ID NO: 17905 - protein, 435 aa, Zea mays
  VARIANT 364: note = Ancestral polymorphism is A, Derived polymorphism is S
  VARIANT 333: note = Ancestral polymorphism is I, Derived polymorphism is T
  VARIANT 30: note = Ancestral polymorphism is S, Derived polymorphism is F
MDKLSGSARLMIVSDLDHTMVNVVQLISWSALSYLYDEENLSLLRFGALWESVYCEDSLLVFSTGRSPTLYKELRKEKPMLTPDITIMSVGTEITYGEAMVPDDGWEEYLNNKWDRNIVVAETVSFSELKLQPETEQRPHKVSFFVDKKNAQEVIKSVAERLDKCGLDAKIIYSGGQDLDILPQGAGKGQALAYLLKKLSSCGKPPNNTLVCGDSGNDAELFSIPGVHGVMVSNAQEELLQWYTENAKDNPKIIHSNERCAAGIIQAIGHFKLGPNISPRDLQFPYAKEASFKPTDAVVKFYVLYEKWRRAEVPKSDSVIKYFKNITHANGVTIHPAGLELSLHASIDALGSCYGDKQGRKYRAWVDRLFITQTGSDSWVGRFDLWESEGDVRACSLSSLALILKAESPEGFVLTHIQKTWLNGYSSGVEQAFKL

SEQ ID NO: 17906 - protein, 102 aa, Zea mays
  VARIANT 2: note = Ancestral polymorphism is S, Derived polymorphism is L
  VARIANT 5: note = Ancestral polymorphism is G, Derived polymorphism is V
  VARIANT 15: note = Ancestral polymorphism is G, Derived polymorphism is D
  VARIANT 36..102: note = Derived polymorphism lacks residues 36 to 102
  VARIANT 43: note = Ancestral polymorphism is S, Derived polymorphism is L
  VARIANT 82: note = Ancestral polymorphism is S, Derived polymorphism is F
  VARIANT 94: note = Ancestral polymorphism is G, Derived polymorphism is C
  VARIANT 98: note = Ancestral polymorphism is A, Derived polymorphism is T
MSTDVLRPTFYWINGVVYAIQMIFKNSAHEEELTSQVKGWIRSWDNETINVLDVISNFPDISMELVEGLRKWFLSLCMMITSLRREDYMKKKHGILSAGGFY

SEQ ID NO: 17907 - protein, 783 aa, Zea mays
  VARIANT 721: note = Ancestral polymorphism is A, Derived polymorphism is V
MQGQAYSRLGSFGAAASAPPPPSAPVRPGAGAGGASRTPAKAGPARAIPGTAASATAAARAGVAHRGGGGAARRVARAVLATLLRRQAVFLFAPLLYVAAMLLYMGSLPLDAVPRIIARQPPGSVYRSPQLYARLRADMDADNSTGAICNAVAIAGFLNATLIIPNFHFHSIWRDPRCIPHLSTQIFIKYWNIPSTPTLEAKGFRLSRSKTEYMKCDFSAMGYEDGDVSLDGQVVPKKDIFRYLGSMLQKEGDIDEDVSHRIKAGWLKWRQAAGVLCDPRVPHKLKGKFYRTAIRSAMLYGAECWPTKRRYVQQLSVAEMRMLRWICGHTRRDQVWNDDIRERVGVAPIEEKLMQHRLRWFGHIQQRLEETPMHIGIIRRPENVKRGRGRPTLTWTEAVKRDLKEWNIDKELAVDRKGWNKFSDIYDKDHFVQRLQNDVRVVDEIPDFMMERFGHNLSNVFNFKIKAWARIQYYKDVVLPKLVEERVIRISPFANRLSFDAPSAVQRLRCLANFEALKFSKPIVSLSETLVSRMRERSAESDGKYISVHLRFEEDMIAFSCCVYDGGDEEKKEMDAAREIGWRGKFTKRGRVIRPGVIRMNGKCPLTPLEVGLMLRGMGFSNKTAIFLASGKIYRAEKNMASLLEMFPLLQTKETLASEEELAPFKNFSSRMAAVDYSVCAQSEVFVTTQGGNFPHFLMGHRRYLYGGHSKTIKPDKRRLVVLFDNPRIGWKALKRHLLNMRAHSDAKGIEMKRPSESIYTFPCPDCMCRLNRTEHSKSKHSR

SEQ ID NO: 17908 - protein, 430 aa, Zea mays
  VARIANT 16: note = Ancestral polymorphism is A, Derived polymorphism is V
MRKQIPPVSCLVLLAAAFALLAKASAASPAQAAVAVNVTGVLSAFPDLSDFTRLLASSPVLAELAGRSSLTLLAVPNGNLPQSPSAFAAASGADLADVLRYHVLLEYLSHADLRRLPASGKLVTTLFQTTGRATADLGAVNVTTAGASRLTVIRSPAPFPGSNATVLGAITAVPYNLSVLAVSGLIAPSGFDLAASESQPPAAVNITRVLADARAFNVAASMLEASGVAAEFEDDERGAGITVFAPTDDAFAGLPAGDRLQSLPADRKAVVLRFHVLHSYYPLGSLESIVNPVQPTLATEFSNAGRFTLNITRANGSVAIDTGVVQATITRTVFDQNPVAVFAVSKVLLPKEMFTRTAAASIVATTASASSPPPAATAPEASESARTPPTKLSSPPALRGGGQDYATAPAPARGIEWWCIALVYLLPHLV

SEQ ID NO: 17909 - protein, 111 aa, Zea mays
  VARIANT 24: note = Ancestral polymorphism is E, Derived polymorphism is K
  VARIANT 28: note = Ancestral polymorphism is R, Derived polymorphism is H
  VARIANT 59: note = Ancestral polymorphism is R, Derived polymorphism is S
MAPPQPKSGLFVGINKGHVVTKRELPLRPSHRKGKATKRVSMVRGLIREVAGFAPYEKRITELLKVGKDKRALKLAKRKLGTHKRAKKKREEMMGVLRKMRSAGTHTDKKK

SEQ ID NO: 17910 - protein, 582 aa, Zea mays
  VARIANT 205: note = Ancestral polymorphism is A, Derived polymorphism is V
MAMEDVAGASSSSVAAAASDPTHGWQTVSYPKRHRKQAHQPPRAMAPDLALQANGKGSGVFDAVEKRSQERHRALQQQLASRAADLDDARIAPVTGGAYSDDSDSDEATAPRQVGEVKKPKKPKKPKVTVAEAAALIDAENLAAHLVEISSSYENQQDIQLMRFADYFGRAFVAVSASQFAWAKMFKESTVSKMVDIPLCHIPEAVIKTASDWISQRSYDALGDFVLWCIDSIMSELSGPSAGPKGSKKVAQQSPRAQVAIFVVLAMTLRRKPDVLVNVMPKIMGNNKYLGQEKLPIIVWFIAQASQGDLVTGMFCWAHFLFPTLCAKPSGNPLARDLVLQLLERILSVTKARSILLNGAVRKGERLVPPVSFDLFMRATFPVSGARVKATERFEVAYRTIKELALAGSPGSKTVKQASQQLLPLCAKAMQENNAELTREAVDVFIWCLTQNAESYKQWERIYPENTEASVAVLSKIVIDWKDVSPKLSSEALKATVKNLKAKNEAALESATDAGKQASIKEADKHCKVILGKLTRSSTCLKSSLVGIALAVAASLVLSSPDMDLPLEWEKIQAMVSSHLSF

SEQ ID NO: 17911 - protein, 649 aa, Zea mays
  VARIANT 325: note = Ancestral polymorphism is C, Derived polymorphism is W
MAKGEGPAIGIDLGTTYSCVGVWQHDRVEIIANDQGNRTTPSYVAFTDTERLIGDAAKNQVAMNPTNTVFDAKRLIGRRFSDPSVQSDMKLWPFKVVAGPGDKPMIVVSYKGEDKQFSAEEISSMVLTKMKEIAEAYLGSTIKNAVVTVPAYFNDSQRQATKDAGVISGLNVMRIINEPTAAAIAYGLDKKATSSGEKNVLIFDLGGGTFDVSLLTIEEGIFEVKATAGDTHLGGEDFDNRMVNHFVQEFKRKHKKDISGNPRALRRLRTACERAKRTLSSTAQTTIEIDSLYEGIDFYTTITRARFEELNMDLFRKCMEPVEKCLRDAKMDKSTVHDVVLVGGSTRIPKVQQLLQDFFNGKELCKSINPDEAVAYGAAVQAAILSGEGNEKVQDLLLLDVTPLSLGLETAGGVMTVLIPRNTTIPTKKEQVFSTYSDNQPGVLIQVYEGERARTKDNNLLGKFELSGIPPAPRGVPQITVCFDIDANGILNVSAEDKTTGQKNKITITNDKGRLSKEEIEKMVKEAEKYKAEDEEHKKKVDAKNSLENYAYNMRNTIKDDKIASKLGADDKKRIENAVDGAISWLDSNQLAEVDEFEDKMKELEGICNPIIAKMYQGAGADMGAAAGMDEDAPAAGGSAAGPKIEEVD

SEQ ID NO: 17912 - protein, 61 aa, Zea mays
  VARIANT 33: note = Ancestral polymorphism is T, Derived polymorphism is M
  VARIANT 21: note = Ancestral polymorphism is R, Derived polymorphism is W
  VARIANT 8: note = Ancestral polymorphism is A, Derived polymorphism is T
  VARIANT 6..61: note = Derived polymorphism lacks residues 6 to 61
MESKVRATCNSSNAKLDDIVRLLDDLLTEYESTAYGPGKWKRLATFLQQCLAGPVLDLFRR

SEQ ID NO: 17913 - protein, 237 aa, Zea mays
  VARIANT 149..237: note = Derived polymorphism lacks residues 149 to 237
  VARIANT 150: note = Ancestral polymorphism is I, Derived polymorphism is N
  VARIANT 176: note = Ancestral polymorphism is K, Derived polymorphism is Q
  VARIANT 184: note = Ancestral polymorphism is D, Derived polymorphism is V
MAGTPSQASLLLQKQLKDLAKNPVDGFSAGLVDDSNVFEWQVTIIGPPDTLYDGGYFNAIMTFPQNYPNSPPSVRFTSGMWHPNVYPDGRVCISILHPPGEDPSGYELASERWTPVHTVESIVLSIISMLSSPNDESPANIEAAVSAPYNIPSLSLWVGKQTAVVFFVLLPVQRLKALLNIYCDNFLLDYHSASAIVKMPLVSEVIHDFALQKDWREKRDEFKKKVRQCVRRSQEML

SEQ ID NO: 17914 - protein, 571 aa, Zea mays
  VARIANT 153: note = Ancestral polymorphism is G, Derived polymorphism is A
  VARIANT 145: note = Ancestral polymorphism is W, Derived polymorphism is C
MDRVLLSSHLPSHAHANTRLQQGPGGLNSIGFAVIKKGCLKLRCYAIGDELGGPGRFSKHFIENSNGPVFQGLDASAGSFRTVGAEITQDTGDFFVSDAEGDPDKPTDGFSSIDQAIGALREGKDQCRNVMDIAEDVNHRLKVGWVKWHQTYGVVGDKKFVIAVDDENGDNEGDLVMAATLVDQKSVAFMIRNGSGIISVGMEEEDLTRLMIPMMSPITEIEDITAAASTVTVDARVGISTGVSAADRAKTILTLASSDSKPSDLRRPGHIFPLKYRNGGVLKRAGHTEASVDLVALAGLRPVSVLSTVMDPRDGSMAGVTVLQQMAMEHDIPIVSIADLIRYRRKREKLVELIAVSRLPTKWGLFRAYCYQSRLDGTEHIAVVKGDIGDGEEVLVRVHSECLTGDILGSARCDCGNQLELAMQLIEKAGRGVLVYLRGHEGRGIGLGQKLRAYNLQDEGHDTVEANVELGLAVDAREYGIGAQILRDIGVRTMRLMTNNPAKFIGLKGYGLAVVGRVPVISPITKENQKYLETKRTKMGHVYGSDLPGSLPEFANPQEAPTEQDDDDNQN

SEQ ID NO: 17915 - protein, 218 aa, Zea mays
  VARIANT 93: note = Ancestral polymorphism is P, Derived polymorphism is R
MVRLAKFYLVCYNSLQSLGWFVSLLRLLPCLVPPFPVHSAYVVAGDLICFLQTCAILETVHAAIGLVPTAPLLAFLQWGGRIHFILAVVRQIPEVQSSPSVFITFIAWSISEVIRYSHYALTTLKVCPAWLTYLRYTAFIPLYPIGVGPGEMWTMYQALPFVKKRDLYSGFFEKFSMSYRSFLVGVLVLYPFLWLKLYQHVFKQRKSKLGKGSRKKRA

SEQ ID NO: 17916 - protein, 193 aa, Zea mays
  VARIANT 93: note = Ancestral polymorphism is F, Derived polymorphism is L
  VARIANT 61: note = Ancestral polymorphism is S, Derived polymorphism is Y
  VARIANT 6: note = Ancestral polymorphism is S, Derived polymorphism is L
METFPSVKNILLLDSEGKRVAVKYYSDGWPTLSAKLAFEKSVFAKTQKANAGTDGNLHLISLNTEELFSTDAEIVMFDGQIVVYKFIQDLHFFVTGGEEENELILASVLQGFSDAVERLLKNMVDKRTALENLDLILLCLDEIVDGGIVLETEGREIAEKVSGHGSEGASSAEQTLVNALTQAREHLAKSLLM

SEQ ID NO: 17917 - protein, 155 aa, Zea mays
  VARIANT 3: note = Ancestral polymorphism is P, Derived polymorphism is L
  VARIANT 5: note = Ancestral polymorphism is S, Derived polymorphism is F
  VARIANT 10: note = Ancestral polymorphism is E, Derived polymorphism is K
  VARIANT 27: note = Ancestral polymorphism is S, Derived polymorphism is F
  VARIANT 32: note = Ancestral polymorphism is A, Derived polymorphism is V
  VARIANT 42: note = Ancestral polymorphism is A, Derived polymorphism is T
  VARIANT 54: note = Ancestral polymorphism is S, Derived polymorphism is I
  VARIANT 60: note = Ancestral polymorphism is V, Derived polymorphism is A
  VARIANT 62: note = Ancestral polymorphism is R, Derived polymorphism is C
  VARIANT 70: note = Ancestral polymorphism is R, Derived polymorphism is H
  VARIANT 74: note = Ancestral polymorphism is S, Derived polymorphism is F
  VARIANT 80..155: note = Derived polymorphism lacks residues 80 to 155
  VARIANT 89: note = Ancestral polymorphism is D, Derived polymorphism is N
  VARIANT 112: note = Ancestral polymorphism is R, Derived polymorphism is C
  VARIANT 130: note = Ancestral polymorphism is S, Derived polymorphism is F
  VARIANT 139: note = Ancestral polymorphism is Q, Derived polymorphism is H
  VARIANT 146: note = Ancestral polymorphism is A, Derived polymorphism is V
MDPDFELEFEMVGVLRAYKTTWDDGDSAAEAAATDVDLLKRAWLNEKAASDILSFDSPLALRVRDSGSDRGSLSWGRVTQEEALDDFIDDGVDDLVVSLYQMDLDRTLFLLRSYLLLEKIKKYTMHISRFDDLLSHLSQQERLVGAFITIVCATL

SEQ ID NO: 17918 - protein, 148 aa, Zea mays
  VARIANT 71: note = Ancestral polymorphism is L, Derived polymorphism is P
  VARIANT 101: note = Ancestral polymorphism is G, Derived polymorphism is E
  VARIANT 113: note = Ancestral polymorphism is L, Derived polymorphism is H
  VARIANT 119..148: note = Derived polymorphism lacks residues 119 to 148
MTVDVQPTLIGRKQVLSNSGIASISVVSIALVIGGMDRCLDSKESTLVTALIDGVIGHYACCNGDTWSSELDILCKAEPRIITTFKVLVRQATIGGVTIDGLLAAAAGFSIGLAFVLIGFFTTQSAPDVLWSQLLAIPLAQLPTYVEV

SEQ ID NO: 17919 - protein, 402 aa, Zea mays
  VARIANT 173: note = Ancestral polymorphism is K, Derived polymorphism is N
MAGRREEWGGEVLQRQREEEEEEDEEEQEDEDFIDMDLSSAAARTPVAHEFEFMSAPLDRWGETLAASPADELFYKGKLLPLHLPPRIQMVEELLDGRGRGRGRDRDRDRELLFRGVSSTAPATPYESCNASPANSSCYGYGYASGELNVEEYFQEYAAGLALAEDAAAAPRKPWSRRLRFMRQLNLGLRLRASKAYLKTILFAARPGSPADEKSGLGAVAARGAREEIAAHGHGHLRAWTKNPFAQTRMNTRCVASHGGTSRAAAAAAGGRCKEREHGAHRRSFSSVIVRYSPSNKTSPVPALPPSSCSSSSASSSVRTSSGSSDGGVGPTLRRSSSASSEVENPVQGLIAYCKRSQQLASVRKSASDAGFRFLSSSASRIAAESESESDGLDELTEICRG

SEQ ID NO: 17920 - protein, 297 aa, Zea mays
  VARIANT 34: note = Ancestral polymorphism is T, Derived polymorphism is M
  VARIANT 37..297: note = Derived polymorphism lacks residues 37 to 297
  VARIANT 229: note = Ancestral polymorphism is K, Derived polymorphism is E
MEGDLGGPHWDSLRTLLPIYQAVSTSTVGDGCSTNFWHDAWHGEDDLATRLPALFSHCVKQQASVADVMANGLHLVTRLSSQAQLELHQAQNIISGTQLSQQPDERKCMLTSTHGKFQTSALYELLKRPVRSENALAAFVWNNKTPPRVKFFAWLMTQGRIQSKKNLLRKRIVDEDVCEECNQESESAGHIVLHCPFAKRFWQAIGFQVPADLDVHELHLIVRPTNIPKTEFSSFVVLCCWQLWKRRNALVFRQEAIPLSRILRQCSEEAKNWSYRHGSKEAGVQAAWVLVFSTASM

SEQ ID NO: 17921 - protein, 120 aa, Zea mays
  VARIANT 3: note = Ancestral polymorphism is V, Derived polymorphism is I
  VARIANT 31: note = Ancestral polymorphism is E, Derived polymorphism is D
  VARIANT 57: note = Ancestral polymorphism is A, Derived polymorphism is T
  VARIANT 71: note = Ancestral polymorphism is R, Derived polymorphism is Q
  VARIANT 79: note = Ancestral polymorphism is A, Derived polymorphism is V
  VARIANT 112: note = Ancestral polymorphism is A, Derived polymorphism is V
  VARIANT 113: note = Ancestral polymorphism is A, Derived polymorphism is S
MLIAELPMTHLPGEDILFCIDIDLEEVVAADQAAATNDSEAATLRSEVERLEGLLAAEKASHEEEMRRGAQLGDQLQTVYQEKAALEEEIETLKGSATAEGKGVEEGCDSVAARARTPKD

SEQ ID NO: 17922 - protein, 236 aa, Zea mays
  VARIANT 110: note = Ancestral polymorphism is L, Derived polymorphism is I
  VARIANT 70: note = Ancestral polymorphism is P, Derived polymorphism is L
  VARIANT 62: note = Ancestral polymorphism is R, Derived polymorphism is H
  VARIANT 57: note = Ancestral polymorphism is G, Derived polymorphism is R
  VARIANT 29: note = Ancestral polymorphism is S, Derived polymorphism is N
  VARIANT 28: note = Ancestral polymorphism is S, Derived polymorphism is R
  VARIANT 13..236: note = Derived polymorphism lacks residues 13 to 236
  VARIANT 12: note = Ancestral polymorphism is D, Derived polymorphism is N
MPAVAAAPAAADQCGRHHALILRRPGPSSNRITSLFHALALGSGGTLQGLDLLLEGGLLLVHGLQLVPELCTPAHLLLMASLLRGEETLEALDLAAERGCLAVVGGSSLIGGDDLLRTAATQWTWIRGRYGSVLHVGVDLEVDVDAEEDVLSGEVGHRELSNEHRAMRGGGTISFGFRPGVLQVEANATRLVPFGGSIGQSTVDTTTRGSSASMRREGGPRRRRPKSGSTRLLLIR

SEQ ID NO: 17923 - protein, 172 aa, Zea mays
  VARIANT 68: note = Ancestral polymorphism is S, Derived polymorphism is L
MVGGGGHSSMDHPGAKDLERGELRRGAPEFADGDDGDGEESQYFSDAEDRSWTSHSRHDSTAYEDYVLPCVSARASSVDADADGEAVRQHCRKSSCVSEGSLDDVDLEAGLSEIIKASPKKAEQNCRICHLGLESAVAESGADITLGCSCKGDLSYAHKQCVDTWFKIRGNK

SEQ ID NO: 17924 - protein, 174 aa, Zea mays
  VARIANT 96: note = Ancestral polymorphism is Q, Derived polymorphism is L
  VARIANT 75..174: note = Derived polymorphism lacks residues 75 to 174
  VARIANT 19: note = Ancestral polymorphism is K, Derived polymorphism is M
  VARIANT 15: note = Ancestral polymorphism is D, Derived polymorphism is H
MNCPLTPDMAWLISDTLRKNLAAEGKRKLMCVIHEREKMAEDNDRYMFTDDFFGEESIFHDIFAGLLEAQYFLSWHAFVDDSVYSTKIEKLNCKRQRISGDKDSNRASSSNQYKNGSGCDKEVEDSRKLFLDAKKCLYLLKRTLEDLQKKDLFPYNPKPLLRSLARFQELCEQG

SEQ ID NO: 17925 - protein, 158 aa, Zea mays
  VARIANT 148..158: note = Derived polymorphism lacks residues 148 to 158
  VARIANT 143: note = Ancestral polymorphism is Y, Derived polymorphism is C
  VARIANT 109: note = Ancestral polymorphism is T, Derived polymorphism is A
  VARIANT 105..158: note = Derived polymorphism lacks residues 105 to 158
  VARIANT 81: note = Ancestral polymorphism is A, Derived polymorphism is T
  VARIANT 71: note = Ancestral polymorphism is N, Derived polymorphism is K
  VARIANT 64: note = Ancestral polymorphism is A, Derived polymorphism is T
  VARIANT 63: note = Ancestral polymorphism is T, Derived polymorphism is I
  VARIANT 58: note = Ancestral polymorphism is A, Derived polymorphism is E
  VARIANT 51: note = Ancestral polymorphism is P, Derived polymorphism is S
  VARIANT 40: note = Ancestral polymorphism is P, Derived polymorphism is L
  VARIANT 13..158: note = Derived polymorphism lacks residues 13 to 158
  VARIANT 2..158: note = Derived polymorphism lacks residues 2 to 158
MQYLERRECEYDQKISIDFYNEGDPLKPAMTGVLVFVSTPDPIGNKYYLGPAPLQDMARQIATANGPTGYNRDYLFSMEKALASISHEDDSIIELANEVRKVLNRTKKTKITGANASLKSHAHYVFYYDLTRELFYYLKDILYINKQRLIAMEEMKKL

SEQ ID NO: 17926 - protein, 100 aa, Zea mays
  VARIANT 39: note = Ancestral polymorphism is S, Derived polymorphism is C
  VARIANT 38: note = Ancestral polymorphism is M, Derived polymorphism is I
  VARIANT 37..100: note = Derived polymorphism lacks residues 37 to 100
  VARIANT 33..100: note = Derived polymorphism lacks residues 33 to 100
  VARIANT 29: note = Ancestral polymorphism is A, Derived polymorphism is T
  VARIANT 17: note = Ancestral polymorphism is N, Derived polymorphism is K
  VARIANT 9: note = Ancestral polymorphism is N, Derived polymorphism is D
MPLPAASANGNGTAEQNSCFSKQDAMPSAFRAWKYLQMSVVTCASEAKAYAQENGLFFMETSAKTATNVNDVFYEIAKKLLQGQQVQNPQGGMVLNQRPP

SEQ ID NO: 17927 - protein, 99 aa, Zea mays
  VARIANT 50..99: note = Derived polymorphism lacks residues 50 to 99
  VARIANT 25: note = Ancestral polymorphism is I, Derived polymorphism is L
  VARIANT 23..99: note = Derived polymorphism lacks residues 23 to 99
  VARIANT 15: note = Ancestral polymorphism is S, Derived polymorphism is R
MSRASASRPCFWCRSTLRYVADWLICSRFSFVWMSGFACLLALSSFVTRRQRKGSSTNAWIVIKLLADHVYVSTQFNQGWRQGNLCPLCQVWYALLKPI

SEQ ID NO: 17928 - protein, 71 aa, Zea mays
  VARIANT 42: note = Ancestral polymorphism is N, Derived polymorphism is S
MEYYYAYQHSNSNSSGGLSSKEKRPPLKRGQLKRQIVRTISNLVVPRHAAVAGSREKADRGSGFGGGRSYN

SEQ ID NO: 17929 - protein, 142 aa, Zea mays
  VARIANT 67..142: note = Derived polymorphism lacks residues 67 to 142
MGKTRGMGAGRKLKTHRRNQRWADKAYKKSHLGNEWKKPFAGSSHAKGIVLEKIGIEAKQPNSAIRKCARVQLVKNGKKIAAFVPNDGCLNYIEENDEVLIAGFGRKGHAVGDIPGVRFKVVKVSGVSLLALFKEKKEKPRS

SEQ ID NO: 17930 - protein, 728 aa, Zea mays
  VARIANT 168..728: note = Ancestral polymorphism lacks residues 168 to 728
MYADTMKGHQPKGDKGNRDDYTFSFRRLADVWPTYFPEEAEVGLSESDQKVRLTTALADFFSTPEMAEVLRSRVEDDGNDILCLPIDFQQLQELRMFIEDKLNESPKEALLCMGVAAHLALCSDKDNKRNKINIRLYNTGAAIALKKLKAAFISKSLPVIIHVFLFYQIQELASADNHEEGRVPRTVECELTEDLVDCCIPGEIVTVTAIVKVLNNHMDVGGGKSRISSQGLYYLYLEAVSVRKLKSHAVSDKEIQASGICHSQSSTVNDDFAVKYKEKYGTDVFRRILQSFCPSIYGHELVKAGITLALFGGVQKNSMDQNMVPVRGDIHVIVVGDPGLGKSQLLQAAAAVSPRGIYVCGNTTTKAGLTVAVVKDSMTNDYAFEAGAMVLADRGICCIDEFDKMFTEHQALLEAMEQQCVSIAKAGLVASLSARTSVLAAANPIGGHYDRAKTVNENLKMSAALLSRFDLVFILLDKPDESLDKRVSDHIIALHTNDVDNFRPNKRTRTGSHFDGDPGLGVGGNSVASRLRLHPEKDKDFTPLSGQLLRKYISYSREHVFPRMSKAAAAILKEFYLKLRNRSASADGTPITARQLESLVRLAEARARVDLRDEVTEEDAQDVVDIMKESLYDKYVDEHGFVDFTRSGGMSQPKQAKKFLNALNKESELQQKDCFSRTELYTIADKISLQVPDLDTLVEKMNIAGYLIQKRSGMYQIHDQTSLTENVT

SEQ ID NO: 17931 - protein, 468 aa, Zea mays
  VARIANT 243..468: note = Derived polymorphism lacks residues 243 to 468
  VARIANT 390: note = Ancestral polymorphism is R, Derived polymorphism is C
MALVSPASPAPSAPDAPSPPQHQQAPVPTPGPAANSQAAVAAASSSPGASASIPSLSPPVSHATKGRSKSVRWGDLSPASSDGATSFDSRPSFKDVLVRTANPSLPGRVAAQGSVPAAGKSSALGMVYRQPHPLSTKRRSPRQATQPTPAIRPAPGLSDHGWTTVESKKGRSRRLKALWLPGRVPADLVGRCFNCLGCDHRAADCGSEPRCFLCSALGHKSSSCPKASVWRRLGCPRPVKSVWERLSPAVQGRVQRPAGRRPVWQRIAPPEAIPVVPSVPVGNMLGVSAAQGNGGPASSRRKRWRKKKRKEREDKPALEISAPPPPEQTLPASDETACVIDWSVQMSIAEDNLKTAVVITVVSSRDVSADEIALVLAPRLEMEVGGLVLRQFSQSSFLAVLPNHVQLDTLVDRFHIIREENFMLSSRRWTSRQLVLVIRTNLIPPLHLEDVVTTLHPLNMLQPLKTPT

SEQ ID NO: 17932 - protein, 94 aa, Zea mays
  VARIANT 80: note = Ancestral polymorphism is G, Derived polymorphism is R
  VARIANT 64: note = Ancestral polymorphism is L, Derived polymorphism is P
  VARIANT 46: note = Ancestral polymorphism is P, Derived polymorphism is S
  VARIANT 32: note = Ancestral polymorphism is S, Derived polymorphism is L
MTASSTHRNSSIPLVEGVVFANRFSMFSIHFSQIWANRDRYCAPNPDDDLVTGYDDRDMVVENLRKLCVHASPTPSVAPGCGGTTPPTTTSAAP

SEQ ID NO: 17933 - protein, 129 aa, Zea mays
  VARIANT 63: note = Ancestral polymorphism is Q, Derived polymorphism is L
  VARIANT 50: note = Ancestral polymorphism is G, Derived polymorphism is R
  VARIANT 24: note = Ancestral polymorphism is S, Derived polymorphism is P
  VARIANT 14: note = Ancestral polymorphism is I, Derived polymorphism is T
MEGVLSHQLKQSVIDGNKVVLSVSNADTKVDDAEFEENEVYAIDIVTSTGEGKLSKDWVKHIQQEWKVVVVYDCKIVEGVLSHQLKQPVIDGNKVVLSVSNADTKVDGAEFEENEVYALDIVTSTGEGK

SEQ ID NO: 17934 - protein, 705 aa, Zea mays
  VARIANT 170..705: note = Derived polymorphism lacks residues 170 to 705
MLAYFSPGSSPTETLPAACFSPPLVLHRQRSPLVLCRYRTEKMTEGQSEETASAPEGVSVLRRNSDDVGWEYGVLVDINNKDKGFIGLKQHITQEGKNAKKCQGMKTTKEKLLEAQEKCKKALYGAKRKREVKTVPISFNVCDNDEFKQMCEAIGQFGPRIEPPTMFDLRGRLLEEEYVRTKSLLQEREAEKMKNGCSIMADAWSDKKRRSIMNFYFLKRDVDVSHTSEVVFELVDKAIEDIGPDDVVQVVTANASNNMGAKKLLHVKRPHIFWTSCATHTINLMLQGIGNMPRFKKVIDQAKAFTIFVYGHTRTLECMRYFTEGKEIVRPGVTRFASNYLTLDTIQEKKDQLRNMVVHSRWDSLKDVKSKKGKNATTTILNPTFWKDVKLTLAVFAPLFKVLRLVDGDVKPSMGFVYGEILKAKRHVKEALGNVENRFKDVVAVIDKKMAGRLDSPLHLATYFLNPHYSYADPSFFDVPKITEGFINCVETFYYHDDEMQEQASNIELQKFQNREGPFSKKLARTFENFDYNPASWWRLYGTETPALQKMATKILSLTASSSGCERNWSGFDGVHTKKRNRLTTDHLNKLVYIQFNNRLINNRANIKSKKITDVLLSSGTTEAQGFLQENGDDYALVSFRDDEDEEEVMEGTGIPWSVLGDAVGAEEQLELRRSARVRELNEEEFESEEEEFDEDGDEDEMDET

SEQ ID NO: 17935 - protein, 103 aa, Zea mays; identical to SEQ ID NO: 2445
  VARIANT 40: note = Ancestral polymorphism is R, Derived polymorphism is S
  VARIANT 61: note = Ancestral polymorphism is I, Derived polymorphism is M
  VARIANT 70: note = Ancestral polymorphism is A, Derived polymorphism is S
  VARIANT 78: note = Ancestral polymorphism is R, Derived polymorphism is H
  VARIANT 84: note = Ancestral polymorphism is A, Derived polymorphism is S
  VARIANT 85: note = Ancestral polymorphism is M, Derived polymorphism is I

SEQ ID NO: 17936 - protein, 294 aa, Zea mays
  VARIANT 106: note = Ancestral polymorphism is R, Derived polymorphism is C
  VARIANT 147: note = Ancestral polymorphism is N, Derived polymorphism is K
  VARIANT 209: note = Ancestral polymorphism is S, Derived polymorphism is F
MSAATEVAPVQQPSHPAAAGWLGLGLLFQILLRIIRSSWAQLLSFVRLRHRLLPVTASPELAFVQLPPEAPADASPPPLRRLMVVLDLDETLVCAYESSSLPSTMRTHAVEAGLHRFDMECVLSEKASTYTSIFRGLQDTEGRQRINRVTVFERPGLHEFLQRTSEFADLVLFTAGLEVYVNHKSGFTDASVNPHILCWEYREHVKDLSCLSKDFQRIVLVDNNPYSFLLQPLNGIPCVTFSAGQPVDDQLMGTMFPLLKHLALQKDVRPALYEAFHMPEWFQRQGIPQIEQAV

SEQ ID NO: 17937 - protein, 249 aa, Zea mays
  VARIANT 32: note = Ancestral polymorphism is R, Derived polymorphism is P
MDRAQLLLVGLPALLFFSDLTHIFAPPPPHLRHPHHHPPHHQHPHPPHHPHSPHPHPHPPHHPHPHPPHHHQHPDPSTAIIQEPRVDEAGFGSTVELQFCASCSYKGTAVTMKRMLETSFPGIHVILHNYPPPFPKRVLSKVIPIVQVGAVATIMAGDQIFPRIGMVAPPWYYSLRANRFGTMATIWLFGNFAQSFLQSSGAFEVYCNGDLVFSKLAEQRFPSEFELRDLVGSRLPGSPFGRNPGKTLT

SEQ ID NO: 17938 - protein, 356 aa, Zea mays
  VARIANT 20: note = Ancestral polymorphism is P, Derived polymorphism is L
MARIMAAIAILLAAFFVLAPDLATAAAAAAAAPQSAVPAVFAFGDSTLDPGNNNGLATLVRADHAPYGRGFPGGAATGRFSDGKLITDYIVESLGIKDLLPAYRGSGLTVAEASTGVSFASGGSGLDDLTAQTAMVSTFGSQITDFQALLGRIGMPKAAGIANRSLYVVSAGTNDVTMNYFVLPVRTISFPTVDQYSAYLIGRLQGYIQSLYKLGARNFMVSGLPPVGCLPITKSLHSLGSGGCVADQNAAAERYNAALRQMLTRLEAASPGAALAYVDVYTPLMDMVAQPQKYGFTETSRGCCGNGLPAMGALCTSALPQCRSPAQFMFFDSVHPTQATYKALADHIVQSQKPKT

SEQ ID NO: 17939 - protein, 898 aa, Zea mays
  VARIANT 377: note = Ancestral polymorphism is A, Derived polymorphism is G
MASRAPIPPAPPHLRLHAASLFSQRLPLPRARAPRCRGGRSRLLSALPSPPPSPASRSQGVSTAPIEREPPGLAPTPAPTPAQQPHQDPAIAAEVARLSAARERLRAAHTLHEKLRALDAEPRVAAFFGEESSRGVLGVLEPREVLLLKCLVAAGQEHVLGHELDWYGGDGGHHEHHHRNGVSGGSALRDALYSLAGLVGKWTSEGVVAAKERREEMEVLPRLLKFLDNVEEFYDCIGGIIGYQIMVLELLSASKDRMHRPSKDKFVDFHVPSGLNLLKDKEYASQAALWGIEGLPELGEIYPIGGAGDRLGLVDSDTGESLPAALLPYCGRSLLEGLIRDLQAREFLHFKIFGGQCITPVAIMTSSVKDNHEHIIAICERLDWFGRGRDNFRLFEQPLVPVVNAKDGKWLISKSLFPVGKPGGHGAIWKLAYDRGVLQWLQNCGRKGATVRQVSNVVAATDLTMMALAGIGLRCNKKLGFASCERRPGATEGVNVLIEKQNLEGLWSYGITCIEYTEFEKYGIPEPTLTNSSQVSFPANTNILYVDLQAVQEVGSRKNASCLPGMVLNLKKAVSYPNHLGFECSAAGGRLECTMQNIADDFMNTFNYRCSKGIESELNTFIVYNERKRVTSSAKRKLKSEDRSLHQTPEGSLLDIMRNAHDLLSSCGIDIPMVQDNSEYMHSGPPFLIFLHPALGPFWDIIRQKFVGGSVSKGSELQIEVAEFLWKDVEVTIKTISLHALCLFLQTKFIMLNSYKLDGSFIILADNVMGSTKNSKNGEQILHYGSRCGRCRLQSVKIVNEGINWTSPNNVYWKHDVERSESVKIILHGNAEFEAKDVVLKGNHVFEVPDGHRMCIIQDRAGFVVKLDLIRDELMDSGTWHWKYAVDGVHVKLNMVEL

SEQ ID NO: 17940 - protein, 174 aa, Zea mays
  VARIANT 115..174: note = Derived polymorphism lacks residues 115 to 174
  VARIANT 47: note = Ancestral polymorphism is P, Derived polymorphism is T
MAAQEGGMRLVSHPIAAHDGRLPRQYTAEGQGAKKDMSPPLEWYGVPEGARSLALLVQDIDADPIVPWTHWVVANIPPATRGLPEGFSGAAGAGPGRDQLGGLQEGVNDWKQPGWRGPVPPSHGHRIQFKLYALDDEVHLGNKVTRDKLMEAIDGHVLEEAELIAVFQGVVANN

SEQ ID NO: 17941 - protein, 86 aa, Zea mays
  VARIANT 15: note = Ancestral polymorphism is L, Derived polymorphism is M
  VARIANT 9: note = Ancestral polymorphism is A, Derived polymorphism is T
METATKVMASGLLLLLLVNVGFAVPVHGSEDDDDCWVEDRVDYVVCVRTGRCRSICREHSYVDGRCQWGFPNLLPYCECLRSNCTS

SEQ ID NO: 17942 - protein, 249 aa, Zea mays
  VARIANT 199: note = Ancestral polymorphism is R, Derived polymorphism is H
  VARIANT 174: note = Ancestral polymorphism is E, Derived polymorphism is D
  VARIANT 106: note = Ancestral polymorphism is L, Derived polymorphism is I
MWPSWVKTRSSDDSAVGAAASTSTAVGACPRLSIPNPCLKDLRSLLSPDSSASPAPRVFHRLRVAASALRVLRAIQHPASQSPAGGKEPAPGACGGGRVVLYFTSLRVVRGTYEDCRAVRAILRGLRAAVDERDLAMDPGYLPELASLLPHAPRGRVALPQVFVGGRHVGGAEEVRRLHEAGELRRIVAPASSGGSCARCGAQRYVLCAACHGSHKRYSLKGGGGFRSCAECNENGLVRCPACCVVPAS

SEQ ID NO: 17943 - protein, 743 aa, Zea mays
  VARIANT 327: note = Ancestral polymorphism is Y, Derived polymorphism is H
  VARIANT 267: note = Ancestral polymorphism is P, Derived polymorphism is A
MAVPSSDRARRPFPLSPSLSLFLLISAILVLLFLFLDPSPGSLAFLPSRLSASAPSLAPPLTPQQQSRAPRSRSPPHSRPDGSSATEKAEEGTTATASQPVTKADANGSASGPSAKESSGGSGSGGNSGARGVGADGETGTSVVAPVEKGGDDEEEAPVSVRWQTCSRLGRGVSSTDYIPCLDNVRAIKALRSRRHMEHRERHCPLPPRLRCLVPLPAGYRTPVPWPRSRDMTVSGHFFPNGGYHAEQNMVLILDVARFKYPLHWVPLQLILEAMNTTDNSTGGFMLISRKVAAPSLLHTIWYNNVPHPKLVEYKKDQNWVTRSGDYLVFPGGGTQFKDGVGRYIQFVEQIMPTIQWGRRTRTVLDVGCGVASFGGYLLDRNAITMSFAPKDEHEAQIQFALERGIPAFLAVIGTQKLPFPDNVFDVVHCGKPLLELNRVLRPGGYFIWSATPVYRQEQRDQDDWNAMVTLTKSICWRTVVKSQDVNGIGVVIYQKPASNSCYAERKTNEPPLCSERDGSRFPWYAPLDSCLFTTAITTSDERYNWPVPWPERLDVSYASVPDDSASNKEKFEADTKYWKQLISEVYFNDFPLNWSSIRNVMDMNAGFGGFAAALIDQPLWVMNAVPIGQPDTLPLIFNRGLIGAYHDWCESFSTYPRTYDLLHMSNLIGNLTNRCDLIDVVVEIDRILRPGRWFVLKDTLEMIKKIRPILKSLHYEIVVVKQQFLVATKSFWRPGKPASTSG

SEQ ID NO: 17944 - protein, 824 aa, Zea mays
  VARIANT 461..824: note = Derived polymorphism lacks residues 461 to 824
MDDGIDCYVVPQITGAGRNIFQGGNPLQESLPLLGLQLVLIVAITRVLYFLLKPFKQPRVGGIILGPSMLSRSPAFKETVFPARGDPVLHTIATFGLMYVIFLIGVRMDPMLVVRSGKKGVIIALSGFILPLVMTTAGLSGAAMVEEPDVTRRSTFLFALATSLSVTSFAVLSPILSELNLLNSDLGRTAMSASMTTDGIAWLIMVGYILAEAFLVSAVTSLWAFLSVAALGAVILFAVRPVALKVIERTPPGKPVDESYVFFFLLVVLLVGFYSDVIGTNSFHGALMLGLAIPDGPPLGTALGEKIDAMVSGLILPLYYAMTGLSTDVWSLHWGRLQLVVLLGWFGKMIGVMVPSLYLEIPLRDAVSLSLFMSSKGIVEVITFTFFLTNKLIGKNTYSVLMCSSVAITAVSVPVAGCMYDPARRYAVYKRRTLQHLKPDADLRILACIHDESHVSGTLALLEASHATPQTPIGLYLLQLVEIAGRSAPVFIPHNPRRNASRIAAPNAPSTDVDRIINVFFRHELRHPEGAVSVHPFTTISPYSSMHDEVCRLAVEKRTSLILLHYHKHHLLAGGVHASVGLRVVNRKVLEVAPCSVAVFVDRNAGNVGLCNFIPGPLQDCSGSSTASSGLSSSGPQFRAAVAALFFGGGDDREAMSYVARMARHPGVTVAVVRFLPARGIKDDPADRRVDNRAIEEVKALAARSRNMQVREELVGDMERIVEVLRGLDKAGYDLVIVGMRHRWYPVMPANGLSDWSECPELGVIGDLLASSDFDTPYSVLIMKQQDQAGLNAAVPGAQDQWHGALPPPPSRTISLAQSSMSKR

SEQ ID NO: 17945 - protein, 217 aa, Zea mays
  VARIANT 47: note = Ancestral polymorphism is S, Derived polymorphism is L
MASAPTPPPLLPVTNPASGSSPAAAGGSDAPIATPAFRLFLSRISDSARRSLSDRRPWGELLDRSAFSKPDSLSDATSRLRRNLAYFRVNYAAVVAFALGASLLAHPFSLLILLGLLAAWCFLYLFRPSDQPVVLFGRTFSDRETLLGLVGASFILLFFTSVASLIISGLLVGGALVAAHGAFRVPEDLFLDEPNAPPGSSAAQGLLSFLGGPGSGV

SEQ ID NO: 17946 - protein, 643 aa, Zea mays
  VARIANT 347..643: note = Derived polymorphism lacks residues 347 to 643
MLSHAPSQIPAASKPRLSSRRRSSRLGAKHLTATAAAASTLRSVSASRRGFVLFVPSLAAASAVLRPLPSAATEADDTESPAPHPPPTEESLSPQPAADAAETKPEASESAMSRVYDATVLGEPEALAGDARGRVWEKLAAARVVYLGEAELEPDPDDRVVELEIVRGLAGRCADAGRGLALALEAFPCDLQQQLDQFMDGRIDGGILKLYTSHWSQELWQEYEPLLCYCRDTGIKLIACGTPLEVKRTVQADGIRALKKAEREAYAPPAGSGFISSFMFGSGRSLIDKISSIDDSMFGSTSYLSEQARVVDDYTISQVITRELSDGDVSRLLIVVTGASHVMYGPRGSGVPGRISKKVPKKDQVVVLLDPERQVIRREGEVPIADFLWYSAAKPCTRNCFDRAEIARVMNAAGRRPEALPQDLQKGLDLGVVSPEILQNFFDLEKYPVMTELIHRFQGFRERLLADPKFLQRLAIEEVISITTTLLAQYERRKGRFFEEIDYVLTDTIRGSVVDFFTVWLPAPTISVLQYADDGSGSSLEFVKGLLGSLPDNAFQKNILGQDWSIKQRIAAVLVGGLKLASVGFISSVGAGVSSDLIYAARGIVKPSENVETGRKRSPIWKSAAVYSCFLGTSANLRYQKLY

SEQ ID NO: 17947 - protein, 161 aa, Zea mays
  VARIANT 53: note = Ancestral polymorphism is V, Derived polymorphism is L
  VARIANT 59..161: note = Derived polymorphism lacks residues 59 to 161
  VARIANT 62: note = Ancestral polymorphism is R, Derived polymorphism is H
  VARIANT 84: note = Ancestral polymorphism is A, Derived polymorphism is G
  VARIANT 88: note = Ancestral polymorphism is A, Derived polymorphism is T
MKRATDRHPDPHRAPARHPGFLASTQQRPAHPQELAAKLVVKRLVVASVTYFVKFATLQVVRIFGGWIEEEEAKMTVWENMQKGEAEAAIQKLVIKLEKKRPYSLERIFNTLRSGSRKTQVVRSTSTANQNQHISRTIKTAPNLSKNGQMSSLSGCFRQDL

SEQ ID NO: 17948 - protein, 103 aa, Zea mays
  VARIANT 7: note = Ancestral polymorphism is V, Derived polymorphism is D
  VARIANT 10: note = Ancestral polymorphism is K, Derived polymorphism is N
  VARIANT 68: note = Ancestral polymorphism is Y, Derived polymorphism is C
  VARIANT 71: note = Ancestral polymorphism is T, Derived polymorphism is I
  VARIANT 77: note = Ancestral polymorphism is L, Derived polymorphism is I
  VARIANT 81: note = Ancestral polymorphism is A, Derived polymorphism is T
  VARIANT 86: note = Ancestral polymorphism is C, Derived polymorphism is S
MLLLVQVKVKRRGDDKKYIAKVLARGVECDLALLSIENEEFWRGTEALHFGRLPCLQFEFLGKDSIRYFNTIEIEELVYKAIEGFCAGKKPGQDLFTRLIHLG

SEQ ID NO: 17949 - protein, 557 aa, Zea mays
  VARIANT 127..557: note = Derived polymorphism lacks residues 127 to 557
MAEVAARRAVGVPAGGGGDQANLAAVAAAMRGRGEVDTSSPFQSVRQAVDLFGGGAAAVSQWRHPQAPPRVHLRPEEEELMKVEEQTVKLEMELFVKEKETFKVLKELQETKQVIDGLKIQIEKVTWEDTNAAKGHADTGMVHPLPAVEQNTEPPVQSAKGTQSPLTTLIKLNQAKAFLNTDTVNMLKSQIQKEKGSLEKTRERLQFNLGKASSLEADLTKTVARLQAAKAPQPVLEPSEIWLQMKHLNADKARHKKASEDLRNEICELTAAIEHTRSKTKTLQFRILMAEKLKEASQRGESVALAEMEKLSNGRDPNGSTSDAVTLSVEEHSTLVLKAQEADGAARKKVDAAMQGLDQANRCKLELLERVEEAMAAVETSRKALEEAQRREESETKAKLVAEETLRKLRSDQIIQNWRPTNSSSVKFKNTALLAPRRAAAGAGIYDVNGLSLVAAGPNSVKTVSIGQILSMKLDRELEMTRTTTTSARKKKVSLGQILSQKYEMFSPLRIDHDCASHRQFQQPRRKRMGFVVYALLLARQRHRRRKAASCTRGGLS

SEQ ID NO: 17950 - protein, 150 aa, Zea mays
  VARIANT 115: note = Ancestral polymorphism is Y, Derived polymorphism is S
  VARIANT 93: note = Ancestral polymorphism is G, Derived polymorphism is V
  VARIANT 83: note = Ancestral polymorphism is R, Derived polymorphism is P
MGRPRWWAKRWKRSSGSARTLGVAAVVALVVPLCFVASSSRLPGTLGGGALASGTMAAAAGAHHPGDQAAATHGLQELFYIARRRRRRLAGGGLGSHPPRCASKCGRCDPCYPVSVPLPVPRGVLDLVTPESEYYPEAWRCRCRDQLYMP

SEQ ID NO: 17951 - protein, 135 aa, Zea mays
  VARIANT 6: note = Ancestral polymorphism is R, Derived polymorphism is S
MTFKRRNGGRNKHGRGHVKYIRCSNCAKCCPKDKAIKRFQVRNIVEQAAIRDVQEACVYDGYVLPKLYAKVHHCVSCAIHAHIVRVRSREKRRDRKPPERFRRREDRPAGGQGGPRPGPGAAATAPAPAPVAARP

SEQ ID NO: 17952 - protein, 228 aa, Zea mays
  VARIANT 22: note = Ancestral polymorphism is R, Derived polymorphism is M
MPLSPPPPSSSPRQAAIQELRRGTQLAELLRQQVELIPEPNRRHAAAVNVGEISMAMESSLSILQSQMEHPFSEPEVMAAALTAHSDGGTSGERNGGPVARTRKVRVRHRPGRGRPAAGDELPIKEILTEAPENDRFHWRKYGEKNILYSEYPRLYYKCGYSDDHKCPAKKYVQQQSNSYPPIFLVTLINEHTCDALFRDDEPIISSSSSGSSQVLDFTKASLSSPLH

SEQ ID NO: 17953 - protein, 317 aa, Zea mays
  VARIANT 77: note = Ancestral polymorphism is S, Derived polymorphism is W
MTMAMASMPPACAATELVAKGRESAAVLKAMLGQLPAAATPHDGLRDLAEQVLRCCDRALAALLRGAATEEAACSSSARKRRKQPAERQGGLAPPPPSPAATGSKRMRMSRGERGTRAEKKETMEDGFIWRKYGQKDIHGSNYPRLYFRCTYKDDRGCEARRQVQRSDTDPCAAYLITYFGEHTCCCRDDAVEAPAPFVIDFGLSAAACDDGLQLPQYGSPWPSCDDDGPGPVELQTPPPRTSADLCSSPPEEELRAGACDVAEFVAEQSTTVTAELMGRMTSPEWDGCLDWELGEGDSSLDVDGFDRYYFDYSDLL

SEQ ID NO: 17954 - protein, 163 aa, Zea mays
  VARIANT 147: note = Ancestral polymorphism is P, Derived polymorphism is S
  VARIANT 128: note = Ancestral polymorphism is P, Derived polymorphism is S
  VARIANT 89: note = Ancestral polymorphism is F, Derived polymorphism is L
  VARIANT 57: note = Ancestral polymorphism is D, Derived polymorphism is N
  VARIANT 56: note = Ancestral polymorphism is P, Derived polymorphism is A
  VARIANT 20: note = Ancestral polymorphism is R, Derived polymorphism is C
MACSSSSGSCSREFVMASKRILKELKDLQKDPPTSCSAGPAGEDMFHWQATIMGPPDSPYAGGVFLVNIHFPPDYPFKPPKVSFKTKVFHPNINSNGSICLDILKEQWSPALTISKVLLSICSLLTDPNPDDPLVPEIAHMYKTDRPKYESTARSWTQKYAMG

SEQ ID NO: 17955 - protein, 487 aa, Zea mays
  VARIANT 16..487: note = Derived polymorphism lacks residues 16 to 487
  VARIANT 160..487: note = Derived polymorphism lacks residues 160 to 487
  VARIANT 162..487: note = Derived polymorphism lacks residues 162 to 487
  VARIANT 254: note = Ancestral polymorphism is S, Derived polymorphism is L
  VARIANT 278..487: note = Derived polymorphism lacks residues 278 to 487
MSHSGTGPGGGGARHSDSMPAESETGNNNLGLESILPLPPQPQRPPLPPSVRGSSSSSVSAGNKRKTSGSSMGAPIVQSSSSAQAAENKDANKLVVADTSNTGTRAVASVDIAGLDDDEEDIPEDMTGTGKRQKRRTSIVWKYFTKETVEVEVNGKKFEQLWAYCNFPKCKQRYRAESNHGTNAFRNHLRSHHSIVKGQLELKAEKDNGKDVTTIQPFRYDPDASLRKFYLAVIMHEYPFNIVEHDYFVDFIKSLRPNFAFKSRVTARKDILDIYFEEKEKLYAQLKNVTCRFSATMDIWTSCQNKSYMCVTLHWIDDSWHIQKRIVGFFHVEGRHTGIKLAQCFTEVMVKWFAEKKLFSLTLDNASNNLVAVKDIIQDLRVNASSCLICDGIFFHIRCACHILNLVARDGLAVISKALEKIKDLVLTVKGSPLQWEELMKRATECGLDTSKGIQLDVSTRWNSTYMMLRDALHYVCLMSEIVIPNS

SEQ ID NO: 17956 - protein, 335 aa, Zea mays
  VARIANT 59: note = Ancestral polymorphism is N, Derived polymorphism is D
MDGLHGTDACFSPARAVSPQVRLPGPPDVGSQYLAELLQEHQKLGPFMQVLPICSRLLNQEIMRVLNIRRQHGAAVDFEKFAAASPNQIHPSPPMPNFCGNGFSPWNGMHSEHCLFVLMTMFFLLLSFYDNVALLSSCILYTTSKEVHHLNTNAIDQRVGVPQGAMGWQGPPQSPASYIVKKILRLEVPTETYPNFNFIGRLLGPRGNSLKRIEACTGCRVFIRGKGSIKDSGKEEQLKGRPGYEHLSEPLHILIEAELPANVIDARLAKAQEILEELLKPVDESQDYYKRQQLRELAMLNSPLREESPRSGGAPPSPFSKTVSGRPNKTGDTEL

SEQ ID NO: 17957 - protein, 493 aa, Zea mays
  VARIANT 151: note = Ancestral polymorphism is T, Derived polymorphism is I
MAHPSLPARGTGSPGKSSTPPRSSLHPRNGAQSARFLPRLRATALVMAYRRKQAIQRSATFVEDHRQTSSGGSASPAVASPRATRFADDSRRPDRSSCLAAQAMATSSDARGDGDLTLPSFSERLPTAAAASQCAAEPSSPVQDPVTHLYTSTTSLNDEGPKYDLELSKKDHRKHGFWGLVAQKAKVMLDENGTPRPQAKTSESLWSYDRVQGSLGGRLDIRGKIKDVLQQEGLLVVADSTTPGTSGGVVVAARKLQIRRKACSMANLTPATPDMESPRIIKASRDVANAMAAKLKLLQRELKALKADLSFSKEWCAQLEEENRLLRDGNHDADEDLIRQQLETLLAEKARLAHENTAYARENRFLREVVEYHQLNMQDVVGLDDDDIDADADYDVELEAEQYQDRRRSLPFHQLVLEEEEHQAADPGTEPQSPSRCTESPRMLSTNSGGSPDHESSQRMLNTNSGVGIAIESPRNRMLSTNSGESTQSFDQE

SEQ ID NO: 17958 - protein, 172 aa, Zea mays
  VARIANT 25: note = Ancestral polymorphism is R, Derived polymorphism is C
  VARIANT 37: note = Ancestral polymorphism is A, Derived polymorphism is V
  VARIANT 57: note = Ancestral polymorphism is R, Derived polymorphism is C
MSEFGGTPLERHCPHQHQGPQKARCRRRRIILCLAFAVLVLLLLAAAAAIALLVMLRTRDLVTELLSVTATGVLPSVVRPAADRLRPPQRHLLPRGPRPEPEPGRVPPRRCRHVPLLPLRDRGLRRGAGPGRGHRPDGRHGAGRPGRGGRRGRPGGLVADVLAGEMEFEART

SEQ ID NO: 17959 - protein, 487 aa, Zea mays
  VARIANT 231: note = Ancestral polymorphism is S, Derived polymorphism is I
MEPRRISASPRPCSVRRVVARKRPRQEAVVSSVRKLQRREISSRRDRAFAMSAAQERFRNIHLQEEFDTHDPKENTLLLPYLRKRSKIIEIVAARDIVFALSQSGVCAAFSREANERICFLNGSPDEVIRSLFYNKNNDSLITVSVYGSENFSALRCRTTRIEYALSMQLFFFFFGHVILLKSPSNYSRYIRRGQPDAGFPLFESESLKWPGFVEFDDVNGKVLTYSAQDSTYKVFDLKNYTLLYSVSDKNVQEIKISPGIMLLIYTRTNSSVPLKILSIEDGTVLKSFSHLLHRNKKVDFIEQFNEKLLVKQEGENLQILDVRNFQLTEVSRTEFMTPSAFIFLYELQLFLTFRNRSVAVWNFRGELVTSFEDHLLWHPDCNTNNIYITSDQDLIISYCKADSTDSSSEENAGSINISSILTGKCLAKINPGNSCKQKDPCKQKKAWRFQNTVSEALEDITALYYDEDRDEIYTGNRHGLVHVWSN

SEQ ID NO: 17960 - protein, 79 aa, Zea mays
  VARIANT 7: note = Ancestral polymorphism is R, Derived polymorphism is C
  VARIANT 15: note = Ancestral polymorphism is V, Derived polymorphism is G
  VARIANT 18: note = Ancestral polymorphism is S, Derived polymorphism is F
  VARIANT 23: note = Ancestral polymorphism is P, Derived polymorphism is L
  VARIANT 24..79: note = Derived polymorphism lacks residues 24 to 79
  VARIANT 26: note = Ancestral polymorphism is E, Derived polymorphism is V
  VARIANT 31: note = Ancestral polymorphism is L, Derived polymorphism is P
  VARIANT 32: note = Ancestral polymorphism is S, Derived polymorphism is P
  VARIANT 33: note = Ancestral polymorphism is F, Derived polymorphism is L
  VARIANT 50: note = Ancestral polymorphism is M, Derived polymorphism is I
  VARIANT 59: note = Ancestral polymorphism is A, Derived polymorphism is T
  VARIANT 66: note = Ancestral polymorphism is S, Derived polymorphism is L
  VARIANT 71: note = Ancestral polymorphism is K, Derived polymorphism is N
MKQIFKRLPQNRQIVLFSATQTPEVEKFAKLSFEKNEESKKSLFMLELMMISQRLLLKACNRVIVSFLAIKGSWFCMLS

SEQ ID NO: 17961 - protein, 895 aa, Zea mays
  VARIANT 745..895: note = Derived polymorphism lacks residues 745 to 895
  VARIANT 712..895: note = Derived polymorphism lacks residues 712 to 895
MATVELPAAGMAGMLPPRNATAQVAPGNNFSNPASVVCYSPMMVTAYGIWQGVNPLEFSLPLFILQTAIIVATTRLLVLLLKPIRQPRVIAEILAGVILGPSVMGQVEVWGTTVFPVRSLLTLETVAHLGLLYFLFLVGLEMDVNVIRRSGKKALIIAVAGMALPFCIGTATSFVFRHQVSKNVHQASFLLFLGVALSVTAFPVLARILAEIKLLNSDLGRIAMSAAIVNDMCAWILLALAIAISEVNSSAFSSLWVLLSGVFFVLACFYGVRPLMWWIARRVPEGEAISDVHVTLVLTGVMVAGVCTDAIGIHSVFGAFVYGLVIPSGQLGVVLIEKLEDFVTGLLLPLFFAISGLRSPHQHFPGARSRHRGAPRPRVHHGQLRQGHGHHPHRCLLHHDLPRRRRPRLSHEHQRTRGDDRPQHRKGQGGARRRVVCGDGAGVCGDDGARDARGDVGVPAGAAAGRLQAAQPAAVQARRRAAHAGVRAHHPQRAVHHLAAGAVKPDQAVPHLHLRAAPGGAHRARVQHARRPPLRRQPEPRLQLGPHLQRLREVRGERGRRVHPGADGGVAVPDDARGRVRPGGGQARVHHRAPVPQAADGGRRDGAHQRVPPGLQREHPLGGAVLGGHPRGPRPQRRGGAHGERAPRGAALLRRARRPGGARVRVAHGGAPGRLPHRRPVHPAGLQGPRAGAAAAHARVQRPRARHHHRPQERAADGRGVPERVPDAQRRQQRDPVHGAGGGQQRGHAGGHPGPGQRARAVHRGQAPRRGRVGADVGPGGVDGVAGAGAHRRPAGVVRVLQDGVRAGDAAVRDHDAAAGGRGTSSGSARDGRPRPAVRDQRQPADVGGRWAAAGGAAVPEGSDDLWRQLHCTRTHTHVGRFIDRGLYVYRDLNV

SEQ ID NO: 17962 - protein, 570 aa, Zea mays
  VARIANT 339..570: note = Derived polymorphism lacks residues 339 to 570
  VARIANT 333..570: note = Derived polymorphism lacks residues 333 to 570
  VARIANT 299: note = Ancestral polymorphism is T, Derived polymorphism is M
  VARIANT 291: note = Ancestral polymorphism is G, Derived polymorphism is S
  VARIANT 290: note = Ancestral polymorphism is P, Derived polymorphism is L
MATSTMRVAAGVLLVVSALATLARAEDPYLFFEWKVTYGTRSLLGVPQKVILINGEFPGPRINCSSNNNIVVNVFNQLDHPLLFTWSGRDMALHARRNGMQHRKNSWMDGMPGTQCPIAPNTNFTYKWQPKDQIGSFFYFPSIGMQRAAGGYGAISVVSRLLIPVPFDQPPPESDHAVLIGDWYTKDHEVLARQLDAGKSVGRPAGVLINGKGGKDLEAAAPMLTFEAGKTYRLRVCNTGIKASLNFRIQGHDMKLVELEGSHTLQDVYDSLDVHVGHCLSVLVDADQAPGDYYMVASTRFIHDAKSASAVIRYAGSSGAPPAPNMTEPPAGWAWSINQARSFRWNLTASAARPNPQGSYHYGQINITRTIKVMVSRGHIDGKLRYGFNGISHRDTETPLKLAEYFNVTDGVFSYNQMGDVPPAVNGPLHVIPNVITAEFRTFIEIVFENPEKSIDSLHLDGYAFFGVGMGPGTWSPEMRKTYNLLDTVSRHTIQVYPRSWTAIMLTFDNAGMWSVRSNVWERYYLGEQFYISVISPARSLRDEYNMPDNALRCGKVVGLPLPPSYAPAR

SEQ ID NO: 17963 - protein, 93 aa, Zea mays
  VARIANT 48: note = Ancestral polymorphism is K, Derived polymorphism is N
MERHAQKQAPLVLALSCLLLLAPALVSAVPTPRSLRLGGQQQHPPALKLTSSQQEAAIAAAMNMGRPTARVAVEVNDYQPSGPNNRHDPPKGP

SEQ ID NO: 17964 - protein, 104 aa, Zea mays
  VARIANT 31: note = Ancestral polymorphism is R, Derived polymorphism is T
  VARIANT 37: note = Ancestral polymorphism is D, Derived polymorphism is Y
  VARIANT 56: note = Ancestral polymorphism is H, Derived polymorphism is R
  VARIANT 63: note = Ancestral polymorphism is A, Derived polymorphism is V
MACCDPPRSGEGTPGDSNDIKPMYNLGKRKTYMTDEYVVVFNGMKEVVSDVPYVVRESIHVEAAPRIYNDVTKCLGFSREALMYAMNHMMEHKGHLPGVPGYDS

SEQ ID NO: 17965 - protein, 384 aa, Zea mays
  VARIANT 2: note = Ancestral polymorphism is D, Derived polymorphism is G
MDAFLHRLKRLDAYPKVNEDFYKRTLSGGIVTLVAAVVMLLLFISETRSYFYSSTETKLVVDTSRGERLRVNFDITFPSIPCTLLSVDTTDISGEQHHDIRHDIEKRRLNSHGNVIEARKEGIGGAKVERPLQKHGGRLDKGEQYCGTCYGAEESDEQCCNSCEEVREAYKKKGWALTNPDLIDQCAREDFIDRVKTQQDEGCNVLGFLDVSKVAGNFHFAPGKGFYESNIDVPELSLLEGGFNISHKINKLSFGTEFPGVVNPLDGAQWTQPASDGTYQYFIKVVPTIYTDIRGRGIHSNQFSVTEHFRDGNVRPKSQPGVFFFYDFSPIKVIFTEENRSLLHYLTNLCAIVGGVFTVSGIIDSFIYHGQKALKKKMELGKYR

SEQ ID NO: 17966 - protein, 354 aa, Zea mays
  VARIANT 227: note = Ancestral polymorphism is R, Derived polymorphism is H
  VARIANT 43: note = Ancestral polymorphism is Y, Derived polymorphism is C
MHPKARIHADPVREVDHFDCLPDSLVLLILNKVEDVRSLGRCYAVSKRLCGLVSLVHDVYVKIDRVVAVDGDAEGTLNLSSPKPRSIFSHFLKLMLFTIIKPFHNMRSPNGTARPLFPQLSQHSPAQVLRNFTHVRNLRIELPSGDVGTEEGVLLKWRAEYGSTLENCVILGGTRVDRKPVGGEHEPALEDNGSMPESFYTNGGLKLRVVWTISSLIAASTRHYLLRSIINGHPTLQSLVLTDADGQGTLCMGAKQLEEFRENQLSTSACSNRTQVPACNMKLKYAPYVELPGGMALQGATLVAIKPSPEGSNGSHPNRKEAEGFVFGAFDGPFKAAVKALMKRRTYLLEMNGF

SEQ ID NO: 17967 - protein, 304 aa, Zea mays
  VARIANT 27..304: note = Derived polymorphism lacks residues 27 to 304
  VARIANT 155: note = Ancestral polymorphism is G, Derived polymorphism is D
  VARIANT 169: note = Ancestral polymorphism is W, Derived polymorphism is S
  VARIANT 171: note = Ancestral polymorphism is D, Derived polymorphism is V
  VARIANT 173..304: note = Derived polymorphism lacks residues 173 to 304
  VARIANT 178: note = Ancestral polymorphism is G, Derived polymorphism is R
  VARIANT 187: note = Ancestral polymorphism is R, Derived polymorphism is W
  VARIANT 282..304: note = Derived polymorphism lacks residues 282 to 304
MATLASVPTPPNPNPVSGDLPSLLLQQQEEEEVSEPVPETALTPLTTSIDPTPSSGKESESDDSLSVWSTPSSAPTHVLAPSPAAKDILHISFNQDYGCFAAGTKSGFCIYNCDPFREIFRRDLTAEGGISVGARGGGIGVEMLFRCNILALVGGGDNPHYPPNKVMIWDDHQSRCIGELSFRSPVRGVRLRRERIIVVLENKIFVYNFTDLKLLYQIDTLSNPKGLCAVSQQPGSIVLVCPGAQKGLVRWNTIRQGRPSLSMHTLPASRALRCRGMGGSLRLLASRGLLLESTMQLKAISCRK

SEQ ID NO: 17968 - protein, 142 aa, Zea mays
  VARIANT 127: note = Ancestral polymorphism is R, Derived polymorphism is C
  VARIANT 117: note = Ancestral polymorphism is L, Derived polymorphism is V
  VARIANT 106: note = Ancestral polymorphism is D, Derived polymorphism is N
  VARIANT 105: note = Ancestral polymorphism is G, Derived polymorphism is S
  VARIANT 98: note = Ancestral polymorphism is R, Derived polymorphism is W
  VARIANT 97: note = Ancestral polymorphism is L, Derived polymorphism is P
  VARIANT 94: note = Ancestral polymorphism is A, Derived polymorphism is T
  VARIANT 91: note = Ancestral polymorphism is S, Derived polymorphism is F
  VARIANT 90: note = Ancestral polymorphism is G, Derived polymorphism is R
  VARIANT 89: note = Ancestral polymorphism is S, Derived polymorphism is N
  VARIANT 87: note = Ancestral polymorphism is A, Derived polymorphism is T
  VARIANT 85: note = Ancestral polymorphism is D, Derived polymorphism is N
  VARIANT 83: note = Ancestral polymorphism is V, Derived polymorphism is M
  VARIANT 79: note = Ancestral polymorphism is E, Derived polymorphism is K
  VARIANT 78: note = Ancestral polymorphism is A, Derived polymorphism is T
  VARIANT 76: note = Ancestral polymorphism is R, Derived polymorphism is H
  VARIANT 72..142: note = Derived polymorphism lacks residues 72 to 142
  VARIANT 70: note = Ancestral polymorphism is A, Derived polymorphism is V
  VARIANT 65: note = Ancestral polymorphism is A, Derived polymorphism is T
  VARIANT 64: note = Ancestral polymorphism is A, Derived polymorphism is V
  VARIANT 63: note = Ancestral polymorphism is V, Derived polymorphism is A
  VARIANT 59: note = Ancestral polymorphism is A, Derived polymorphism is T
  VARIANT 58: note = Ancestral polymorphism is A, Derived polymorphism is T
  VARIANT 56: note = Ancestral polymorphism is D, Derived polymorphism is G
  VARIANT 51: note = Ancestral polymorphism is G, Derived polymorphism is S
  VARIANT 50: note = Ancestral polymorphism is A, Derived polymorphism is V
  VARIANT 46: note = Ancestral polymorphism is A, Derived polymorphism is V
  VARIANT 41: note = Ancestral polymorphism is R, Derived polymorphism is C
  VARIANT 40: note = Ancestral polymorphism is R, Derived polymorphism is W
  VARIANT 37: note = Ancestral polymorphism is A, Derived polymorphism is T
  VARIANT 35: note = Ancestral polymorphism is D, Derived polymorphism is N
  VARIANT 33: note = Ancestral polymorphism is N, Derived polymorphism is K
  VARIANT 32..142: note = Derived polymorphism lacks residues 32 to 142
  VARIANT 28: note = Ancestral polymorphism is R, Derived polymorphism is L
  VARIANT 26: note = Ancestral polymorphism is A, Derived polymorphism is V
  VARIANT 20: note = Ancestral polymorphism is T, Derived polymorphism is M
  VARIANT 16: note = Ancestral polymorphism is G, Derived polymorphism is S
  VARIANT 9: note = Ancestral polymorphism is L, Derived polymorphism is V
MCVRASLLLPAGGLAGRIATGELVTALRSLGQNVDEAEARRFLEDAGVAAGAGDIDLAAFLAVAARKMGARQSEARLAECFDVFDDACSGSIPAEQLRQVMVSHGDRLTEEEADAMLREADPRGEGRVEYKHYVKVLLRDKK

SEQ ID NO: 17969 - protein, 113 aa, Zea mays
  VARIANT 39: note = Ancestral polymorphism is R, Derived polymorphism is K
  VARIANT 2: note = Ancestral polymorphism is R, Derived polymorphism is S
MRSLGQNPTEAELQDMINEVDADGNGTIDFPEFLNLMARKMKDTDSEEELKEAFRVFDKDQNGFISAAELRHVMTNLGEKLTDEEVDEMIREADVDGDGQINYEEFVKVMMAK

SEQ ID NO: 17970 - protein, 292 aa, Zea mays
  VARIANT 72: note = Ancestral polymorphism is C, Derived polymorphism is R
  VARIANT 116: note = Ancestral polymorphism is A, Derived polymorphism is T
  VARIANT 142: note = Ancestral polymorphism is P, Derived polymorphism is T
  VARIANT 152: note = Ancestral polymorphism is S, Derived polymorphism is F
  VARIANT 238: note = Ancestral polymorphism is S, Derived polymorphism is F
MSESALTIRRLSGPSNGGGNAGASSCAVGTWGGGGGGGGNAARIRGVNVGLMDEKVLQLVFLALNWDPQSLCAVARVSRRLRAVAERVLWRELCVSRAPRMVAALTGGPAGSAPAAGRVGGGWPALAKLLLFCCGAAGAGVTGHFAPVSRFSKTSGRSFLPRRCAGDLLYVSDPCEHAVAGADDVGVYRGVFRGFMRSRTRAWLVGHRAALDPRARCPYCGARVWSMAAAGLAPRSASRRLGAYEGRLEYFVCVSGHLHGSCWLARLSDSEGTGPDADDTSAGASDEDDADL

SEQ ID NO: 17971 - protein, 84 aa, Zea mays
  VARIANT 29: note = Ancestral polymorphism is P, Derived polymorphism is L
  VARIANT 27..84: note = Derived polymorphism lacks residues 27 to 84
  VARIANT 18: note = Ancestral polymorphism is A, Derived polymorphism is V
  VARIANT 4: note = Ancestral polymorphism is R, Derived polymorphism is H
MGRRFLMVFTVALIARSAEASICIYDQEPFCEVDNASSSLANTSLPVACSQGEGRWNTGPQMASAVQAAMIDEASSDLCSSPPG

SEQ ID NO: 17972 - protein, 446 aa, Zea mays
  VARIANT 217: note = Ancestral polymorphism is P, Derived polymorphism is L
MATRNHRAAAAPQPANRGAARVAGKQNAAAAAAGTRRALGDIGNVVSDALDRAIKLPEGIHRPITRSFGAQLMKAALANKNADAAVAPAQPVAARAVTKPARKVTTKNVPRPGAGQAPKENKKPSAEGAAAGSGRSVQKNRRKKPACTLSTVLSARSKAACGLTEKPKEPIEDIDKFDGDNQLALVDYVEDIYTFYKTAQHESRPIDYMGNQPELSPRMRSILADWLIESHRRFQLMPETLYLTIYIVDRYLSLQPTPRRELQLVGVAALLIACKYEEIWAPEVNDLIHIADGAFNRSQILAAEKAILNSMEWNLTVPTPYHFLLRFAKAAGSADEQLQHTINFFGELALMDYGMVMTNPSTAAACAVYAARLTLGRSPLWTETLKHHTGLNEQQIMEGAKTLVGSHAASASPDARLKAVYQKYATEQFGRVALHPPAPAALPDLV

SEQ ID NO: 17973 - protein, 346 aa, Zea mays
  VARIANT 10: note = Ancestral polymorphism is G, Derived polymorphism is D
  VARIANT 26: note = Ancestral polymorphism is V, Derived polymorphism is A
  VARIANT 30: note = Ancestral polymorphism is S, Derived polymorphism is P
  VARIANT 31: note = Ancestral polymorphism is G, Derived polymorphism is R
  VARIANT 32: note = Ancestral polymorphism is G, Derived polymorphism is D
  VARIANT 98: note = Ancestral polymorphism is A, Derived polymorphism is G
  VARIANT 99: note = Ancestral polymorphism is A, Derived polymorphism is T
  VARIANT 106: note = Ancestral polymorphism is T, Derived polymorphism is I
  VARIANT 111: note = Ancestral polymorphism is G, Derived polymorphism is D
  VARIANT 118..346: note = Derived polymorphism lacks residues 118 to 346
  VARIANT 132: note = Ancestral polymorphism is P, Derived polymorphism is L
  VARIANT 137..346: note = Derived polymorphism lacks residues 137 to 346
  VARIANT 178: note = Ancestral polymorphism is L, Derived polymorphism is P
  VARIANT 227: note = Ancestral polymorphism is N, Derived polymorphism is I
  VARIANT 240..346: note = Derived polymorphism lacks residues 240 to 346
  VARIANT 274: note = Ancestral polymorphism is F, Derived polymorphism is Y
  VARIANT 284: note = Ancestral polymorphism is A, Derived polymorphism is V
  VARIANT 303: note = Ancestral polymorphism is G, Derived polymorphism is V
MMARRKRKDGGGGWWAKVVINFPHSVNLCSGGFTSHAALFASYNVHLLTALVLQRGSLSLSAVIGEMQSGSKNILVISDSSGSKMGKERAFCAEGDLAALVRSGFTNASTGRTVSYNEGTWCSTDHSSTYSPDCILWIPGYKNITAYFGCYTLAHAASERGAKQTSLFRARTLKEYQPEILLFIFVGYAGGFFLEHSFFVDDVINVRYYRNITANTLAVLEAMAAHNVRTLIYSSTCATYGEPDKMPIAEGTPMFPINPYGKAKKMAEDVILDFSKSKKLDMMAVMILRYFNVIGSDLKGRLGEAPRHELRKHGCISGACFDATLGIIPGLKSLRVAWVWQKAHRL

SEQ ID NO: 17974 - protein, 242 aa, Zea mays
  VARIANT 167: note = Ancestral polymorphism is P, Derived polymorphism is L
  VARIANT 230..242: note = Ancestral polymorphism lacks residues 230 to 242
MSSSRPAHSSSSSSRTRQSSRARILAQTTLDAELNAEYEESGDSFDYSKLVEAQRSTPPEQQGRSGKVIAYLQHIQRGKLIQPFGCLLALDEKSFRVIAFSENTPEMLTTVSHAVPNVDDPPKLGIGTNVRSLFTDPGATTLQKALGFADVSLLNPILVQCKTSGKPFYAIVHRVTGCLVVVFEPVKPTEFPATVAGALQSYKLAAKAIFKMQSYSVFIYILNTYLLFFRESTRICPFCIVK

SEQ ID NO: 17975 - protein, 345 aa, Zea mays
  VARIANT 228: note = Ancestral polymorphism is S, Derived polymorphism is F
  VARIANT 222: note = Ancestral polymorphism is I, Derived polymorphism is V
MAYASPGTDDTSTDLDTDEKNHMLELGQLVSLTASDSGNKAKDKLLGQKALRRLAQNREAARKSRLRKKAYVEQLENSRLKLSQLEQELQRARQQGIFIPTPGDDQQPNSTSEKGALAFDKDYAGWEDEHRKQISELRAALSAHAGDDELRRIVDGVMAHHHEAFRLKCVAARADAFHVLSGMWKTPVERCFMWLGGFRPSEILKFLASHLDPLTERQLASVHGLQQSSQQAEEGISQRVQALQQSVAETLASSGSPCLPVPAGRAPPPGDDAAPDCSGTMAAAVAKLVALESLVHEADGLRRQTLEQMQRVLTTRQSARALLVISDYLSRLRALSSLWIARPRE

SEQ ID NO: 17976 - protein, 520 aa, Zea mays
  VARIANT 177: note = Ancestral polymorphism is V, Derived polymorphism is L
MGNCCPGSSSSAEPAPPQPPDPSGSSRPVASPASVSPTAAPAPARPPAPIGPVLGRPMEDVRATYAVGKELGRGQFGVTSLCTHKATGHRFACKTISKRKLSTKEDVEDVRREVQIMYHLSGQPGVVELKGAYEDKGSVHLVMELCAGGELFDRIIARGHYTERAAASLLRTIVEIVHTCHSMGVIHRDLKPENFLLLSKDEDAPLKATDFGLSVFFKEGEVFRDIVGSAYYIAPEVLKRSYGPEADIWSVGVIVYILLSGVPPFWAESEHGIFNAILRGQVDFTSDPWPRISQGAKDLVRKMLNPDPKQRISAYDVLNHPWIKEDGEAPDTPLDNAVLGRLKQFRAMNQFKKAALRVIAGCLSEEEIRGLKEMFKSMDSDSSGTITVDELRRGLANKGTKLSEAEVQQLMEAADADGNGTIDYEEFITATMHMNRMDRDEHLYTAFQYFDKDNSGYITMEELEQALREKGLLDGRDIKEIVAEVDADNDGRINYTEFAAMMRKGDPEPSNPKKRRDIVL

SEQ ID NO: 17977 - protein, 285 aa, Zea mays
  VARIANT 121: note = Ancestral polymorphism is T, Derived polymorphism is R
MGNASAKEGENGHMAASPEPAAPNGGGGSSSSAGGAAARPPPLSPPDDVMLERPPPVPYLFVPQVPETPLHRPTELSPLLNHSPVNESTDHHSQEQGIPTLITWSQGGDEVFLEGSWDNWTSRRALERSGKDHAVLLVLPSGVYHYRIIVDGELRYIPELPHAADERGRVANVLDVHDYVPESLDSVAEFEAPPSPVHSYDLHCPGDEEFAKEPPTLPPQLLVSVLGGDVDSAGHGNQALKPQHVVLDHLFIEKGWGSQSLLALGVTHRFESKYVSFVLYKPLER

SEQ ID NO: 17978 - protein, 235 aa, Zea mays
  VARIANT 209..235: note = Derived polymorphism lacks residues 209 to 235
  VARIANT 151..235: note = Derived polymorphism lacks residues 151 to 235
MDDGADLPCQLLFSHPEMPHSFDEFFSSATTTTTCTHTHSCDPPGPSAAMHTHTCLHTHTQVLGSGGEDDGSAKPRRPLGNREAVRKYREKKKARAAFLEGEVKKLRAANQQLVRRLQDHAALEAEVARLRGLLLDVRGRIDAEVGVSPFQRPCSAGSVECGADPALRFDGSSEVVGGGGWEKSSSPQVADCRIDEGGGGMSRELDVLEGLRHSIDAGATFVSSDSLAERSCLPG

SEQ ID NO: 17979 - protein, 278 aa, Zea mays
  VARIANT 243: note = Ancestral polymorphism is G, Derived polymorphism is D
  VARIANT 249: note = Ancestral polymorphism is S, Derived polymorphism is G
MASPSTEAPPLPTLRDVIAHDDDDDHFIAEEEEDEEWDDMSKRMSRLSMEGSEAGDADDEDDGGEDEGEEDDDEFDDVRSDVNAAATYRAWPPRDEPQQAPSAASLPGTPDRGAQAPWWPGPSAKGYASETEARWPPGADGRGGRRQRQRMAAREVWLERAWRTRKQRRQLQEEVPVPVVVLGGGGGDSPASRGVAMDMEEVRACRDLGLDLPCDWTVEIPSCALSVSGVDTASSGGNSPASGSWRISSPGDDPKDVKARLKVWAQAVALASASRLGS

SEQ ID NO: 17980 - protein, 181 aa, Zea mays
  VARIANT 78: note = Ancestral polymorphism is D, Derived polymorphism is Y
MIFTFYKAQGLSVGASLVEEDKLDLATSLLAKAKEKGVSLMLPTDVVIADKFAPDANSQIVPASAIPDGWMGLDIGPDSIAAFNAALETTQTVIWNGPMGVFEYDKFAIGTEAVAKKLAELSRKGVTTIIGGGDSVAAVEKVGVADVMSHISTGGGASLELLEGKELPGVTALDEAATVTV

SEQ ID NO: 17981 - protein, 281 aa, Zea mays
  VARIANT 206: note = Ancestral polymorphism is G, Derived polymorphism is S
  VARIANT 176: note = Ancestral polymorphism is N, Derived polymorphism is D
  VARIANT 166: note = Ancestral polymorphism is R, Derived polymorphism is M
  VARIANT 141..281: note = Derived polymorphism lacks residues 141 to 281
  VARIANT 138: note = Ancestral polymorphism is G, Derived polymorphism is R
  VARIANT 130: note = Ancestral polymorphism is I, Derived polymorphism is S
  VARIANT 123: note = Ancestral polymorphism is G, Derived polymorphism is C
  VARIANT 63: note = Ancestral polymorphism is T, Derived polymorphism is I
MACMPAVSAPSVLAPAPASTRTHLCYSTEMRRGALSLRPARAIPTLRLGGHRDARGAVVVRATAAEGAVELQAKVTSKCFFDVEVGGEPAGRIVIGLFGEVVPKTVDNFRALCTGEKGYGYKGCSFHRIIKDFMIQGGDFQQNNGTGGRSIYGECFDDENFTRAYRKLILNEVLLNCKNVDVSGAISLVLKLRGSLAYFVAVKHVGPGVLSMANAGPNTNGSQFFICTVKTPWLDNRHVVFGHVLEGMDVVKQLESQETSRSDTPKQPCRIVNCGEVPLDS

SEQ ID NO: 17982 - protein, 205 aa, Zea mays
  VARIANT 63: note = Ancestral polymorphism is E, Derived polymorphism is D
MQQMEWDMRGGGHGSAVGDGGPGGRGLTVGGGVALAVGGGDQQRVEAHYRGVRKRPWGRYAAEIRDPWRKTRVWLGTYDTPVEAAMAYDRAAVALRGSKARTNFTAGRGGARATPVQARPLPHPALAPGHFSGLDATHSSPWHVVYLPPPRLHQQALAPPMPLVAVAGDVATSLPSTALELRTGPKALPFDLNEPPSLLFGSLSP

SEQ ID NO: 17983 - protein, 512 aa, Zea mays
  VARIANT 491: note = Ancestral polymorphism is P, Derived polymorphism is L
MPAQKRPLPSSASPGSDADVEEAPGADADGCGGADQRSPKVTLNGVEERDGGPLQAKDQRHDSDADDEEEGDREGGGGGDGSGSGGDDDCDSQSSQSDGVMDEFTLVKLVDVRKEVQCPICLGIIRKTRTVMECLHRFCRDCIDKSMRLGNNECPACRTHCASRRSLRDDPNYDALILALYPDIDKYEEEELAFSEEERTRNKRIQESIAETFRRQTEALVKKRSTVKATDAASTRKTRRNMRPRRRGRISSPDIAPTDFDDDDREENGDDGSKESSSVDDHSPDVRPKRSRRWPMPRRSPAKAIGNTDNSIEDNDDSGGARDFMTASPLRGEMLAWGKNGTRSQTRHGNSSGSSGRMGRSGRVAKLVDQFRNADDFDNENVRNTNMPMDTFVRKVTELNLYLVLLPLDGQSVPKLEKPYLSCLPTLSVRHLCQFVALQLSRQPKEVEIYIRKSKDACLSANYTCKYETKPEQPNGLERLWEEKSLSDLYPSLATRQGDLELLYSLKAQGQG

SEQ ID NO: 17984 - protein, 87 aa, Zea mays
  VARIANT 79: note = Ancestral polymorphism is P, Derived polymorphism is L
  VARIANT 71: note = Ancestral polymorphism is S, Derived polymorphism is I
  VARIANT 69: note = Ancestral polymorphism is V, Derived polymorphism is D
  VARIANT 65: note = Ancestral polymorphism is E, Derived polymorphism is D
  VARIANT 64..87: note = Derived polymorphism lacks residues 64 to 87
  VARIANT 63: note = Ancestral polymorphism is G, Derived polymorphism is V
  VARIANT 57: note = Ancestral polymorphism is L, Derived polymorphism is Q
  VARIANT 50: note = Ancestral polymorphism is A, Derived polymorphism is T
  VARIANT 46: note = Ancestral polymorphism is D, Derived polymorphism is Y
  VARIANT 42: note = Ancestral polymorphism is G, Derived polymorphism is R
  VARIANT 41: note = Ancestral polymorphism is S, Derived polymorphism is P
  VARIANT 37: note = Ancestral polymorphism is A, Derived polymorphism is V
  VARIANT 28: note = Ancestral polymorphism is G, Derived polymorphism is R
  VARIANT 16: note = Ancestral polymorphism is A, Derived polymorphism is V
  VARIANT 14..87: note = Derived polymorphism lacks residues 14 to 87
  VARIANT 3: note = Ancestral polymorphism is E, Derived polymorphism is K
MQEMSMDYHFKVEQEAGSFLCNFFGYNGTAGVWRTQAIVESGGWEDQTTAEDMDLALRAWLMGWEFVYVGSIKVKSELPSTLKAYQS

SEQ ID NO: 17985 - protein, 283 aa, Zea mays
  VARIANT 208: note = Ancestral polymorphism is D, Derived polymorphism is N
  VARIANT 207: note = Ancestral polymorphism is R, Derived polymorphism is C
  VARIANT 179..283: note = Derived polymorphism lacks residues 179 to 283
  VARIANT 171: note = Ancestral polymorphism is G, Derived polymorphism is D
  VARIANT 153..283: note = Derived polymorphism lacks residues 153 to 283
  VARIANT 108: note = Ancestral polymorphism is T, Derived polymorphism is S
  VARIANT 77: note = Ancestral polymorphism is W, Derived polymorphism is S
  VARIANT 72: note = Ancestral polymorphism is G, Derived polymorphism is R
  VARIANT 63: note = Ancestral polymorphism is I, Derived polymorphism is N
  VARIANT 29: note = Ancestral polymorphism is W, Derived polymorphism is C
  VARIANT 8: note = Ancestral polymorphism is T, Derived polymorphism is I
MAYGDRVITFEDSEKESEYGYVRKDMKHWPLIAPLPSYGRGRDEPGARYSNFIGGSNLTDVIITGKNGTINGKGQVWWDKFHAKELKFIRGHLLELLYSENIIISNVTFVNAPYWNLHPTYCTGVTILAPVNSPNTDGIDPKSSSRVKIEDCYIVSGDDCVAVKSGWDEYGIRFNMPSQHIVIQRLTSVSPTSAMIALSSEMSGGIRDVRAKDSVAINTESAIRVKTLGAIAGVLSRNELVAAALFTLAINHKQVDVFSFGIVLWEILTGEEPYANMHCGAII

SEQ ID NO: 17986 - protein, 47 aa, Zea mays
  VARIANT 24..47: note = Derived polymorphism lacks residues 24 to 47
MAAPVTPCQSKDNEHQRGQASDDQGTTAGLPLFLASTHPPPPPTTRE

SEQ ID NO: 17987 - protein, 480 aa, Zea mays
  VARIANT 57: note = Ancestral polymorphism is S, Derived polymorphism is W
  VARIANT 27: note = Ancestral polymorphism is T, Derived polymorphism is I
MASAKQSKKMRILLIPFFATSHIGPYIDFAVRLAAARPGAVEPTVAVTPANVAVVRSALERHGPAASGTVRIVTYPFPRVDGLAPGVENLSTAGDDAWRIDAAAIDEALSRPAQEALLRERSPDAVVSDYHFFWTSSIAAELGLPCVVFSVIAPFSGLVMRILAGAVVSGSRDVTVPGLPGPEIRIPVSELPEFLRRPAKDQGTFSPCNAAQARCLGVAYNTFAGMEQEYREANVRAKSLKRCYFVGPVSLPLPAAAAGTSESPCIRWLDSRPSCSVVYVCFGTYAAISEDQLRELALGLEASGEPFLWVVRADGWTPPEGWEQRVGERGMLVRGWAPQTAVLAHPAVGAFLTHCGSSSLLEAAAAGVPMLTWPLVFDQFIEERLVTDVLGIGERVWSGARSTRYEERELVPAEAVARAVARFLEPGGPGEAARGRARDLAVKAHAAVAEGGSSSRDLHRLIDDLVEARAATSSCNADSE

SEQ ID NO: 17988 - protein, 480 aa, Zea mays
  VARIANT 98..480: note = Derived polymorphism lacks residues 98 to 480
MAALESNKKLRLLLVPFFATSHIGPFTDFAVRLATANPDAVELTLAVTPANVHVVRSALGRYGAEAGGVVKIATYPFPRVDGLAPGVENLSAAGDDGWRIDAVAVDEASTRPAQEALIREQSPDAVITDVHFIWNNAVAGELGVPCVTFSVVGIFSTLVMYHLGRDVVIRDGQEVTVPGLPLAGAGDTDPRIRVAGVPETPAGARRGQAVPCGDGQVLRRHPQLVRGSGAAILRHVREQRIPEARLLRRAPLAAVTTGRSKHQRFAMPRVARHQAEVFSGVRMLRHLRCHLGGPAPGTGAWARSFKEAIPVGGEGGRMDAAGGVGGARRREGDASERVGAADGDTVPSSGWRVPDALRVELAAGGGGGRRADADVAAGVRPVHRGETGDGGPQDRGEGVERDTEHEIRGAKGRGMAAEVVARAVARFLEPGGTGEAARSKAGVLAAKARSAVAEGGSSFCDLRRLVNDLIEARTAAGTNA

SEQ ID NO: 17989 - protein, 174 aa, Zea mays
  VARIANT 92..174: note = Derived polymorphism lacks residues 92 to 174
  VARIANT 73: note = Ancestral polymorphism is R, Derived polymorphism is H
  VARIANT 62: note = Ancestral polymorphism is S, Derived polymorphism is F
  VARIANT 61..174: note = Derived polymorphism lacks residues 61 to 174
MLSKAMVVVAWSTVSARQHRMSGRRRDARRKSVTISPELSQSQNRIYLHDTVNGGWLYLFRSNLFGMQYSRKRYFVLEDAALRCFKSVPSSKGEYLMAKPRNNLRTVQYGQQLQQGEKDRHQVLKDFSKLLDDQDAAPEALLGDIPFHSGCNVGLMDEGIVAAMAYPIIHATCE

SEQ ID NO: 17990 - protein, 190 aa, Zea mays
  VARIANT 11: note = Ancestral polymorphism is Q, Derived polymorphism is H
  VARIANT 48: note = Ancestral polymorphism is E, Derived polymorphism is D
  VARIANT 98: note = Ancestral polymorphism is E, Derived polymorphism is D
  VARIANT 104: note = Ancestral polymorphism is D, Derived polymorphism is Y
MPGRRAIEVRQLLPAGGDAATPRWRMSLLENTFSGFVQGAGAEAVFADGSLFSPFLFGKFFDPADPFPLWEFEPDVLLAALRRGNARTAVDWAETDSEYYLTAYVPGGRRCDVEVSGDAMKVVDISGLWRAPPADGRDWRAGRWWEHGFVRRVELPEDAEWRKVEACFDDSEGSLEIRVPKTADARQATA

SEQ ID NO: 17991 - protein, 633 aa, Zea mays
  VARIANT 75: note = Ancestral polymorphism is A, Derived polymorphism is D
MPEAPVVTMRDTAAAAPPATHRDLLEYIERVTAGAAQVQRRVLSEILAQNAPAEYLRRLGVSGAAPGAVEAFRRAAPLVTYEDILPDVLRIANGDTSPILSGKPIREFLTSSGTSGGERKLMPAIADEMDRRSLLYSLLMPVMSQAVPGLDRGRCMYLYFVKAESRTPGGHPARPVLTSFYRSRHFLERPHDPYTVHTSPDEAVLCVDAYQSMYAQLLCGLVHRADVLRVGAVFASGFLRAIRFLEKHWQRLCRDLRRGALGAEVTDRSVRAAVARVLRADPALADAVEAECARPSWQGIIRRVWPGTKYIDVIVTGAMAQYIPTLEFYGGGLPLTCTMYASSESYFGINLNPMCKPSEVAYTLIPTMCYFEFLPLPQPGPGGTDDADPDHRDLVDLVDVKLGHEYELVVTTYSGLYRYRVGDVLRVAGFKNQAPMFKFLRRKNVVLSIDSDKTDEAELHAAVSGAVQHLAPFGASLVEYTSYADAGTIPGHYVLFWELRLRAGDVPVPVPASVFEDCCLAVEEALNSVYRQGRAADRSIGPLEIRVVSDGTFDRLMDYALARGASINQYKVPRCVHPGPVVELLDGRVQASYVSPKCPKWSPGGGKQWSSDAAAKKPAAAAGSNNGGGAVVA

SEQ ID NO: 17992 - protein, 204 aa, Zea mays
  VARIANT 172: note = Ancestral polymorphism is D, Derived polymorphism is N
  VARIANT 135: note = Ancestral polymorphism is T, Derived polymorphism is R
  VARIANT 107: note = Ancestral polymorphism is G, Derived polymorphism is S
  VARIANT 78: note = Ancestral polymorphism is F, Derived polymorphism is L
  VARIANT 75: note = Ancestral polymorphism is L, Derived polymorphism is F
  VARIANT 60: note = Ancestral polymorphism is A, Derived polymorphism is V
  VARIANT 38: note = Ancestral polymorphism is W, Derived polymorphism is C
MAVKVYVVFYSTYGHVAKLAEEMKKGAASVEGVEVKVWQVPEILSEEVLGKMGAPPKTDAPVITPQELAEADGVLFGFPTRFGMMAAQMKAFFDATGGLWREQSLAGKPAGLFFSTGSQGGGQETTPLTAVTQLTHHGMVFVPVGYTFGAKIFDMESVHGGSPYGAGTFAGDGSRWPTELELEHAFHQGKYFAGIAKRLKGGSA

SEQ ID NO: 17993 - protein, 96 aa, Zea mays
  VARIANT 24: note = Ancestral polymorphism is S, Derived polymorphism is F
  VARIANT 61: note = Ancestral polymorphism is V, Derived polymorphism is L
MPAKYLPWWKACSSSSSVGHRDPSPANVPAPYGLPPCTLSMSNILAPNVYPTGTNTIPWCVSCVTAVSLAATPRGKRYPLLLRFDRLVLQGEGNML

SEQ ID NO: 17994 - protein, 344 aa, Zea mays
  VARIANT 55: note = Ancestral polymorphism is R, Derived polymorphism is W
MAGKHGRNGFDDDNVNPFAVSAPLVTRTTLSLRRPFHSPRSRGGVGVFLRSDHLRVALAFEICGLVAVHVLVLSVVRGGSVPPATNSRLSPLSHEPADFYNVDIPLESSKDLKKKEKELQAMEAELNKRERELKRKEDAASRAGIVIEEKNWPPFFPLIHHDISNEIPIHLQRMQYLAFSSFLGLIACLFWNIIATTTAWIKGEGTTNRVMIWLLAIIYFISGVPGAYVLWYRPLYNAMRTESALKFGWFFLFYMIHIIFCVWAAVAPPFPFKGKSLAGILPAIDVIGKNAIVGIFYFVGFGLFCLESLMSIGVIQQVYMYFRGSGKAAEIKREAARSALSSAF

SEQ ID NO: 17995 - protein, 108 aa, Zea mays
  VARIANT 80..108: note = Ancestral polymorphism lacks residues 80 to 108
MPSCPISDLVVVALIAPVVAGLLLLLLRSLACSSRSMRKGLNGWNKSSSMLRSGEFVAAPSMGFDKKKSALVVAGTGSGSSIPDSSTYGRAVSVEETDGFVLKAVPFL

SEQ ID NO: 17996 - protein, 181 aa, Zea mays
  VARIANT 82: note = Ancestral polymorphism is P, Derived polymorphism is Q
  VARIANT 97: note = Ancestral polymorphism is I, Derived polymorphism is T
  VARIANT 158: note = Ancestral polymorphism is A, Derived polymorphism is S
MAIISGNSSATAAAYVQGSNEPLGVEVTETDSAPAVTETGNAPTVTGRPTCSVPSEQFGGDDGTHSGNNGAEESSDTKQPPPSKKQRVYTDDDLVVTMSRSLGELASAIKRLSEQPGLPVPKGLYEELKSIPGFEEAHLEHYYAYLCENPPLARAFYALPQLSSKVTWVARYVKSHSSELM

SEQ ID NO: 17997 - protein, 117 aa, Zea mays
  VARIANT 45..117: note = Derived polymorphism lacks residues 45 to 117
  VARIANT 69: note = Ancestral polymorphism is I, Derived polymorphism is T
MNNPLAVYLSFSFSSLKSFFLTCRLNRSAVNLIICRNKMKCNACWRDLEGQAVSTTCGHLLCADDARKILNNDGTCPICDQVLSKSHMKPMDINPGDDWTNMAMVGISPQICILHFH

SEQ ID NO: 17998 - protein, 188 aa, Zea mays
  VARIANT 34: note = Ancestral polymorphism is R, Derived polymorphism is T
  VARIANT 53: note = Ancestral polymorphism is E, Derived polymorphism is G
  VARIANT 55: note = Ancestral polymorphism is P, Derived polymorphism is S
  VARIANT 63: note = Ancestral polymorphism is S, Derived polymorphism is N
  VARIANT 138: note = Ancestral polymorphism is A, Derived polymorphism is T
MFIIIMLRLHTDFSFLEMNPFAMVNREPYPLDIRGELDDTTAFKNFKKWGGIEFPLPFGRVLSPTESFIHELDEKVLISGLCCSSFALRLDLNLRTMFVGLSPCFGPHPPKRAEEQMKAQGREEEPAVGVRRGCHRHARPGREHHVGPHAVDAIGRDQALESGSKIVYVVSQVLFHEQVQALEKSGDW

SEQ ID NO: 17999 - protein, 90 aa, Zea mays
  VARIANT 14: note = Ancestral polymorphism is A, Derived polymorphism is T
  VARIANT 16: note = Ancestral polymorphism is W, Derived polymorphism is C
  VARIANT 21: note = Ancestral polymorphism is H, Derived polymorphism is L
  VARIANT 27: note = Ancestral polymorphism is R, Derived polymorphism is I
  VARIANT 29: note = Ancestral polymorphism is V, Derived polymorphism is L
  VARIANT 31: note = Ancestral polymorphism is E, Derived polymorphism is K
  VARIANT 32: note = Ancestral polymorphism is G, Derived polymorphism is V
  VARIANT 59..90: note = Derived polymorphism lacks residues 59 to 90
MLLSCAQELKHGVALWQEFYHANVCDRVVSEGGHYLIALGEIYRVAQILYLSLQRLKTWVLADPGMLSKMLSCLDSCTYIRKPNKSFRQE

SEQ ID NO: 18000 - protein, 277 aa, Zea mays
  VARIANT 1: note = Ancestral polymorphism is M, Derived polymorphism is T
  VARIANT 13: note = Ancestral polymorphism is A, Derived polymorphism is T
MDEEAEYLETARADRSVWLMKCPPVVSRAWQAASASSSDAANANPVVAKVVLSLDLLRQEERPEEPTLQASTHNPLHPAGPFPFKMELAQTNTGNTPKSYSLNMFKDFVPMCVFSESNQGKLSCEGKVEHKFDMEPHSDNLANYGKLCRERTQKYMVKSRQVQVLDNDHGMSMRPMPGIVGLISSSSKEKKKQAPVKPSDAKRTRRDRTEMENVIFKLFERQPNWALKALVQETDQPEQFLKEILNDLCVYNKRGPNQGTHELKPEYKKSTGDTDTA

SEQ ID NO: 18001 - protein, 365 aa, Zea mays
  VARIANT 171..365: note = Ancestral polymorphism lacks residues 171 to 365
MEATPISMKPPAPPPVTLEPIELSTHAVGLTELERSSMNQLAIAPDPKRQRVEEAADGNGCKHCACKKSRCLKLYCPCFAGGGYCSDKCGCQPCFNKEAFSETVQTTRKVLLSRQKRMSMKINRRPEANAEPMEDAHHSSSSTPPRRGETRLPNSLLWTGWDRMFLVLPLRRLPEPFREKWYLRNTFIDSSKNYTNGIIADDSKRYLYTGADLDHSEGEHDFVVERSPRLQSPMSKESSFHQTPPHLRASSRDAHVFPQAVSQWQALPRSWHCSNKRNGNDRAMDDSSANGNYKSSSHDWQMSKLEDGYSISRCVQILNGMVELSQVEKSVAPDVFLLPGNREIFVSLGGDVRAMWLKRKIQHLA

SEQ ID NO: 18002 - protein, 127 aa, Zea mays
  VARIANT 23: note = Ancestral polymorphism is G, Derived polymorphism is C
MATLSAAPLVGAAAVARPCQAQGLPQLRVRAEKARCGAAHSRRPSQRRDGNNGASSSLLAVATSAVTTSPALALVDERMSTEGTGLSLGLSNNLLGWILLGVFGLIWSLYTVYTSTLDEDDDSGLSL

SEQ ID NO: 18003 - protein, 705 aa, Zea mays
  VARIANT 488: note = Ancestral polymorphism is W, Derived polymorphism is R
  VARIANT 451: note = Ancestral polymorphism is C, Derived polymorphism is R
MRGIRESLRTVQGSLLRLEAVVLLSALILAALVLYGSANRRSSDKLLRGAMWMAYSMSYVVVSYAVGIIQDGPFRGETFVLWAAALLLIQASAYSAPVHSRRDVDQRKKLLLQHVLQTGLVLWLIVNATGHNASYRAAIWAFWALNVLKTAAKIAEMIEVSRPDLSVRVVAEYMAEYMAEADGVQQQPAADPATMQGYAYIFHGEEVMEPVIHTGGHRVRENMLSQSAVKSVVTIDQVYQWIDQQPDSDVEKDRAKDFCLAFALFKLLKRRFYGYVPAEAGSEKARSLVLNGLIHMDATGPDAAFRVVEAELAFLYDFFYTRNIVLVGAKTYICIAVAVAGLTMWTAFFGTLGPGYHRLHIGVRNLDRSVTMLLVVITAGLEVFQAVAGFSSNWRYVKTVYRCVRDDRRWSGRRLGHHLWWKQSIAPPETRYWEDKVGQYVLLKRFERRPCNLLSWLTLYLVEPRRQGQKRGRRKPLPPEVKRAVLLWLKQNHCHLSNGVATLRKHHLLPRLAWACRLPMVTDQILAWHVVTTSCDWSYSFRPAGRFAAGDDHHRLVAKKLSNYCAYLVAFVPEMLPDPSYNAEQIFDTAVQQARDHLDGCKTHSSIIARLEEMEIAERPAVGATVIERAAVLWGQLRAAFGVDDARRWEVLAEFWTELVLFLAPSDNVDIHAEMLGAGGEFMTQLWALLSHAGVLERPPIMQRQ

SEQ ID NO: 18004 - protein, 482 aa, Zea mays
  VARIANT 370..482: note = Derived polymorphism lacks residues 370 to 482
MHPSIQIYAVVLCIVPSFFSCNAEDARPPQTQSSLVLGLSHVRSLYTPSLTLVNSTGYDFLDIVEPVTAYTDGYLLSLNLGTPPQVFQVYLDTGSDLTWVPCGSSGYQCTECGGSSSVTPPPTTTFLPSESSSNARDLCGSRFCVDVHSADNRFDPCAAAGCAIPAFTGGLCPRPCPPFSYTYGGGALVLGSLSRDSVTLHGSSGAGGPLPVAFPGLCFGCVGSSVREPIGIAGFGRGALSLPSQLGFLGKGFSHCFLGFRFARNPNFTSPLVMGDLALASSATDGFVFTPMLTSATYPNFYYVGLEGVDLGGGGGGAVAAAAAASPSMGGVDAQGNGGVLVDTGTTYTHLPDPFYASVLSSVGAAAPYERSRELEARTGFDLCFRVPCARAPCADDELPALSLRLRGGGRLALPKQSSYYPVTAIRDSVVVKCLLFQRMEDGDGGPAAVLGSFQMQNVEVVYDLAAGRVGFRPRDCALHAA

SEQ ID NO: 18005 - protein, 148 aa, Zea mays
  VARIANT 4: note = Ancestral polymorphism is K, Derived polymorphism is N
MSKKAAEGSGGGGGKLGRWLGAPVRALSRACDSYVRRMSACAGRVPAHAATYGGRGGFAPGAATFSSRSRRRGGGQEEDVNELVRAMSLRQAAAAATETTVPVRSRSVAVGRIDEDAPCEFGADDAVRVGGPAVRRVRSVAVAGAGYN

SEQ ID NO: 18006 - protein, 416 aa, Zea mays
  VARIANT 232: note = Ancestral polymorphism is R, Derived polymorphism is L
MPRHDYHHPPPPACCSCCCAGAGAAPCYYPAPAPAPPSSTASDQLLHAIAAHLLLSSPVPAQPQSQPQPQPQPQPPPPPAAQHATNPHPYPYPYPQQYQYQYQQQEPKHHTYIHPPLPQLRPNPSGDNGHLLLHSLLRRVAAIESALPHCFPAPPPARRPPHPNHRPRRAARYHEEEQEVEEDGSEPESPPSPPPPRPRPRPRRSARAGPPSAASDRAARTIQAHFRRFLARRSRTLRQLKELAVLRSKAAAIRGSLSGRRGGADPAAVSEVAMGLLLRLDAIQGGDPMIREGKRAVSRELTRILEFVDKVLIKEHQQMVMGDALETHEYHDGCNATFVAARPSVSKKVSFSGNDQVRTLNGKIENRNEVDEGSEGSSSAESDELKPNKRGAYGKPGLAAPMPVHMESRPVAGERR

SEQ ID NO: 18007 - protein, 212 aa, Zea mays
  VARIANT 127: note = Ancestral polymorphism is A, Derived polymorphism is S
MSVTKFIKCVTVGDGAVGKTCMLICYTSNKFPTDYIPTVFDNFSANVSVDGSIVNLGLWDTAGQEDYSRLRPLSYRGADVFVLAFSLISRASYENVLKKWVPELRRFAPDVPVVLVGTKLDLRDHRAYLADHPGASTITTAQGEELRRQIGAAAYIECSSKTQQNVKSVFDTAIKVVLQPPRRREATPARRKNRRGSGCSIMNLMCGSTCAA

SEQ ID NO: 18008 - protein, 540 aa, Zea mays
  VARIANT 310..540: note = Derived polymorphism lacks residues 310 to 540
MAAIPRTSEVMERSEPMHVGPMPPSNLRLHQSGLNSGNLRKENRRHDSKSHHLSGRVEIEEQSIVNQEFCACNNDSSFEFVDLRSMKIKHTPMMLRWKSGRNQSLNPWKIHGDLIPSWITPPRGDAVLPQFRDSRGCIEEKCKAVVKKTEEVEGLWGKIPESDISRNANAESAHLCSPPNPKPHTYISSPVHTSKPQIERFVGHFWGRSQKSYASVVKANCAPIVVVKMQPRGAGRRGAAHGYGRGSGRDHVWRRIEDGAIQNQKGGRTIEEADMGEDGDTLNQGNPSPWEGQVNRSEEKNEDSWKVNAKGCLQKGWFRISGIPMEQRSLVTIAKVGGLVGKVIEIDERTRLRNEYVRARIACRDVTVVPGVVESSLGLFLYDFFFEREIHSEEDEQSLEAGIRVDDSYQKAAKRSKYEGKMQKENKVDYGNLDDGSIKQHDDCSKKTQSFTYQMKGLDKNTNKGKNVGDEEIKTGKSYSSCSGEEKNKVHITDSEDDDDSDLLGEDLMAMKKRGSGSNNHTMWNMQADLIDNLNSRNMN

SEQ ID NO: 18009 - protein, 364 aa, Zea mays
  VARIANT 57: note = Ancestral polymorphism is A, Derived polymorphism is D
  VARIANT 59: note = Ancestral polymorphism is V, Derived polymorphism is I
  VARIANT 164: note = Ancestral polymorphism is H, Derived polymorphism is R
MALAGITNQDLLDAQVELWHSTFAYIKSMALKSALDLGLADAIYHHGGSATLPQIVDRVTLHPSKTLHLRRLMRVLATTGVFSVQHPSPLGDDSSSASDSEPVYKLTAVSALLVGPRRSHVPLAAFVVDPALVTPFFELGKWLQRELPGPCIFEHAHGQTIWEHANGDAAFNALLNDGMLSDSHFIMDIASKECAHVFQGISSLVDVGGGLGAAAQAISLAFPGVKCSVLDLDHVVAKAPSDTQVSYIGGDMFESVPPADAMFLKWVLHDWGHEECVKILRNCRKAIPPREGGGKVIIIDMVVGAGPADPRHREMQALFDLYIMVVNGMERDEQEWKRIFVEAGFTDYRVTPVLGVRSIIEVYP

SEQ ID NO: 18010 - protein, 438 aa, Zea mays
  VARIANT 79: note = Ancestral polymorphism is G, Derived polymorphism is D
  VARIANT 83..438: note = Derived polymorphism lacks residues 83 to 438
  VARIANT 84: note = Ancestral polymorphism is A, Derived polymorphism is T
  VARIANT 85: note = Ancestral polymorphism is R, Derived polymorphism is Q
  VARIANT 117: note = Ancestral polymorphism is T, Derived polymorphism is I
MTRTTRTLAIPCLKTSPRTATANARAIRQQLPASIRRQTARSPWRRPFWSPVPAGSLSLRRWDWDTGTVKLEFHSGHGGNVFQARFMPCSDDRTIVTCVADGEVRLAKIQDAGDVSTTLLGEHEGRAHNLAIEPGSPYIFYSCGEEGFVQHFDLRTNTASKLFLCRNSTKSVYSSLVHLNALAIDPRNPNLFVVGGSDAYARVYDIRKCKWDGSSDFSHASDCYCPPHLVDNKSVGITGIAFSHLSELLVSYNEENIYLFSKDGGLGPDPKKSVRIGAIEGCKSTMLASGHDVSQPAPQTYVGHVNRETVKRVSFIGPNDEYVASGSDCGRIFIWRKGDGKFLRAMEGDECIVNCIEPHPHAMAIASCGIDNDVKVWTPSAIERAPMIHVDEVISSVANLYSDPLIISTFDQSIFLPLIISTLFNLYSDPLSSLLSAR

SEQ ID NO: 18011 - protein, 183 aa, Zea mays
  VARIANT 22..183: note = Derived polymorphism lacks residues 22 to 183
  VARIANT 38: note = Ancestral polymorphism is P, Derived polymorphism is L
  VARIANT 82: note = Ancestral polymorphism is G, Derived polymorphism is R
  VARIANT 103: note = Ancestral polymorphism is D, Derived polymorphism is E
  VARIANT 153..183: note = Derived polymorphism lacks residues 153 to 183
MHRSKSCCSLSKREEEADQLSWSASESLSSAGSIGRTPSGRRADRRGGDVDGDRSSRESFQAQAPLRPSTTLNTQAASRFIRHSLSHLTSGTYLDIKFMRILDYYGMEMRFFYLDQKRSMHEISRGERRSWSGQKRKPEPSVEKKSVRVAAEEFFAKASQELIGHSDSRVKGPVILISDEDED

SEQ ID NO: 18012 - protein, 187 aa, Zea mays
  VARIANT 10: note = Ancestral polymorphism is I, Derived polymorphism is T
  VARIANT 28..187: note = Derived polymorphism lacks residues 28 to 187
  VARIANT 32: note = Ancestral polymorphism is G, Derived polymorphism is R
  VARIANT 53: note = Ancestral polymorphism is P, Derived polymorphism is S
  VARIANT 70: note = Ancestral polymorphism is H, Derived polymorphism is Y
  VARIANT 84: note = Ancestral polymorphism is L, Derived polymorphism is P
  VARIANT 100: note = Ancestral polymorphism is T, Derived polymorphism is I
  VARIANT 105..187: note = Derived polymorphism lacks residues 105 to 187
  VARIANT 106: note = Ancestral polymorphism is D, Derived polymorphism is H
  VARIANT 133: note = Ancestral polymorphism is P, Derived polymorphism is S
MLAEEVAKKTMELEPRSIGSHVVLSNMYSASGRWNEAAHLRESMRKKGMKKDPACSWIEVKSKLHVFVAHDWSHPWYDRIIDALNAFSEQMAREGHVPNTEDVFQDIEEDHKSYVLCGHSEKLAIVFGIISTPAGKNIRVMKNLRVCIDWHTVTKFISKLADREIVLCDANRFHHFKDGNCSRGDFW

SEQ ID NO: 18013 - protein, 509 aa, Zea mays
  VARIANT 42: note = Ancestral polymorphism is G, Derived polymorphism is S
  VARIANT 35: note = Ancestral polymorphism is Y, Derived polymorphism is S
  VARIANT 14..509: note = Derived polymorphism lacks residues 14 to 509
MAATPPPSWDASPQPRRPASSSGPAKRGGLLLGRYELGRLLGHGTFAKVYHARHADDTGETVAIKVLDKEKALRNGLVPHIKREIAILRRVRHPNIVRLFEVMATRSKIYFVMEFVRGGELFARVAKGRLKEDTARRYFQQLISAVGFCHARGVFHRDLKPENLLVDERGDLKVSDFGLSAVADQFHPDGLLHTFCGTPSYVAPEVLARRGYDGAKADIWSCGVILFVLMAGYLPFHDQNLMAMYRKIYRGEFRCPRWFSKDLSCLMNQLLDTNPETRITVAQIIESRWFKKGFRPVRFYVEDDQVHSLADSEAEALEELGPSDSEPPPPPPPPPPPPPPQKEDDGDDSGWESDSSVASCPATLSSEERRRPVGSLPRPVSLNAFDIISFSRGFNLSGLFEERGNEVRFVSAHPMQTIITKLEEIAKVKSFAVRRKDWRVSLEGTREGEKGPLTIGAEVFELTPSLVVVEVRMKAGDREEYEEFCEGELKPGMLHLVHRTASVPDIPSA

SEQ ID NO: 18014 - protein, 342 aa, Zea mays
  VARIANT 278: note = Ancestral polymorphism is R, Derived polymorphism is M
  VARIANT 31: note = Ancestral polymorphism is V, Derived polymorphism is D
  VARIANT 7: note = Ancestral polymorphism is H, Derived polymorphism is N
MDSRCPHLLLLLPLLLLAALLPPPSSGVPEVIWLPTSGGAGPLSCAPPDPAVYDRPVIGIVSHPGDGAGGRISNTTATSYIGASYVKFVEAAGSRVIPLVYNEPEDRLLEKLSLLNGVLFTGGSEKEGVYFDTIKRVFQYVLDKNDAGEPFPLFAQCLGFELVSMIVSKDNNILEAFDAQDQASTLQFPSYALEGSVFQRFDTDLIKKVSTNCLVMQNHRYGISPRRYRENDALSSFFKILTTSPDENGKVYVSTVQANNYPITCTQWHPEKAIFEWRKPMIPHSEDAVQVTQHFANHFISQARKSPNRPPADKVLDNLIYNYSPTFTGKKSKSFEEVYIFS

SEQ ID NO: 18015 - protein, 520 aa, Zea mays
  VARIANT 206..520: note = Derived polymorphism lacks residues 206 to 520
MAAIPRASEGMERSEFVRVGSEPPSNLQMHQSKMNPGILRKDHRRYDSESHNLSGHVEIEDQSIVNQEFYACKNDSPLEFVDLRSMKIKHTPMMLRWNSGRNQTLNPWKFHGDMIPSWITPPRGDAVLPQFRESRGCFEEKCKSVAKKTEKVEGLWGKIPESGISRTGNAESAHLSSPPNPKSHTYISSPVLASKPQIERFVGHFWGRSQKSYASVVKAKRAPIVAVKMQPRGAGRRGAARGYGRGSGHDHVWRRIEDGAVQNQRGGRNIEEADLGEEGDTLNQGNPSPWEGQANRSEEKNEDSWKGNPHPMGEDGPKDSHVKKEHDECSKKTQSVTYQMQGLDKNTSKGKNVGVEEIKTGKSYSSCSGEEKNKVHITDSEDDDDSDLGEELMAMKNRGSRSNNHTMWNMQADPIDNLNSRNINQTKSSKCSIIIEELDLNEKEVENSEELISGTQGSSILNVSQEEGEDLSDQRKKADGIMHHEDSQKFMPSPIPVRRVSERLKKDMVLELKRRTEEWL

SEQ ID NO: 18016 - protein, 481 aa, Zea mays
  VARIANT 31: note = Ancestral polymorphism is A, Derived polymorphism is D
MSSPSPLCAASCSTALRAPPPPLLRFRRSYAPVAASVPRTAPAVSDDLVLRIAEQLEDSVTSTSPLLDPLRSASALSLLSTRWPTRRSSEAFRFTDISYLRSLPISLPSREPDLKLPSSPFSSHVLFSDGILVSSSGAHVSALADLPPGRARDRAAAALAAAAEFAHKDLFYDFNAVGARDVVVVHVPEGVKVADDPIHIMFAYTNSFAESMLMSNPRVLVVAEKSAEVAIVEEHFGAGEEGGCYWANPVAEIIIDEGARVVHSYVQHQSFAAAHTKWTVVQQDTTSKYEFVEVSTGAKLNRHNLHIEQLGPETETELSTLHLTSQNKQIHDLHSRLILDHPRGFSRQLHKCIACGTGNSIFDGNIKVNRYAQQTDAGQETKCLILSPKALVNVKPNLQIIADDVKCTHGAAISGELDPNELFYFQARGINTETATDALLYFFGAHVIKRIPFKQITEKALAQFKELLASSRQTTDEALRS

SEQ ID NO: 18017 - protein, 175 aa, Zea mays
  VARIANT 158: note = Ancestral polymorphism is Y, Derived polymorphism is H
MSATDHLVMARVIQDVLDPFTPTIPLRITYNNRLLLPSAELKPSAVVSKPRVDIGGSDMRAFYTLVLIDPDAPSPSHPSLREYLHWMVTDIPETTSVNFGQELIFYERPDPRSGIHRLVFVLFRQLGRGTVFAPEMRHNFNCRSFARQYHLSIATATYFNCQREGGSGGRRFREE

SEQ ID NO: 18018 - protein, 183 aa, Zea mays
  VARIANT 26: note = Ancestral polymorphism is G, Derived polymorphism is W
  VARIANT 33: note = Ancestral polymorphism is A, Derived polymorphism is V
  VARIANT 44: note = Ancestral polymorphism is A, Derived polymorphism is E
MEEFQEADVLWTWPMPDTPTPSPEEGSYDLAAAAYELYEYDAAAVIDFSCDEPFSKPVAAWSASSTTSSTLSALLSSDNGGGFFLSGPSTVSATGLGLDAAEEFLEADVLWPDPDTADDDTAGFLWRRRRSRSRRVEEAAASAAAAVFCGQREGCSGPLVASSPIDIPMAARGAAAAARRRRP

SEQ ID NO: 18019 - protein, 220 aa, Zea mays
  VARIANT 7: note = Ancestral polymorphism is K, Derived polymorphism is N
  VARIANT 42: note = Ancestral polymorphism is Q, Derived polymorphism is R
MEVAAAKQLLPMALGPNSPSSSTSSSSPSSAAAAASSPSPRQQHPHAPAPPSPTPRPVPRIIDTTPFPTTFVQADTASFKQVVQRLTGSDTPPPPHKPVKSYPHHHGSGPKKPAFKLYERRIGKSNLKMIAPLAMAAAAAPPEALSPSVLDFPSLALRSPVTPLLPDPFNRSQGAEEDEEAAERAAIARTGFFLHPSPRGAEPPPRLLPLFPVTSPRMAQ

SEQ ID NO: 18020 - protein, 130 aa, Zea mays
  VARIANT 43..130: note = Derived polymorphism lacks residues 43 to 130
  VARIANT 42: note = Ancestral polymorphism is V, Derived polymorphism is M
  VARIANT 40..130: note = Derived polymorphism lacks residues 40 to 130
  VARIANT 28: note = Ancestral polymorphism is N, Derived polymorphism is D
  VARIANT 26: note = Ancestral polymorphism is R, Derived polymorphism is Q
MAKQANVSPPSGPTTAAVPVSAPRRRRNATTGKGMRSGPRRVYLYSCAARRSSSTMGGRPSSSAGTMNRCVSSPSAPTTIGTCPAGTFPQVAPGNAGTGFTTAPGATLHAPVDTHRSSAGLHQGGSSAGL

SEQ ID NO: 18021 - protein, 114 aa, Zea mays
  VARIANT 100: note = Ancestral polymorphism is R, Derived polymorphism is I
  VARIANT 91..114: note = Derived polymorphism lacks residues 91 to 114
  VARIANT 90: note = Ancestral polymorphism is S, Derived polymorphism is I
  VARIANT 73: note = Ancestral polymorphism is G, Derived polymorphism is R
  VARIANT 70: note = Ancestral polymorphism is C, Derived polymorphism is Y
  VARIANT 66: note = Ancestral polymorphism is P, Derived polymorphism is H
  VARIANT 65: note = Ancestral polymorphism is G, Derived polymorphism is R
  VARIANT 60: note = Ancestral polymorphism is L, Derived polymorphism is F
MGEGLGFLQSVVSSSAGYLRYYSNEEGYELGFCRSFVLYPSSDCFFCSTTNMLHMAGRGLEVKPGPTVKCVLGHDFILHFPAAFGESKKSESAMSKLMTRSLLLEPSLLKNTPR

SEQ ID NO: 18022 - protein, 109 aa, Zea mays
  VARIANT 1: note = Ancestral polymorphism is M, Derived polymorphism is I
  VARIANT 7: note = Ancestral polymorphism is P, Derived polymorphism is S
  VARIANT 9: note = Ancestral polymorphism is E, Derived polymorphism is K
  VARIANT 21: note = Ancestral polymorphism is R, Derived polymorphism is H
  VARIANT 22: note = Ancestral polymorphism is R, Derived polymorphism is C
  VARIANT 24: note = Ancestral polymorphism is A, Derived polymorphism is V
  VARIANT 25..109: note = Derived polymorphism lacks residues 25 to 109
MQRSVVSAELLGRPPIVELLRRAAQEYRFHLFLLPFLVWAPAAAPPLQGYKLYNKSDRVWVNYSLRDEQCNLSVIRNMIWFPQYASNMYARCSPLGHCSESRKDVEGRS

SEQ ID NO: 18023 - protein, 592 aa, Zea mays
  VARIANT 356: note = Ancestral polymorphism is C, Derived polymorphism is G
  VARIANT 331: note = Ancestral polymorphism is C, Derived polymorphism is S
MSLGGTSGPRVCARICKLAGRRQRMLLRLLVSVAVAFCFLFSSLVSKDEDASPGVETMLVFSDHVRSFVNPVWTSSGRPVAQRGSLTVNGLNTPSQMEKQSDSKQVQELMQSFPPAIVVDHHPCENFSLSPPPVDRKRTGPRPCPVCYLPVEQALALRPAKPSLSPVLQSLNYVLEEILIPKESKSGSLFGGFPSLEERDKSYDIKDSMTVHCGFVRGKVPGLNTGFDIDEADHSEMQLCQSTVVASAIFGNYDVMQQPENISKFSKDTVCFFMFLDEETEAAIKNTTIGHTKKIGLWRVVVVRNLPFTDARRNGKVPMQLAILIFLIQTCVIRNLPCCSVTNKLIGSGFTIYAPCDLFLLQVPKLLLHRLFPNARYSIWIDGKLKLVRDPYQVLERFLWRKNVSFAISRHYRRFDVFEEAEANKAGGKYDNTSIDYQIEFYKREGLTHYSSAKLPITSDVPEGCVIIREHIPITNLFTCLWFNEVDRFTSRDQLSFSTVRDKIRWRVNWTADMFLDCERRDFVVQSYHRELLEQRQSALRRWPPQRSPIARFQPRKMLPDNAAREPWKASATKKLSRKRARDKKSSSRRTH

SEQ ID NO: 18024 - protein, 99 aa, Zea mays
  VARIANT 7: note = Ancestral polymorphism is H, Derived polymorphism is R
MEAKSKHLGTSDKILSKMGEGLGFLQSVVSSSVGYLRYYSNEEGYELGFCRSFVLYPSSDCFFCSTTNMLHMAGRGLEVKPGPTVKCVLGHDFILHFPV

SEQ ID NO: 18025 - protein, 499 aa, Zea mays
  VARIANT 269: note = Ancestral polymorphism is R, Derived polymorphism is W
  VARIANT 107: note = Ancestral polymorphism is S, Derived polymorphism is C
  VARIANT 47: note = Ancestral polymorphism is A, Derived polymorphism is V
MSAPQPAGKYQDDEPLERSTVPAQAPTANGGLALSTQCEFPAIARSASRDRFAVLVHAKAPSDVARAPLDLVTVLDVSSSMKGQKLELLKQAMCFVIDQLSPIDRLSVVTFSNDAIRLTRLNRMSDLGKACAKRAVLSLGVRYSTNIGSGLRVGAQVLAGRREKNVVAGMILLSDGQDNSGCWPTVLVPPSFTSAGGGGWPAPIHTFGFGTDHDAAAMHAIAEATGGTFSFVGNEAAIQSSFARCVGGLLSVAVQEARVAVTCLHQGVRIQEVKSGAYVSHLGADGIAATIDVGELYEGEERRFLVLVYVPRVRSTEEVTRLVKARCTYRETATGLARHVAAPAAVVQRPLELTTLPAPSVDVERERVRLAATEDIAAARVAADDGQNAGAVRILESRLRAVELSAPGDPTCEAIKEELRDLSARVGDRAEYQKTGRACMLVGMSSHAQQRASGMDVEATSKASAYLTPKMEEMVDLSRESESTRKQKQPVKQAKVEEV

SEQ ID NO: 18026 - protein, 676 aa, Zea mays
  VARIANT 610..676: note = Derived polymorphism lacks residues 610 to 676
  VARIANT 416: note = Ancestral polymorphism is R, Derived polymorphism is L
  VARIANT 396: note = Ancestral polymorphism is C, Derived polymorphism is G
  VARIANT 395: note = Ancestral polymorphism is P, Derived polymorphism is L
  VARIANT 362: note = Ancestral polymorphism is A, Derived polymorphism is E
MSGGASLGLRSSGSYGSLPQQQLGGCQSSSPPLAARKPAKMSLGGTSGPRVCARICKLAGRRQRMLLLLLVSVAVAFCFLFSSLVSKDEDASPGVETMLVFSDHVRSFVNPVWTSSGRPVAQRGSLTVNGLNTPSQMEKQSDSKQVQELMQSFPPAIVVDHHPCENFSLSPPPVDRKRTGPRPCPVCYLPVEQALALRPAKPSLSPVLQSLNYVLEEILIPKESKSGSLFGGFPSLEERDKSYDIKDSMTVHCGFVRGKVPGLNTGFDIDEADHSEMQLCQSTVVASAIFGNYDVMQQPENISKFSKDTVCFFMFLDEETEAAIKNTTIGHTKKIGLWRVVVVRNLPFTDARRNGKVPMRLAILIFLIQTCVIRNLPCCSVTNKLIGSGFTIYGPCDLFLLQVPKLLLHRLFPNARYSIWIDGKLKLVRDPYQVLERFLWRKNVSFAISRHYRRFDVFEEAEANKAGGKYDNTSIDYQIEFYKREGLTHYSSAKLPITSDVPEGCVIIREHIPITNLFTCLWFNEVDRFTSRDQLSFSTVRDKIRWRVNWTADMFLDCERRDFVVQGKQHILCDGTRTTENCWNRGSLPYEDGLPSGLPSRASNLERCFQTMQQGNHGRLLQPRSYHGSEHGIRNQARDELIELVGRKQFNCKCWRFCSYTTAYLTDSIPTLFYYF

SEQ ID NO: 18027 - protein, 346 aa, Zea mays
  VARIANT 244..346: note = Derived polymorphism lacks residues 244 to 346
  VARIANT 229: note = Ancestral polymorphism is V, Derived polymorphism is E
  VARIANT 150..346: note = Derived polymorphism lacks residues 150 to 346
MGSSSHSLAVSRRGRSARQSPFFRDLATPIPSHRGVSRFASGASPSSTPPPPPPIFTLDDRYASADFSPDPTASDLLPVASSPSPRTAASRSPPWDLSRGKVALSAPGSPMAGVVEPTRKEMLALPAPASPGTPPPAATAEAQSPVSPAQAPRTEPVANAGEVEREEWVTVFGFSIGDTNLILREFEKCGVILRHHSGPRDGNWIHILYQLMFLHCYVIVLKLTTFTIVYVVPKRSYDARKALQKNVIQLSSSLIVGVKPIDAVHWQQLDESFAPSNPGGFMVSLPSKSLGLKSTGASNQLGGFNRLYDLKANTNVSRDAGRRATGSVAAPAKSIVTNVMDLVFGI

SEQ ID NO: 18028 - protein, 252 aa, Zea mays
  VARIANT 31: note = Ancestral polymorphism is L, Derived polymorphism is I
MSSGQSSPTEASGGPPCPSKKLWRGVQAVYLVLVKKHQPKLAALGVHMHRLLSSSKRRRRLAARGREQNPALTYMSCRSMDPAAAVVHPYPHGHGRASSRLAAPSSLSCRSLDPAAAVRSKYQYRPREVEFSCKSTPMHTRRRRLRLHQSRGHPSEPEPEPERHVSAAAVTRLFALMDDVEVEEAADGDLGLGLDAPAPRQVRITDSPYLAREEDNNEELRSAVDRRAGEFIMWFHEQLRTQQQHGQLGQIR

SEQ ID NO: 18029 - protein, 171 aa, Zea mays
  VARIANT 91: note = Ancestral polymorphism is S, Derived polymorphism is C
  VARIANT 14: note = Ancestral polymorphism is L, Derived polymorphism is P
  VARIANT 1: note = Ancestral polymorphism is M, Derived polymorphism is I
MRGVHSPAAQLLKPSLLRALRLPLSWKGDGHSHPCSGFVGYLDEQFCQIEDLQDEASPNFTEEVVSLFFKNSTRLMTNIEQAMDRNPRDFCRWDVNMQQLKGTCSSIGACRMKNECTSFRNRCGDENVEGCMRSFQNLKREHGVLRQKLESYFQLLRQAGPAVTATRPRGM

SEQ ID NO: 18030 - protein, 67 aa, Zea mays
  VARIANT 5: note = Ancestral polymorphism is R, Derived polymorphism is G
MAGFRSLAPKTRNLVVAGGLSAFVLGVYYYTMRAVGGTDELQVAIDKFEETKKQDAARNSSSSAGGS

SEQ ID NO: 18031 - protein, 397 aa, Zea mays
  VARIANT 187: note = Ancestral polymorphism is V, Derived polymorphism is D
  VARIANT 222..397: note = Derived polymorphism lacks residues 222 to 397
MAVPSRLLLCSAVVAVALLVAPGEVAAAAGHGHTHTRRLRPKKSAAAAAAKLYPANATRAEAIERQFTRWVRFVGGRLGHGTYNYNRPALTLLPARTLVVDRRPGAGDFTSIQAAVDSLPLINLARVVIRVNAGTYTEKVNISPMRAFVTVEGAGADKTVVQWGDTADTAGSWGRPMGTFGSATFAVNSMFFVAKNITFKQNTAPVPRPGALGKQGVALRISADNAAFVGCNFLGAQDTLYDHLGRHYYRDCYIEGSVDFIFGNALSLYEGCHVHAIARNYGALTAQNRQSLLEDTGFSFVKCRVTGSGALYLGRAWGTFSRVVFAYTYMDNIIIPRGWYNWGDPTREMTVFYGQYKCTGPGANYAGRVQWSRELTDEEAKPFISLDFIDGFQWLRL

SEQ ID NO: 18032 - protein, 326 aa, Zea mays
  VARIANT 10: note = Ancestral polymorphism is K, Derived polymorphism is M
  VARIANT 5: note = Ancestral polymorphism is M, Derived polymorphism is T
MGRAMRWLKKVLAGSKHQGDRDRKAQNAACAALPPAEKRRWSFAKPRNSVADGGARRPSVAAGELSQVRPCSCGQERVAAAAVVIQKAFRGYLARKALRALRSLVKLQALVRGYLARKRTAMTLRRLQALMRLQASSRRSVEQERIAARVKPLALPAAHRRRLSDGGDDRSPRIVEMDTCQLRCRSSRITTSRYFHEPAWCLLQGPEQVEPAHPKTTHNTPRLGAFPGYLGSPAKPRAAACRDAGSSPRYMADTASSTARARLQSAPRQHAGREQATRPSVGRSASGPRKQQDSFSFQSSEASRVEVEGSELSDEVTRDYYLDRLW

SEQ ID NO: 18033 - protein, 151 aa, Zea mays
  VARIANT 31: note = Ancestral polymorphism is S, Derived polymorphism is W
  VARIANT 71: note = Ancestral polymorphism is Y, Derived polymorphism is C
MSYRLGGAADREEGDEELFETAPSVSGGEGSCDQERRAFVPPLRRMNSDSIYDMASMVSQQLPAKKGLSRYYEGKSQSFACMSEVRCLEDLRKKGSPYKHRTNKSYGALGLGLGGMMWPRSPPPAPAPTSASPPPTGSGRPTAPIQNGYHQ

SEQ ID NO: 18034 - protein, 259 aa, Zea mays
  VARIANT 39: note = Ancestral polymorphism is S, Derived polymorphism is L
  VARIANT 127: note = Ancestral polymorphism is E, Derived polymorphism is K
  VARIANT 131: note = Ancestral polymorphism is R, Derived polymorphism is L
  VARIANT 179: note = Ancestral polymorphism is K, Derived polymorphism is N
MSPPLPWYIGGCLFTPSSDFSWLGLWSNYIGIKVGICSSEFVQLDQIVVENVLAFDAVGFSLLPSQKDYEELAENVMNIVDRLVHKTNQKIEQSTDVLKAIISPAMHEGDVKWPPRDPDTLKLMEKEITRREQEGQLDEGFLSEVSAQLRQAKQDGDKPGLQAMLQKVLQLYASKSLQKRSYAYKAPENEWNKVLLDGLTVGKGDVSPDDLYAVINKRIERVLIRTEGGSYQQRILVEYLKEIHARAEEVVKVLQGPTI

SEQ ID NO: 18035 - protein, 519 aa, Zea mays
  VARIANT 366: note = Ancestral polymorphism is R, Derived polymorphism is C
MAAAGASRSAEEGKSDQTRPLALPSPTVYPAPSASDAAARARWRSTQYLRKRRCALCCGGCCVSAIVVVGVIILALALTVFRVKQPRLAVNNVWLTAISAGPGTGPGAAAPVAANATLTADVSVDNPNAAAFRFSRTETDVYYEGRTVSVAYAPAGRVGARGSVRMNVTVDLLADRLARAVNGTGLVFGQEYQLHTYTAINGTVNVLGIVKKHIQIRLNCSTVIQSSLSPAPPPPRLTGLDRVLNNTEGEADRATAGMVSRENLHLVLDPASLGAPWADPSAAEIPPQLLAALGEYLSSTRAEGGDVATEADDEFMMHEFKVRRCARARSHDWTACPYAHPGEAARRRDPRRVAYAGEPCPDFRRRPGAGAACPRGAACPLAHGTFELWLHPSRYRTRPCRAGAACRRRVCFFAHAAAELRAGAGAGAGAAKDGCSPLALSLSPKSTLAPPWESPPVSPVEGRRWVDEPADAEVEELLLAMRELGFRKAKASSSAPVLPAAAVTEDDGPDLGWVSELVM

SEQ ID NO: 18036 - protein, 245 aa, Zea mays
  VARIANT 151: note = Ancestral polymorphism is P, Derived polymorphism is L
  VARIANT 143: note = Ancestral polymorphism is R, Derived polymorphism is I
  VARIANT 142: note = Ancestral polymorphism is M, Derived polymorphism is T
  VARIANT 137: note = Ancestral polymorphism is I, Derived polymorphism is V
  VARIANT 133: note = Ancestral polymorphism is P, Derived polymorphism is S
  VARIANT 40: note = Ancestral polymorphism is A, Derived polymorphism is V
  VARIANT 26: note = Ancestral polymorphism is P, Derived polymorphism is S
  VARIANT 18..245: note = Derived polymorphism lacks residues 18 to 245
  VARIANT 15: note = Ancestral polymorphism is E, Derived polymorphism is K
MLCGYFYVEAEEQPEISEAYEVTTFPYFVFCKDVAGEIAAELQGTPDFIIGNYSDGNLVASLLSYKMGITQCNIAHALEKTKYPDSDIFWKNFDEKYHFSCQFTADIIAMNNADFDHHQHIPRNCWKVFILFPSSKILLDSMIVITAITLPGLYRVVHGIDVFDPKFNIVSPGADMSIYFPHTEKAKRLTSLHGSIENLIYDPEQNDEHIGHLDDWSKPILFSMARLDRVKNITGWSKLLLSALS

SEQ ID NO: 18037 - protein, 449 aa, Zea mays
  VARIANT 217: note = Ancestral polymorphism is T, Derived polymorphism is M
  VARIANT 183: note = Ancestral polymorphism is H, Derived polymorphism is Y
  VARIANT 131: note = Ancestral polymorphism is G, Derived polymorphism is S
  VARIANT 109..449: note = Derived polymorphism lacks residues 109 to 449
  VARIANT 100: note = Ancestral polymorphism is R, Derived polymorphism is H
  VARIANT 68: note = Ancestral polymorphism is T, Derived polymorphism is A
  VARIANT 32: note = Ancestral polymorphism is A, Derived polymorphism is T
MKKTVVLYPGLAVSHFMPMMQLADVLLEEGYAVVVALIDVTNERNTTFAAAIDRAMASSSKLAATFHTLPRIRDPPTVTNDVNLLLGYFEIIRRYNEHLRELLRSIPRQSVHAVVVDSLSNAALDVAAELGVPAYSFFASNASALAVCLQLPWARAEGQPPSFKELGDATVNFHGVPPMPASHLIPEVLEDPGTEIYKAMMNSLSKNLEAGGILVNTFASLEARAVAALKDPHFLAESRLRMPPVYCVGPLVEKAAETKEEHACDACLAWLDEQPELSVVFLCFGSVGSSNHSETQLKEIAVGLERSGQRFLWVVRAPLGDNPEREFGDKADPDLQALLPEGFLERTRGRGLVVKLWAPQVAVLQHKATGAFVTHCGWNSVLEGVMAGVPMLCWPLYAEQKMNKVLMVEELRIGVELAGWHQHGLVKAEELEAKNSLIIVSTIAYSDLS

SEQ ID NO: 18038 - protein, 180 aa, Zea mays
  VARIANT 81: note = Ancestral polymorphism is F, Derived polymorphism is S
MQSSSMKREISEAHDTIRFGINAGVKADLAPPHPLQSTIQSETKFWADKKKFGTDAIYGSALNIRKDLDAQILSRFFTIPFAVVLTGEIEFPSINSSIPSLALLMSCCWIFCDPRFQRPPGALPSSLLGYEALTGSLDDFGFEDYLNMPHDSDSFRQPDMHHGMEVRLGLSKGPICPSFN

SEQ ID NO: 18039 - protein, 229 aa, Zea mays
  VARIANT 163: note = Ancestral polymorphism is R, Derived polymorphism is M
MENSTLHGGSCQQPNTQLDTASCLLAPLPPVVAEPQPEQQHACTDAPPTSLAPGAAMSCPPPPAAVDWASLLLPPSTSGASEVGCGVSAVTTVAAGSKAGATAGEGDNSKTVKAGKQGGGRGKNKVSRPRFAFQTRSENDILDDGYRWRKYGQKAVKNTAFPRSYYRCTHHTCDVKKQVQRLAKDTSIVVTTYEGVHNHPCEKLMEALSPILKQLQLLSQLQSCTNQLL

SEQ ID NO: 18040 - protein, 222 aa, Zea mays
  VARIANT 106: note = Ancestral polymorphism is A, Derived polymorphism is D
MANLNITNILEKMIGKDKDYRYMATSDLLSELNKESFKADQDLDPKLTIIVQQLEDASGNVFGLAVKCWVGVSILQALFVKERNAVCDAIKEEHPNLSDEELYRYARLVTSAVIAKVHTVDWAVELLKTKTMRAGMHANCIDIGELVGLKGEEQLSKIGFEKKILSMGYQACGTLELWNYPSFFRDLIPQNLDRTNRSDRIDLAALEGMKFGPNLYHISRGS

SEQ ID NO: 18041 - protein, 741 aa, Zea mays
  VARIANT 300..741: note = Derived polymorphism lacks residues 300 to 741
MEMVDDDGGPVRGAGATVQPEGRVRGVAAGRAVVRRLAAPPPGVPELPHQERRHVVVPDQHAGLAPEVAAVGVPANVAGRRRRGAWPGVGGSPVNEVLASLRQLRLGGGSPRSAPSGGSFLAGGYPFGSLKSPAGLYSLPSTPPTRSCPVMVTTASGATIMTVERLNLGLLVDEEPVMERVESGRALREKVFERLSKESAVPNDTVASANVEAHSASPLSVAGQLGFSPDSRAAELPLLGLASAANRASGSACSGGRHPAPCIFAAARGWGFGVGALQLQLQLRFLQPKANRLLFSLSPQISMICFGFDSGYTMEGAGRDANPLGGYRIGKTLGIGSFGKVKIAEHILTGHKVAIKILNRRKIRSMEMEEKVKREIKILRLFMHPHIIRLYEVIDTPADIYVVMEYVKSGELFDYIVEKGRLHEEEARRFFQQIISGVEYCHRNMVAHRDLKPENLLLDSKCNIKIADFGLSNVMRDGHFLKTSCGSPNYAAPEVISGKLYAGPEVDVWSCGVILYALLCGTLPFDDENIPNLFKKIKGGIYTLPSHLSPSARDLIPRMLVVDPMKRITIREIREHMWFKIQLPRYLAVPPPDTAQQVKKLDEETLNDVIKMGFDKNQLIESLHNRLQNEATVAYYLLMDNRLRTTSGYLGSEFQESMDPSFSQVHAETPTSATEHRQHVFTESPGSGLRQHFASERKWALGLQLYKTRDEKYLLDLQRVSGPQLLFLDLCSAFLTQLRVL

SEQ ID NO: 18042 - protein, 465 aa, Zea mays
  VARIANT 116: note = Ancestral polymorphism is A, Derived polymorphism is S
MAPPAPSSRTTLSRAVLYLLLLLSLQVAAPAAAAMDPAERETLLRVMESVSADRDWREAAGADPCSAPWPGLECRPGTAAARMHVARLDFGVPPHPTCRDTATFPLAAFALPELRSLFLVGCFRNPRAVAAFTLPPASNLSASRLQQLSVRSNPSLAGALPPQLARLRSLRVLTVSQNALVRGAVPEGIGDLAGLVHLDLSYNSLTGPIPARLGGLRGLVGLDLSYNSFSGPIPGRLGDLAQLQKLDLSSNNLTGGVPAAVTRLRALTFLALANNGLRGRLPAGLSALRDLQYLILENNPMGGVPLPPELGNIPRLQELRLANSGYSGPIPDTFRLLSSLTTLSLENNNLTGRIPPGLSRLKRMYHLNLSKNGLDGVVPFDAAFLRRLGRNLDLSGNPGLCVTNRAVMPGVGVGVCGDDVVDCERSAAAESSVVGRVVRGEVTTGRWPAGLLRPAAVALCSCLLL

SEQ ID NO: 18043 - protein, 138 aa, Zea mays
  VARIANT 1: note = Ancestral polymorphism is M, Derived polymorphism is T
  VARIANT 8: note = Ancestral polymorphism is A, Derived polymorphism is S
  VARIANT 50: note = Ancestral polymorphism is C, Derived polymorphism is W
MEEEFQEAEILWPAGVDGGGEAAPACSVRHRPRAATPVDISRQKRRCRPCPVSSSEHYYATTLDDQETDDVGDGAKGTTANHGSAVVPPHVLVARRRRLVRGRTAAYSMCAGKGRTLKGRDLRDVRNLVLKMTGFIEE

SEQ ID NO: 18044 - protein, 350 aa, Zea mays
  VARIANT 185..350: note = Derived polymorphism lacks residues 185 to 350
  VARIANT 143: note = Ancestral polymorphism is W, Derived polymorphism is R
  VARIANT 142: note = Ancestral polymorphism is Y, Derived polymorphism is N
  VARIANT 140..350: note = Derived polymorphism lacks residues 140 to 350
  VARIANT 118: note = Ancestral polymorphism is G, Derived polymorphism is E
  VARIANT 42..350: note = Derived polymorphism lacks residues 42 to 350
MARFTPLTTRSFSSPTRWSSMVISLFFTTEFSLLLLLYIHPSETLEKQIVGYFPDVTEVFVEVTEEEKQNVLYWHNEKLTVAFALLSSEPNTMIRIVKNLRMCLDCHNTIKLISRLYGREVVVRDRTRFHHFRHGFCSCKDYRMLIPAQKVGAIIGHKGERVKRLCEETRACVRIIGGHLCAAEQAVIIFGREQLDEPLPPAMDALLRVYQQTINNDSLDVGPDNVIVRQILAPSEQAASLIGEHGVMINSIMEASQTDIRVLGNELPSDLIDTLLKWIPSNDEELRLRLSSRSTATPHASVAAFASAPVSHTAPWLGKFIAFEPFNVGGFDWAIYFYPDGKSGEDGMLK

SEQ ID NO: 18045 - protein, 579 aa, Zea mays
  VARIANT 467..579: note = Derived polymorphism lacks residues 467 to 579
MTGSAASLGLRSGSYGSLAAAAVVGSGGRKAGATACRTLRVEKERLHRALRLVGRRRTGVLLLLAVASAALFCSLFAVVKDDANSTSIVNNYEVPNAIQKSVYPSRTRPLMMSGNQESTSVVNKIDFPNRLHLSFANFTHPCEGFSVPPPLVDKKRTGPRPCPVCYVSVDQAFALMPLQASPSPVLKDLNYVSEDGVTANLSNQGSGFGGHPSLDQRNDSFNINESMTVHCGFVRGKKPGQGTGFDIKDDDLLEMEQCHDLVVASAIFGNYDMIQHPRNISDFSKANACFYMFVDEETEAYVKNSSSLYNNNKVGLWRLVVVRNLPYEDPRRTGKIPKLLLHRLFPNVRFSVWIDAKLELVVDPYLLLERFLWRKNTTFAISRHYKRFDVFEEAEANKAAGKYDNASIDYQIEFYRNEGLTHYSSAKLPITSDVPEGCVIIREHIPITNLFTCVWFNEVDRFTSRDQISFSTVRDKIRARVGWMPEMFMDCERRNFVVQVYHRELLEQMIASGRMPPLAAAVTHANVRVGSRKAPPTKKPSVKRKREKKSSSRRRLPKPIAQGLDANVTQVFFSVAESG

SEQ ID NO: 18046 - protein, 88 aa, Zea mays
  VARIANT 46: note = Ancestral polymorphism is D, Derived polymorphism is Y
  VARIANT 29: note = Ancestral polymorphism is S, Derived polymorphism is P
MSAGGSRARQNAMRSGVVVLGAVAFGYLSFRVGFKPYLDQAQEAIDSARDPDPDPATTAARDASDDPGAGRPGGDLGPSKDPAVVLRD

SEQ ID NO: 18047 - protein, 246 aa, Zea mays
  VARIANT 191: note = Ancestral polymorphism is W, Derived polymorphism is S
MDLQEHHDLIFGEEFCFPAATTYYPPLYVPTGINVVPAQLYQHQANSRCDNRAQTYMGHEVQGTPSMYYVVPNYGIAHSPHGPHPLHPCAIGDGRFVRTQEYYSETVEHTYQQPVPTSYCSIRPSAADRTPASTAQSLGYTNDLFVPGGLRQTVSVTSERGVAWNQSLQQATIASMEFQSHTSLPERGVTWNQSLQQATISSMEFQSHASLQKELPHTPPPWKRQLSGGVRASARLPRARRVFFLS

SEQ ID NO: 18048 - protein, 174 aa, Zea mays
  VARIANT 65: note = Ancestral polymorphism is R, Derived polymorphism is W
  VARIANT 67: note = Ancestral polymorphism is A, Derived polymorphism is V
  VARIANT 73: note = Ancestral polymorphism is A, Derived polymorphism is G
MPGGFPGGDSRGLPSSPSCSITVTAALDARSAELAADLAFRFGGGAEVVGIPAVARAAGGARGARSAELTGRAVGEGRAALVGELVAFGGAGEGRAPSQRAAPSRARAGGTIGWRARYPATRLVAGGLGGEVGGGTGEIPGAIAGASAACVMRGGRRVRGSGGTLMLWTLSLYT

SEQ ID NO: 18049 - protein, 253 aa, Zea mays
  VARIANT 28: note = Ancestral polymorphism is A, Derived polymorphism is S
MDASYRRAGTGSGSAPRSVEDIYKDYRSRRSAILRALTHDVEEFYALCDPEKENLCLYGYANEAWEVALPAEEVPTELPEPALGINFARDGMNRGDWLALVAVHSDSWLVSVAFYYAARLNRSDRKRLFGMMNDLPTVFEVVSSGVKQSKERDRSGTDNGGRNKLSVKQTSEPRLENNAREPDEGYDEDDSNHSETLCGTCGGIYSADEFWIGCDVCEKWYHGKCVKITPAKAESIKQYKCPSCCNSKRPRPI

SEQ ID NO: 18050 - protein, 654 aa, Zea mays
  VARIANT 592: note = Ancestral polymorphism is T, Derived polymorphism is M
  VARIANT 309..654: note = Derived polymorphism lacks residues 309 to 654
  VARIANT 289..654: note = Derived polymorphism lacks residues 289 to 654
  VARIANT 237..654: note = Derived polymorphism lacks residues 237 to 654
  VARIANT 168..654: note = Derived polymorphism lacks residues 168 to 654
MQALAAAATAVAAPTPARLRLPLLFRAPRSGHCRPASSSRLLRISCSATTMGDETSTSVAPQEQESTVRAGSVKQQLSRLVLSSLQTTLPDVEVEPMVEVSAKFADYQCNNAMGLWSKVKGSGTIFKNPNSIGQAIAKNLPSSDIIESASVAGPGFVNITLSNRWVAQRIQDMLVNGIKTWAPVLPVNRTVVDFSSPNIAKEMHVGHLRSTIIGDTLARMFEFSNVVVLRRNHVGDWGTQFGMLIEYLFEKFPNWQEIGCQAIGDLQIFYKASKHRFDSDPDFKARAQQGVVRLQGGEDKYREAWKKICDISRSEFDLVYKRLNVVLEEKGESFYNPYIPQVLEELSNKGLIKESEGARVIFIQGHQIPLIVVKSDGGFNYASTDLTALWYRLNVEQAEWIIYVTDVGQQQHFDMVFSAAKMAGWLPDPSEKKFPKTSHVGFGLVLGSDGKRFRTRSTEVVRLVELLDEAKSRSKSELLQRLTENGKIVDWTDEELEQTSEAVGYGAVKYADLKNNRLTNYTFSFEQMLSDKGNTAVYLQYAHARICSIIRKSNKNVEELKMSGAISLDHPDERVLGLYLIRFAEVVEEACTNLLPNVVCEYLYNLSEMFTKFYTNCQVVGSPEETSRLLLCQATAVVMRQCFNLLGITPVYKL

SEQ ID NO: 18051 - protein, 525 aa, Zea mays
  VARIANT 251..525: note = Derived polymorphism lacks residues 251 to 525
  VARIANT 306..525: note = Derived polymorphism lacks residues 306 to 525
  VARIANT 391..525: note = Derived polymorphism lacks residues 391 to 525
  VARIANT 422..525: note = Derived polymorphism lacks residues 422 to 525
MDLDPSFPGPISITPDRQISPLFSDPFSPRAASKLFSSTHPKPLSPTDGRKDRFSSVLTVVSPRTGKRDILSKTPKVASPKAEGKTKLVNGLIAEDQDSGVAEIPQKVEMQTDILWSQANTQNTNALAEPIVSHPLADRMSLNYSSMYGAEDDFRAHVSGIGADMDEGTPSDHECLVIGAGLPISSPLSYHEEYEDHSISNDTNDDWLPIVMPAKKLISDENLKAILRKWRQHAADKRLLREQKNALADISLLHGLGIKFVLVPGTHIQIDKLLSERGNKAKYVGQYIITDGDARKAAMDAAGRIRLTIEAKLSPGPPMLNLRRHGVIGRWHGLVDSIASGNFLGAKRRGVVNGIDYRFTGEVTKIDVSRIRERLDSDSIVVISNMGFSSSGDVLNCNTYEVATACALALEADKLICVVDGQVFDEHGRAIQYMSIEEADLLIRKRDRQSDIAVSYVKVVDEEGINSLHKGDNRPSLSPKAYINGYAASFRNGLGFNNGNGIYSGEQGFAIGGEERLSRSNADPF

SEQ ID NO: 18052 - protein, 185 aa, Zea mays
  VARIANT 160: note = Ancestral polymorphism is P, Derived polymorphism is S
  VARIANT 155: note = Ancestral polymorphism is L, Derived polymorphism is R
  VARIANT 139..185: note = Derived polymorphism lacks residues 139 to 185
  VARIANT 134: note = Ancestral polymorphism is T, Derived polymorphism is I
  VARIANT 119..185: note = Derived polymorphism lacks residues 119 to 185
MFMAQLPQMPSRQLRRKEIDQPTLIPHIAEAKSQKYSYEVLFRSLQKLLIDTATSEYVFTDDFFGEESIFHDIFAAPINRSSALLMIHSHFSSHKSAVLIQCSWQFCHRILIRPHPAVWHLVHGLAVVYLVALTFLLFQNRDDARQFMKLLHPDLGVELPERCYGADCRLYVPENPKNKFINIYV

SEQ ID NO: 18053 - protein, 174 aa, Zea mays
  VARIANT 157..174: note = Derived polymorphism lacks residues 157 to 174
MAKPPPPTSTSDPALPTTATTTSSVPKSSSRPSPRPRGLLDPLAASARSLLASARRSPVTTLATAFFLLALVMYGEDARTIAELSIDDYLYPDADLYNVSGLPPLPSPPGPPRSARSLRALPPRLGAPLPEGHDRGVADAVAVVGGRARAASKLSPQAKRKVVTGLASLLPLAS

SEQ ID NO: 18054 - protein, 534 aa, Zea mays
  VARIANT 287: note = Ancestral polymorphism is S, Derived polymorphism is L
MAAKQAVVAAAASGHPKMGEEKLIIRPEKVRFIDVLSMLLLRRPITSYAFVEAGDRTAADLGSTPGDWLVALTQVIQKALAGAYYPALVVGAVVEFLLNFVALNNGILGIFLNLFRCKLVIPLNREAPNFRSMIGMIDGRTELKPLPASGGPEDRRLQVVGVSAAAGSGGDDYYLDVESGSAAVPLVQQQYVNGRLVRLRTFSVFEVSMMAAKIAYENAAYIENVVNNVWKFHFVGFYNCWNKFVGDHTTQAFVFTDKAEDASVVVVSFRGTEPFNMRDWSTDVNLSWLGMGELGHVHVGFLKALGLQEEDGKDATRAFPKAAPNAVPGKPLAYYALREEVQKQLQKHPNANVVVTGHSLGAALAAIFPALLAFHGERGVLDRLLSVVTYGQPRVGDKVFAGYVRANVPVEPLRVVYRYDVVPRVPFDAPPVADFAHGGTCVYFDGWYKGREIAKGGDAPNKNYFDPRYLLSMYGNAWGDLFKGAFLWAKEGKDYREGAVSLLYRATGLLVPGIASHSPRDYVNAVRLGSVASA

SEQ ID NO: 18055 - protein, 324 aa, Zea mays
  VARIANT 21: note = Ancestral polymorphism is C, Derived polymorphism is Y
  VARIANT 24..324: note = Derived polymorphism lacks residues 24 to 324
MDPVQGNEGQREDARKALTLCLREDDDVERLDVEEVKPDRARPSAEDGNSRADGGSGGGRARMDWRDGVGMRWRSASTISAVFVNGKENRRAFVASTTGESNRRGISARAVRSSRPPQRVGEKGRRWWGRKPRVEGGISAAGEGSRMCSVRDLGESSASRVLGRASLVGKKPQFMPRVGRGISELRVLAGRWRGAARECVDRGPGRRGLAHGQALVTRTGMALLAAARASRIGGNRRTGGALAEQGKERGGKDALQGHGAGGGGIAGRDGAGGGGMQGRDGAGAGGIAGRKTLRAEAGAGRDGAGAGGIAGRKTLRVEAGAGAR

SEQ ID NO: 18056 - protein, 85 aa, Zea mays
  VARIANT 58: note = Ancestral polymorphism is Y, Derived polymorphism is N
  VARIANT 45: note = Ancestral polymorphism is V, Derived polymorphism is M
  VARIANT 39: note = Ancestral polymorphism is R, Derived polymorphism is Q
  VARIANT 30: note = Ancestral polymorphism is P, Derived polymorphism is S
  VARIANT 29: note = Ancestral polymorphism is H, Derived polymorphism is Y
  VARIANT 18: note = Ancestral polymorphism is T, Derived polymorphism is K
  VARIANT 14: note = Ancestral polymorphism is R, Derived polymorphism is H
MGRGKFKGKPTGRRNFSTLEEIGNDAPAHPMVPFIGRIRFHIWSVPRCWYFRSPSHLYEDRQLKKRIDLFMGEVLKMALVKEMSC

SEQ ID NO: 18057 - protein, 481 aa, Zea mays
  VARIANT 391..481: note = Derived polymorphism lacks residues 391 to 481
MGRTIKKAKKAQSKKSKKKTESSSSSNPAIASGPAKVWQPGVDTLEDGEELQFDPQAYNYLRGFGIGWSCLSFDVVRDQLGLVRSEFPHTFYGVAGTQAEKASWNYIGVFKLSNISGKKREPIPASAVEADTDVDSDSSSDEEDEEINEDTKPILHLKKVAHAGCVNRIRSMTQKPHISATWGDTGHVQVWDLSSFLNSLAESGTAAPKEDDIIHKHLPLKVFSGHKDEGYAIDWSPLVTGRLVSGDCNKCIHLWEPTSNNWNVDANPFVGHSASVEDLQWSPTEADIFASCSVDGTISIWDIRTGKKPCISVKAHEADVNVISWNKLASCMIASGCDDGSFSVRDLRSIEEDSLVAHFEYHKKAITSIEWSPHEASSLAVTSEDHQLTIWDLSLERDAEEEAEFRAKMKEQANAPEDLPPQLLFAHQGQRDLKELHWHPQIPSMIISTAIDGFNVLMPSNIDTTIPGSTDAAMPSAEPQH

SEQ ID NO: 18058 - protein, 730 aa, Zea mays
  VARIANT 48..730: note = Derived polymorphism lacks residues 48 to 730
MARLQVEEGEGGYGQSKPREHDRWRRGRAATDKAVVGDKGARRVPVIEEMEKTKYEVARDETVKHVQQVFNSLGIHVLAQTVRDVISPKKKEGRGKAIDSDNDYDPCSDIENQSDTNDDYDDDLNNEVNTEATQMVPGTRPHQKKQKAGTMPAANHQPPCTPVRLTRQSAAMPLPGGRPPPKPRHPLPPKTTSKATPKRNAISSSTQQQVRASTTTTETTETTNPVSFPPKMTRSTQAMSSPVPNTMPRPTRYTRTSGTMSTPGGHTMHSPPRFTRASAAMSSPGANPHHSPPRFTRASAAMSSPSANPHHSTPAATAIVSQQPTPTTSVNKTVPTDNSPGGHSSRQSNAINESAEQFDAATSEGNPNEGEPVGDLVPGPKKNVRKKTMGYGLEKMLNRGNRLAIHVAEGKKRPEVPLQVAKLASETGVALRDNLPIYKSWKLYDNSVGQAEVGKVLDKVTSRLDVDVKNEGPSKDACIYIIKRGVRQTRYNLKRKYFDESLTKEQLLAMQPPPKMKKEDWTGLVEYWCDPKNQEKSAKNKANRGNVQLHQRTGARSYIAHRYSLRTKYNNMEPDAVDFFGECMNSPRNGRTPLANEIYEQMVAEKERELEEGEEQKSPSKIVADSLSQISRSSNFLPNIGVPTMSKTGRSTSLAAQARMQAQFEEKLQAEREEAARKQEELQAQLQAQHAALEENQSLLHQTQEEVKGMHTKFEETNALLRAVLKLQKD

SEQ ID NO: 18059 - protein, 254 aa, Zea mays
  VARIANT 95: note = Ancestral polymorphism is P, Derived polymorphism is T
MADSATNDAPLVASNQPTEEEVTVERAAATEEQEEERLRYLEFVQQAAAQALVLAAAAYAYAKQGAGPLRPGVDQVEGTVKAVVGPVYDRFHAVPLDLLKFIDRKVGESVEEIDRRVPPVVKEAPTLARSAAKEVRQAGLVGTATGLAKSAIARAEPKARELYTRYEPVAERRAAEAWVALNRLPLVPSVTRAVLPTAAQLSARYNSAVRDGAKRGNAVATYLPLVPTERLARVFRYPVADVAAAPEMQPIPSQ

SEQ ID NO: 18060 - protein, 436 aa, Zea mays
  VARIANT 1: note = Ancestral polymorphism is M, Derived polymorphism is K
  VARIANT 163: note = Ancestral polymorphism is R, Derived polymorphism is M
  VARIANT 190..436: note = Derived polymorphism lacks residues 190 to 436
  VARIANT 286..436: note = Derived polymorphism lacks residues 286 to 436
  VARIANT 304..436: note = Derived polymorphism lacks residues 304 to 436
  VARIANT 325..436: note = Derived polymorphism lacks residues 325 to 436
  VARIANT 347: note = Ancestral polymorphism is T, Derived polymorphism is I
  VARIANT 371: note = Ancestral polymorphism is V, Derived polymorphism is F
MKLLLSNPYGFNSSDDDGDTDVFSSDGEDDHRAAGHGSKRPGESAVETFFSSSRSFSSDSSEFYTNKKQHKKKTATKTKAKGMARRLNSVDGRHLLGTPTIRGADAICCPVTLAIAEANGRNVLNHFELHSWFGMKMMCWELQFSRWCTRLHLHGSLLVVLNRAWTRKHDDPMTRHCASATAAAIHTNLQSNGGLLSTFEAMRDTARDEQIVSVRISQVSFVFFHSVCCIVLIKLAKGRAKFGDSSTEALAGRYEVDGYVYSAAEELKIMITGKWNKSLSCQPCDQEGDPLPGMELKEIIRSIGDVYMKKPEFNREPLHNKFRLQETFRRPLLSSDLAITVHQIQPTDKFIIFASHGLWEHLSNQEVVDMVQSSPCNHVLSSFKVLFMEFCDSVLDLGLSNRELQLAGLDSRRCKAAGLGSERSVGCSCCRSSGRG

SEQ ID NO: 18061 - protein, 151 aa, Zea mays
  VARIANT 31..151: note = Derived polymorphism lacks residues 31 to 151
  VARIANT 52..151: note = Derived polymorphism lacks residues 52 to 151
  VARIANT 96: note = Ancestral polymorphism is G, Derived polymorphism is R
  VARIANT 99: note = Ancestral polymorphism is S, Derived polymorphism is L
MSKAGGGPGSAPGPTAAAAAAAVQKQKSLLQKADADVSSLVDNFSSLINIARVNDPPVRNSQEAFQMEMRAARMVHSADSLLKLVSELKRTAIFSGLASLNENVDRRIEVLGQQAEGTERMLERIGQEAAASLKELEAHYYSSVVRSPSYD

SEQ ID NO: 18062 - protein, 660 aa, Zea mays
  VARIANT 607..660: note = Ancestral polymorphism lacks residues 607 to 660
MSSSSSLAIVEKKPPPFPGGGGGGVLFHLLDWHRRLARKRRLFSPRRLLPSSLRSSSSPRRPPCPPPPASPPPPPPPPRPSDAAAPGLVARLMGLESWPAPPRPQKQRKVEASRADGADSAVVLVLPKTRSRRPPAPAPAPAARSHHGADLPARSPRRTRLVHAAAAKLLDPGARAGSRASARLALAYACSSPQHRRDGHASALLQGSRMADDFLSRSDSLLLEERSARVHVQVQPPGLPAETDTAAVPRRHGHFSGNSNADAATSTSTIVLPRMDFGDGNRSKRGSDMDAKHNESGVRDEVVRTCARVRSSGAAVQTGDERSLRKRATPTRPEVSGSGITEPGGLAGSTRLVGRARESVSATRKVAHGGSGPIRELAGRIVGQGRMTRRDLNSQNGLSSTSRILSNGSAHKRGPGRKVGHDAAISSRDDRNAVAVASRSSTKPVARASSPRSNLSKGGSPSRLAHETTRTRVPAPEKGCVEASPCVMSTSEKDEFSRLLKAKINELGMSDRIECTPNDSPSGKLTVPVLQELISALATDMSTSISQCSNYSGASAPLRCNGNVDCINPAHCIFSNEQSPDFQKCYQVSLEARTLLYCYHFLIQSFWFVVSLINAAIVDHEFMMIHSFLFFMSFFFSNFVSEYMVSFSACSVTWTNLYDG

SEQ ID NO: 18063 - protein, 553 aa, Zea mays
  VARIANT 110: note = Ancestral polymorphism is I, Derived polymorphism is N
MMRCAATGGGCVASWSGDRRLPAVNPCSVRMPTGNDGWCAGLRSRAADLAGLEMANLRGGVGGLFRASPRYGRLQATAAVDPEDIPLEKVQVKSSGHVLPYVGVACLGAILFGYHLGVVNGALEYLAKDLGIAENAVLQGMAYFYMLNLILFLGWVVSTSLAGATLGSFTGGSLADKFGRTRTFILDAVPLALGAFLSATAQDIRTMIIGRLLAGIGIGVSSALVPLYISEISPTEIRGTLGTVNQLFICIGILAALLAGLPLAGNPAWWRTMFGIAVVPSILLAVGMAFSPESPRWLFQQGKVTQAELAVKRLYGKEMVTEIMFDLRASGQSSSESEAGWFDLFSKRYWKVVSVGAALFLFQQLAGINAVVYYSTSVFRSAGIASDVAASALVGAANVFGTMVASSLMDKQGRKSLLITSFSGMGASMLLLALSFTWKALAPYSGTLAVVGTVLYVLSFALGAGPVPALLLPEIFASRIRAKAVALSLGMHWVSNFFIGLYFLSVVSKFGISNVYLGFASVCALAVLYIAGNVVETKGRSLEEIERELSVAE

SEQ ID NO: 18064 - protein, 234 aa, Zea mays
  VARIANT 201..234: note = Derived polymorphism lacks residues 201 to 234
  VARIANT 84: note = Ancestral polymorphism is K, Derived polymorphism is R
  VARIANT 31: note = Ancestral polymorphism is V, Derived polymorphism is A
  VARIANT 2: note = Ancestral polymorphism is A, Derived polymorphism is T
MATPAAVMKLYGWAISPFVSRALLALEEAGVDYELVPMSPQAGDHRRPEHLARNPFAMVPVLEDGDLTLFESRAIARHVLRKHRPELLGAGAGGSLERAAMVDVWLEVEAHQLSPPAVAIVVECFAAPLLGRERDQTVVDENVEKLRKVLEVYEARLGECRYLAGDFLSLADLSPFTIMHCIMATEYAAALVEALPRVSAWWEGLAARPAAKKVAEFIPVGAAGLLEHPPKQQD

SEQ ID NO: 18065 - protein, 201 aa, Zea mays
  VARIANT 175: note = Ancestral polymorphism is G, Derived polymorphism is E
MALRLPISSTHGLASSPAPISSTTTCRPAAASGSLIPPAALVAVAIRWASASASQKRGLLLTTARGGGVLAPVRSSGIETTTTSVGAEAVTGQVTEVNKDTFWPIVEAAGDKVVVLDMYTEWCGPCKVMAPKFQEMSEKNLDVVFLKLDCNQDNKPLAKELGIKVVPTFKILKGGKVVKEVTGAKIDELAEAIEIANKKSG

SEQ ID NO: 18066 - protein, 175 aa, Zea mays
  VARIANT 92: note = Ancestral polymorphism is C, Derived polymorphism is Y
MVSRRRPSLSTPSCLAMSGGVLNSRSFGSSLGGSAVAELGSRPHRGLRRPTSPIIARGTTSRTQSKRQGFPMVDTRRFLEFSYPESGKQCHCRYTLPNELRNGSEKSRGFGFVQFATVQDVDRAIQQKNGSPVSVQVKDSDAKDEADEISPAEKHKGKSHKADPEQLHLLSNDAK

SEQ ID NO: 18067 - protein, 167 aa, Zea mays
  VARIANT 40: note = Ancestral polymorphism is A, Derived polymorphism is V
  VARIANT 78..167: note = Derived polymorphism lacks residues 78 to 167
  VARIANT 104..167: note = Derived polymorphism lacks residues 104 to 167
  VARIANT 115: note = Ancestral polymorphism is L, Derived polymorphism is R
MMERENERAKLGLQPVNYHGKWPLKRASVFQEPLSAALSALTLVVQFNGWLSFFLLLYYKLPLRPETHKTYYEYTGLWHIYGLLAMNSWFWSAIYHSCDTIWTEKLYFSSDAAFLGYSLILTILRTSSLRDEASRVMVAAPILAFVTTHIMYLNFYELDKGNLGHDH

SEQ ID NO: 18068 - protein, 385 aa, Zea mays
  VARIANT 27: note = Ancestral polymorphism is V, Derived polymorphism is A
  VARIANT 94: note = Ancestral polymorphism is S, Derived polymorphism is F
  VARIANT 229: note = Ancestral polymorphism is A, Derived polymorphism is T
MAASHSHLGGKLLKVAPTLLLFSLGFALGMVSNSKFPSLYLSSISRSPSPAPPPPAPAPPPLPPQNPEVGMARFLEPRSVTHNMTDEELLWWASMTPKVRSTPYHRAPKVAFLFLARGDLPLRPLWEKFFAGHQGLYSIYVHTDPSYAGSPPEDSVFYGRMIPSQKTRWGDVSLVAAHRRLLANALLDVGNERFALLSESCIPLYNFTAVYAVLTGTDTSFVDAVVTPARYSALFAERSNITAAQWRKGEAWFEMDRALALEVVSDATYFPTFRERCAGQRACLMDEHYVPTLLSVLRWPRGANRSLTFVDWDRRRRTGFHPHTHRGEEVTPELVEEIRGGARAGRNCSAYHDGASGVCYVFARKFTPDTLQPLLRLAPRVMGFG

SEQ ID NO: 18069 - protein, 285 aa, Zea mays
  VARIANT 12: note = Ancestral polymorphism is T, Derived polymorphism is I
  VARIANT 39: note = Ancestral polymorphism is P, Derived polymorphism is L
  VARIANT 43: note = Ancestral polymorphism is P, Derived polymorphism is L
  VARIANT 47: note = Ancestral polymorphism is G, Derived polymorphism is E
  VARIANT 50: note = Ancestral polymorphism is Y, Derived polymorphism is H
  VARIANT 87..285: note = Derived polymorphism lacks residues 87 to 285
  VARIANT 124..285: note = Derived polymorphism lacks residues 124 to 285
  VARIANT 126..285: note = Derived polymorphism lacks residues 126 to 285
  VARIANT 131..285: note = Derived polymorphism lacks residues 131 to 285
  VARIANT 136: note = Ancestral polymorphism is P, Derived polymorphism is H
  VARIANT 139: note = Ancestral polymorphism is R, Derived polymorphism is L
  VARIANT 156..285: note = Derived polymorphism lacks residues 156 to 285
  VARIANT 157..285: note = Derived polymorphism lacks residues 157 to 285
  VARIANT 164..285: note = Derived polymorphism lacks residues 164 to 285
MQYIVTMDVLQTLEKDLKEQQVVHGAVENTLGSGSINLPLENPIPKGTTHVYGTIFKPYISQHENEIYQNLLELRARATDMVVLYFQKAASARQMFILLPMLKSCFDVFQESQQPPQQQQPQVQVQQAQPQKQAAPVMRRASSIAARQAAMAQQSQETKPIQSSPKIKRQTSSRSGSVASTKPPIAASTPKPGGSPKKGEVKPAADPVQTPTTGADSPKPEPSARSLPGVEGVDKMAIDEASGDALEGAEELDHALEEETSMEETIRVTRAKLRRRTTTEVPVGN

SEQ ID NO: 18070 - protein, 244 aa, Zea mays
  VARIANT 198: note = Ancestral polymorphism is L, Derived polymorphism is H
  VARIANT 193..244: note = Derived polymorphism lacks residues 193 to 244
  VARIANT 191: note = Ancestral polymorphism is S, Derived polymorphism is I
  VARIANT 147: note = Ancestral polymorphism is A, Derived polymorphism is D
  VARIANT 141: note = Ancestral polymorphism is S, Derived polymorphism is L
  VARIANT 138: note = Ancestral polymorphism is N, Derived polymorphism is S
  VARIANT 132: note = Ancestral polymorphism is D, Derived polymorphism is G
  VARIANT 130: note = Ancestral polymorphism is V, Derived polymorphism is L
  VARIANT 65: note = Ancestral polymorphism is R, Derived polymorphism is S
  VARIANT 49: note = Ancestral polymorphism is W, Derived polymorphism is G
  VARIANT 36: note = Ancestral polymorphism is T, Derived polymorphism is M
MRRHTLAPSFPAPAPHRTRRSSAVAASIQRHCADTTTSRAVVKEVALNWLATKATRWVVSRNSTSKPASTGSERAHSSVMRPTTPHLPQAPRRPYPRELATPSSPSSVFISMTLMDVYAKTSRLELVLQVLGEMPSRNVVSRTMLVASLIGTRADLRKMMDFGCLNERWRKSGPTSFAPLIYAAISVVENSNWQYHVLVIIADGQEIQGCEFSTSYVSPKRWDYMCCTSCWDLFLVSSTALLYL

SEQ ID NO: 18071 - protein, 156 aa, Zea mays
  VARIANT 84: note = Ancestral polymorphism is D, Derived polymorphism is V
MDDCTHQPMPMLYMPIPELASPAPVPVLPAAAPQEGTGDSESDAPAAGDRPLVVAAGYAEDDAESCSGDGSSRAPAPAASVVVVDDLAGEGDESEVDSSMAVPWWLRTTVQDAAGGGCARPQATAEAGAAAAVAGGASHAAESNRLFWEACIAHGY

SEQ ID NO: 18072 - protein, 1060 aa, Zea mays
  VARIANT 129..1060: note = Derived polymorphism lacks residues 129 to 1060
  VARIANT 296..1060: note = Derived polymorphism lacks residues 296 to 1060
  VARIANT 310..1060: note = Derived polymorphism lacks residues 310 to 1060
  VARIANT 562..1060: note = Derived polymorphism lacks residues 562 to 1060
MEELRCLSTVAESDDAPAEQECDHFSLRLGSPGCLGDKATTVHQGELGTPERLVLLTVDGFVRGYVAMLQKKDPKLCSHIFHNQPQYDEHHDSSPVLVSKYHRWDCSRCLDSVEVSGHRPTSENVSMQQNGMNDGCSISIVRILPNSVDSRRLFSCTQQSSQGNDRLTLSKTAQECNSKCSSPGNKAITAMNVPVAEENVPEALVDTRVPSIEVLQASPNSIDLSANILNAVSKNVRDLPDDVEENGTQNPHSLKPCVAPNEDENNIANDDLNEPNVCKPVSGHKSKQVCNMGPRRASSKRNVESDGSEQVGVSADAVQVDHTNSVDLCEGGKRKMHLEVGKGNDTTNQQVDEIQSRAVKNKAKYTGVDKLEDGSSLMNWLKSTNKKVRTKKKDSEHKNLDSSSISRSYPDIVASNDMHHDFLPSVGDVGQANVPSTTSAKHGNGNAQNDKLEQNMQKMDGLCENESRNLKQRFFSNEKSTILLKRKLLSTSVVHDENIENSNIKRDMLRSDDLPQMEPEGSVQRCLAKVSLGKQKIQNVSGLHKKNIPKNKKGKQKVHKKQNVIDDFPMDIVELLARNQHERQLMTDTNSLENCHTQPKVAQVDCAAFAAKGCPTNASNEFNTNFQKSLASESKQKSLQDQASPSTEAANVNPQDLHTQKSSQCHAASSTSTEVPNGQPPESQMQNSLQVHVLPIKRSFIVYPSKLPVLDDILECTQEQQTQFHRDGGVTIACTSPMFSHHQHIAEVPARSWRNNGEKKLMWDSFKTASRNSPTSSYGFQFGNRLQEVHSSPSHAYGASSNYAAHQPVIVAVDQPRSVPSTTSTMEAGRLYDRRIPGQSGLYPKEPMPATHLLRLMDSSTAPDFTNYQRANRRQMEHQTQTLDSQYTQHDQYNGSLSTSYGRHITGKVPPTLQDLSRRQVQQNLHRPLRPHPRVGVLGSLLQQDIANWYENCGPPQSGYRLGVSKGTASLDMNRHGNYETLNSGVFTAGWNALQLGSVSSLADPEYRLPRYGTGQPCTGGNGRTVHPLDKLVRKDICVTNRNPADFTVISDMNEYMRSL

SEQ ID NO: 18073 - protein, 316 aa, Zea mays
  VARIANT 101..316: note = Derived polymorphism lacks residues 101 to 316
MAVHGGDYLRRFVAETEWYNEVVLSAVAPGDWWRGLPHPVQSWMRNCVGGYLLYFISGFLWCFVIYYWKRHAYIPKGSGCHQREGFRLDSRCFGDMPAKDWLTVTTRAVNDKLYMCLDYAIPTNEAMKKQIAVASKAMPFYCALPTLSEYMIESGWTRCYFNISEMGFSAYLCYMAMYLIFVEFGIYWMHRELHDIKPLYKHLHATHHIYNKENTLSPFAGLAFHPLDGILQAIPHVLALFLLPTHFRTHIALVFLEGVWTTNIHDCIHGKVWPVMGAGYHTIHHTTYRHNYGHYTVWMDWMFGTLREPDDILKKA

SEQ ID NO: 18074 - protein, 245 aa, Zea mays
  VARIANT 164: note = Ancestral polymorphism is I, Derived polymorphism is R
MAAAATNADVEVVDFDLDDDDLMDEDAGPDPAPPPASRLRSTIAGDDAPRRTKGRGFREDPNSSATRDSRFGAGGRADLDSLGGPGPIQSIEGWIVLVTGVHEEAQEDDLQNAFQEFGQVKNLHLNLDRRTGFVKGYALIEYEKFEEAQAAIKELDGAELYKQRMSVDWAFSSGPAKRRNTRKRYSLLFKKVTTKSSFKDPTQEKALMFPQHVLNYLLCVTESKKSGDSKYYLGVCGSPDFDGGY

SEQ ID NO: 18075 - protein, 73 aa, Zea mays
  VARIANT 40: note = Ancestral polymorphism is V, Derived polymorphism is L
  VARIANT 38: note = Ancestral polymorphism is V, Derived polymorphism is I
  VARIANT 36: note = Ancestral polymorphism is A, Derived polymorphism is T
  VARIANT 33: note = Ancestral polymorphism is V, Derived polymorphism is L
  VARIANT 23..73: note = Derived polymorphism lacks residues 23 to 73
  VARIANT 22: note = Ancestral polymorphism is T, Derived polymorphism is M
MSRMFDDYYSKDCGVVSALEVTQRRIDNNDQFLILATVGVAFVPVWNVLSNDETMQIVAYIEVCMILMVTNRL

SEQ ID NO: 18076 - protein, 536 aa, Zea mays
  VARIANT 77: note = Ancestral polymorphism is L, Derived polymorphism is P
  VARIANT 121: note = Ancestral polymorphism is A, Derived polymorphism is V
  VARIANT 162: note = Ancestral polymorphism is S, Derived polymorphism is R
MAAKHLHDGYEQDGDQPGDNRMRRLPSLSTVIREAMMQKEMQNLLRCLEPLIRRVVQEEVEAGLRLMQSLRYIERAPAETPAAERAAWKLAFRTPPQLPIFTGSKIEGEAGRPLEVVLVDACTGSPAAPPVPRALRVELVPVLGDFPPDGREDWAADELERSVVREREGRRPLLTGDVGLTLRDGRATVGELRFTDNSSWVRSRRFRIAARAACGGGGGGGARVQEAVTEAFVVKDHRGERCRKHYPPALTDDVWRLEKIRMGGAFHTRLMCRNVGTVQEFVRMLMVNPDELRALVVVSNYCSAIDCGFLWGRRGQILGDGMRDRMWEAATRHARTCAPDGKVYAHATPHGTIFVDSIFNVVRVDVGGVEWPLQQLNRGQTMMVQQMLQDAYEHRHSLQDAAEEAFMLDGHTDTNAPLLQNAAHVAAPAPVDTPLWFQNAAEMDFPDDDDDDDVVPVPQVNSFGYQWTGQAFHMCAGWQGLRVGEFELPFTASPDAPPSVREQREAASELVQDSLPGRGASCSAPAPAPKDELSCM

SEQ ID NO: 18077 - protein, 219 aa, Zea mays
  VARIANT 87..219: note = Derived polymorphism lacks residues 87 to 219
  VARIANT 51: note = Ancestral polymorphism is S, Derived polymorphism is F
  VARIANT 12: note = Ancestral polymorphism is D, Derived polymorphism is Y
  VARIANT 5: note = Ancestral polymorphism is R, Derived polymorphism is M
METNMDFEELKDLNGRSEELEEDNNGNMEKLVELFLDKGLLDELKPIKVESQRRVRATLSIIDKMMSSRIVKGGNGANDIHGNDGAQLTSIEEEGRTAEASDDGDPAEVESCVAEKVELGHETTHDSTGTALDGGNDGSYFPWREELESLVCGGVPMALRGEIWQAFVGVGARRILGYYNKLLDDRTETLDEKDLVDPVVKNREVHPEKLPSLRNGKDM

SEQ ID NO: 18078 - protein, 138 aa, Zea mays
  VARIANT 120: note = Ancestral polymorphism is N, Derived polymorphism is K
  VARIANT 111: note = Ancestral polymorphism is N, Derived polymorphism is K
  VARIANT 109: note = Ancestral polymorphism is N, Derived polymorphism is K
MAMLCYVIHEFLILLRGPEPLSQLLLVAARMPPHLNAMQNLGAPTKLTELTGTVTHSLGHFFLVRKEKAWSIITVRVVGGGKKKAMSVMFVFQDREHLSFVYRRPAASNSNQKWLLLRSNTNRSTSRALDVCQESSFP

SEQ ID NO: 18079 - protein, 426 aa, Zea mays
  VARIANT 48: note = Ancestral polymorphism is R, Derived polymorphism is S
  VARIANT 108..426: note = Derived polymorphism lacks residues 108 to 426
  VARIANT 119..426: note = Derived polymorphism lacks residues 119 to 426
  VARIANT 228..426: note = Derived polymorphism lacks residues 228 to 426
  VARIANT 285..426: note = Derived polymorphism lacks residues 285 to 426
MGRHSCCYKQKLRKGLWSPEEDEKLMNHITKHGHGCWSSVPKLAGLQRCGKSCRLRWINYLRPDLKRGAFAQDEEDLIIELHAVLGNRWSQIAAQLPGRTDNEIKNLWNSCIKKKLRQKGIDPNTHKPLTEADRGGAAPTISTERTSGSSDVNPSSTGPLGNLSPLLSETAQSSMLMPVYDKNRAETPNLARPKLPPKELFLEQLTAGHESPSTCHSSGQTLYFPFQQPLGYNSESGSSDGANMNSLWFNQSDFNCSTISTVMPPVSPSALSTSMGLNLPPDNPRHGGTGIGSTAVDSFYWDGTNPSSSSSTGSRGSNSMGFEPQSTSTILENSVFPWTDIGQEKDTRAHLVAELKWPDSFAETTTAMQNQSQTLYDDVIKAESQFNIEGICASWFQNQQPQQQLQVAPDMYDKDLQRMQLSFENI

SEQ ID NO: 18080 - protein, 215 aa, Zea mays
  VARIANT 154..215: note = Derived polymorphism lacks residues 154 to 215
  VARIANT 118: note = Ancestral polymorphism is S, Derived polymorphism is N
  VARIANT 55: note = Ancestral polymorphism is S, Derived polymorphism is L
MPQHILTENSDSEGKVYLEHEHSFNLLGSFNHIDEKALNSNKFTGTIPPTLGLLSNLFWLDLADNQLTGSIPVSTATTLGLDQLTHTKHFHFNKNQLSGTLTGLFNSNMSLIHILFDSNQLTGPDTRGARGHFIAPSSELGQQLAHWTIARSKQHDQIECRVGEKGGLTKKLFDFAYKRNLASLNGVECTQMINLTCSYWVQVHVIPNLSHSQLD

SEQ ID NO: 18081 - protein, 244 aa, Zea mays
  VARIANT 229..244: note = Derived polymorphism lacks residues 229 to 244
  VARIANT 228..244: note = Derived polymorphism lacks residues 228 to 244
  VARIANT 168: note = Ancestral polymorphism is R, Derived polymorphism is C
  VARIANT 42: note = Ancestral polymorphism is A, Derived polymorphism is V
  VARIANT 12..244: note = Derived polymorphism lacks residues 12 to 244
  VARIANT 7: note = Ancestral polymorphism is S, Derived polymorphism is P
  VARIANT 2: note = Ancestral polymorphism is P, Derived polymorphism is L
MPFVERSYATALEEAEQFLWGDHAMDSVGNIIVRLTKAMNWVLGVRKCLSKIQDFLKDGCSEKVNYVEIEELVATKCAPCCEPSLTKLQAYAEEAKMLINEVNNALSSFLTVDKLETLYSRVSEFPVKLTESSTLFWELSSAKELEGFLLAADGANFSIPELNILKQRYSNCCSWVSRAKNILGKLYAMSDYHNAVEELTGILKEAELLGVKGMLFKYFLPWILLYFKCLVVLIIFTRAIILCS

SEQ ID NO: 18082 - protein, 288 aa, Zea mays
  VARIANT 127: note = Ancestral polymorphism is I, Derived polymorphism is N
MKTVSLGASRPSTVNFRMPTRDNLVPIRVDVEVDGQRYRDAFTWNPRDPDSEIISFAKRTAKDLKLPANFVPQMLQSIQGQLAEFRSYEGQEMQIKEKIVPLKIDLRVNNTVIRDQFLWVCTCIVVIFGSPHVLIIALTPIYSTLLLPLGGQDIGNLDSDPEEFARTLCDDLNITDPEVGPAIAVSIREQLYEIASQSVSVMREKQMSKKGRRAPEFSSNSKAVNNAVDLFKYFGSKGSVIRKRKEWYLYEPVVDVVANDEDGKEEANNSSRPKKRADEEKAASLQSL

SEQ ID NO: 18083 - protein, 68 aa, Zea mays
  VARIANT 64: note = Ancestral polymorphism is S, Derived polymorphism is F
  VARIANT 1: note = Ancestral polymorphism is L, Derived polymorphism is M
MYLLAVSYNCRLSSYVCLEHWKHLCECSPKKHCLLYRHTLAELGDLVCEVSLVSPQRGQCYAESTLAQ

SEQ ID NO: 18084 - protein, 311 aa, Zea mays
  VARIANT 148..311: note = Derived polymorphism lacks residues 148 to 311
MARQLFLHPVLLAAACLLVSVVLCNAGVAQAAWWWPRWDSLFPSRGQQQHHGGYDYHDNGDGSSKSRVASIVTQELYGEMFKHKDDAACPAHGFYTYASFLAAAARFPEFGGDGDLATRKREVAAFLAQVSHETTGGWATAPDGPFAWGLCFKEEITPPIDYCDASSTQWPCVAGKSYHGRGPIQLSWNFNYGPAGQALGFDGLGSPDVVAADPEVAFKTALWFWMTPRAPKPSCHDVMVGRYRPSAADVAANRTAGYGLTTNIINGGIECGKSGVPQVDDRIGFFREYCKLLRVDVGTNLDCAQQQPYSS

SEQ ID NO: 18085 - protein, 95 aa, Zea mays
  VARIANT 64: note = Ancestral polymorphism is R, Derived polymorphism is M
MGSWVRTITSPFRKMLSPQQRDGKKTPRRRHHHHQRRQQQSPSPSPSSSSAMEEEHSGEMEISRSQLYGEVMACTYEDVQVMWSMLDKARICSAS

SEQ ID NO: 18086 - protein, 141 aa, Zea mays
  VARIANT 16: note = Ancestral polymorphism is R, Derived polymorphism is H
  VARIANT 55: note = Ancestral polymorphism is D, Derived polymorphism is G
  VARIANT 59: note = Ancestral polymorphism is C, Derived polymorphism is Y
  VARIANT 72: note = Ancestral polymorphism is E, Derived polymorphism is V
MAFDDEAVRRAMFSDRMKELLFVQMRIKIFLTACICTGHVTVNNLASVSIDENQDILDCLSKIVPEEKLLQEVVFTWFGGKSESSSTCESSSGQTDKHAYSLEHTKIGKKETKRIHKSGDFSDIAGFNMRLQFIADVCSFH

SEQ ID NO: 18087 - protein, 327 aa, Zea mays
  VARIANT 49: note = Ancestral polymorphism is A, Derived polymorphism is S
  VARIANT 30: note = Ancestral polymorphism is V, Derived polymorphism is A
  VARIANT 19..327: note = Derived polymorphism lacks residues 19 to 327
MSSPPPASPMAAENEACDWAEMPSDALAAVFAKLDVAEILSGAGLVCRSWRRLAASDPTLWRRVDMCYQGDQLQTEEVEAMARAAVDRSAGTMEAFCAETFVNDDLLRYISQRAPSLKSLHLCLCHYVTNQGFAEAVNCFPQLEELDITFCSLYGIVCETAGRACPQLKCFRLNERWSILQSEFAPYEGMDDDTEALGIASTMPGLQELQLIGNNLTNDGLVAILDRCPRLESLDIRQCYNIQMDDALRSKCARIRYLKLPHDSISDFKYRAYIVSSIANSGSDFEVDMYDDLLDVVTEDDDADFDDMDDFDDTVSDGGMYDDDLDI

SEQ ID NO: 18088 - protein, 205 aa, Zea mays
  VARIANT 175: note = Ancestral polymorphism is K, Derived polymorphism is N
MAMSSSASKKQAQAQAQKAGRRPPAVSSAAAADADAEMQRVFSRIDADGDGRISPSELAAVSRAISPPASSSHGRREVAAMMDELDTDRDGFVDLGEFRAFHARGVGGGGDDGDDAELRAAFAVYDADGDGRITAAELGSVLARIGEGCSAEECRRMIAGVDADGDGCVGFEEFKIMMRGPQPQPQPQPQAGAGVTAVPDKAKKE

SEQ ID NO: 18089 - protein, 471 aa, Zea mays
  VARIANT 68: note = Ancestral polymorphism is R, Derived polymorphism is W
MGQRAAGTGVRCGRVGSETRRVTISSQLRNEQVTISSQLRLDRISSDSDPPDHPAPPQILLAPKAQMRRLVLSKKMAAVDTFLFTSESVNEGHPDKLCDQVSDAVLDACLAEDPDSKVACETCTKTNMVMVFGEITTKANVDYEKIVRETCRNIGFVSNDVGLDADHCKVLVNIEQQSPDIAQGVHGHFTKRPEEIGAGDQGHMFGYATDETPELMPLSHVLATKLGARLTEVRKNGTCPWLRPDGKTQVTVEYRNEGGAMVPIRVHTVLISTQHDETVTNDEIAADLKEHVIKPVIPEQYLDEKTIFHLNPSGRFVIGGPHGDAGLTGRKIIIDTYGGWGAHGGGAFSGKDPTKVDRSGAYVARQAAKSIVASGLARRAIVQVSYAIGVPEPLSVFVDTYGTGAIPDKEILKIVKENFDFRPGMIIINLDLKKGGNGRYLKTAAYGHFGRDDPDFTWEVVKPLKSEKPSA

SEQ ID NO: 18090 - protein, 66 aa, Zea mays
  VARIANT 63..66: note = Derived polymorphism lacks residues 63 to 66
MDLLSIGSSSIQNGPPTANFSLPGIETKSVAVTPQVVDLLDGLSSGTSLPDENATYPTITTFQSLI

SEQ ID NO: 18091 - protein, 208 aa, Zea mays
  VARIANT 27..208: note = Derived polymorphism lacks residues 27 to 208
  VARIANT 54: note = Ancestral polymorphism is R, Derived polymorphism is C
  VARIANT 106..208: note = Derived polymorphism lacks residues 106 to 208
  VARIANT 200..208: note = Derived polymorphism lacks residues 200 to 208
MVQTKIFMHLLFSNNCIARVLLSCVGQSCRNYEKGIEAAPYSKAIVVLDKFSGRSRGLGFVNFNEKQAMEDAIEATNGLYLDGSNITVDKARPHGPGRDRNGDRYYDCELGSRYDHGCNYGGRCALRGGGDCFKCGNPIILLETTHLGTMGEGTNMVVGMTGMVAVEVVMVLIVAVTDTLVIVEMAVAIGATTVMALIDQVLPDGLSS

SEQ ID NO: 18092 - protein, 336 aa, Zea mays
  VARIANT 53: note = Ancestral polymorphism is T, Derived polymorphism is I
MSAKTRAGAAHVRRQLVAAVAVTVACFYSSEATQLQVGYYNGSCPAAESLIETIVHAAVRKDAGNGPGLIRLFFHDCFVRGCDASVLLDDPTGSPGNRTVEKTSPPNFPSLRGFSVISRAKRVVERRCPGTVSCADIVAFAARDAARIMGGIRFAMPSGRLDGRVSNASEATANLPPASFNLTQLLGRFASKNLSADDLVTLSGAHSIGRSHCSSFAPARLYPQLDPAMNATLGARLRARCPAGGGGRRDRVVDLDFATPLQLDNQYYRNVVTHEAVFSSDQALAGRNDTAALVALYAANRTLWSQRFAAAMVKMGSIEVLTGPPGEVRLKCNKVN

SEQ ID NO: 18093 - protein, 187 aa, Zea mays
  VARIANT 110: note = Ancestral polymorphism is R, Derived polymorphism is L
MQGCDASVLLDPTPANPETEKTAPINIGLAAFDVIDDIKAALEERCPGTVSCADILVYAARDASSILSNGRVRFAAPAGRLDGVVSRAADAQRDLPDSTFTVAELVRNFRRKNFTVEELVILSGAHAVGVGHCSSFRARLSAPPAQIVPAYRDLLSAKCGAEGPGADPVVPNNGDNPYPKIVRKTLR

SEQ ID NO: 18094 - protein, 659 aa, Zea mays
  VARIANT 415: note = Ancestral polymorphism is T, Derived polymorphism is I
  VARIANT 52: note = Ancestral polymorphism is S, Derived polymorphism is L
MVKVEDQAEDGGADADARGLRESALDPLPVSVHASLKEEEGQPSSSSGKLRSQFIGMGFSSKLVDKVLQRHGDDDSNTILESLLSYSDLQQSGSESSDSFGSFFDNDNEENNSPSESRKGIYQDIKPELDSFSEKWSFLLRTMNFSQQEVDLAFKQLGDEAPLEQLVDFIVSAQSGVPSGGLQTGDATNEGKTELLYGVMEKTLSLLQMGFTEEEVSSAIDNFDQRATVQELADSILARRIANSIEQKEIKVESDFLDEAETDYSSYQPSYSDVSYYDDDNNNTRVKRAKHIFIDDIGASSSHLGDPWSMGQRAGTNDMSVKVELEAMTPGRRANVQGDLAKPPFFLYGNVVEVPKDTWHQLKQFLYNVEPEFVNSQSFSALTRREGYIHNLPVEKRSVVVPKSPMTIEEALPFTRQWWPSWDTRKHISVITTEAAGIEQTCERLGGMVRESRGVLSQARQMQIIHQCRVSNLIWVGRDRLGPLEPRQVEKILGYPYNHTNLFELNQPDRLAAMKYAFQTDTLSYLLSVLKGKYQDGIRVLSIYSGIGGAEVALHRLGIPLKCVISVEESEVNRKILRRWWLKTEQTGVLRQHAGIWKLKTHVIEDLVKEFGGFDLIIGGNYTSCKGGTTVNTTMGMDSNRFYEYNRVVKRVRTAVGLS

SEQ ID NO: 18095 - protein, 155 aa, Zea mays
  VARIANT 108: note = Ancestral polymorphism is G, Derived polymorphism is V
  VARIANT 98: note = Ancestral polymorphism is D, Derived polymorphism is G
MSLVSRRSSNVLDPFSLDLWWDPFDMFRSIVPSAASSGGSETAAFANARVDWKETPEAHVFKADLPGVKKEEVKVEVEDGNVLVISGKRSREEEDKNDKWHRVERSSGQFVRRFRLPENAKVDEVKAGLENGVLTVTVPKTEVKKPEVKAIEISG

SEQ ID NO: 18096 - protein, 84 aa, Zea mays
  VARIANT 75: note = Ancestral polymorphism is S, Derived polymorphism is L
  VARIANT 65: note = Ancestral polymorphism is T, Derived polymorphism is N
  VARIANT 59: note = Ancestral polymorphism is P, Derived polymorphism is S
  VARIANT 47: note = Ancestral polymorphism is K, Derived polymorphism is R
  VARIANT 42..84: note = Derived polymorphism lacks residues 42 to 84
  VARIANT 40..84: note = Derived polymorphism lacks residues 40 to 84
  VARIANT 31: note = Ancestral polymorphism is T, Derived polymorphism is A
  VARIANT 25: note = Ancestral polymorphism is T, Derived polymorphism is A
  VARIANT 10: note = Ancestral polymorphism is D, Derived polymorphism is Y
MVLALLDESDLDIASDAIEMIIDRTFDQADTKGDGKIDQEEWTEYAKDNPYVLRNMTLPYLKDITMVFPSFVMHSEINEIDMAV

SEQ ID NO: 18097 - protein, 367 aa, Zea mays
  VARIANT 174: note = Ancestral polymorphism is P, Derived polymorphism is R
MDMDMGMTMVGLDEDLDQVLAAISSAGSSATSAPAATGGSSEDDETTAATELRRGPWTVDEDILLVNYIAAHGEGRWNSLARSAGLRRTGKSCRLRWLNYLRPDVRRGNITVEEQLLILELHSRWGNRWSKIAQHLPGRTDNEIKNYWRTRVQKHARRLRCDANSAQFRHLWMPRLLERAQDLQQPAAATVPAAVAQAAPATTTTSAPPPACYYNYYYDDHHHLAHQQGALHQYYSEPAGQTAAAATALSPDDASSALRPPSSSLTADDGAARYAAAYETSANDLQVLHQCGADAGSGPTTTTEDDVFAGTTWSDLLATATATGPDGDDSSSSMIGLQMEDFGFGLGDLADDGLWSLDDLFCFQQLC

SEQ ID NO: 18098 - protein, 141 aa, Zea mays
  VARIANT 61: note = Ancestral polymorphism is G, Derived polymorphism is R
  VARIANT 53: note = Ancestral polymorphism is G, Derived polymorphism is R
MGYDPLGVPSHGEICIRGKYLFSGYYKSPELTNEAIVDGWFHTGDIGEMTPDGILKIWVYGDSFKSSLVAVVNPHEENTMKWAESNGYKGGLKEYIPKELTTIAHKNKSEIDTVYKKLEAQKNGAKSHKLKKGKHCCKFHI

SEQ ID NO: 18099 - protein, 515 aa, Zea mays
  VARIANT 316..515: note = Derived polymorphism lacks residues 316 to 515
MAVASRLAVTRVSPADGARPAAAAGRRSGLAVVRLPPTDSRGRRRRRGGAVAASPPTEEVVQMTEPLTKEDLVAYLVSGCKPKENWRIGTEHEKFGFEVDTLRPIKYDQIRDILNGLAERFDWEKIMEGNIVIGLKQGKQSISLEPGGQFELSGAPLETLHQTCAEVNSHLYQVKAVGEEMGIGFLGLGFQPKWALSDIPIMPKGRYKIMRNYMPKVGTLGLDMMFRTCTVQVNLDFSSEQDMIRKFRAGLALQPIATAIFANSPFKEGKPNGFLSLRSHIWTDTDNNRAGMLPFVFDNSFGLAFLLNSPLPHLECQFEQYVDYALDVPMYFVYRNNKYIDCTGMSFRDFMQGKLRQAPGELPTLNDWENHLTTIFPEVRLKRYLEMRGADGGPWRRLCALPAFWVGLLYDEESLQSILDMTFDWTQEEREMLRHKVPLTGLKTPFRDGYVRDLAEEVLKLAKNGLERRGYKEVGFLREVDEVVRTGVTPAERLLHLYETKWQRNVDHVFEHLLY

SEQ ID NO: 18100 - protein, 597 aa, Zea mays
  VARIANT 242..597: note = Derived polymorphism lacks residues 242 to 597
  VARIANT 205..597: note = Derived polymorphism lacks residues 205 to 597
  VARIANT 3..597: note = Derived polymorphism lacks residues 3 to 597
MCSGPRKPSTPPLPAETATAKNSSVMATALLLELAAADDVVAFRRAAEDDKAPALDAVGHWYGPSAAGAGAAAGRPRLEARTPTMVAALYGSTAVLAYVLSSAPAEAARASPTDGATPLHLAAAGGAPAAVAAAHILLAAGASADARAFSGLRAGDLLLPRAAAAAAADADRALRVLLKSPAASPSSSPKKSASPPPAPEARKEYPPDLTLPDLKSGLFSTDEFRMYSFKVKPCSRAYSHDWTECPFVHPGENARRRDPRRYSYSCVPCPEFRKGGACRKGDGCEYAHGVFECWLHPAQYRTRLCKDEVGCARRICFFAHKREELRAVNPSAVSVGMQMQPTVSPPPPSGLGDMLSPAAWPSSPASRLNKAALGGGRDLDLDQYQHMLFDTVSSPRANWGSAGGIGSPLPPARAVPDYADLLGSVDAASMLSQLHALSLKQAGGDMPAYGSMVADTQPHMATTSPMVGLGSSTAFGLDHSMAKAILSSRASAFAKRSQSFVDRGGRAPAARSLMSQQAAAAGAPPVLSDWASPDGRLDWGVQGDELHKFRKSASFAFRARSPPPPAEPDVSWVSSLVKDGHAGDIFAQWPELEQMVA

SEQ ID NO: 18101 - protein, 600 aa, Zea mays
  VARIANT 193: note = Ancestral polymorphism is V, Derived polymorphism is D
MAPSVSKMLSTPPYHAYYTWRRRLLPQETAASPNPSPASRRIAPPLRCCRCACSRSPARRFVPICASASDRAGATTAALVEAEEEAELDGPPMVQLSSDILRTELSLLKADAPPAGGDSSLGITALEDQDSEDGRHSGGRETAAYPAAMNGMQRSVVRGLPRWDSGNVTEQLWNFTWPAAIATLHPSLLPVAVLGFFSKLVVFAVGPLVGDLVSSLPRIPAYRSLTVIQTAAHLVSAAMVTYAFTVPRAPAASALLLRPWFATLVASTAVDRLSCVSLGVIAERDFVVQLAGEGRPIALARANAALSRVDLLCETAGASIFAVLLSRNHPLTCVRLSCAVSLCSLPLLFFLGGAMNRLADGILDRSASAGPAPLERPGRHGSAAVGKAWETIRHGWTEYLRQPVLPASLAYVLVCFNVALAPGALMTTFLIHLGVSASVLGAFGGSSAVVGILATFVTPYLVKELGILKAGAAGLVAQSALLGAAVVVFVTGPVSRRGALFAFLGFIVASRLGHMAYSVIGLQVVQTGNPMGKAKLIGATEIAVASLAELAMMAVAVVAGDAAHFGCLAALSAASVAAAACLFCAWLANPTDDLRRLFPC

SEQ ID NO: 18102 - protein, 326 aa, Zea mays
  VARIANT 192: note = Ancestral polymorphism is T, Derived polymorphism is S
  VARIANT 180: note = Ancestral polymorphism is A, Derived polymorphism is T
MGVDYYKVLGVGRGATDDELKKAYRRLAMKYHPDKNPTPQADTLFKQVSEAYDVLSDPQKRAIYDQYGEEGLKAGAPPPAASTHGAGAGVHRFRFNTRSAEEIFSEIFGGGFAGAGPRTPGGGVPSGFPMFGGAAGAGEASSAASQRKAPPIERPLACTLEDLYKGATKKMKISRDVLDATGRPTNREEILTIDIKPGWKKGTKITFPEKGNEARNVVPSDLVFIVEERAHPRFRRDGNDLIYTHKISLVEALTGCTVQVTTLDGRTLTVPVKSVVSPTYEEVVPGEGMPITREPSRKGSLRIKFQIKFPTSLTGDQKAAIQQLLS

SEQ ID NO: 18103 - protein, 814 aa, Zea mays
  VARIANT 475..814: note = Derived polymorphism lacks residues 475 to 814
  VARIANT 329..814: note = Derived polymorphism lacks residues 329 to 814
  VARIANT 293..814: note = Derived polymorphism lacks residues 293 to 814
  VARIANT 256..814: note = Derived polymorphism lacks residues 256 to 814
  VARIANT 183..814: note = Derived polymorphism lacks residues 183 to 814
  VARIANT 103..814: note = Derived polymorphism lacks residues 103 to 814
  VARIANT 93..814: note = Derived polymorphism lacks residues 93 to 814
MTPRPRLLLLLLAIALPAASAASTLAVSASSTSPTVCGVAEPNGTVYCAPLQGPSSSNSASPVAPSAIAFAELSAGRGFVCGLQAGGAALFCWPSTPAPQWGQLRRLYNGPAPLADLAVGGGHVAAYDASGKVVLWWRGGGRFPARADGAFRSLVSGDGFSCAVQANASAAVRCWGPQGSAVQAGLANASAAPYLAAGGARACAVLASGAALCSGSDASAGALPRDLFGYGLAVGDSHACALRRPDHTAVCWTLGGPTTTLYEPALGISFAFLVAGGNFTCGVASSDFSVYCWSAGAVAAPVPLPRIRPGVCVSDDSSCRGCGFMSQSQKFCGGSGGICDALCDDSPPPPAPAPPSPPPSSSRRVSKAWIAFCVVGAVGGFAGLCSIVYCLVFGFCSNKRVHNSVQPNISAAAAGTGADNNGGGGGAAASGSPYGSPNGSRARGLFRRQLSRAMTRQRSGPSSFKDPAEEFTFAQLEAATKGFALEAKIGEGSFGTVYRGKLPDGREVAIKRGESGPRARRFQEKESAFRSELVFLSRLHHKHLVGLVGYCEEAEERLLVYEYMKNGALYDHLHPKASAAPSPVASSWKLRIKILLDASRGIEYLHSYAVPPIIHRDIKSSNILLDGGWTARVSDFGLSLTGSPEPSSEESRSQQLAVTTKAAGTVGYMDPEYYGLHHLTVKSDVYGFGVVMLESLTGRRAIFKEAEGGSPVSVVDYAVPSIMGGELGKVLDPRAPEPAAHEAEAVELVAYTAVHCVQLEGKDRPAMADIVANLETAFALCEGSDRDRGTGAFGNSSSSASLSVTSMDRSGALA

SEQ ID NO: 18104 - protein, 192 aa, Zea mays
  VARIANT 75: note = Ancestral polymorphism is R, Derived polymorphism is H
  VARIANT 101: note = Ancestral polymorphism is G, Derived polymorphism is V
MDAAQASGDRSNFAINDVEVSTKLIHYYNGMRTALTLGSLSNALGRQPSARSNAPNDQQNHIGLVCCGACGYDLRLRSSDRNTAGIVGAGGAAYGRAARRGVVAFDAIDDARFGHADEFRCVDLRARRLFVRRTRLLCRKCGAGLGFGYDDRGQDGARPPRYDIKIRALQPLAADDDHHHHGDAAAPPTSDA

SEQ ID NO: 18105 - protein, 1690 aa, Zea mays
  VARIANT 37..1690: note = Derived polymorphism lacks residues 37 to 1690
  VARIANT 243..1690: note = Derived polymorphism lacks residues 243 to 1690
MPPPPPDRRDYLYREGRRHDGGGGDPLLPPAPTPPRWRDSPYHPSPPPPLRDHARPSPRRAPTSASSGRPAPRESSDLRPPLPHRAPPPAPLISSNRSAISEGYYRQGGGAYDRSYPDDPPPVYTPSRSDRYWPEDDGGQYKGFGRYGGGGRRDGRDMRGSYRRSPYRGGYGSDFSRNHPEQPPPPPPRRSPLRSVAVPICYDSPGNRVDRGDRDNLPRVTPWRRRESRSEPADAVGLLSVGQTTRLSASGKEASAQPLSVSGPHGTEDEAPRKKARLGWGQGLAKYEKQKVQGPVDPAEAVADGSPADGELKTTSPVPVPVHPVPVPVPYVAPAPPAAPVLAPAPAPSAAPALLSAPMQCSSPVTGPPYCSSAPEDKSCEMMPNAVTNSTKDVLEADDTTFNNEFLIKLDQLGDDPVISLGNMLVELIQHEDSCSGDSNGPTSTYKLLLLKESISKEIEKTELEIDSLEGELKSVNTEAATTLEGSPTGVTHTENLSPSSGTSKVPGSVEICDTSDMIKEPGELIGSPKVPVVQYDDVKSADMMEIETAPVHNAKTVPSEAGAISPVVAEGKACAAADLSSLKASEEAGSQNDIDNGRLETSSRQANADSMKIEISDDLPVKKWTYHDHKSDLLSSVTSANSAIAKEINEVLFKSLPADTPRLDLFASSHLLSQRKSDLIVKERLGVCKTRLRLKEQMLTMKFKAYCHLWKDVQLFSANKQRSKSNKRTDQSNRTSQIGSQRQRSSNRSRLTMPAGNLSTFSTPEMSDVAMRLFSEFKIKRCRNYLKMPALIIDEKEKEWLKLMNKNGLVEDPVLVEKERVMINPWTQEEKKIFMELLAKFGKDFSKIASFITHKSTADCVEFYYKHHKSDSFREVKKLLDLRQQQPTSNFLGAKSGHKWNPESNAASLDMLGVASVVAAHGLEYAKQVEKISAKSLIRTAYGPNVTSVANKSSDKECIDHVPLHERESVAADVLAGICGTLSPDGMGSCITSSADPGQKISMKRVEHVLSQENDKTVEEEDTLSDQECEVDPVDWNDDEKSIFIEAMNNYGKDFARISSCVKSKSYEQCKVFFSKARKSLGLDLIHQGAADVSMPASDTNGGKSDTDEACAVEMDSAICSTQSCSKIAMDVCPTEGAIGGPNSVIISKQAEAYISNGCNADVKIEEDEKVADKNCSIVDAKRSSDATHEAGPIDINCPGSTDKLQGTDDVVDLVNMHSNSGISSSAKHAVAIHSEMRSTLHSVEVLQTDKGEGTGTDLSWVEECSHHALDNTPMKNGNSGAPAFLASDSGIKDNVRISNITAASTVSPAFTSSYQHSVPGDMPLPKPKPLVTPLTPKDLMPVQFSSVLPDPTAIRFEGIASITTPNFEDTGNRVSGALGAKEMSKYPAFRDPSGNQQSTLFCNIDGYMNHRLTTELPFFSERTASGTVNTSQADRLTQTKLQNGRSSSLCLQNNSDGIQWPRDHEGGLEGSLRPCSRNTSSEGDEQQKRPGDVKLFGQILSHQSTLQSSGLSCNGNKSKPPSPKIDTSVRSMNNPMDRVVCSSRPGTTPHLGLEERLARCYGHLDGSTAQPEPLLVMAKRQRSLAGVQFYSAKNGTLGVLPDYQQPSTQPQQSDPKRVERLSDPQKRNVLELISGFQQPGRVARFGGAGILVSGNVSDPVAAALKAQYGPGSKIMGSDVDPWTDIGSR

SEQ ID NO: 18106 - protein, 130 aa, Zea mays
  VARIANT 60..130: note = Derived polymorphism lacks residues 60 to 130
MGATLFGGLTESRFAKRRPGFADRRKRASLRAEGPPYRVKCEPDEPVPASQPNQGSVRVRGRKDRKRIKQRDDFITAEKEKRRAQYSAAVKRKEAERTEREMAAVARDRAWAERLVELKQLEEEKNTAMA

SEQ ID NO: 18107 - protein, 143 aa, Zea mays
  VARIANT 2: note = Ancestral polymorphism is A, Derived polymorphism is V
MAAVRLLKLNKQPRAKSLWTLVRRLLLLRRSRKQQQQPAAAEQDSEGEKSHLLSRSSLEQLLVTSSTDGAACRCAKKLGQPVAPLRPEAADADADAAAGAASPTGGAHRGAAPAAHRRFMFGGFRRRLLMRRPWRPMLVAIPE

SEQ ID NO: 18108 - protein, 559 aa, Zea mays
  VARIANT 74..559: note = Derived polymorphism lacks residues 74 to 559
  VARIANT 353: note = Ancestral polymorphism is C, Derived polymorphism is R
  VARIANT 361: note = Ancestral polymorphism is L, Derived polymorphism is I
  VARIANT 367: note = Ancestral polymorphism is Y, Derived polymorphism is H
  VARIANT 509: note = Ancestral polymorphism is A, Derived polymorphism is S
MGTQKKAAEWAARDAISHHQSAAAPPTAPPETGGEGRRELDATPTVLRLPITTSPAPSTDQINQARPDPKMQRWLPALLRRAAPGGGAARLFASSSLLFDDTQEQFKESVRKFAQENIAPRAAAIDASNHFPRDVDLWRLMGDFNLHGLTAPEEYGGMGLGYMYHCISMEEITRASGAVGLSYGAHSNLCINQLVRHGSPEQRLKYLPKVLCSPRICFVLSLCFARAIVFLRTMKMLTASICLAVLYSCIFAFSMKLISGEHIGALAMSEPNSGSDVVSMKCKAEKVDGGYVLNGNKMWCTNGPSAQTLVVYAKTDLAAGSKGITAFIIEKGMPGYRTTPLSSLDMIEHEHMRFYSFLVMLLMVLVHDYRFSTAQKLDKLGMRGSDTCELVFENCFVPRENVLGEEGKGVYVMMSGLDLERLVLAAGPIGLMQACLDVVLPYVRQREQFGRPIGEFQFIQGKMADMYTSLQSSRSFVYSVARDCDNGKVDRKDCAGVILFAAENATQVALQAIQCLGGNGYINEYPTGRLLRDAKLFEIGAGTSEIRRMIIGRELFKED

SEQ ID NO: 18109 - protein, 198 aa, Zea mays
  VARIANT 154: note = Ancestral polymorphism is R, Derived polymorphism is G
  VARIANT 151: note = Ancestral polymorphism is R, Derived polymorphism is M
  VARIANT 146..198: note = Derived polymorphism lacks residues 146 to 198
  VARIANT 69: note = Ancestral polymorphism is T, Derived polymorphism is I
  VARIANT 65: note = Ancestral polymorphism is R, Derived polymorphism is W
  VARIANT 24: note = Ancestral polymorphism is L, Derived polymorphism is F
MEERREMDPVTHAHRVAWLQHGLLVLLQIHPVRLHLDGDAAVHRPTTEDICYYLDCHLTSIKATRNLVTEIFNFSQDDLLTEDMMILDTHGEVFIWIGQYVESKEKQKAFDIGQKLEHKMLDNFFSVLSCVIFVPFYTGFLPLLFWSGHGRLARQMTLLMAFYDYLGNSVKDMVSAPRPCSLPIRRVTTIEDEKENAI

SEQ ID NO: 18110 - protein, 931 aa, Zea mays
  VARIANT 871..931: note = Derived polymorphism lacks residues 871 to 931
  VARIANT 812..931: note = Derived polymorphism lacks residues 812 to 931
  VARIANT 769..931: note = Derived polymorphism lacks residues 769 to 931
  VARIANT 729..931: note = Derived polymorphism lacks residues 729 to 931
  VARIANT 672..931: note = Derived polymorphism lacks residues 672 to 931
  VARIANT 528..931: note = Derived polymorphism lacks residues 528 to 931
  VARIANT 511..931: note = Derived polymorphism lacks residues 511 to 931
  VARIANT 439..931: note = Derived polymorphism lacks residues 439 to 931
  VARIANT 265..931: note = Derived polymorphism lacks residues 265 to 931
  VARIANT 245..931: note = Derived polymorphism lacks residues 245 to 931
  VARIANT 213..931: note = Derived polymorphism lacks residues 213 to 931
MSDLASSCKDKLAYFRIKELKDILNQLGLPKQGKKQDLVDRVLAILSDEQGQHHHGWGRKNALTREAVAKVVDDTYRKMQVCAPDLPSRSHSGSDFSHFRPKEEAPDFYHVDTKVRCLCNSTLLNDNMIKCEDGKCQVWQHITCVLIPDKPTEGAGPDIPPHFYCELCRLKRADPFWVTTGNPLLPVKFMSSGVGNDGASVPQIVEKTFQLSRADRETVQRQEYDLQVWCILINDKVQFRMQWPQYAELQVNGIPVRVMTRPGSQLLGINGRDDGPLVTTCSREGINKISLSRVDARTFCFGVRIVRRRTVPQVLNLIPKEGEGESFEDALARVRRCLGGGGATDNADSDSDLEVVTESVTVNLRCPNSGSRMRIAGRFKPCVHMGCFDLETFVELNQRSRKWQCPICLKNYSLENLMIDPYFNRITSLLHNCSEDVNELDVKPDGSWRVKGDAATRDLSQWHMPDGTLCDSKEDTNPGVVSVNEFKREGTSDGHRTLKLGIKKTPNGLWQVSSKPDDKKPVVRNHIQNNTGYSIPNIVPMISSPTGSCRDGEDVSVNQEGGGIQFDISLNQEFDSFAHNFGQTYNTEDRQQEPQHNAADVIVLSDSDEENDPIVRLPAVYANTPTNGDSFPFVTDAAVSGYPEGYQEDAGVGTSGLGLLSNNTGDFEINNWQMHSYPQPEQGFQFFGTDTDVGNPFVGPHNSFSITPEDYSLDCNVGIEDPSAAHDVSICRNSNDVHGSLVDNPLALAGDDPSLQIFLPSQPSTVPLQEELSERANTPNGVHPDDWRISLTLAAGGGGNEEPTSVDGLKSQPKVPSKEAGVEPLLDAGLSPFMNLILLFCDHFVPKDNGLLHFSLVACQPFPGSSRLTFEGRHLRFAADDPGGTMRWPAAPDLVGDEIGGWYRIFSNWEWFNVASGAGCTFSLTFTGYKE

SEQ ID NO: 18111 - protein, 654 aa, Zea mays
  VARIANT 16: note = Ancestral polymorphism is P, Derived polymorphism is L
MQPLLLLLLASSLLRPPAAASAADSSSGCWPKTCGHLNVTYPFWVEEPGRAPCGPPSFQLKCNGSGAFLSISVYQAYQVLDIFPENSSFHVVDHNLPLATGCPAPTMNISLFSPGTFVFSGLNRELLFLGKCTGFPPAESAGFRSLPCDNSSFVRLGDGRNFSSQGIQGGVPHGCLFTVVPVLGAPDGNGDDDDYVASMRNGFLVDWKAVPGDCPKCMARGGECTYGGPDAEFACDCSGGKCGGNSNKNRILGIVCGVAGGGLLVVSVCFFFVWRKHKRRKQARAPNGCMRSESSMQSYSKDLELGGSPHIFTYEELEEATDGFNDSRELGDGGFGTVYKGKLRDGRVVAVKRLYKNNYKRVEQFINEVDILSRLLHQNLVILYGCTSRSSRDLMLVYEFIPNGTVADHVHGSRASERGLTWPRRMSIAIETAEALAYLHAVEIIHRDVKTNNILLDNSFHVKVADFGLSRLYPPEVTHVSTVPQGTPGYVDPVYHQCYKLTEKSDVYSFGVVLVELVSSKPAVDMGRSHSEINLANMALNRIQNHEVGQLVDPELGYETDGETKRSIDLVAELAFRCLQLERDSRPSMKEVVEALNRIRNGDSLENNKTDRSSSSPKEDARLLTSSIQYSPDSVIHRFHSQSTTHSAASNASG

SEQ ID NO: 18112 - protein, 252 aa, Zea mays
  VARIANT 192: note = Ancestral polymorphism is F, Derived polymorphism is S
  VARIANT 167: note = Ancestral polymorphism is M, Derived polymorphism is I
  VARIANT 150: note = Ancestral polymorphism is N, Derived polymorphism is I
  VARIANT 48: note = Ancestral polymorphism is F, Derived polymorphism is S
  VARIANT 35: note = Ancestral polymorphism is H, Derived polymorphism is Q
MASTSSVWSVWIALSLTLTLASASPADGQGGGGAHCPPVLCGGVEIAFPFGIVQEQATATNCGGIGFQVRCVNGTPYLGYSRYDHWLQILSVSYTNASLLVADTHKLEKLGASDGGGDSAVCRIPGNNSSTKVALPFSISPLNQDLILYNCTKAPAPAPDEEGLVEMTRCGNRTFARIGGRYGEPDDDGGYSLDGCGATVVPVLVKDDGKANASDYEQLISGGFLLTWQWQTSLEPSSVAWPSQRLQTQRFV

SEQ ID NO: 18113 - protein, 365 aa, Zea mays
  VARIANT 174: note = Ancestral polymorphism is R, Derived polymorphism is M
  VARIANT 41: note = Ancestral polymorphism is T, Derived polymorphism is M
MGTGAVAVAAPDRAKQRRAGGHLWKKALLHFSLCFVMGFFTGFAPSSSSSWKSAAATPQHHPPHRPGDRLAASRVAVDARATLSPPAEAADALSAGATVDLGDDEEDAAQRRLLIVVTTTRSGPGERRRRRGELLRLAHTLRLVRPPVVWVVVEPAADAPATAEVLRGTGVMYRHLAFKPEDNFTTADAEAHVQRNAALAHVEKHRLAGVLHFADAAGVYDVGFFEQIRQIEAFGTWPVATMSAGEKKVVVEGPLCSASKVVGWFSRDFNDGTTRSVTYNTEADLNPAGAAGTRAHTIDVSGFAFNSSILWDPERWGRPTSLPDTSQDSIKFVQEVLLEDRAKLKGIPSDCSQIMVWQYSVPSSR

SEQ ID NO: 18114 - protein, 93 aa, Zea mays
  VARIANT 63: note = Ancestral polymorphism is E, Derived polymorphism is K
  VARIANT 60: note = Ancestral polymorphism is R, Derived polymorphism is I
  VARIANT 56: note = Ancestral polymorphism is R, Derived polymorphism is I
  VARIANT 16: note = Ancestral polymorphism is P, Derived polymorphism is L
  VARIANT 2..93: note = Derived polymorphism lacks residues 2 to 93
MWPGMILKSGNRIIAPFLVQKQESKDDESNYDLEYEVLSHGFDDQWKFVGETSTSRRFERSNEADGAHNHTHQVVKANIDSSTSNPLPSNTPT

SEQ ID NO: 18115 - protein, 369 aa, Zea mays
  VARIANT 202: note = Ancestral polymorphism is I, Derived polymorphism is S
  VARIANT 195: note = Ancestral polymorphism is T, Derived polymorphism is A
MASPPPDLLIDDATAEILLRLPPDDPACLVRASLVCKAWRELLSSPIFLRRYRRFHGAPPLLGFLYNIYDERPCARFVVAADAATTFPFSAPAFDQFDLWFIECRHGRALLQTFERHAPARLVVWDLITGDQQHIPMPVPGYPYFCRTAAVLCAADGCDHLDCHGGPYLVVVIGAYEEDTLRWASVYSSETGVWTTSSSIQIDAYVEQRPSLLAGDALYFSAQEGKIIVKYDLNGQSLHVINAPDMFEPTEGIAVTVEDGGLGLAGVKDGNLHLWSWQAGPGGIAEWVQGRIVKLRTLFPILKPLDSLDVIGFQEGTDTIFISIDMEVFAVTLRSEQVKKVGKTGSKYAMAPYVSFYTPDLAKGRLLSP

SEQ ID NO: 18116 - protein, 511 aa, Zea mays
  VARIANT 240..511: note = Derived polymorphism lacks residues 240 to 511
  VARIANT 332..511: note = Derived polymorphism lacks residues 332 to 511
MASPPLPGKDAAFGSGTTVRRPGRLRVMHPHVAELLRSPRRHARPAAAPQAKAQAPVPERARYACAFEDGGGVAAPGRLVWAKVRNHPWWPGQVFDAADASAVARARRRLRRAVLVAYFWDRTFAWTDAAALLPLRAGFPRLAAVAPVAAAVDAALAEVARRVLAGLSCCCGGGGDNEATASTQAIDNAGVRAGAPGAAVDAAFARRALQAEALLGYLSALATSPRAGGDRVDLAVAAAQLGALGRWKGSARGLPEYTVVHGIDDAVVAAPGRAKAKRRRPPSTGVDGPAPAKRRVSRNTHIAATKGNAACDTGDYEALELEDLPLGTPAQQTPTPTRIGKLMSRAAQNMSLSPVVLRVRATAANGSNCAPPPPTAVLPAPHMVRCAVVAAHEQLPPTRKDDSGDHEAWAGAGLVLNFSSAHAVPSARHLATAFSRFGPVKEVRVDNTTVVFDSDAHADEAFSGAAEIGSISASLVSFRVTSSLPAAPDDPAAQPQTQSMPSDTSPVEALR

SEQ ID NO: 18117 - protein, 358 aa, Zea mays
  VARIANT 161: note = Ancestral polymorphism is Y, Derived polymorphism is C
MANMLVSEMRLPLYLAHLLAARRLDTAKDVLSLPEVELMAILDAGLPTARAAIAHVSEAACPPCQTALSLLEERVRLGGGGRLATMLCGLDEALGGGIPTGKLTEVVGPSGIGKTQFCLKLALLAALPEYYGGLDGRVVYIDTEFKFSPRRLLKLMATVYYFQMAGRILVMRPTSLADFTKSLEEMKVTLLQHDVKLLIVDSVAALMSMENEKATAGFRQHPLRWSLSFLKSIAEFSRIPVVVTNQVRSQSNDDGYHFSFEVDRKDGSNCAERFDSHLVAALGIQWAHAVTVRLVFESHSGHRFIKVAKSPMSPAVAFPFAVESSGITLLSDESIDVTGPDITSIRCQDISPGQNVLA

SEQ ID NO: 18118 - protein, 117 aa, Zea mays
  VARIANT 72..117: note = Derived polymorphism lacks residues 72 to 117
  VARIANT 57: note = Ancestral polymorphism is T, Derived polymorphism is A
MKMQSWALMMFGSYNHLVPQMIFIQPQFISLNLLLTAYAKKFFYLVKKKLKEGEEVTRVAQLDSKITTSDIQKLFTTSGLEFVPLSVVIHGEEWVSYSNVRAANEPIQTLKEFSKIK

SEQ ID NO: 18119 - protein, 386 aa, Zea mays
  VARIANT 145: note = Ancestral polymorphism is R, Derived polymorphism is C
  VARIANT 156: note = Ancestral polymorphism is G, Derived polymorphism is D
  VARIANT 164: note = Ancestral polymorphism is G, Derived polymorphism is C
  VARIANT 240..386: note = Derived polymorphism lacks residues 240 to 386
  VARIANT 276: note = Ancestral polymorphism is G, Derived polymorphism is D
  VARIANT 284..386: note = Derived polymorphism lacks residues 284 to 386
  VARIANT 353..386: note = Derived polymorphism lacks residues 353 to 386
MQLDLNVAEAPPPVEMEASDSGSSVLNASEAASAGGAPAPAEEGSSSTPAVLEFSILIRSDSDAAGADEDEDATPSPPPRHRHQHQQQLVTRELFPAGAGPPAPTPRHWAELGFFRADLQQQQAPGPRIVPHPHAAPPPAKKSRRGPRSRSSQYRGVTFYRRTGRWESHIWDCGKQVYLVVVRLLADIRRWIRHRSRRCKARTGLDAQNSSAYDRAAIKFRGVDADINFNLSDYEDDMKQMGSLSKEEFVHVLRRQSTGFSRGSSRYRGVTLHKCGRWEARMGQFLGKKYIYLGLFDSEVEAARAYDKAAIKCNGREAVTNFEPSTYHGELPTEVADVDLNLSISQPSPQRDKNSCLGLQLHHGPFEGSELKKTKASANDRYTLTS

SEQ ID NO: 18120 - protein, 119 aa, Zea mays
  VARIANT 17: note = Ancestral polymorphism is R, Derived polymorphism is Q
  VARIANT 74: note = Ancestral polymorphism is A, Derived polymorphism is D
MMQIDDAPSELPGRPRQLSPLVAEHPPAWPAQPPHPFFVFTNHEMSASGDLHRRPAGAVPSWAWQVAAAAPPPAALPSSAAASSGFSNTATTAATTAPSASSLRYCPPPPPPSSHHHPR

SEQ ID NO: 18121 - protein, 91 aa, Zea mays
  VARIANT 20..91: note = Derived polymorphism lacks residues 20 to 91
MDVLKMDSANRINERCLELQKNKKSTKTKLEDDKRKVRPTKRSCGCSTILSRHMRVKYLQRFPHNSLPGSYGMLHCYATDMLAVGLSSLFC

SEQ ID NO: 18122 - protein, 235 aa, Zea mays
  VARIANT 20: note = Ancestral polymorphism is M, Derived polymorphism is T
  VARIANT 34: note = Ancestral polymorphism is H, Derived polymorphism is Q
  VARIANT 47: note = Ancestral polymorphism is F, Derived polymorphism is S
  VARIANT 121: note = Ancestral polymorphism is R, Derived polymorphism is S
  VARIANT 187: note = Ancestral polymorphism is F, Derived polymorphism is S
MMASTSFVWSVWTVVSLTLTLASASADDQEGGAHCPPVLCGGVKIAFPFGVVPEQATATNCGAIGFQVRCVNGTPYLGYSRYDHWLQVLSVFYNNASLIVADSHELETLGASDGGGSVVCRIPENNSSTKVGLPFSISPLNQDLILYNCTKAPAPDEEGLVEMTRCGNRTFARIGGRYGEPDGGGYSLDGCGATVVPVLVKDDGKANASDYEQLISGGFLLTWQWQTSKLHLCTE

SEQ ID NO: 18123 - protein, 390 aa, Zea mays
  VARIANT 48..390: note = Derived polymorphism lacks residues 48 to 390
MASAVGASTATRFLPRLPDPWRPRRARAALPPLTWRPPAVTVAAASPRPGEAEGRRRERTRRRRARGPGQEEGVSLSSEKETLNSTPRAQTNKDAEPEPVSSTTGKGSAIRRVTLVVLAAVLFGVSIALRDGAEKASEYFAGYLLEQSLSVDNLFVFVLVFKYFKVPKEYQNRILSYGIAGAVVFRAVMIILGTASIQKFEAVNLLLAVILLFTSYKLFAEEEQESDLSDNFIVKTCQKFIPVTVELIPMFLLSEYYDDDRFFTNQDGLWKATPLLLTLAVIELSDIAFAIDSIPAVFGVTRDPLIILSSNIFAISGLRPLYVLISESMSELEYLQPAIGIVLGFIGTKMIFDFFGYHIPTEASLAVVTTCLSGGVILSLRKASKVEGDK

SEQ ID NO: 18124 - protein, 1308 aa, Zea mays
  VARIANT 539..1308: note = Derived polymorphism lacks residues 539 to 1308
MAIVRTGGGVRLPRLDGGAEASLEATEDEDEEEEGSRATPSHESDADGFSAEEENGGGGGDDEPEAEEEEEEFEEEEDEGDSGMGSDELDVAELGEPSTEMCQVGDQSMAVPLELYDLDGLGDVLSLHAWNDLLSDDERLRLAAFLPDMDQETFARTLVELLAGQNFHFGSPLADFLKRLKGGLCDPRVNLYRRGIRFVERRKHYYWLQSYHNSMVRRLREIKDCWKGREGYSLDERLRMLDTMKAKQQHQQQQQRKALDFTRRAGSETDSESRGSGEQVLARPKHDKSRQKKAGKLAKEKSKGLLRVGTPKGVDEDDMGGSGRDAVVALSELSRRGYDSGTHRGKLHRSIDGLYSESEDLGYERDSSRPRFPRPLPKPVKKELSTSCDVNLYANNYSDNHTASPYYYSRNLSANQGVTLAAAYDPPYFDTRRNARYLERDWVQGGKGVHINALMGDEMNLPAGNHTGNSDDWQKGQSAGDYRSRKDQAGYGLKVKSYKSIEKEVNDARVGSDPRSKISQAKVAGKSSRQLDRTGQKHWSNAVYGQSDETESDSSEKFEDGREAHYLERKPERHHSGYHRPAHGAKKSNKLAKVAKMNYPTADADLEPSQSKGFKGKVSETGYLRDVDVMMTGQISDVMKPLAASGERKRKGVANLDMRVYDNSDLHEVNEDANDSFRLAEYERLASRSGHAVQDSNGGYGGTERTSSSSKKAKGRVEVPSLDEHGEHLSSGPKVVENTGGSKKKSKKKPESSTTDAVILAEPAVAVPENNVIAAEPEKVEKPKKKYVPITPTIHTGFSFSVVHLLTAVKKAMVTPAEDTPPATATQPDGEEGKKWFNSGERSKTPHQEQSATDQTEQVLEGANASAVEQTVPINTPALTVQEIVNRIRANPGDPRILETQEPLQDLVRGVLKVLSSRTAPLGAKGWKALVAYEKSNKSWFWVGPAPSVSSYDDPDEETSAEAWSIPHKMLVKLVDAFSNWLKSGQETLKQIGSLPPPPPPNPANLDLKERFKELKAQKSLNTISPSSDEARTYFQREEFLRYSIPDRAFCYTAADGEKSIVAPLRRGGGKPTAKARGHPMLLPDRPPHVTILCLVRDAASRLPARTGTRADVCTLLRDSQYLNHEEANKEAAINQVVSGALDRLHYERDPCVLYDNDKKLWTYLHRGREEEDFEDDGTSSTKKWKRPRRDVSDAAEPGAANDDIDDDGAGTPPSNNVKKQKTTLSGEAANDEGNHPTQNPASGGLEGDSDLNAVPSSKFFEEPCGDAYIDARPDDGGPNSVDAKPGSTADDNTALPGNTGMDATTPP

SEQ ID NO: 18125 - protein, 881 aa, Zea mays
  VARIANT 40..881: note = Derived polymorphism lacks residues 40 to 881
  VARIANT 266..881: note = Derived polymorphism lacks residues 266 to 881
  VARIANT 389..881: note = Derived polymorphism lacks residues 389 to 881
MQTAVVVVAALLLHLSALPRLGLATATADTNQTSGNDTSCTSARCGNLSVTYPFSLAGVQPIYCGFPSVLPDDMRRRQPHLPQQDVQGSPLQRPPHILRQQPTVALSCTASLILACLGWMMYRQKRKEEQITSASNQKYKSYESNIKEILQGYGSLVPKRYKYSELKKITGSFKDKLGEGSYGTVFKGQLEDGRKVAVKLLKGSKGNGEEFVNEVVSIRRTSHVNIVSLLGFCVHGHKRAIVYEYMANGSLEKYIQSEETRMAIGWEKLREIAAGIARGLEYLHRGCSTQIIHFDIKPNNILLDEDFSPKIADFGLAKLCHLKDSALSMAEARGTIGFIAPEVFSRGFGVVSTKSDVYSYGMMLLEMVGGRKNLTESTENSSQEYFPNWVHDRLVKDLQSHEVTCKTEEIAKQMTLVGLCSTTTTTGGAPNTAAPCAPAWCGDLAISYPFWLAGTHPPKCGYDQGFEVTCDKAKAYLKNSTCTYQIQSIFYAMNLLRVAIVGLLSLDDGTCNVDKFVNASFVPSPAFEIEPQQNQELFFVYDCNLRAPQLPRSWTPLRCGNNGSFTWLSGQYRPEDSSMALPGNCNVAMIPVVAYEGATAADYQRLVEGGFFLSYYLTDTEDHYYYGQCQACSYRAGHGQCRTIVSDDGFQCYCSDGVYSTTACGTKRANWKTTIVDKDFCPKIADFGLAKLCHSKDSKLSSVTDARGTIGFIAPEVHSRTFGVVSTKSDVYSYGMMLLEMVGGRKNVKSVVENSSEKYFPHWIHDHFAQEGGSSQGYGGGVTGEVEETARKMTLIGLWCIQILPVHRPTITKVLEMFERDLHKRLDMPPKQNFSQILEDSAVYNLNTESMMSPSSSSMETQGSSEGLKAEEMKCVNSNVI

SEQ ID NO: 18126 - protein, 220 aa, Zea mays
  VARIANT 12: note = Ancestral polymorphism is A, Derived polymorphism is V
  VARIANT 47: note = Ancestral polymorphism is T, Derived polymorphism is K
  VARIANT 64: note = Ancestral polymorphism is W, Derived polymorphism is C
MPSQQQQQQAAAGSTRWCPTPEQLMVLEETYRGGLRTPNASQIQQITAHLACYGRIEGKNVFYWFQNHKARDRQKLRRMLFMSQSHHLLSCAQYYAAVLAPRHGHQLLLSPSSTSPTPPAAAAAAAYGYYYSATAFAEPASSGGGLVPAEALGRPEYSSLDNFGVALDDVVVSSASAAVEMTPPGFEVVVPPPPAAAFCRPLKTLDLFPCGLKEEQHDVA

SEQ ID NO: 18127 - protein, 519 aa, Zea mays
  VARIANT 461: note = Ancestral polymorphism is R, Derived polymorphism is S
  VARIANT 388..519: note = Derived polymorphism lacks residues 388 to 519
  VARIANT 372..519: note = Derived polymorphism lacks residues 372 to 519
MSSRRYPSGSEKGKRKKRVDDLIDSQRGAIDKFFKSNTSASTNPNDVFVLAIVPVGTEEPTNEKILEKNMLISTPMITIGSIEQLYSDSNGNFLAYVEMIAEFDLVMQDHLRRIQNKEIHYHYLSPKIQNELIVLLSSNITRSIIKIVKEAKYFSVILDCTPDISHQEQMTLLVRCVNLSNGKINIEEYFLGFLNVDDTSSLGLFSVLLDSVKSLGLNINDIRGQGYDNCSNMKGKHQGVQKRLLDINPRALYMPCCHSLNLTLCDMAKSCEKAISFFGIVQRIYVLFVGSIKRWNVLCKHVPIFTLKSLSNTCWESRISSIIAITYQAKELRSALFELSHASDIEPKDKSDAKSLFDALGNFEFLLGMVIWHDILYSVNKVSKKLQSPDMCIDSALNQIQGMVQYFEAYINEGFPSSLIISKGIADEMGLYASFPVKRHALSKKQFDENNDQEEILEAERVFKVKYFLVVVDMAITSLKTRFEELMVFKDIFGFLLRSTILKSLNDTELSSGSRQNNH

SEQ ID NO: 18128 - protein, 249 aa, Zea mays
  VARIANT 124..249: note = Derived polymorphism lacks residues 124 to 249
MLQLLFEDLNVNNGVSVCLLLVYVCYSCWISCFIFWDVEIIFVSLDRDEASFRDHFQGMPWLAVPFDAAGLLRQKLCARFAIERIPALIPLSASVTSSSGLGCGEDAVRLVGEYGVDAYPFSAQRRELESMDDARREGGRLQELLGCEERDFVISADDIKIPIADLTGKTVGLYFGAHWCPPCHVFTKQLKEVYNELKILRPGSFEVIFVSIDRSKGEFQASMSSMPWLAIPYSDAARKRLIIKETNFD

SEQ ID NO: 18129 - protein, 66 aa, Zea mays
  VARIANT 15: note = Ancestral polymorphism is A, Derived polymorphism is T
  VARIANT 19: note = Ancestral polymorphism is L, Derived polymorphism is F
  VARIANT 21: note = Ancestral polymorphism is T, Derived polymorphism is M
  VARIANT 24: note = Ancestral polymorphism is K, Derived polymorphism is T
  VARIANT 29: note = Ancestral polymorphism is F, Derived polymorphism is L
  VARIANT 31: note = Ancestral polymorphism is M, Derived polymorphism is I
  VARIANT 34: note = Ancestral polymorphism is S, Derived polymorphism is N
  VARIANT 49..66: note = Derived polymorphism lacks residues 49 to 66
MKFNVNRVDNMVIQAIFLLDMLNKDINSFSMRVSPSNQLWNPNGQAFGWKVQQRWLRDPRVVGRQR

SEQ ID NO: 18130 - protein, 325 aa, Zea mays
  VARIANT 283: note = Ancestral polymorphism is G, Derived polymorphism is S
  VARIANT 120: note = Ancestral polymorphism is W, Derived polymorphism is C
  VARIANT 86: note = Ancestral polymorphism is V, Derived polymorphism is I
MATPPNPPPPSTPIAAAAPLLPAEFTRFTFRALYVRRTGPSSREMIQPGRPYDELGRRLTSDYPVYDGRGSDAALVARMQGITVLVGNAHQLFTIVFETGRFKGSTLLTNGMVTEGSDEWAVYGGTGAFAMATGVIRRKNLLAGGGDSGGNSDELSVEVFCPVFGSPQQPPKDDDDGSAVTKIGLWGGPGGSAQDITTTEAPRRLNSVTIRAGIAVDSIEFTYTGKDRQRRTAGRWGGLGGNVRTIDLGDNEHIREVSGTYGTFEGATTLTSLRFITSTRAWGPWGTENGTRFCITAPIGSSVVGFYGRAGTRLVDAIGVYLRQL

SEQ ID NO: 18131 - protein, 460 aa, Zea mays
  VARIANT 333: note = Ancestral polymorphism is D, Derived polymorphism is V
  VARIANT 326: note = Ancestral polymorphism is Y, Derived polymorphism is N
  VARIANT 239: note = Ancestral polymorphism is R, Derived polymorphism is C
  VARIANT 189..460: note = Derived polymorphism lacks residues 189 to 460
  VARIANT 177..460: note = Derived polymorphism lacks residues 177 to 460
  VARIANT 167: note = Ancestral polymorphism is G, Derived polymorphism is R
  VARIANT 150: note = Ancestral polymorphism is P, Derived polymorphism is L
  VARIANT 15: note = Ancestral polymorphism is G, Derived polymorphism is V
MDPSVSSSPLRLSAGTRASPAPTPRPPSLVVAAGRHQPAAATATTRLRAVSPSPPPPSPVGSFGFDALKETFSVDVAAAGARPLRVPLAAPFTIASSRLAALSNVAVRVELRSGAVGWGEAPVLPSVTAEDQPAALGAAARACAALAAAPAAPLGALLQDVAGVLPGHAFASVRDPQLLYVLLRQARAGVEMALIDAVANSIRIPLWRLFGGASDSVTTDITIPIVTPNEAAQLAAKYRGQGFQTLKLKVGKNLNSDIEVLKAIRLVHPDCSFILDANEGYTANQAIEVLDRLNEMGVTPVLFEQPVHRDDWEGLRDVSAVAMEKYKVAVAADESCRSLLDAQKIIQGNIAHVINIKLAKLGVLGALEIINAARKSNTALMIGGMVETRIAMGFAGHLAAGLGCFSFVDLDTPLLLSEDPVYGGYEGNLTQNILCVPWCKGIAYYSYRSMFPQDSGIKKF

SEQ ID NO: 18132 - protein, 292 aa, Zea mays
  VARIANT 198: note = Ancestral polymorphism is P, Derived polymorphism is L
MPAATAAGGPRGSKSPTTSGDIATLGGGWLGPRGSKSPTTSGDIATLGGGWLGPRGSKSPTTSGDIATLGGGWLGPRGSKSPTTSGDIATLGGGWLGPRGSKSPTTSGDIATKGGGWLGPEGGTLPRGSKSPTTSGDIATLGGGWLGPRGSKSPTTSGDIATKGGGWLGPEGGTLPRGSKSPTTSGDIAAMEGGFVGPAAGILHDGGIAAMGGGWLGPDGGTLVRGNKSPIMLGGIVEYGCASTVDAKSVINSVSATTTTIGDVMAPTILILLLTMASLWFFPSFVFVDVCA

SEQ ID NO: 18133 - protein, 194 aa, Zea mays
  VARIANT 24: note = Ancestral polymorphism is V, Derived polymorphism is I
  VARIANT 30: note = Ancestral polymorphism is G, Derived polymorphism is D
  VARIANT 31: note = Ancestral polymorphism is V, Derived polymorphism is M
  VARIANT 109: note = Ancestral polymorphism is R, Derived polymorphism is W
MHTRSRSLFFLSCSDPKNPSLITILVLAFGVVFPPKATADDVVLQRFALAPADPASNSIISFNVTATVSLWNPNMYRAIEYGALAVTFSFNGTRFDDSASVPGFKHKARKTATQSVRVGGVGKPIKLTRPGVGEFRAENDTGSFGVEMRRDMVLQHKGQSHPTFKPPRVVATADLANVPRPIDPPLPLSAARHR

SEQ ID NO: 18134 - protein, 203 aa, Zea mays
  VARIANT 11..203: note = Derived polymorphism lacks residues 11 to 203
  VARIANT 48: note = Ancestral polymorphism is G, Derived polymorphism is S
  VARIANT 51: note = Ancestral polymorphism is V, Derived polymorphism is A
  VARIANT 52..203: note = Derived polymorphism lacks residues 52 to 203
  VARIANT 53..203: note = Derived polymorphism lacks residues 53 to 203
  VARIANT 68: note = Ancestral polymorphism is T, Derived polymorphism is I
  VARIANT 79: note = Ancestral polymorphism is R, Derived polymorphism is Q
  VARIANT 82: note = Ancestral polymorphism is G, Derived polymorphism is E
  VARIANT 132..203: note = Derived polymorphism lacks residues 132 to 203
  VARIANT 146: note = Ancestral polymorphism is P, Derived polymorphism is L
  VARIANT 148: note = Ancestral polymorphism is P, Derived polymorphism is L
  VARIANT 154..203: note = Derived polymorphism lacks residues 154 to 203
  VARIANT 166: note = Ancestral polymorphism is T, Derived polymorphism is I
  VARIANT 171: note = Ancestral polymorphism is L, Derived polymorphism is P
  VARIANT 172: note = Ancestral polymorphism is R, Derived polymorphism is Q
  VARIANT 181: note = Ancestral polymorphism is P, Derived polymorphism is L
MNISILFPGMQGLDLEWAAGASVPGAAAAARVNADAQRQSAPPLFAAGNFAWRRISIPAAKTLVEKMTELVRAGSGGSRFIGAPSLSDTIIEWAGGGGGGSGSASEAPAMGAVQDQQQIELPLSPEDVPFAQVYRFVGDMFDADAPVPVEAHLQKLKEMDDITAKTVLLVLRNLENNLSTPQFEPVRRLLSTYDPTRALSGQL

SEQ ID NO: 18135 - protein, 82 aa, Zea mays
  VARIANT 46: note = Ancestral polymorphism is G, Derived polymorphism is C
  VARIANT 39: note = Ancestral polymorphism is V, Derived polymorphism is A
  VARIANT 30: note = Ancestral polymorphism is G, Derived polymorphism is E
  VARIANT 29: note = Ancestral polymorphism is G, Derived polymorphism is D
  VARIANT 11: note = Ancestral polymorphism is S, Derived polymorphism is F
  VARIANT 8..82: note = Derived polymorphism lacks residues 8 to 82
MSCPAMAQLLSNTLYYKRFFPYYAFNVLGGLDSEGKGCVFTYDAVGSYERTGYSAQGTGSILIMSVLNNQLKSPRPLLLPAR

SEQ ID NO: 18136 - protein, 126 aa, Zea mays
  VARIANT 8: note = Ancestral polymorphism is T, Derived polymorphism is P
  VARIANT 11: note = Ancestral polymorphism is A, Derived polymorphism is T
  VARIANT 46: note = Ancestral polymorphism is A, Derived polymorphism is V
  VARIANT 59: note = Ancestral polymorphism is A, Derived polymorphism is V
  VARIANT 66: note = Ancestral polymorphism is P, Derived polymorphism is S
  VARIANT 67: note = Ancestral polymorphism is W, Derived polymorphism is C
  VARIANT 71: note = Ancestral polymorphism is A, Derived polymorphism is S
  VARIANT 81: note = Ancestral polymorphism is L, Derived polymorphism is H
  VARIANT 94: note = Ancestral polymorphism is A, Derived polymorphism is T
  VARIANT 102..126: note = Derived polymorphism lacks residues 102 to 126
  VARIANT 106: note = Ancestral polymorphism is R, Derived polymorphism is L
MPELRSSTRQACLRSKKLEDLHHISHEGFVFFIILFSSARSTSTTATEASAPAAGGGAAGQSHPFSWLDAAISEPYYFLHHLAFFSYFAARSTALSADDRGELHDRLLRREIQAVLVFLVLFVVKV

SEQ ID NO: 18137 - protein, 109 aa, Zea mays
  VARIANT 49: note = Ancestral polymorphism is T, Derived polymorphism is I
  VARIANT 46: note = Ancestral polymorphism is G, Derived polymorphism is R
  VARIANT 42: note = Ancestral polymorphism is L, Derived polymorphism is I
  VARIANT 22: note = Ancestral polymorphism is G, Derived polymorphism is D
  VARIANT 11: note = Ancestral polymorphism is A, Derived polymorphism is T
  VARIANT 10..109: note = Derived polymorphism lacks residues 10 to 109
MIADRRSSVCARDDMLDALLSGNEGTRAKLSDDQIIDLLITLIYSGYETVSTTSMKAEVPVRQPQSSRQIRKEHLDIRKAKSPEDPLDWNDYKSMTFTKAVIYETSRQR

SEQ ID NO: 18138 - protein, 133 aa, Zea mays
  VARIANT 50: note = Ancestral polymorphism is T, Derived polymorphism is K
MAAAAMNGHYLHAFGRERTTLHAALGGRRAADVILWRDKAASACILAAATAAWGLFEVAEYHLVTVACYVAMVAMLVSFVWTNASAFFNMDRWYGIARPTLTAKRMVMVCLGREPARTATPMRMRARQPDKTM

SEQ ID NO: 18139 - protein, 115 aa, Zea mays
  VARIANT 66: note = Ancestral polymorphism is C, Derived polymorphism is R
MWASCVGARPSRGERDSTIENTSKNKNVELEFSDEERDQELPDFSSFIPFLPPLSAANLKVYYATCFTIIVGIMVFGGFLAPIKCTQVIHPVKSKTFESSWVSCVAIDASESWLV

SEQ ID NO: 18140 - protein, 215 aa, Zea mays
  VARIANT 79: note = Ancestral polymorphism is T, Derived polymorphism is I
  VARIANT 117: note = Ancestral polymorphism is A, Derived polymorphism is G
  VARIANT 138: note = Ancestral polymorphism is A, Derived polymorphism is T
MAAVEVCVKAAAGNPDTLGDCPFSQRVLLTLEEKKVPYEVKLVDLGNKPEWFLNISPEGKVPLFNGGDGKCIADSDVITQVIEEKFPTPSLVTPPEYASVGSKIFPAFVKFLKSKDASDGSEKALLDELQALDDHLKAHGPYINGENVSATDLSLGPKLFHLQIALEHFKGWKIPENLTNVHAYTKALFSRESFVKTKPSEEHVIAGWAPKVSSL

SEQ ID NO: 18141 - protein, 265 aa, Zea mays
  VARIANT 31: note = Ancestral polymorphism is N, Derived polymorphism is S
  VARIANT 144: note = Ancestral polymorphism is P, Derived polymorphism is L
MAIGHKNTTKVALLVLLLSLMLSLTASVARNLQWRLSVATAVEVCVKAAVGAPDKLGDCPFSQRVLLTLEEKKVPYRMRLIDLSNKPGWFLKISPEGKVPVYNSGDGKWIANSDVITQVIEEKYPAPSLATPPEYASVGSKIFPSFVKFLMSKDASDDGSEEALVRELQALEEHLKAHGRPYISGERVTAADLSLAPKLFHLVVALEHFKGWKVPESMSSVHAYTQAMFSRESFIKTKPTKEHLIAGWAAKVPKPPNLVVPCWLI

SEQ ID NO: 18142 - protein, 359 aa, Zea mays
  VARIANT 201..359: note = Derived polymorphism lacks residues 201 to 359
MADEAAPRLLPVAADRDKDDRRRWAARCGFAVLGIMSTLLVYGVLQEKIMRVPYGVEKEFFRYSLFLVFCNRITTSMVSAMVLLASKKSLDPVAPLHKYGVVSISNILTTTCQYEVNNFFQALKYVSFPVQTLAKCAKMIPVMIWGTIIMRKKYVAKDYFFSVVVTMGCALFILYPASMDVSPFNKGRESTIWGVSLMLGYLGFDGFTSTFQDKLFKGYDMEIHNQIFYTTVCSCLLSLSGLILQNHLIPAVDFMFRHPDCFSDVVILSSVATASQFFISYTIRTFGALTFATIMTTRQLVSILLSCIWFVHPLSWMQWVGAAIVFVALYTKSFLRSKPQKLAGSSPPRGSSPNPVSNS

SEQ ID NO: 18143 - protein, 314 aa, Zea mays
  VARIANT 289: note = Ancestral polymorphism is R, Derived polymorphism is W
  VARIANT 19: note = Ancestral polymorphism is G, Derived polymorphism is D
MEVFNGVRFVRLRCCARRGKYLAAGSDGSSVCLTGQRGVHNAVWAVHHAAGPDGGPCVLLRGAYGRYLLATSAQAGTGPSHGVVTAQDGLGGATPLPGMLWQAIPRRSTFVIRSGTGRYLRANGRYLRWRRAVTSAGDNGSTMMQWDIENVPISMTRPCILDPTYQLTHARRRPLTESEVARQIRYVRGETDGSVNEGAWRTMQLNTHNLMQLRLTLACRLGASMDVTRTTLCVRAGRYAHLSPLLVDLPIGNDPIDIVILNHGTEGGTLSSESSDQIRLVDRADNDLRYPDLHAPRVLDSSKVSNKNEQRTTI

SEQ ID NO: 18144 - protein, 192 aa, Zea mays
  VARIANT 50: note = Ancestral polymorphism is L, Derived polymorphism is I
  VARIANT 61: note = Ancestral polymorphism is A, Derived polymorphism is V
MAHARTRDDQVRTEHNTLIQKAGLRSLPCSTGSIADIQIENTAEMAEAIILALRKIGSALADETAKKMLAKLSEKVNNLRDLNDKIESIRMQLTAMNNVICKIGTIYLTDEVVRGWIGEVRKVAYHVEDVMDMYSYHTLQMEEEWFLKKYFIKASHYVLVFSQIAEEVIKVEKEIKKVVELKNLWFKTAFAR

SEQ ID NO: 18145 - protein, 1004 aa, Zea mays
  VARIANT 217..1004: note = Derived polymorphism lacks residues 217 to 1004
  VARIANT 231..1004: note = Derived polymorphism lacks residues 231 to 1004
  VARIANT 445..1004: note = Derived polymorphism lacks residues 445 to 1004
  VARIANT 461: note = Ancestral polymorphism is P, Derived polymorphism is S
  VARIANT 462..1004: note = Derived polymorphism lacks residues 462 to 1004
  VARIANT 534..1004: note = Derived polymorphism lacks residues 534 to 1004
  VARIANT 643..1004: note = Derived polymorphism lacks residues 643 to 1004
MALIETIKNIPYATMDVELVCIGSQVISRKFMECLFQPDSYLGDEIINSYIYLLIAQEYMKQRPGGTVHIEITFVSEFFKLDAGDDRKFDDIYCETSERSQVERRVFIPINIRELHWYLVVLNAKRREIQILDSLGSSLGHKDLDCVLKGLQKQIDGVSQYMKLKDHNWPDLQVAYWPWKLIEFKDAKQTDSSSCGLFLLNYMEYWTGVELSDNFTQADIKHFRPKLAAILLSSDLNKRKGCPLYKNKTNKSTEDNETDSSGVEILEPSPNPNKRKRSPPISPEDDPISLYFEEICAKEKNDVIPTPTSVNECGKDSLISGLSTKDMPVKKEDMIEFLCDYIMTIQDATILEAKWVRSFKPYRIDLTVKTLQELLNVNKDMPIDCFNMAVRILAHNEPNRLSLAKRRITKHYMDLCFCEMCGFDEESKSYKDPSAIELAETLTNWPQMNYYITLCKFVLMPWRYSTGYVLFIINHANKSVSVFNFTPIPEWCKDIPLNFFWEVMLLISKKYKAAYGVKRIGWSHDIYMWRHSIRPDAPIDLKGVNTGHFALHIMEWWESGLKAQFSMDGATLRRNLLIDLLTYEGNTYRFNIPVDIREYLDHIMFVADKVAYALTQGLKVIACIGETLEQREAGTTMDVVAAQTKAIAEMKDFTQSVSWTRFLAYDKGWRVRTDFKQYQVLKQNPFWWTHQQHDGKLWNLNNYRTDVIQALGGVQGILEHTLFKGTYFPTWEGLFWEKASGFEESMKYKKLINAQRSGLNQIPNRRFTLWWSPTINRANVYVGFQELDALEIETVQKETIHPRKSYKMNSFCADILLFAAHRWQMSKPSLVSESKDVFDQKASNKYWIDVQLRWGDCDSHDIERYTRAKFMDYTTDNMSIYPSPTGVMIGIDLAYNLHSAFGNWFPGSKPLLQQAMNKIMKNYGEIFSNQIIWFVDDTNVYRVTIHKTFEGNLTTKPINGAIFIFNPRTGQLFLKTLPYEHLRKPYREILETRLTKSPQAPHCR

SEQ ID NO: 18146 - protein, 517 aa, Zea mays
  VARIANT 120: note = Ancestral polymorphism is D, Derived polymorphism is N
MRDEKPPPAAAAAAPAPPRVTHRARIVRPQPQNPVFKRCGTLVERRGQSRGPPPDRAGAGGVAAPARPSGGEGAGMVLGGGMAAAAVGGDDAVVMQLGGAEGEETVVTVNCPDQTGLGCDLCRTILEFGLRITRAADVSTDGHWCFVVFWVVPRSSSIKVRWASLKNRLMSMCPSSYSIPFFYRDVSQPEPGPLQFYLLKLMSPDRKGLLHDVTHILSDLELIIHRVKVSTTPDGRVVDLFFITDGMELLHRKERQEETCSALTATLGPSISCEVVPAEGFQQGFSSLPPEIAEELFRAELADTDSEVCSSPLSAELRKVRTTATVNFDNSLSPAHTLVQIVCADQKGLIYDILRTMKDCNIQIFYGRFRSDKKGSASKGSSGCREVDLFVKQVDGKKVTDPAKQDALRSRLRSETLHPLRVMVVGRGPDTELLVANPVEASGKGRPRVFYDATLALKALGICIFSAEIGRQAASERHWEVYRFLLDDSKEFPLASSLANRNCVVDRARKTLMGCYN

SEQ ID NO: 18147 - protein, 78 aa, Zea mays
  VARIANT 12: note = Ancestral polymorphism is R, Derived polymorphism is H
  VARIANT 17: note = Ancestral polymorphism is R, Derived polymorphism is H
  VARIANT 23: note = Ancestral polymorphism is T, Derived polymorphism is M
  VARIANT 27: note = Ancestral polymorphism is I, Derived polymorphism is N
  VARIANT 28: note = Ancestral polymorphism is T, Derived polymorphism is I
  VARIANT 33: note = Ancestral polymorphism is T, Derived polymorphism is I
MKTFDPWPVFFRREWKRNWPFLTGFAITGFIITKMTANFTEEDLKNSKLHRHRDGVGSMRLPSSAEPLMQLGIGAGVL

SEQ ID NO: 18148 - protein, 394 aa, Zea mays
  VARIANT 222: note = Ancestral polymorphism is L, Derived polymorphism is F
MVSSGTGSIAKRWRELQGEKSWKGLLEPLDMDLRKSIISYGELVAATGDGFNNEPHSPHVGLCKYGHDDLLTKSGVAAASHYKVTKFVYAWEDSKLTWIGYVAVATDGEGVAALGRRDIVVAWRGSMTGAEWWKDVEVLPTCPWPALGLEDHSVGHGHPCARVHSGFLSLYTEPPKPPKDTNSDMAFFVNGSARDQVLAEVRRLMELHRDEDTSITVVGHSLGSALAILNAIDLVGNGVNSSGLLGGRPPCPVTAIVFACPHVGNDSFRDAFTSFKYLKVLHVKNQQDWVPFLMGWLHDLGVTLHIDTALSHYLKKPNLVTAHSLESYMHAVAGEVGSDGKFRLLVDRDVALVNKSADALKDEYHVPASWWVPHNKNMVKNDQGKWELKDFEQF

SEQ ID NO: 18149 - protein, 159 aa, Zea mays
  VARIANT 33: note = Ancestral polymorphism is W, Derived polymorphism is R
  VARIANT 103..159: note = Derived polymorphism lacks residues 103 to 159
  VARIANT 146..159: note = Derived polymorphism lacks residues 146 to 159
  VARIANT 150: note = Ancestral polymorphism is S, Derived polymorphism is I
MEATAEALTQEEVLRRCRRRAARLAGVYCRIYWAMAKEVRARHRQYVWHLARSPLEAEQPSAPLEVSSRRRSGSHQSRHWCQGAPDLGVRAEGGMKSSLRSRQEPRRVSNGVIIGAMLLSLCVLSFVKARYCATPLGKAEDQLEEQMNASIRMQPEESS

SEQ ID NO: 18150 - protein, 434 aa, Zea mays
  VARIANT 58: note = Ancestral polymorphism is R, Derived polymorphism is L
  VARIANT 49: note = Ancestral polymorphism is S, Derived polymorphism is F
MPPPPPSAPASHHLRLWWRRRGRAGAVGATFAVALLATALLLALSSYASIVFPASSGRRGPALVGLTLVRRASEKGALCLDGSAPGYHLQGGSGSGSRSWLIHLEGGGWCRNLKSCASRQRSMLGSSRYMEGQVEFTGILSDDKSQNPDFYNWNKVKIRYCDGASFSGDVKDELQNGTRFFFRGQRIWEAVMNELVVKGLRNAKQAFLTGCSAGGLATYIHCDSFRALLPKDSRVKCLADGGFFLDVEDISGRRTMHSFYSDIVRLQGLRERFSHCNSNMDAGQCFFPREVVKHIVNPVFVLNPAYDAWQVQHALAPEASDPQHSWLDCRLDISKCSPKQLGILQGFRKELHDAISEAKQKRGWGFYINSCFVHCQSLNSLTWHSPTSPRVNNKSIAEAVGDWFFDRREVKEIDCEYPCNPTCHNLVFARPFKI

SEQ ID NO: 18151 - protein, 150 aa, Zea mays
  VARIANT 69..150: note = Derived polymorphism lacks residues 69 to 150
  VARIANT 80: note = Ancestral polymorphism is V, Derived polymorphism is A
  VARIANT 99: note = Ancestral polymorphism is R, Derived polymorphism is W
MECGSSWRLLAVVVGILFCAALFSPPAATLNIGIQSAGDGVVDGMLGRRENPGEHEAMRKMKNEFMVNWDGLRTREKERVLVLAATNRPFDLDEAVVRRLPRRLMVNLPDASNRRKILSVILAKEDMADDVDLETIANLTEGYSGSDLKV

SEQ ID NO: 18152 - protein, 334 aa, Zea mays
  VARIANT 13: note = Ancestral polymorphism is A, Derived polymorphism is T
  VARIANT 38: note = Ancestral polymorphism is A, Derived polymorphism is E
MSSSSDLEQQVATALRRVTPVAAAPAVDRGGAPDLAAAIQRRMASQRARGADAFYAKFASARSLADQTFSRRRVQLKGLKDQLRDLQSQLRESLTLQSCKEWKYRIATEPMSEATATNERLRSWVADFRDKRNKGAAIVFEQLQAVESLEANSNEDAEMAEKVPKAVLWYNKFLGFRVIGGERGVKFVFDKIDPQRPEKEYSFRVSPRSQFIDSDPHVKDIDELAKDLDLNEHLFEFVRMAREKFQSPFMNETLPVSPDASAAPLPSPMVVSVNSRSGEAHSQTQSLSKNSARLLPAKRGATALPGASPGVLRRSPRLEASRLSMSRCVPVLGQ

SEQ ID NO: 18153 - protein, 111 aa, Zea mays
  VARIANT 28: note = Ancestral polymorphism is G, Derived polymorphism is C
MEESCDKRSEKQVVAAAKKKKLAKSGHGRRWSSSTDLQDIETATRTAAVDGGMKQQRQQAAREGQGEAVEQRRRCGGAGARLSRKIKEHRARFYIVRRCVAMLVCWRDADD

SEQ ID NO: 18154 - protein, 582 aa, Zea mays
  VARIANT 47..582: note = Derived polymorphism lacks residues 47 to 582
  VARIANT 104: note = Ancestral polymorphism is E, Derived polymorphism is K
  VARIANT 319..582: note = Derived polymorphism lacks residues 319 to 582
  VARIANT 320..582: note = Derived polymorphism lacks residues 320 to 582
MALLVVRSHKGKVMGYTSPFFLLAFTTQFQLTRKIEGQLIFILSGGCNQNQDASACVTGFEIDYSHWVDEQKRHMAELTSTLQGQQTSELELRLLVETWLSNYERLFRIKATAANADVFYVMSGLWKTPAKRFFLWIGGFRPSDVLKDVALSRGGSPGVMTWGWVWELFSNLGVLGFGSASHFVFNEKKQTTNYSEGSSRPPLLGGSPPRNQPSQRQAGERTSGAAGPSMNKMEKAPGEAFGRRNPSGPMNQTDSYAQQPHETVSMSLKKITCVKWCSESERDAIFDVLQPHLLTLSCKKYAIFLVKKLIELVVDYAFQRGTQRQKRQLLVELYSPELQLFKDLTVQSSSCLIDTISKLGLQISSVLLHMTIVIDKILEKGTVEYLIVHTAILDYFTIADKTSASDAICQLIPLLTQGALIIDGDEPTNAPELPKKAKAKKKRSKEPLIVRIMQTREGLKLGISCLKYGSAKMIAKIVVVCNDAIIGHSEHQYVATGMPTKAALKGAVIVKLFFYCEIIFHVALEQEMYICKRDGNGGGLARDGGGATAVPQDSEGFRQPDMHHGMEVRLGLSKGPICPSFS

SEQ ID NO: 18155 - protein, 387 aa, Zea mays
  VARIANT 313..387: note = Derived polymorphism lacks residues 313 to 387
  VARIANT 284..387: note = Derived polymorphism lacks residues 284 to 387
  VARIANT 222..387: note = Derived polymorphism lacks residues 222 to 387
  VARIANT 210: note = Ancestral polymorphism is C, Derived polymorphism is Y
  VARIANT 86: note = Ancestral polymorphism is P, Derived polymorphism is L
MAMPSSRSPAPPPTASSSYWCYMCDRFVRAAASSSSSPTSPSSSSPACPSCGGGFLEEMGAPPPRARRPRRAARRGADSRASPFNPVIVLRRSPPADADADGSSSPAAATGSSFELFYDDGAGSGLRPLPESMSDFLMGSGFERLLEQLAQMEAGGGLAARARDAPPASKAAVDSMPALRVGAAHVAADAHCAVCKEAFELGAEAREMPCAHIYHADCILPWLALRNSCPVCRHEMPADNAAPRAAAAAAADEDARVGLTIWRLPGGGFAVGRFAGGPRPDERELPVVYTEMESGFNFNSGHAPRRISWGARQAAATDRGTVRRFLRSVFACFGRGHAPSAAAARAMPELNDDDVASDHSAAFSRGSRSRSTSWRLEDGRADAMVQR

SEQ ID NO: 18156 - protein, 905 aa, Zea mays
  VARIANT 753: note = Ancestral polymorphism is E, Derived polymorphism is V
MVTEMAARGGEAAAFGAETDRGDFEVFRSGSAPPTVEGALGAAGADGGLLVDDDLRADPAYQSYYYSSAHLNPRLPPPLLSKEDWRSSHHRLRSAGFGGIGDGRRQQQQASAAEGTVGLPGIDLGRQRSFSTIFQEDSYQRDMDRHTASHNSNDLLGSSGIQYGLNRGSGTIGGLHSSNSLRSLDEIQNNDLPSNTFASILGSSLSRSASPDPELVRRAPSPSLPPIGVKVGNTDKKINGGSTSFRRSSSAIGESDDLVAALSGMNLSSRAMSGQTMDQSQLYQDVDNVQKFLFDRQGDQTTGNQQHYMRRPEQGQSKLPDGYSANLANSSTMRNQINAGSFTSFDSLSLGSGFASPRIGSRSPGGTVSSRQNLAGMSNMLNYNGIGSPTASPSLQTSIDPAYIQYLAQLAATCDDPLMDRGHLGNSYMDLLGTHKANIGPLLQSQKQYGYYGNLGFNLGYPGSPLASPVLPSSPIAPGSPLRHGERNMRFPSGMRNFGNSFGSWNSGMGGKMDANLMPSLLEEFKSNKSKSYELSEIAGHVVEFSADQYGSRFIQQKLETASTEEKDMVFSEIMPQALTLMTDVFGNYVVQKFFEHGSTAQIKELAGQLIGRVLALSLQMYGCRVIQKAIEVVDLELQTKMVAELEGHVMRCVRDQNGNHVIQKCIECIPQHAIEFIISTFYGQVVMLSTHPYGCRVIQRVLEHCDDPKTQQIMMDEILQSVCLLAQDQYGNYVVQHVLEHGKPHERSAIIEKLIGQIVQMSQQKFASNVIEKCLVFGNPVERQVLIGEMLGSTSESEPLEVMMKDQFGNYVVQKVLETCDDQQREMILTRIKTHLNTLKKYTYGKHIVARVEKLVAAGGIFIHLCLQDLTLSVYHVGLGTNNDVYVVVPTEKRLGLQPACTAA

SEQ ID NO: 18157 - protein, 73 aa, Zea mays
  VARIANT 35: note = Ancestral polymorphism is K, Derived polymorphism is R
  VARIANT 53: note = Ancestral polymorphism is D, Derived polymorphism is N
  VARIANT 65: note = Ancestral polymorphism is T, Derived polymorphism is I
MSASSAKPATGGKTSWPEVVGLSVEEAKKVILADKPNADIVVLPTTTQAVTSDFGFDRVRVFVGTVAQTPHVG

SEQ ID NO: 18158 - protein, 133 aa, Zea mays
  VARIANT 17: note = Ancestral polymorphism is E, Derived polymorphism is D
MSKVFTLDAVAKHNSKEDCWLIIGGKVYDVTKFLVDHPGGDDVLLSSTGKDATDDFEDVGHSNTARAMMDEYLVGEIDASTIPSRTKYVPPKQPHYNQDKTPEFVIKILQFLVPLAILGLAVAVRMYTKSESA

SEQ ID NO: 18159 - protein, 143 aa, Zea mays
  VARIANT 130: note = Ancestral polymorphism is S, Derived polymorphism is F
  VARIANT 121: note = Ancestral polymorphism is E, Derived polymorphism is K
  VARIANT 108: note = Ancestral polymorphism is R, Derived polymorphism is C
  VARIANT 104: note = Ancestral polymorphism is A, Derived polymorphism is T
  VARIANT 95: note = Ancestral polymorphism is G, Derived polymorphism is W
  VARIANT 81: note = Ancestral polymorphism is P, Derived polymorphism is S
  VARIANT 77: note = Ancestral polymorphism is R, Derived polymorphism is C
MESSTGVCRARRTSGVVASASVASPTSHRCFDEEVLEGIRRAVVDSAYEVISLKGYTSWAIGYSVASLAASLLRDQRRIHPVSVLARGFHGIPDGNDVFLSLPARLGCVGIQGVTEMELNEEEAKRLRRSARTIWENCQLLGL

SEQ ID NO: 18160 - protein, 454 aa, Zea mays
  VARIANT 376: note = Ancestral polymorphism is I, Derived polymorphism is N
  VARIANT 386: note = Ancestral polymorphism is P, Derived polymorphism is S
MHIPPAFPFRPLHFILPGALSTSLALGRRRRLLCEVLCGATRAESALPPQEFARLAPPNLAVAWAPVQGWRRRSSVEMADGEDIQPLVCDNGTGMVKAGFAGDDAPRAVFPSIVGRPRHTGVMVGMGQKDAYVGDEAQSKRGILTLKYPIEHGIVSNWDDMEKIWHHTFYNELRVAPEEHPVLLTEAPLNPKANREKMTQIMFETFNVPAMYVAIQAVLSLYASGRTTGIVLDSGDGVSHTVPIYEGYALPHAILRLDLAGRDLTDSLMKILTERGYSFTTSAEREIVRDIKEKLAYIALDYEQELETAKNSSSVEKSYELPDGQVITIGAERFRCPEVLFQPSMIGMEAAGIHETTYNSIMKCDVDIRKDLYGNIVLSGGSTMFPGIADRMSKEITSLAPSSMKIKVVAPPERKYSVWIGGSILASLSTFQQMWISKEEYDESGPAIVHRKCF

SEQ ID NO: 18161 - protein, 1345 aa, Zea mays
  VARIANT 177..1345: note = Derived polymorphism lacks residues 177 to 1345
  VARIANT 132..1345: note = Derived polymorphism lacks residues 132 to 1345
MPSLQLLQLTDRGRGLLASRRRTLAFVSGAVLAGGALAYARSSQSRRRRRRPEASRSGGAGALAANGDGFSQNGAGGGLAAADQRRSGLKSLHFLASILLKKMGPSGTRYLLCLVLTSVLRTAVGHRLARVQGFLFKAAFLRRIPTFTRLIIENLTLCFLQSTLYQTSKYLTGSLSLRFKKILTDIAHADYFENMVYYKISHVDHRISNPEQRIASDIPKFSSELGELVQDDLAAVAEGLIYTWRLCSYASPKYVFWIMAYVLVAGGVIKNFSPAFGKLKSTEQQLEGDYRQLHSRLRTHAESVAFYGGENREASHIMQRFEALVEHLNLVRHENWWFGMIQDFFLKYFGATVAVVLIIEPFFSGNLRPDSSTLGRAEMLSNLRYHTSVIISLFQSLGILSISTRRLNILRCSSPPILEIATCGYADRIRELLDVSRELSGVRDRSLDHSSPGNYVSEANHIEFSDVKVVTPAGNVLVDDLTLRVETGSNLLITGPNGSGKSSLFRVLGGLWPLVSGHIVKPGVGSDLNKEIFYVPQRPYTAVGTLREQLIYPLTADQGIEPLTYDGMVDLLKNVDLEYLLERYPLDKEVNWGDELSLGEQQRLGMARLFYHKPKFAILDECTSAVTTDMEERFCKKVRAMGTSCITISHRPALVAFHDIVLSLDGEGGWNVQHRRDDSSFSTEESDFSSSETDRKSDALTVQRAFMSRAKSNASLGSKDHPYCTEVIATSPEVEIEHPARTPRIPHLRCHPRPLPLRVAAMLKILVPRLFDKQGGQLLAVAVLVFSRTWISDRIASLNGTTVKFVLEQDKDAFIRLIGVSILQSGANSFVAPSLRTLTAKLALGWRIRMTNHMLRYYLKRNAFYKVFNMSGKSIDADQRLTLDVDKLTTDLAGLVTGMVKPLVDILWFTWRMKLLSGRRGVAILYAYMLLGLGFLRAISPDFGHLSGQEQELEGTFRDHLVFVKTVIAFPIFSIVFTLLCTCYVYNFELMVEAKFVKLINHSKILLRKQWLYGIVDDFVTKQLPHNVTWGLSLLYALEHKGDRALTSTQGELAHALRFLASVVSQSFIAFGDILELHKKFLELSGGINRIFELEEFTRFAQRNTVVSPNAISAASKETISFHEVDIVTPSQKLLARKLSCDVVQGKSLLLTGPNGSGKSSIFRVLRDLWPTFSGRVTKPSEGMFHVPQRPYTSLGTLRDQIIYPLSREEAKIKVLSLHRSGNNSSASMLLDDHLKTILENVRLVYLLEREGWDSTPNWEDVLSLGEQQRLGMARLFFHHPKFGILDECTNATSVDVEEHLYRLATSMGITVITSSQRPALIPFHALELKLIDGEGNWELCAIQQ

SEQ ID NO: 18162 - protein, 119 aa, Zea mays
  VARIANT 46: note = Ancestral polymorphism is T, Derived polymorphism is M
  VARIANT 63: note = Ancestral polymorphism is P, Derived polymorphism is L
  VARIANT 72: note = Ancestral polymorphism is F, Derived polymorphism is L
MATFELYRRSTIGMCLTETLDEMVSNGTLSPELAIQVLVQFDKSMTDALENQVKSKVTVKVKPCITTSLFWFYGHLHTYRFCDNVWTFILTDASFKNEEATEQVGKVKIVACDSKLLGQ

SEQ ID NO: 18163 - protein, 119 aa, Zea mays
  VARIANT 71: note = Ancestral polymorphism is C, Derived polymorphism is W
  VARIANT 63: note = Ancestral polymorphism is C, Derived polymorphism is Y
  VARIANT 47: note = Ancestral polymorphism is R, Derived polymorphism is H
MQVAMATTTSSSLVTGLRCRTGAAVALIRPTSAAGDRRGWRTTASGRGARRGKVTVAAACKTCKGKGAVECPGCKGTGKNKKNGNIFERWKCFDCQGFGLKSCPTCGKGGLTPEQRGER

SEQ ID NO: 18164 - protein, 85 aa, Zea mays
  VARIANT 77..85: note = Derived polymorphism lacks residues 77 to 85
MAGRRAEEEYDYLFKVVLIGDSGVGKSNLLSRFTRNEFCLESKSTIGVEFATRTLHLQNLQTKTLSESRAHSAFFRQLAVSGPAD

SEQ ID NO: 18165 - protein, 1108 aa, Zea mays
  VARIANT 380..1108: note = Derived polymorphism lacks residues 380 to 1108
  VARIANT 735..1108: note = Derived polymorphism lacks residues 735 to 1108
  VARIANT 892: note = Ancestral polymorphism is S, Derived polymorphism is Y
  VARIANT 894..1108: note = Derived polymorphism lacks residues 894 to 1108
MVRKKRTGPGESSGESSGAPGHGSSQRPQATQQGTRGGGQHQGRGGYLGPGVPPSQHPGGGPPEYHQPLDYQGRGGYQGRGGPPSQHPGGGTPPGSQPRGYQGHGGYQGRGGPPSQYPGGGTPPGSQPRDYHGRGGPRPRGGMPQSYRGGHVGGSVVPSVPSGPSRPVPELHQAPDVQHQAPVVATPSSPGAGSSSQPGKAEVSAGQVQQQFQQLAIRNQSLASQAGQMAPASSKSVRFPLRPGKGTHGSRCIVKANHFFAELPNKDLHQYDVSITPEVTSRGVNRAVMAELVKLYRHSHLDGRLPAYDGRKSLYTAGALPFASKTFEITLQDEEDSLGGGQRRQRVFRVTIKFAARADLHHLAMFLAGRQPDAPQEALQVLDIVLREMPTAKYCPVGRSFYSPKLGRPQQLGEGLETWRGFYQSIRPTQMGLSLNIDMSSTAFFEALPVIDFVSQLLNRDISVRPLSDSDRVKIKKALRGVKVEVTHRGNMRRKYRISGLTPQATRELSFPIDDRGTVKTVVQYFLETYGFSIQHTTLPCLQVGNQQRPNYLPMEVCKIVEGQRYSKRLNDKQITALLKVTCQRPQAREKDILETVYHNAYSKDPYAQEFGITIDERLASVEARVLPPPRLKYHDSGRERDVLPKIGQWNMMNKKMVNGGRVSSWACINFSRNVQDGAAGSFCHELALMCQVSGMDFVLEPVLSPCYARPELVERALKGRYQDAMNILGPQGRELDLLIVILPDNNGSLYGDVKRICETNLGLVSQCCLTKHVFKVNKQQYLANVALKINVKVGGRNTVLVDALARRIPLVSDIATIIFGADVTHPHPGEDSSPSIAAVVASQDWPEVTKYAGLVSAQAHRQELIQDLFKVWQDPERGTVSGGMIRELLISFWRATGQKPKRIIFYRDGVSEGQFYQVLLYELDAIRKACASLESDYQPPVTFVVVQKRHHTRLFANNHNDNRAVDKSGNILPGTVVDSKICHPTEFDFYLCSHAGIQGTSRPAHYHVLWDENNFTADGLQTLTNNLCYTYARCTRSVSIVPPAYYAHLAAFRARFYMEPDTSDSGSMASRGPPPGGRNTKAAGVGNVAVRPLPALKENVKRVMFYC

SEQ ID NO: 18166 - protein, 1124 aa, Zea mays
  VARIANT 75: note = Ancestral polymorphism is H, Derived polymorphism is L
MAALAGEDKDVDAFLADCTASGDAAYGAAKAVLERLHAPATRPAARRLLGAVRRRFAASRAAGEDCFRTFHFRIHDVVLDPHVQGFQQMKKLTMMEIPSIFIPEDWSFTFYEGLNRHPDSIFRDKTVAELGCGNGWISIALAEKWCPSKVYGLDINPRAVKIAWINLYLNALDDDGLPIYDGEGKTLLDRVEFYESDLLSYCRDNKIELDRIVGCIPQILNPNPEAMSKIVTENSSEEFLYALSNYCALQLNDYSDQSYIRISLLKDFDFLLCLPTSISFCIQGFVEDQFGLGLIARAVEEGISVIKPSGIMVFNMGGRPGQGVCERLFRRRGFRITKLWQTKIMQAADTDISALVEIEKNSRHRFEFFMDLVGDQPICARTAWAYMKSGGHISHALSVYSCQLRQPNQVKKIFEFLKDGFHEVSSSLDLSFDDDSVAEEKIPFLAYLASFLKENKSNPCEPPAGCLNFRKLVAGFMKSYHHIPLTPDNVVVFPSRSVAIENALQLFSPALAIVDEHLTRHLPKQWLTSLAIEGRADCNHADGTVTVIEAPRQSDLLIELIRKLQPQVVVTGMAQFEAITSAAFENLLNVTKDVGSRLFLDISEHLELSSLPSSNGVLKYLAGKTLPSHAAILCGLVKNQVYSDLEVAFAISEDAAVYKALSQTIELLEGHTSLISQHYYGCLFHELLAFQIADRHPQQERQPAEVIPQQMIGFSDPAVSTLKATEFFVPGSAESSIIHMDLDRSFLPVPSAVNASVFESFVRQNITDSETDVRSSIQQLVKDSYGLSAAGCAEIIYGNTSVALFNKLVLCCMQEQGTLLFPLGTNGHYVSAAKFVNASTVTIPTNPSSGFRIEPKVLADTLKNVSRPWVYVCGPTINPTGFLYSDSDIRELLSVCAEYGARVVIDTSFSGLEYETDGWRQWNLAGCLSSLKRSEPSFSVVLLGELSFALTAGGHDFGFVILGDSSLAETFHSFSSLSRPHTTLKYTFKKLLGLKNQKDQHFSDLIVEQKEELKNRANQLIQTLESCGWEAAIGCGGISMLAKPTAYMGKAFKAAGFDGELDASNIREAILRATGLCINSSSWTGIPGYCRFSFALERGEFERAMGCIARFKELVLGGAQMNGA

SEQ ID NO: 18167 - protein, 248 aa, Zea mays
  VARIANT 38: note = Ancestral polymorphism is A, Derived polymorphism is T
  VARIANT 20: note = Ancestral polymorphism is R, Derived polymorphism is W
MAATATSFATLAVARSAGQRFLLASKAAPSPLLSLRGARLPSQGVSLSGGLAASPSHSRARFATSASAEPKEAELQSKITNKVYFDISIGNPVGKNVGRIVIGLYGDDVPQTTENFRALCTGEKGFGYKGSSFHRVISDFMIQGGDFDKGNGTGGKSIYGRTFKDENFKLVHTGPGVVSMANAGPNTNGSQFFICTVKTPWLDGRHVVFGQVLEGMDVVSLIESQETDRGDRPKKKVVISECGELPVV

SEQ ID NO: 18168 - protein, 258 aa, Zea mays
  VARIANT 222: note = Ancestral polymorphism is L, Derived polymorphism is H
  VARIANT 145..258: note = Derived polymorphism lacks residues 145 to 258
  VARIANT 144: note = Ancestral polymorphism is G, Derived polymorphism is R
  VARIANT 121: note = Ancestral polymorphism is D, Derived polymorphism is G
  VARIANT 115: note = Ancestral polymorphism is A, Derived polymorphism is V
  VARIANT 96: note = Ancestral polymorphism is Q, Derived polymorphism is P
MGARQVEGVPEAGSLVEKLDALNRVVAVASRLGHRCAAPALVGFGHVYADLLAERADAGTLAAVASRSDAVPLVRRLDRVTATLYAELDALAELKPDASLWNWTYDRAVLLLAHAVCAIYGRIRLVFGDPVLGLDLLAMTRESGQCEQIPQLSGLVAADSGPVLQSSLSDGSGSISRKARRFGPKSIVTSLAPASTVGGSALALHYANIVIVIEKLLRYPHLVGEEARDELYQMLPRSLKLALRRSLRARARSTAIYD

SEQ ID NO: 18169 - protein, 243 aa, Zea mays
  VARIANT 24: note = Ancestral polymorphism is L, Derived polymorphism is R
MATPPRALLERVAGLVGGRPPRRRLELGERVKLGVERGGDAVEPAHERHGVGAGCDGGERARVGAFGQEVGVDVAEAHERRGRAPVAEARGHRHHAVQRVQLLDERASLGDAFDLARTHANNHNAPRISVIDISPFLDSSNQQQQRDECVEVVRAAAADWGIMHIAGHDIPAELKDRLRAAGTAFFALPVQDKEAYTNDPASARLQGYGSRLAANACGQREWEDYLFHLVHPDGLADRALAHN

SEQ ID NO: 18170 - protein, 846 aa, Zea mays
  VARIANT 618..846: note = Derived polymorphism lacks residues 618 to 846
MGGNWSGKESGGRACPPPARPAANPKFEPAASTDYYPTIQNPTPASAVISSPRQSATISSSDRPRNPSPQTIPLATAMPDLPCDGDGVCMVCRVASPPEVDLLTCSTCTTPWHSPCLSKPPALADAASWSCPDCSPDSAAVAAPSGPANTLVAAIRAIEADHTLSDQEKARRRQALLTGDAPDGADDDDDEASDDALEIVGKNFSCVFCMKLPERPVTTPCGHNFCLKCFQKWIQNQKRTCGKCRAQIPAKMAEQPRINSALVEVIRMAKISKNPNSAGSAVPYHYLRNDDRPDKAFTTDRAKRAGKANASSGQIFVTIAPDHFGPILAENDPRRNMGVRVGETWEDRLECRQWGAHFPHVAGIAGQSTHGAQSVALSGGYEDDEDHGEWFLYTGSGGRDLSGNKRTNKEQSSDQKFEKLNAALRIIVYICFVSSNCWTFVSLYCLKRSHKEKRSSYAPESGVRYDGVYRIEKCWRKIGIQGKFKVCRYLFVRCDNEPAPWTSDDHGDRPRPLPKIKELQGATDITERKGRPSWDYDDKDGWKWVVPPPVSRKPVLSGDPETDKQIRRATKRVHLSVAERLLKEFACSICRAVIKEPLTTPCAHNFCKTCLLGAYDSQSSIRERSRGGRTLRAQKIVKTCPSCPTDICDFLENPQINREMMELIETLQRKAVEEAKMTSDDAEECGDGDSEENDGDLVKGEDVSGLNEGEQDSADADANVEGSVKIVVEIKEEGKDDKRSKMGATEVVDVLVDEDAVKQTKKRKVDAEAGTNGGKRMKSSSTVEEVAVCVTPVKRSRKSGDMDDERNGSPAVSSGRRVTRSSVDDTGSADSPARRTRSRARADAGC

SEQ ID NO: 18171 - protein, 96 aa, Zea mays
  VARIANT 79: note = Ancestral polymorphism is G, Derived polymorphism is S
  VARIANT 74: note = Ancestral polymorphism is S, Derived polymorphism is F
  VARIANT 73..96: note = Derived polymorphism lacks residues 73 to 96
  VARIANT 72: note = Ancestral polymorphism is R, Derived polymorphism is W
  VARIANT 60: note = Ancestral polymorphism is A, Derived polymorphism is T
  VARIANT 59: note = Ancestral polymorphism is V, Derived polymorphism is I
  VARIANT 57: note = Ancestral polymorphism is V, Derived polymorphism is I
  VARIANT 54: note = Ancestral polymorphism is E, Derived polymorphism is G
  VARIANT 52: note = Ancestral polymorphism is A, Derived polymorphism is T
  VARIANT 51: note = Ancestral polymorphism is V, Derived polymorphism is F
  VARIANT 50: note = Ancestral polymorphism is S, Derived polymorphism is T
  VARIANT 49: note = Ancestral polymorphism is R, Derived polymorphism is C
  VARIANT 45: note = Ancestral polymorphism is G, Derived polymorphism is S
  VARIANT 38: note = Ancestral polymorphism is A, Derived polymorphism is T
  VARIANT 35: note = Ancestral polymorphism is L, Derived polymorphism is I
  VARIANT 30: note = Ancestral polymorphism is S, Derived polymorphism is L
  VARIANT 29: note = Ancestral polymorphism is G, Derived polymorphism is S
  VARIANT 24: note = Ancestral polymorphism is S, Derived polymorphism is F
  VARIANT 23: note = Ancestral polymorphism is S, Derived polymorphism is T
  VARIANT 20: note = Ancestral polymorphism is G, Derived polymorphism is E
  VARIANT 18: note = Ancestral polymorphism is G, Derived polymorphism is R
  VARIANT 17: note = Ancestral polymorphism is S, Derived polymorphism is F
  VARIANT 3: note = Ancestral polymorphism is G, Derived polymorphism is R
  VARIANT 2: note = Ancestral polymorphism is E, Derived polymorphism is V
MEGMKNTTLMVLKLSSSGVGSSSSGGESGSEAVVLANAMDVNHFGYFQRSVAREFIVFVARTIAQRTQPGQRQSVQHDGNLISDRLSNLYKIWGLY

SEQ ID NO: 18172 - protein, 246 aa, Zea mays
  VARIANT 48..246: note = Derived polymorphism lacks residues 48 to 246
  VARIANT 173..246: note = Derived polymorphism lacks residues 173 to 246
MASPVVADLPRRPLLLGRHSPHSLPVGCAGEGVRACVRAGGWTGICCWVGRGMASFAVSGARLGVVRPGGSTRSGGERRSAVDLPSLLFRRKDAFSRTVLSCAGAPGKVLVPGGGSVAVMTCFPPQSLSWTLNLKNYRFDCPLLCLHVTNDIGLLKINLGCLVLYVLLSYQPLDTAASRMQTSVFGKSKGLSETLAEGTQIERSIWWYNIESIASARASLDREVVEQEGVGSILGATKVGLAVEQL

SEQ ID NO: 18173 - protein, 162 aa, Zea mays
  VARIANT 53..162: note = Derived polymorphism lacks residues 53 to 162
MCRSGPSPWLHTSSWLADSMAPQRYGQGRQSASIPTANCPYLSLPTNRNKERKNREDARADSLRDLGRRRRVFSGRGRRDRTTSVSATGDMTRGNQRDRDRERAAARKPNAKNSQDGLTPEQRRERDKKALEEKAAKKAQQAAAGGTGTSTDNNKNKAGGKK

SEQ ID NO: 18174 - protein, 550 aa, Zea mays
  VARIANT 32: note = Ancestral polymorphism is A, Derived polymorphism is V
  VARIANT 87: note = Ancestral polymorphism is S, Derived polymorphism is F
  VARIANT 310: note = Ancestral polymorphism is L, Derived polymorphism is R
MDDMHRQLQAPPACQSHSSSSSIFFFFFLAAVIIYCVVIIRRLIKFQGRRRVKNDHAAAAAAPPPPPPPRRGSRWWWSVVETLAFLSANSSGRGFYHFVEARHRRYGPGPCFRTSLLGATHVFVSSADAARSLLGAEPAGFSKRYVRTVAELLGEHSLLCASHATHRALRRAVAPLFNAQATASLAATFDGLTRRLMKRDWSSSTGAVVVLDAALDLTFEAICDMLIGRTLRPDARRRLQSDVLAVTRAMLAFPLRLPGTRFHAGLRARKRIMDVLRQEIGSRQRQIMDMEEEEEEQQHGDDFLQSLLLLRSRRRRRSQQQQHLLPSSSAHHNDDDDLFLTDDQILDNILTLIIAGQVTTASAITWMVKYLADNKVFQETLRSVQLELKQQQQQEEADHDLLQHLNSMELAYMTVKESLRMASIVSWFPRVALEDCQVAGFHIHKGWIVNIDARALHYDATLYHNPTMFDPSRFKGGHSMHTKQPYSFLVFGAGGRTCLGMNLAKIMMLIFLHHLVTTWRWEMADDDPSLEKWAMFPRLRNGCPIHLARI

SEQ ID NO: 18175 - protein, 325 aa, Zea mays
  VARIANT 160: note = Ancestral polymorphism is M, Derived polymorphism is K
MAMEGSGGSQSQLIHPAVDEAALAVTKRERKRSRYLSPPYTDTGVLQEKKAAGSQKQREEGQPHVSGAEVLPTLRASALGQGKGMEAAALRFMAMDSRNRNSIFVDDHPDSHAAAGGASQDDGVSKPPSAAGVGRKMMLNLNAGPDDGSSLAKKRKRKTMKTVGQHSYVGNPVALVLDLAEGTPLPSREDLLSTFSRFGFVIDSETSITQDKNKHTARVVFATRAQAESALSCAATLGGAFAAPSVQDLPPITPLPKLPLTDIRNNLGKMILSLSSKAKSPQEANAKPAVDSLSLVGEMQHLLAKVDKVLQAQRASATDHHAIHH

SEQ ID NO: 18176 - protein, 520 aa, Zea mays
  VARIANT 236: note = Ancestral polymorphism is T, Derived polymorphism is M
  VARIANT 147: note = Ancestral polymorphism is Y, Derived polymorphism is H
MASGIGSGQQQPPGSAVRLDALAAPAADADPGAVGDKLVFEAPPQPVREDYVQNAVKFLSHPKVRGSPVVYRRSFLEKKGLSTEEIDEAFRRVPDPQPSTTATTSPQQQVNSQNQSVGVQAYAPAQPVHPANAGPVVLPTQPRFSWYQAFLAAGLLLGFGASAAVFIKKLFLPRLKSWIRNVVAEGNGTEGNQLKPRIDDETADAVKASASAVSAIAKTNQQLLASKDEEKKILVTLTQALDSQAKELKSLTDSIGHTREPINITRDDRFSQYRPLEDHAPTVIRNGQCSKFMCCFMVQCLALLSKASHPVLRAINSSWRASQQTNMYGVSNGDFGSVRSSFAPAPAEPTAGSFSRSYGEQPMSTAQRSDRSSGSKPWEMHSYSQQRPGYGSNSQLSDDGSYSDAQDSYAPSYHQNGKAPDFQADEPRPLTYNTGVEERPPPQRRWVPPQPPGVAMPEAAAAIRQPKALPKQPSSDASEAAGEMQVNGSSASDAVTEVPVNGATASDAGRSEIQEQSVAA

SEQ ID NO: 18177 - protein, 245 aa, Zea mays
  VARIANT 57: note = Ancestral polymorphism is V, Derived polymorphism is A
MSTQNKRLKDVEVSFPIVYGTISFWLGKKASEYNSHKWTVYVRSANNEDLSVIVKRAVFQLHPSFQNPTRVVEQPPFELSESGWGEFEIAITLYFHSDVCDKRLDLFHQLKLYPEEEAGPQSTKKPVVVETYDEIVFPEPTEAFFLRVQNHPAANVPRLPPGITLPPPGPMEIVPYEKKRGDTKDHPLSQWFSNFSEADELLKLAAARQQVQVHIAKLRRQLTMIEGMPQQSKAFSVPGQQFRHI

SEQ ID NO: 18178 - protein, 331 aa, Zea mays
  VARIANT 236: note = Ancestral polymorphism is G, Derived polymorphism is S
MMRLKQHMGLVSSPTPAIVVRLGNNTPHRRRATRSRIVSSSASDAAPFEKPRAVVKKVLAQSQPEGQGATVRRSIGRHELRNLDPFLQLDEFTVSKPAGFPDHPHRGFETVTHMFEGAITHQDFAGHKGTIRTGDVQWMTAGRGIVHSEMPAGDGVSEGLQLWINLSSKDKMIEPRYQELERKDISRAETEDGVEARVIAGEAFGVASPVYTRTPIMYVDFTMRPGSRLHQPVPEGWNAFVYVVDGEGVFGRETATAHHCLVLGSGDGVSVWNRSARPLRFVLAAGQPLGEPVVQHGPFVMNSHAEIQQAMEDYSYGKNGFERAGQWSSSA

SEQ ID NO: 18179 - protein, 139 aa, Zea mays
  VARIANT 49: note = Ancestral polymorphism is A, Derived polymorphism is E
MEKMNVVASRKQPGDWSCRSCQYVNFCKRDACQRCGEGKLGVERTDYAALGGDWDVKPGDWYCYRCGVNNYASRASCFKCAAAKNESTAAVAQGWGYTVAGQAGMMPGDWICPRLGCNVQNYANRTECFRCSMPKSYYG

SEQ ID NO: 18180 - protein, 246 aa, Zea mays
  VARIANT 59: note = Ancestral polymorphism is P, Derived polymorphism is S
  VARIANT 180: note = Ancestral polymorphism is M, Derived polymorphism is T
  VARIANT 188..246: note = Derived polymorphism lacks residues 188 to 246
  VARIANT 190: note = Ancestral polymorphism is P, Derived polymorphism is L
MTKNVCTEKEMGQGQGSKYAGIIVTATCTSVASVLWLWHQSNRQEATSTTAIRSPYSDPHEVKNLYEERKEPGREELEEMASAEGERWVGLATDFSQGSREALQWAATNLLRAGDHLLLLHVIKEPDYEQSEAILWESTGSPLIPLSEFSDPIIAKKYGAKPDMETLDLLNTTATQKEIMVVVKVLWGDPREKLCQVIHDTPLSCLVIGSRGLGKLKRVLLGSVSDYVVNNATCPVTVVKSSSTEG

SEQ ID NO: 18181 - protein, 135 aa, Zea mays
  VARIANT 91: note = Ancestral polymorphism is S, Derived polymorphism is N
  VARIANT 74: note = Ancestral polymorphism is M, Derived polymorphism is L
  VARIANT 60: note = Ancestral polymorphism is C, Derived polymorphism is Y
  VARIANT 54: note = Ancestral polymorphism is D, Derived polymorphism is V
MMPCSSPWTMPCPSTVVVLTAWNLAAGTGPIPTEKKATSLHTVRMATPTPAPRDTDPRACRKRAADSAARQPVLPTMLTYSSGFRPTRSISTMASAMNDVLKNPTATMAARSWRSVAIPVSRDILEPGSWNRTDP

SEQ ID NO: 18182 - protein, 161 aa, Zea mays
  VARIANT 35: note = Ancestral polymorphism is M, Derived polymorphism is R
  VARIANT 49..161: note = Derived polymorphism lacks residues 49 to 161
  VARIANT 55: note = Ancestral polymorphism is S, Derived polymorphism is T
MVAVGFFKTSFIALAIVLIDRVGRKPLLYVSMVGRTGCLAALSAALFLQARGSVSRGAGVGVAILTLYGIFATSVGDMSDEDRDRERDRDRVWLHGEKVGAGFKYKYCRETKSGGGGTRLKEHLAHRGKNVKKCPSVPPDIKAYFQLDIDKTKEKKSSRFR

SEQ ID NO: 18183 - protein, 570 aa, Zea mays
  VARIANT 445..570: note = Derived polymorphism lacks residues 445 to 570
  VARIANT 65..570: note = Derived polymorphism lacks residues 65 to 570
MGPTTRAHFVYNRRRRRRRGGRHAVEEASDEEQQQMDSSSSSSDEEGDQEEDAEASGEDVDDEEEEEAVAAEPAPKQPPAAAAAGEKRGRRKGSITISLKKVCKACKRTGHQAGFKGAVYIDCPMKPCFLCKMPGCHTTLTCPHRVTMEHGVIPAPKRNANTSLDYVFQSQVKGKIPMVKPKFLIPNQLEHGNIKFHQRRVTCLEFHPTKNSVLLSGDKKGLLGIWDYVKLHEKITYDSVHSCILNSMKIDTTNDGMIYTASSDGTISCTDLDTGIGSPLLNLNPNGWNVSLLWSCSIDHFVQKEFMKMLFQSLSTFPHLVLLDRRSKTRIGHPILIHKKGSKVTSLHCNPARPEVLLSSGNDHYARIWDTRKLEANSPLASLAHGRVVNSGYFSPRSGNKILTTCQDNRIRVWDYILGDLQSPSREIVHSHDFNRHLTPFKAEWDPKDYTETVAVIGRYISENYNGVALHPIDFIDTSSGKLLAEVMDPDIITISPVNKLHPQDDILATGSSRSIFIWKPKIEDELTEERAKHDNSSDDDSGGDSGGKNKKAKKTRFTHAVKGKGKSKV

SEQ ID NO: 18184 - protein, 99 aa, Zea mays
  VARIANT 8: note = Ancestral polymorphism is L, Derived polymorphism is M
  VARIANT 27: note = Ancestral polymorphism is F, Derived polymorphism is S
  VARIANT 29: note = Ancestral polymorphism is A, Derived polymorphism is V
  VARIANT 47: note = Ancestral polymorphism is S, Derived polymorphism is L
  VARIANT 58: note = Ancestral polymorphism is F, Derived polymorphism is V
  VARIANT 65..99: note = Derived polymorphism lacks residues 65 to 99
MVIVDLCMDRVRKLADNCTGLQGFLVFNAVGGGTGSGLGSLLLERLSVDYGRKSKLGFTIYPSPQIEQYHSVLHSNFSQKALLVSKHDRRSLRSQLKSS

SEQ ID NO: 18185 - protein, 423 aa, Zea mays
  VARIANT 324..423: note = Derived polymorphism lacks residues 324 to 423
MSDGKDSLDLSALGAAIPNSAELSAEDKANLVASIKNTLEGLASRHTDVLESLEPKVRKRVEKLREIQGEHDELEAKFFEERAALEAKYQKLYEPLYSKRYEIVNGVVEVEGITVESAAETPAEQKTGDETSADQKEEKGVPAFWLNAMKNHEILAEEIQERDEEALKYLKNITWYRISEPKGFKLEFQFGTNPFFKNSVLTKTYHMIDEDEPILEKAIGTEIEWYPGKCLTQKVLKKKPRKGSKNTKPITKTEDCESFFNFFSPPQVPDDDEEIDEDIAEQLQNEMEQDYDIGRPRELPEGKGSRANDLQSASSSEVLHNECWQALFVEQLVWFCLMLKVIELVCGTFEGALVGFMELVGEFFWDMALYHYMWVVSSLSVLGFRYYMCSYAWSEDGCHSGMSYCAYHWHSVLSVLSSSVPCR

SEQ ID NO: 18186 - protein, 282 aa, Zea mays
  VARIANT 87: note = Ancestral polymorphism is G, Derived polymorphism is R
  VARIANT 164: note = Ancestral polymorphism is S, Derived polymorphism is L
  VARIANT 209: note = Ancestral polymorphism is V, Derived polymorphism is A
  VARIANT 266: note = Ancestral polymorphism is S, Derived polymorphism is P
MAAAAICVEDEAACAAAECAGIGNLDLAAAGAGAGGKRSVYLMDCAPVWGCASTRGRSTEMEDACAAAPRFADVPVRLLASRRDLDRLGLDADTLRLPAHLFGVFDGHGGAEVASYCRERLQVLLRQELRLLSKDLGETSEADMKEHWDELFTRCFQRLDDEVSGQASRLVGGVQETRPVAAENVGSTAVVAVVCSSHVVVANCGDSRVVLCRGKEPLELSIDHKPDRKDERARIEALGGKVIQWNGYRVSGILAMSRSIGMYIASGTKSWQNDLFPFLSGM

SEQ ID NO: 18187 - protein, 149 aa, Zea mays
  VARIANT 30: note = Ancestral polymorphism is K, Derived polymorphism is R
  VARIANT 37: note = Ancestral polymorphism is P, Derived polymorphism is L
MAWFLQVALAAWTMPNHQWDRYLKPFVIPKPEVTVVPRAKDDDCLILASDGLWDVVTNEEACKAARRQIQVWHKNNGAAGASWSLCDEGDGSTTDPAAQAAADYLVRVALKKGTEDNVTVIVVDLKPRKKSSGATRSIGRSGSITVELS

SEQ ID NO: 18188 - protein, 196 aa, Zea mays
  VARIANT 91: note = Ancestral polymorphism is D, Derived polymorphism is G
MAAVGARPVLYHHHPHPAPAGGAPAPMSSSYFSRGGGSSSPASSLSAAHLDISEFLFDDASVVVPPDASGGGAISAGGAGSAAAPERPRTDRIAFRTRSEVEVLDDGYKWRKYGKKSVKNSPNPRNYYRCSTEGCNVKKRVERDRDDPGYVVTTYEGTHNHASPSTVYYASQDAASGRFFVAGTQPPGPGPGSLVN

SEQ ID NO: 18189 - protein, 420 aa, Zea mays
  VARIANT 161: note = Ancestral polymorphism is S, Derived polymorphism is W
MMLVKSEIESCYPGPSAAAPSVVIGGAPDGVEGGHRHQVVRRRRREPPLLAPIGGGGGIGKPLPSITVKRSSRFRGVSRHRWTGRFEAHLWDKNSWNPTQRKKGKQVYLGAYDEEEAAARAYDLAALKYWGPTTYTNFPVMDYEKELKVMENLTKEEYLASLRRKSSGFSRGVSKYRGVARHHQNGRWEARIGRVFGNKYLYLGTYSTQEEAARAYDIAAIEYKGVNAVTNFDLRSYITWLKPSAPPAAFNREALVAQAAPAEQLQLHHHPAETAQMLPRGNPFLLDHMTSSGGGQEASMSTVSPGGMRRRGSSTALSLLLKSSMFRQLVEKNSDAEEGAGDGEAAAAAGSGHPGPGDAYEYHNFFQGEAPPDMCDLFSSGGGGGGGHARVAGFHRDIAACYDGEGLDGWSGFGNMPSLQ

SEQ ID NO: 18190 - protein, 277 aa, Zea mays
  VARIANT 8: note = Ancestral polymorphism is L, Derived polymorphism is F
  VARIANT 6: note = Ancestral polymorphism is P, Derived polymorphism is H
MAAAGPGLYSDIGKKARGLLYKDYHTDRKFTLTTYAANGAFKARVTMDMKHRVVRAMIAGSMGDGDGAPVHVQDKTESVTTTITVHELATPGLKAFLCIPFPYKKSAKAELQYLHHHAGVAASVGLNANPVVKLSGVFGTKTVAVGADVAFDTSSGNLTKYNAGLSYSTSDFVAAATLNNKGDKIAASYYHSVSPTTAVGGELSHSFSTNGNTITFGTQHALDRLTTVKARFNNCGMASALIQHKWRPKSLVTISMEVDTKAIEKSSKIGLSLVLKP

SEQ ID NO: 18191 - protein, 90 aa, Zea mays
  VARIANT 27: note = Ancestral polymorphism is A, Derived polymorphism is T
MVGGGAHGGTTYKGYTIPHNKRWHTVAGKGLCAVMWFWVFYRAKQDGATLLGLRHPWDGHDDHSHGHGHGNEVGDHLIPSIYLALQNAFF

SEQ ID NO: 18192 - protein, 163 aa, Zea mays
  VARIANT 139: note = Ancestral polymorphism is A, Derived polymorphism is T
  VARIANT 132: note = Ancestral polymorphism is T, Derived polymorphism is I
  VARIANT 98: note = Ancestral polymorphism is Q, Derived polymorphism is P
  VARIANT 94: note = Ancestral polymorphism is L, Derived polymorphism is I
  VARIANT 84: note = Ancestral polymorphism is V, Derived polymorphism is I
  VARIANT 65: note = Ancestral polymorphism is P, Derived polymorphism is L
  VARIANT 62: note = Ancestral polymorphism is A, Derived polymorphism is T
  VARIANT 61: note = Ancestral polymorphism is T, Derived polymorphism is I
  VARIANT 32: note = Ancestral polymorphism is G, Derived polymorphism is S
  VARIANT 28: note = Ancestral polymorphism is R, Derived polymorphism is Q
  VARIANT 27: note = Ancestral polymorphism is R, Derived polymorphism is Q
MGAQPAHSLVPPSASGRWSPARGNGERRRRGSNGEARGAPSGAKKGLPRKGKASSGRTLNTTQIPLVASHPDVYEPCDDSFALVDALLSDKAQLLTLQPRLCMEVGSGSGYVITSLVIMLRQLGSGAQYLAIDINQHATETTQVTLEAHGVHAYVIVTDIMWC

SEQ ID NO: 18193 - protein, 311 aa, Zea mays
  VARIANT 48: note = Ancestral polymorphism is D, Derived polymorphism is Y
  VARIANT 63..311: note = Derived polymorphism lacks residues 63 to 311
  VARIANT 74: note = Ancestral polymorphism is F, Derived polymorphism is S
  VARIANT 77: note = Ancestral polymorphism is S, Derived polymorphism is T
MEFWGLEVKPGSTVKCEPGHGFILHVSQAALGESKKSDSALMYVKVDDKKLAIGTLSIDKYPQIQFDLVFNKEFELSHTSKTTSVFFSGKADGKEEQKNQEKAVAATASKSSLGLEKKSKDDSDDSDEDESDDSDEDDSDDSDEGEGLSPDEGDDDSSDEDDTSDDDEEETPTPKKPEAGKKRGAENALKTPLSDKKAKVATPPAQKTGLFVVKYLQSWGYLLWNCCYEFVTCILYFFLQVARRVPPMWQLHTQQKARPLQTMTNQRRSLQNLVGQSLANHAARHSIVRWLCRLTPRRSMGPNELQVQLSP

SEQ ID NO: 18194 - protein, 246 aa, Zea mays
  VARIANT 190..246: note = Derived polymorphism lacks residues 190 to 246
MPAHQTLYSTCPLPEGTLPLKVLPLEGEQDCRLGRPAGPLSTEQDLELGAPDLPLVADVDLSGSDVLRFGGASREKPGISDGFHGLDLIVGELPLEGVGAAVFAGEEPLGIVEPGLVIDDDLTGATKLPCWAEGAEGRLVGVNALDVGLLCADMVGLDDSVVDLVLPEGAEVLLAGPTALLEGVVDLADGSVDDLGTEAPVLAGTVVREVGVQGLEPLELAVNATCLVGVEVLDELEVSPPDDDGQ

SEQ ID NO: 18195 - protein, 342 aa, Zea mays
  VARIANT 91: note = Ancestral polymorphism is Y, Derived polymorphism is C
MEGYDREFWQFSDQLRLQTTAFSGLSLGDSIWSPATGAGGRRNNNTDLLAASASAADAGKHNGVGLSLNDGGPGLIGSGKLAFGGSKAGRYNNLPSEKAAPVYNHSGATINGGYARSDNAGLAAFNKMGSYFHNSNGNGGGGGEVKSYFNKSAGRAASNNSHGHAGGGKKGGGGKHGKNEGNGGAVAATDKRFKTLPASEALPRGEAIGGYIFVCNNDTMDENLRRELFGLPSRYRDSVRAIRPGLPLFLYNYSTHQLHGIFKAASFGGTNIDPTAWEDKKCPGESRFPAQVRVATRKIYDPLEEDAFRPILHHYDGPKFRLELSVAETLALLDIFADKDDA

SEQ ID NO: 18196 - protein, 284 aa, Zea mays
  VARIANT 229: note = Ancestral polymorphism is V, Derived polymorphism is A
  VARIANT 211: note = Ancestral polymorphism is N, Derived polymorphism is S
MDGARVLIAAGATAVCCFVCAFWVFRSSSSSSPASPKKHQSPSTNCCGCASCGCRDAKPANGEMAVGGENKKKAPEPDPPEAPSMMEQLVPEITTHALSYLDYTSLCRLSMTNSAMRRAANDDGAWKALYHKDFTVEQGTINPPNGWKAYYAATKAIINLNAEFYNIIREGSLPAMSRFWLNADYVKCIHATGEFCPGYNSVMESWGLLFNWGQDGGQGIGFQIRDVRVRVLGEMAWVNMKANVDVDPLVFHVTNVYELCNGRWYMVHHHSSLMAHPAPHNMFG

SEQ ID NO: 18197 - protein, 181 aa, Zea mays
  VARIANT 75: note = Ancestral polymorphism is A, Derived polymorphism is V
  VARIANT 49: note = Ancestral polymorphism is D, Derived polymorphism is N
  VARIANT 46: note = Ancestral polymorphism is A, Derived polymorphism is S
  VARIANT 37: note = Ancestral polymorphism is R, Derived polymorphism is H
MQRRVGMADGEARCRTLGAVIKEKDEEFALFLEMRRREKERGAAAAAADQLLLSGDVAAENGMLLLDPPPPAALAYRGLNFWFFVVVEPKPAAYKVAGGGFRRAPGGVDDFLNADASDKNDYDWLLTPPGTPLFSSLKVEPKRSLVSQAGTPKARPTALKSRVSHLNTRCILVLGSTNCYF

SEQ ID NO: 18198 - protein, 463 aa, Zea mays
  VARIANT 218..463: note = Derived polymorphism lacks residues 218 to 463
  VARIANT 119: note = Ancestral polymorphism is Y, Derived polymorphism is N
MWANREAEDGGNGHSIPPRTDRFTSLFSRDLDSRASMGEAKDNEVYEEDLVDYEEEVENVIDGAPTNGSSDVVKKGYVGIHSSGFRDFLLKPELLRAIQDCGFEHPSEGKIYFCSCANYALYYHISLGCIGTKLQHECIPQAILGMDVICQAKSGMGKTAVFVLSTLQQIDPVAGQVAALVLCHTRELAYQICHEFERFSKYLPELRVAVFYGGVHIKNHKDLLKNECPHIVVGTPGRILALARDKDLPLKNVRHFILDECDKMLESLDMRRDVQEIFKMTPHDKQVMMFSATLSKEIRPVCKRFMQDVMSYGLTYFNCPSSYLRLPFPRVCFICYLVPIHIPFVGDEMESSVVSINRLGENSRIGTLIFLSIIVTLQPMEIYVDDEAKLTLHGLVQHYIKLSEAEKNRKLNDLLDALDFNQVVIFVKSVSRAAELNKLLCECNFPSICIHSGMTQEERSVIY

SEQ ID NO: 18199 - protein, 237 aa, Zea mays
  VARIANT 99: note = Ancestral polymorphism is R, Derived polymorphism is S
  VARIANT 155: note = Ancestral polymorphism is E, Derived polymorphism is K
  VARIANT 178: note = Ancestral polymorphism is A, Derived polymorphism is T
  VARIANT 197: note = Ancestral polymorphism is A, Derived polymorphism is T
  VARIANT 200: note = Ancestral polymorphism is A, Derived polymorphism is V
MATAGGGAGHLKLLGAWPSPFVNRVRMALHLKGLEYENVEEDLTNKSDLLLASNPVHKLVPVLLHGDKPISESLVIVEYLDDAFPGAGQAVLPADPYERAVARFWAKYVDGKLHGMMVKALMGATEEERATATVDALAAMDTLEGAFAECSGGKKFFAGDAPGYLDVALGGFIGWLRAWDKVGGVKLLDAGRVPRLATWAERFAALDVAKEVIPDPDHIAEFAKVLQARSAAAATSN

SEQ ID NO: 18200 - protein, 436 aa, Zea mays
  VARIANT 37: note = Ancestral polymorphism is A, Derived polymorphism is V
  VARIANT 24: note = Ancestral polymorphism is T, Derived polymorphism is M
MRSSVASAALLVTCLVVAAAARSTGRTTLSVLSFGAAGNGVTDDAQALVAAWQVACRVPRATVLVLPSGHRFLLSPVTLQGPCSAKLTLQIDGTVLAPPEMGSWPKPRRPLQWLNFKWLQGFSIQGTGAVDGGQQNLDLDMKCCLSITHFYLQTSTGTGHWHSPGVKPTLIRFYNSFNVSVRNIRISNSPQCHLKFDSSGGIRVKNVTISSPGDSPNTDGIHLQNTKDVEIRSSTIGCGDDCVSIQTGCSNVHMKNVVCNPGHGISLGGLGKDNSLACVSDVVAENIVVQNALYGVRIKTWQGGVGSVRNITFSNVRVANVATPIAIDQFYCDRGGARCANRTGAVAIAGVAYRRVVGTYTFQPLRLACSDARPCTGVTMLDVRLSPAAAGGTVAPLCWNSYGEARGTIIQPLSVGCLQRSNGYAMPLTQPFNYTC

SEQ ID NO: 18201 - protein, 640 aa, Zea mays
  VARIANT 2: note = Ancestral polymorphism is R, Derived polymorphism is S
MRCYRCFLLAPVVIACFFSRITTTTLADPRATVVRELCNKTKDDGPGAVWANNFVVAFDNLNSDLEQKGWGVTSVGQDPITFYALVQCLEDLSTVDCTLCYSEIRSLLPKCYPEIGGRIYLDGCFMRYANYSFFGEAVDSLDTSVCSSSNRSSEKRGFGSAVDAVLSNVTSLAVKSGKGFAVTSAFGSTEFAAYALAQCWENLNTSSCAACLSAAAGSVAKCAPAEEGRALFAGCFVRYSTAPFWNSEDSGSSSKKHVVPWTVLGFSVGLVLVLIGSVLAWRKKKKACRAGEGSLRGLYGSELPARISQSSLNYSYKDLKKATCSFSVENKIGQGSNGTVYKAVLPGGNEVAAKRLFLNTKQCLDQFFNEVDVISQVRHKNLVKLLGCSVDGPESFLIYEYHLNRSLDLSIFADGQQKRRLDWQQRFDVIFGVAEGLCYLHEESETRIIHRDIKASNVLLDQKLKPKITDFGLARVLCGDRTHLTTGIAGTVGYMAPEYVVHGHLTKKADVYSFGVLAVEIVTGKRCCGSTGSHSGHSLLAQVWHSYKTNTTEKVVDTRLQQESAPLDLEEITRVVQVGLLCTQANPDERPAMSRVVELLRDRDGERGDADFILGDPPFFEVEIDAAGGGVDGEACTLLP

SEQ ID NO: 18202 - protein, 246 aa, Zea mays
  VARIANT 46: note = Ancestral polymorphism is P, Derived polymorphism is R
  VARIANT 9: note = Ancestral polymorphism is E, Derived polymorphism is D
MADYEQEQDMEVEALQAILMDDIKEIDPSESGIATTARCFQILLSPQDDDFDESAYVPVQLALIFAHTEKYPDEPPLLNVKSVRGIKPHDLASLKEKLEQEAKENLGMAMVYTLVSSAKEWLSEIYGQNGGDEEPEETEAEEEVIIPHGEAVTVESFLAWRDRFEAELALQRAKLMPDSALTSSKEKKLTGRQYFESGRHAVKGASTVADEDEEEEEDIEFDDDFEDDEEDMLEHYLAQQSENSAA

SEQ ID NO: 18203 - protein, 738 aa, Zea mays
  VARIANT 115..738: note = Derived polymorphism lacks residues 115 to 738
  VARIANT 123..738: note = Derived polymorphism lacks residues 123 to 738
MGSCAGEEWPGGVTGPDAEVGALVWVRRRNGSWWPGRILGMGELPENIVIPPRSAGTPIKLLGRPDGSIDWYNLEKSKRVKSFRCGEYDECIEKAKALVRRQKKTHTEGRYVRREDAIMHALEIERSHFPNNCDDLEEDADNDICASQNICSAKSININGLSKKSRGARSLYDIEINSAQELSQTLTLYKQPQNLSSSSTRYASSKRKKWKGHKDHEDDSVHGFQRMRDLREIGTKNVFKQKSGSGIVSDVPLLESGSSFGYDLSSADGIKLGEQSQSSIKKKRSNIGQSYDSLSKKDKHHPLSLLCEDSEVSGTYYHWDPSGQSCSQYPGGQIPNLVESSRRAKTIFPTDVNNCSYSSGTSSLDTLLDTSHINHKRSLNAVTPKNADPCTARFLNDDCPDCDGFLDAVTLEEDVLEEGKSHLDTYGSCASIKDQISKLGNQSTGCGIGGTSSTRHNRNSKKNITAVNFLIPKGSHKRDTNSLLQHEGIIKSEGTVFRPAELEDNAHVTPEHDESSETISNLSNYEKNTTSFPNYVPLQLLPPPGQRPDPKPPGCPVTNPTRRARADYRLYDVEVTVQRSYKGHHAPLISLMSKWTGKPIVGYPVTLEVLKDSRHTTSRDEHRPVMGSLDSLLKSRVSEPRQARSSHASRSKFKSSGRKKATEHDLDRSWWPHTKKPASSPRKMRRLSSFAGSRRESADQKPVVAKTGGPAVACVPLRLVFSRINEALSFPLRQEKTT

SEQ ID NO: 18204 - protein, 203 aa, Zea mays
  VARIANT 18: note = Ancestral polymorphism is G, Derived polymorphism is D
MNPEYDYLFKLLLIGDSGVGKSCLLLRFADDSYLESYISTIGVDFKIRTVEQDGKTIKLQIWDTAGQERFRTITSSYYRGAHGIIVVYDVTDQESFNNVKQWLNEIDRYASENVNKLLVGNKCDLAENRVVSYEAGKALADDIGIPFLETSAKDATNVEKAFMTMAGEIKNRMASQPAASGASRPATVQMRGQPVSQQSSCCS

SEQ ID NO: 18205 - protein, 116 aa, Zea mays
  VARIANT 9: note = Ancestral polymorphism is R, Derived polymorphism is C
  VARIANT 19: note = Ancestral polymorphism is G, Derived polymorphism is C
  VARIANT 23: note = Ancestral polymorphism is A, Derived polymorphism is T
  VARIANT 27: note = Ancestral polymorphism is R, Derived polymorphism is H
  VARIANT 28: note = Ancestral polymorphism is E, Derived polymorphism is K
  VARIANT 30: note = Ancestral polymorphism is A, Derived polymorphism is V
  VARIANT 32: note = Ancestral polymorphism is R, Derived polymorphism is C
  VARIANT 34: note = Ancestral polymorphism is A, Derived polymorphism is V
  VARIANT 41: note = Ancestral polymorphism is E, Derived polymorphism is K
  VARIANT 46..116: note = Derived polymorphism lacks residues 46 to 116
  VARIANT 72: note = Ancestral polymorphism is C, Derived polymorphism is Y
  VARIANT 79: note = Ancestral polymorphism is C, Derived polymorphism is Y
  VARIANT 90: note = Ancestral polymorphism is G, Derived polymorphism is R
  VARIANT 95: note = Ancestral polymorphism is E, Derived polymorphism is K
  VARIANT 97: note = Ancestral polymorphism is I, Derived polymorphism is T
  VARIANT 100: note = Ancestral polymorphism is T, Derived polymorphism is A
MIKSEEAHRCDLSSLLFIGIGGAPLSREVAERFAAIFPNIELIQVRLIRCVLVFFAFAIGYGQGSRCCGFCCHVLKGCCDCGGWSGGRDGQSSTELIFITGKMGPKGSFPAILKSG

SEQ ID NO: 18206 - protein, 300 aa, Zea mays
  VARIANT 118: note = Ancestral polymorphism is R, Derived polymorphism is L
  VARIANT 94: note = Ancestral polymorphism is G, Derived polymorphism is R
  VARIANT 83: note = Ancestral polymorphism is S, Derived polymorphism is T
  VARIANT 82: note = Ancestral polymorphism is G, Derived polymorphism is R
  VARIANT 74..300: note = Derived polymorphism lacks residues 74 to 300
  VARIANT 72..300: note = Derived polymorphism lacks residues 72 to 300
  VARIANT 66: note = Ancestral polymorphism is L, Derived polymorphism is F
  VARIANT 59..300: note = Derived polymorphism lacks residues 59 to 300
MGGGAEDGGGVTVYGRKEIMMGEQCQSMDFSGVGVPIYLEGTKAMEEAKIKNIESLDGWMKLRELLDKNDFWSQHNLTVPEGSFCNLNLRFKVGLPPEAVYNIIIEAGNKGLWMLDILKKLLMAPNIATKVVRTLVASGLLKEVSDVRHRSRKIFMATDFQSFAEITGGTWYHDGRLDTDAVSTARRCCQAQVERLGAATAQMIHHDILKEDPRAGYTIDKVKDIIKTMVLEEVKSTGTRDFSAVMAGTMCYRLVTGAPQGGMMEGIHCGICPRTHECSPEGIISPSTCVYYKKWLQMDF

SEQ ID NO: 18207 - protein, 263 aa, Zea mays
  VARIANT 186..263: note = Derived polymorphism lacks residues 186 to 263
MGGSECALGDAAIGEETLNYDGDDVEMADADSDTEEARAAEVSAATGGSAGGVRQAEKDGPDGKKKRKKRRNKGKKNKGRQDGAPTNIADINRFVLNTCKRLKEKKSYLVWNAVGCLGVTAVNDLVREVEAIQKCGGQTIADGSRFRTGGGILWNILKSREPKAYKEIMAKGKELEKQFRCTKRPQISRNEDASSQGSALIDDEIEARDQKETLDDPKQLDDVEIHVSDNKAQRKPLADRIRAPVAYDDLFEEGEIHDGEPRS

SEQ ID NO: 18208 - protein, 134 aa, Zea mays
  VARIANT 62: note = Ancestral polymorphism is R, Derived polymorphism is W
  VARIANT 27: note = Ancestral polymorphism is S, Derived polymorphism is R
MENCEVLFPGGSSGANAFTRPEQERKRGQPWTEEEHKLFLLGLKKYGRGDWRNISRNFVQTRTPTQVVSHAQKYFMRHNSGGKDKRRSSIHDITTVKLSDDQDQPPSSPSQSSLITDQFNELALTPGAADSPSN

SEQ ID NO: 18209 - protein, 277 aa, Zea mays
  VARIANT 13: note = Ancestral polymorphism is H, Derived polymorphism is Y
MATTATRRWWRRHDGGDDDPDDLVPMDTQEQEELVRSLEAKQAQQGRRWRRVFAGFLLGYVAFLVYSSFHHAWSPWELRYHAYFMEDLPAPMVIIADWIAALACLFAVKGLLQNSGPSKKWMWYSCYVGILVAIFWTYYILRLPRIRWDVAWLPLGPLMYDGWCIEPVCGPCAAGVNARYQHIEKLHAEFDLGTRYNMSYLRDFTTKFMFIPVLSLKHVEEDLRSLETSLTRGTHTHALAPIVPYSMENSVADAMYNKIIVFVFDQVVDTTPWKSWW

SEQ ID NO: 18210 - protein, 128 aa, Zea mays
  VARIANT 113: note = Ancestral polymorphism is P, Derived polymorphism is L
  VARIANT 72: note = Ancestral polymorphism is W, Derived polymorphism is R
  VARIANT 23: note = Ancestral polymorphism is T, Derived polymorphism is N
  VARIANT 5: note = Ancestral polymorphism is S, Derived polymorphism is R
MNQSSGRYISLRDTLNIMEFLVTVSLLLVHQLFVAETAVVACFSLAVHHNVNVILRAPINHSSTVLLRKPNWLIQIEEGSPLSHIDNLLQKVEQALLKKEAIQNLVKFFHDCPEQFFGHILDAFLKII

SEQ ID NO: 18211 - protein, 181 aa, Zea mays
  VARIANT 10..181: note = Derived polymorphism lacks residues 10 to 181
  VARIANT 63: note = Ancestral polymorphism is T, Derived polymorphism is M
  VARIANT 66: note = Ancestral polymorphism is L, Derived polymorphism is S
MYTFFTIQLQMHSVNQLPVPLVPLIGKGVQEDEVMVSFVATNGEPTTTATSKLVWWNLLEQMTMTSTSCTSATLSTRTRAPPLRALYKSGSIIVLGKTDFLRPDMLCPSSAIEQKGTAEHKTRLKILSDPEKRAIYDQYGEEGLKGMPPPGSRAGPPQLLAQLQSMMMSHKRLFLLQYILW

SEQ ID NO: 18212 - protein, 486 aa, Zea mays
  VARIANT 84: note = Ancestral polymorphism is D, Derived polymorphism is Y
  VARIANT 92..486: note = Derived polymorphism lacks residues 92 to 486
MVAARLRLSLLLSVCLSSAWARPRLEPAIRLPSQRAAAADETDDGDVGTRWAVLIAGSSGYYNYRHQADICHAYQIMKKGGLKDENIIVFMYDDIAHSPENPRPGVIINHPQGGDVYAGVPKDYTGRDVNVDNFFAVLLGNKTALRGGSGKVVDSGPNDHIFVFYSDHGGPGVLGMPTYPYLYGDDLVDVLKKKHAAGTYKSLVFYLEACESGSIFEGLLPNDINVYATTASNADESSWGTYCPGEFPSPPPEYDTCLGDLYSVAWMEDSDFHNLRTESLKQQYKLVKDRTAVHDTFSYGSHVMQYGALELNVQRLFSYIGTDPANDGNTFIEDNSLPSFSKAVNQRDADLVYFWQKYRKLADSSHAKNEARKELLEVMAHRSHVDSSVELIGSLLFGSEDGPRVLKAVRAPGEPLVDDWSCLKSIVRTFEARCGSLAQYGMKHMRSFANMCNAGILPEAVSKVAAQACSSIPSNPWSSIHKGFSA

SEQ ID NO: 18213 - protein, 621 aa, Zea mays
  VARIANT 526: note = Ancestral polymorphism is L, Derived polymorphism is P
  VARIANT 268..621: note = Derived polymorphism lacks residues 268 to 621
MAQIPNLDNAPLNLAALREQSQKDLFGILKNIRGKKCLVIDPKLAGTLSLVVQTSLLKEYGAEVRILSPEPLQTECPKIVYLVRSQLRFMKFIASQIKNDEPKGLQREYFLYFVPRRTVACEKILEEEKVHQKLTFGEYPLYLVPLDDDVLSLELDHSLQECLIEGDTSSIWHVAKAIHKLEFAFGVIPNVRAKGVASTKAAELLNSMQLEDPVNMDDMGIPEINTVILLDREVDMVTPMCSQLTYEGLLDEISACLLGLHITPSLFSVPMQMLQINNGSVEVDASIIGAQQDGKKVKVPLNSSDKLYKEIRDLNFEVVVQVLRQKATSIQQDYAEVKSTNTQSVSELKDFVRRLHSLPEIARHVHLAQHLQSFTGKPSFHARLDIEQTILEVQNFEICFEYIEEMIHKQEVIENVLRLLVLLSLTNAGLPKKNFDYMRREILHSYGFEHMHLLYNLEKAGLLKRQESRSNWVGITRALQLIVDVNDTANPTDISYIFSGYAPLSIRLVQHAVRSGWRSIEELLKLLPGPHLDLKRGGLTINSSPEVHPGLGAQQSIDRVGHRSLVLVVFIGGVTFAEIAALRFLSAQEGMGYDFLVATTKVVNGNTILRPIIANSKEGMM

SEQ ID NO: 18214 - protein, 199 aa, Zea mays
  VARIANT 63: note = Ancestral polymorphism is C, Derived polymorphism is Y
MASPTCSPATAATTPTSPTTSRSVPLHVSSLVGFVPFISTANGADRDLLARFCAGSQLKCENCGEVTAKSTYVTLSEQVDLPKGHGAAHLVQKCKLCGRDGTIVMIPGQGTPLTIEQSQKEEKTCLMVFDCRGYEPVEFSFGTGWKAESVHGTPFEIDCSEGEFSEYDEKGECPVELGKLQSTFKVVKKHERGGKTRFV

SEQ ID NO: 18215 - protein, 237 aa, Zea mays
  VARIANT 175: note = Ancestral polymorphism is R, Derived polymorphism is H
  VARIANT 182..237: note = Derived polymorphism lacks residues 182 to 237
  VARIANT 188..237: note = Derived polymorphism lacks residues 188 to 237
  VARIANT 201..237: note = Derived polymorphism lacks residues 201 to 237
MDALSVFLHGSSPVLAAVKEHEMEIGCPTDVKHVAHIGWDSVAGGVSPSWMNDIMASSDLSSLGNFAALTGTSWVSQDTSGGTFLSNFYGSYIHDSRIGVLIEVNCETDFVSRGDIFKELVDDLALQIAACPQVQYISIDDVPKEVVKKDTELEMQREDLLTKPEQVQAKIVKGRVKKRLGEFALFEQPFIKNDKVTISEWLKQTIGTTGENMKVRRFARYNLGEGLEKESQDFAAE

SEQ ID NO: 18216 - protein, 492 aa, Zea mays
  VARIANT 422..492: note = Derived polymorphism lacks residues 422 to 492
  VARIANT 275..492: note = Derived polymorphism lacks residues 275 to 492
  VARIANT 249..492: note = Derived polymorphism lacks residues 249 to 492
  VARIANT 218..492: note = Derived polymorphism lacks residues 218 to 492
  VARIANT 139: note = Ancestral polymorphism is G, Derived polymorphism is R
  VARIANT 127..492: note = Derived polymorphism lacks residues 127 to 492
  VARIANT 103: note = Ancestral polymorphism is R, Derived polymorphism is C
  VARIANT 73..492: note = Derived polymorphism lacks residues 73 to 492
  VARIANT 19: note = Ancestral polymorphism is R, Derived polymorphism is G
  VARIANT 11: note = Ancestral polymorphism is A, Derived polymorphism is E
MIYLVLALGWEAASIFRKGVIKNMRRNIVDGNSFAFLCDNIDELEHSVQENLPRVSVVMPLKGFGKHNLQNWRTQITSLYGGPLEFLFIVESKYDPAYHVVSRLITEYKDNLEAKVVVAGLSTTCSQKIHNQLTWHFNGRVAYSLTNNNILHIHYRADVPSFHTKFSERRYEQALEIFSWMESCSSLRLSSWDHAARLDLIAKAYSTSQAEEYYNKLQSPATRQAASFPLLHCYVMERDVQKAETFMAQLQSHGLPVDPHSFNEIMNLYVATLFQVMLNDETVKVGWSTYCTLANIFRKNGLNTEAQACLVKAEAKLSPTGRLGYSFVMTCYAALNDSDGVMRMWEASKSVPGRILTAYYMAAMSCSIKVGDISQAECIFGKWEAGCRKHDVRVSNVLLGAYVRNRWIEKAERLHLHMLEKGACPNYKTWEILMEGYVQSRQMDKAVGCMKKGLSLLKSCHWRPPVELMEAIGKHFEEQGSADDAYRYIKVL

SEQ ID NO: 18217 - protein, 81 aa, Zea mays
  VARIANT 55: note = Ancestral polymorphism is T, Derived polymorphism is N
MVANGDAPARGSAAAAASLRRRRTTSGAAAGGGGASSMLQFYTDEAAGRKMSPNTVLIMSIGFVAVVAVLHVFGKLYRTSN

SEQ ID NO: 18218 - protein, 430 aa, Zea mays
  VARIANT 380: note = Ancestral polymorphism is D, Derived polymorphism is E
MDHNFSDMISSESAWSGGVGAGDGAGSGMTVLERLVLDEALAAAILELQGIQQAPACAGKEVVMVAEPTAGGGVVGEAAVAFPSMGMATPTPAYADVDADVLQRQQHHHRHHGAMGMPPDYDLTPATPAVTVTAVPPAFTSAAAYSGGNFVVGQSPAVFSTSNETTATAAAVTSTTSLNCEQGGGGGGGRRQRRANRKRKAAAERSPVAAAQESTLCSLLASTTTAGEGGIQIAFSNAAAAAKRSAKPSSLSSSGSSSISFDGRNPETNCGGVDDPMYEPDTEALAQVKEMIYRAAAMRPVSLGSEEDAGERPRRRNVRISSDPQTVAARQRRERISERLRVLQKLVPGGAKMDTASMLDEAASYLRFLQSQVRELQTLDRRNYGLTTADNNASRATATMAASGPLMSYNNGHGALPAFTFPAAAGETLY

SEQ ID NO: 18219 - protein, 339 aa, Zea mays
  VARIANT 215: note = Ancestral polymorphism is A, Derived polymorphism is S
  VARIANT 149: note = Ancestral polymorphism is K, Derived polymorphism is M
  VARIANT 64: note = Ancestral polymorphism is R, Derived polymorphism is C
  VARIANT 48: note = Ancestral polymorphism is A, Derived polymorphism is T
MASHHSEPLDPADADDPSDNNPELPCPSYHIVTKPGQLPVEFLEPSAAQKLVIGFDCEGVDLCRNGALCIMQLAFPDAVYLVDAIEGGKELIQACKPALESDHITKVIHDCKRDSEALYFQFGIKLHNVMDTQIAYSLIEEQEQEGKKMTSDDYNYISFVSLLADKRYCGILYPEKEEVRTLLRQDPNFWTIRPLSDMMVRAATDDVRFLLSIYAKMMEKLSKVSLWRLAVRSELYCRCFCLSDNQFADWSPLPPVPDDIEADVYVPEADILSVLDVPPGKMGRVIGRKGSTIMAVKECCKVEIHIGGAKGPPDRVFIIGPEKEVRKAEAIFRGRMLEF

SEQ ID NO: 18220 - protein, 119 aa, Zea mays
  VARIANT 19: note = Ancestral polymorphism is D, Derived polymorphism is N
MDRSKSYAGGRMQIEPYYDGGGARPDFRSYSYSAGGSGMGTSSYAYQYEYGGAGAGAGEEMKRSKSKRRWLALADPDMERKRRVAAYKAYGVEGKMKGSFRKSFKWIKDRYLNLVYGWS

SEQ ID NO: 18221 - protein, 260 aa, Zea mays
  VARIANT 18: note = Ancestral polymorphism is M, Derived polymorphism is R
MARMVPTSTSKHRPIIIRASSSPAILHAAWITAVVAICLALCTMHSRKPSSPSSRRRGGSRSASSNHLCSVPSRETNGAGSVGTVATATTPAKVSPTPSDTAMARGADVGPVTVIDVGTHGPIPPAFLPPDPFPPRRSLSSVKHTRFAERVGRIRSMRRGGPGEGAAAAEDDVFVGCHRGGEVGEEGTLWTKTIILGERCRVPSGSDEDDDGVDGATVKKWKGYRPRQPRSVPVTRSNSFAGVGSPGACRPTNPCMRLAS

SEQ ID NO: 18222 - protein, 1174 aa, Zea mays
  VARIANT 53..1174: note = Derived polymorphism lacks residues 53 to 1174
MATSLSTPSQLRTSHCHARRYGRLLGLHPRVSCARCPAPRRAAALSVRANAASTDGDAAVTVRRFPAAPTKAGRLAGVKKIMILGAGPIVIGQACEFDYSGTQACKALAEEGYEVVLVNSNPATIMTDPGLAHRTYIGPMTPPLVERIIDAERPDALLPTMGGQTALNLAVSLADSGALDRLGVRLIGASLPAIRAAEDRQLFKQAMDRIGLKTPPSGIGTTLEECLAIAEDIGELPLIVRPAFTLGGTGGGIAYNKAEFEDICRAGLAASHTQQVLVEKSLLGWKEYELEVMRDMADNVVIICSIENIDPMGVHTGDSITVAPAQTLTDKEYQRLRDYSVAIIREIGVECGGSNVQFAVNPADGEVMVIEMNPRVSRSSALASKATGFPIAKMAAKLSVGYTLDQIPNDITKKTPASFEPSIDYVVTKIPRFAFEKFPGSEPILTTQMKSVGEAMALGRTFQESFQKAVRSLETGFAGWGCGPIKELDWDWEKIKYSLRVPNPDRIHAIYAAFKKGMRVEDIHEISFIDKWFLTELKGLVDVEQFLLSKSLDQLSKDDFYQVKKRGFSDKQIAFATSSSESDVRSRRLTLGVTPTYKRVDTCAAEFEANTPYMYSSYEYECESSPTNRKKVLILGGGPNRIGQGIEFDYCCCHASFALREAGYETIMMNSNPETVSTDYDTSDRLYFEPLTVEDVSNVLDLERPDGIIVQFGGQTPLKLALPIQQYIEENKMVSASGTGNVKIWGTSPDSIDASEDRKRFNAILEELQIEQPKGGIARSESDALAIASEVGYPVVVRPSYVLGGRAMEIVYNDEKLIKYLATAVQVDPERPVLVDKYLIDAVEIDVDALADTAGNVVIGGIMEHIEQAGIHSGDSACSLPTRTVSAQCLEVIRSWTTKLAKRLNVCGLMNCQYAISTSGDVFLLEANPRASRTVPFVSKAIGHPLAKYASLIMSGVTLPELGFTKEVIPKHVSVKEAVLPFEKFQGCDILLGPEMRSTGEVMGIDYEFSGAFAKAQIAAGQKLPLSGTVFLSLNDLTKRHLAEIGSGFRELGFSIIATSGTAKVLQLEGVPVEPVLKIHEGRPNARDMLKNGQIQIMVITSSGDALDSKDGLQLRRLALAYKVPIITTVDGARASIDAIKSLKDKSIEILALQDYFQTADASADLQAAAQTTP

SEQ ID NO: 18223 - protein, 491 aa, Zea mays
  VARIANT 263: note = Ancestral polymorphism is T, Derived polymorphism is I
  VARIANT 429..491: note = Derived polymorphism lacks residues 429 to 491
MVAVAAGRRAGGVGGRRRSGCGPGQAQQKLLAIAVAARFAEAVAPPSAEASRAGSGGCCVELLECLLGALSVNAAPPPAQHRRAVHSIRRRRPRGGGSADDRHADAPSGRIAGNGASASAAASLYTMQGRKGVNQDAMVVWENFGSKDDTIFCGVFDGHGPNGHLVAKRVRDLLPVKLSANLGKGEFKEISTSDVKSGTTKGVATEHRVEDTDASPGNEENGEYPEFFTALRASFLQAFYVMDRDLKAHRNIDCEFSGTTAVTVIKQGQNLIIGNLGDSRAVLGTRGEHNQLVALQLTVDLKPSIPSMFHFHILPKIKKNESFTGEAERIRQQSGRVFSLPDEPDVVRVWLPTFNLPGLAMARSFGDFCLKKYGIISMPDVFYHRITDKDEFVVLATDGVWDVLSNAEAVSIISNAPSQASAARFLVESAHRAWRTRYPTSKTDDCAVVCLFLKTEAASTSSSAVTKDLVKNREMSSGKHSLAVKTSTQGS

SEQ ID NO: 18224 - protein, 769 aa, Zea mays
  VARIANT 584: note = Ancestral polymorphism is K, Derived polymorphism is T
MDGDHRRQAAAAVTVTQVSPARRLIAWLRLLFRAFVHRYGKVASWNAAGRPVFVVLAVFFLQRSLRRRYLSWKESSRLPLMAAAAVTVQTTVRAMAAQRELSVRKQTRAATRIQAQWRAHRAVWSYLTTKRAAVICQRAWRQSVARKELRKLRLCVQENLEREMLEEVCRLREMVDVLQQAVNDAETRAVNEREAAKDAMAQLEAASAIEETVVMVEDTEKVKSLSAEVDRLKDLLGAEMSETFAAKKALSEAELRNEKLARLLGVEEVKNKRLQDTLKRMEEKASSLDEENRMLRQAVASNPAIVRSPSGENHEAPGIQAAPDNEKSRNGTVKPIAVDREANVHEKGAEQPSSNGQEAGKQQQELLIKCLSEDLGFSVGRPIAAYLIYRCLVHWRSFEEERSVVFDRIIQKITAALEARDNNDALAYWLSNSCALLVLLQRTLKINGVAALARQRRRTSSPLKVPQQENQDPAPDGQLICGLAQVYQVEAKYPAIAFKQQLTALLEKVYGMIRHNLKKELSPLLGLCIQAPRTFVVSPRGSCSQGTDLAQQASMAHWQSIIKILTNSLDVLKSNYVPPFLICKMFTQVFSFINVQLFNSLLLRRECCSFSNGEYVKAGLDELEHWCFWLTEEYAGSAWDELKHIRQAVTLLILDDKHSRSLAEITDDFCPVLSMQQLYRISTMYCDDKFGTLGIPSEVVSSMRTKMIEGSSSSPSAHDDINSFLLDDDFSIPFSVDDFTKLIVHVDVADMDLPPLIQESSGGGSKMGH

SEQ ID NO: 18225 - protein, 753 aa, Zea mays
  VARIANT 508..753: note = Derived polymorphism lacks residues 508 to 753
MDAQVTNPSAATDHAAPTTSVSAPAHYAYANDNACPGGPKVWVLVLLFALLLLPFLPSAMRRGGGMHWAGGEGGYRRGGITFKSGWDVVNLCLVLFAILCGLLGRRGGGGSGDGESSSAATSTPAKDGHREVASAPATAAATTTSADLEEEEEEGYDSMSAIYATLPRTNHHAHASGGIRRMKSSSSLRLGSDGVWAPEATCRFYDDAELYRARRPERTWDVDLHGRTATTEVKTIPVDTFVERGRASQPREPRRRRRSVQRLDEVDEERPPRGEALAPARLRRWNSEVVDVMPEHGAPPATSRMWDSKVVDVMPEQDAARLRRWNSESLDMVLEQEAQVAPARNRRWTSEAVDVITERQAAVAPARIIRWNSVDVIPEQEAPVAPSRSRRWSSVAVDMVPEHKVPVVMVPAAPPPPSPPPPPALPRRRRHSVEKLPRPQELEQEIVVVEEVRNLLPPPSPSMFAPGTPPPPPPLPLPPRSTVSRSKKKRSGSVGGAKDLASAIATFYQKKRKSITMKAKRRPHQHHHSDGHYSSPSSDASASPDSTVRTTNAPPPPPPPPRPPPSSIFSNLFKNKKGGNKSRRIHSVAPPQPPPPPPPTRRTKKPPPPASRLAPPAPAVRTRQPRAPVHAPTHQPPLYYTYYPLPPLPPPPPPPLVSEGEDDSPSITASPAPAYCASPDVNTKADRFIESFREGLKLEKLNSYREKWQRQIQENAAAVDIEEEGEFMVIGSLFGDDDISLPQTPATAVAVGF

SEQ ID NO: 18226 - protein, 113 aa, Zea mays
  VARIANT 12..113: note = Derived polymorphism lacks residues 12 to 113
MRKAGKFGNENCKNIVKVSKGHGDSAKLDTFVPSMEAAKPGFKEVEKWSENALWSVSELHVGDEKQTGSNKSDMERVLKGFGACDAFVASRLNAPNGQVGGITFKSSDIALLI

SEQ ID NO: 18227 - protein, 317 aa, Zea mays
  VARIANT 109: note = Ancestral polymorphism is T, Derived polymorphism is I
  VARIANT 143: note = Ancestral polymorphism is M, Derived polymorphism is I
MTGPMEIPVIDLGGLNGGGEERSRTLAELHDACKDWGFFWVENHGVDAPLMDEVKRFVYGHYEEHLEAKFYASALAMDLEAATRGDTDEKPSDEVDWESTYFIQHHPKTNVADFPEITPPTRETLDAYVAQMVSLAERLAECMSLNLGLPGAHVAATFAPPFVGTKFAMYPSCPRPELVWGLRAHTDAGGIILLLQDDVVGGLEFLRAGAHWVPVGPTKGGRLFVNIGDQIEVLSAGAYRSVLHRVAAGDQGRRLSVATFYNPGTDAVVAPAPRRDQDAGAAAYPGPYRFGDYLDYYQGTKFGDKDARFQAVKKLLG

SEQ ID NO: 18228 - protein, 401 aa, Zea mays
  VARIANT 269: note = Ancestral polymorphism is L, Derived polymorphism is H
  VARIANT 1: note = Ancestral polymorphism is M, Derived polymorphism is I
MDEVWRGLDLQLQAGDIDGLHPVSDPFWPALAEYGCSASFLAAVDDTACFGIANMDLTAASADAAAGKSDGVDTSAFFAHNDHRGALPMRQDEQQPVYSSSSLSSTRSLSIDSGGSSSTFFPLDYDAVAALPAATFSPAPLQLQQDPFAGDEEAMMLAMLAVISSAASTSPSSSESSSPLHRAAAAVQPRLHPHGGDDSASHVTVRSTSLAVAPERTTSAADAAGQQDDACKAAAAAAGSNNSSQVYHMLSERKRREKLNGSFHTLRSLLPPCPKKDKTTVLMNAASYVMALEAQVSELEDKNSKLQRYVPCGDGGGGGGATTATAAHRRARVHISRAASDEQQVSLMVMVMVECDIVDLVLHVLERLRWTSGVSVLSVNADTYSPQALLKALANIKLHIM

SEQ ID NO: 18229 - protein, 157 aa, Zea mays
  VARIANT 10: note = Ancestral polymorphism is N, Derived polymorphism is T
MREQDPEKKNPHRAVLYIHTHRANSSKNINAHVGDLKDLLVQQPDLADTSQGKVAWKGDALTRILGEEKPGRVHGLGLVPNPDKVLDCSKSGRLKHLNITSLDPTSSEDVVSLRLQVEKLVNHVQNLEQKTKALEQQQNQHGGSGDPLSATTNAQIT

SEQ ID NO: 18230 - protein, 164 aa, Zea mays
  VARIANT 27: note = Ancestral polymorphism is A, Derived polymorphism is D
MALVSTSATAPAAVLKTPFLGARRALANAAAPKPAPRAPRRRRGRRQEVVDPPSSSTRPGSTDHPVPRRQARARQCRRAQARAARSSPSPRPPPRSCGSAEFINPPWLDGSLPGDFGFDPLGLGKDPAFLKWYREAELIHGRSAMAAVLGIFMGQPRFGDCGRA

SEQ ID NO: 18231 - protein, 544 aa, Zea mays
  VARIANT 131: note = Ancestral polymorphism is T, Derived polymorphism is I
  VARIANT 283..544: note = Derived polymorphism lacks residues 283 to 544
MPNTAAFRRAVAELGARAAGGGGARLDVPPGRWLTGSFNLTSRFTLFLHRGAVSSAPRAEFDPLLVLSLLYNAAKQSPGVSVSNSNFWIQSEKPYSPEAVDSALECWSGTTDPVEVEAVLVPYILEDELKTVRINLGDNEHYMSYVAAELSAIDSSHVLVSRTIGKASSEIRLYFAAANIHVVSDISKHALDSLGDGDINWQVNKRASYICGQTIYGDALLANIGYTRRDSELHTEDVNLCSYYRILLGKLPDGNCKMSRDSILAAELPSAYSRFSWKGLSPRDLLCSFCRLQRLPEPHFVVSRVSCDTLMLAVSSEERGAPAGSAENQYTNDVRINKEKPDLFKCEVNIRSRKQEILLEYSAADTWSKESDAIQNSSLKVLIWFNNYFKRLTSKTSKLYLSESTADVKDKAKTYLLESHNEFEFEIGTSAVSNQLESCVTQLSVNQTARFVAELPPRDLIMAASCEFSPGHSFIMPTGWLYQVLDYDWFEAISTEPNKGRGHKRRLKFLVDAGEINCGRGKVRESETSGHFGQVNGVYQVPYS

SEQ ID NO: 18232 - protein, 396 aa, Zea mays
  VARIANT 58..396: note = Derived polymorphism lacks residues 58 to 396
MAPAPAAASAGRKSHVTVLLLYVVCGLILLLLLASYSPRLQPHAHGRSLHRRLKLHPKSSLPSDASSGGNGGQQKTQHQNHHAASFDPTIAELERRLDDKEWEREHYSLLHGGEPDDHMKEWEEFLKEEEDFINDDDRFNIADRIRALFPKIDVAPQDGFVSLDELTAWNLQQARADQHHRSAREMELYNKNGDEIVSFEAFNALRQESHGEGNMLGFEWWKEDHFNASDANADGFLDKTEFNDFLNPSDSDNPKIINLLCKQEIRQRDKDGDGKLNFEEYFTGLHDHIHGYDDENADISQIGNITVAKDRFFKLDKDNDGFISEHELEPVLDKLYLSERYYSRQQAIHAISEADKDHDGRLTLEEMVENPYAFYGSVYLSSSDNDDEDYFHDEFR

SEQ ID NO: 18233 - protein, 468 aa, Zea mays
  VARIANT 344..468: note = Derived polymorphism lacks residues 344 to 468
MFHHQQELLQAEAAAADRESSMSNLTSSTSGGPNAAPAAAAAAPPAPAASGNNKRKRSLPGNPDPEAEVVALSPATLMATNRFVCEICGKGFQRDQNLQLHRRGHNLPWKLKQRGTGKEAQRRKVYVCPEASCVHHDPARALGDLTGIKKHFFRKHGEKKWKCDKCSKKYAVHSDWKAHSKICGTREYKCDCGTIFSRRDSFITHRAFCDALTEESAKAIGLNAMAAVPAQHHHHPMLFSPPPTHVMQQDVALLQEHHHQEVMQQEHCNYAMKTEMPPWPGMTYDHPLLQPLCNAAAPQSSATSTPPPPTTMQLPAAYAHLSATALLQKAAQMGATVAGAGYTQMAGAATSATFGLGLPDLQNTQQQQHQDGEIMAGLARTASHGRGGEEGGGGGGDGMTRDFLGLRAFSHRDILGLAGLDSSCMGAIISASASMNCYDEPQQRAQAQAEQQQQSSNEQWHSMGSHQS

SEQ ID NO: 18234 - protein, 139 aa, Zea mays
  VARIANT 65: note = Ancestral polymorphism is G, Derived polymorphism is R
  VARIANT 12: note = Ancestral polymorphism is G, Derived polymorphism is R
MASAAKTLARVGSSLFGRILASPSSSIPRAGLPLARLQPHVPPPAPAGVDAYEAETIARLSSLPGEISFPCGLPSLRFFIDDVEDPVPNDPFQLLPKRTYQPSTIKRKRTHGFLTRKSTKGGRKVIARRIAKGRHRISV

SEQ ID NO: 18235 - protein, 176 aa, Zea mays
  VARIANT 30: note = Ancestral polymorphism is K, Derived polymorphism is N
  VARIANT 44: note = Ancestral polymorphism is K, Derived polymorphism is M
  VARIANT 45: note = Ancestral polymorphism is S, Derived polymorphism is I
MDAFSAVMDKVKSHPEMMEKVSAVMDKVKKSHPEAVEKVKDEVKSLADALHLRRHGSKDKEPESEEKAVEGEAAQSVEEEEGTSADKTAEPNVLEQAVQEIQAVAAALQQTAPETETEIPVETAAAAAPETLAEGDKPEETNRDVEKDDPKKRLDFAGFFAMLFERFCSPANKKKD

SEQ ID NO: 18236 - protein, 340 aa, Zea mays
  VARIANT 291..340: note = Derived polymorphism lacks residues 291 to 340
  VARIANT 194..340: note = Derived polymorphism lacks residues 194 to 340
  VARIANT 118: note = Ancestral polymorphism is F, Derived polymorphism is S
MSSSQESTFTSASAAAQVNASALDLLPVYAKELIAGGAAGAFAKTAVAPLERVKILLQTRTEGFQSLGILQSLRKLWQYEGIRGFYKGNGASVLRIVPYAALHYMTYEQYRCWILNNSASSIGTGPVVDLLAGSAAGGTAVLCTYPLDLARTKLAYQVSNVGQTGNALGNSGQQQTYNGIKDVFKTVYKEGGARSLYRGVGPTLIGILPYAGLKFYIYEDLKSQVPDDYKDSVILKLSCGALAGLFGQTLTYPLDVVRRQMQVQSKQSQNSSDGFRIRGTFQGLLLIIRCQGWRQLFAGLSLNYVKVVPSVAIGFTTYDMMKALLGVPPRERVHASGGNK

SEQ ID NO: 18237 - protein, 550 aa, Zea mays
  VARIANT 87..550: note = Derived polymorphism lacks residues 87 to 550
  VARIANT 95: note = Ancestral polymorphism is S, Derived polymorphism is F
MTLRLLNTEHNHLLHPRPQSPRDAAALSSLLRSPRVSCSGQQSPKPKSAKMAHGGLERSLSFRNWEAASRGGGGINGARPGTLALQQQSPRRVVSVSPHPHPHPQAQAMIEYISPRPRVELDQAATTLQKAYKGLRTRRSLADGAIVAEELWWKTVDSVYLNIKSISFFHEDRQETAASRWSRAGKRVAKVGKGLCKDDKAQKLALQHWLEAIDPRHRYTTSGARAPAASPSSTGWMSAKAETCITRNAHEASSTHSSSCTSDQYNERAAYEVVVEEGRLLYKQSGDLVNTNEESKWIFVLSTSRSLYVGQKRKGKFQHSSFLSGAATSAAGRLVAKDGVLKAIWPYSGHYLPTEENFREFIAFLEDNNVDLANVKRCSVDDDEYPSFKKQAAEGPEEPQAAGEAPAPVATEEAAEEAVELPAVDVVKAEDTATDTVEPSKMTMMASRPSFKWSTPTGARIGCLQNYPADVQSMALEQVNLSPRLAAAAPSPRLPIPSPRPSPKIRLSPSLHYMGCPTPTGRRSSPKQQQFMGFYTAPPVALTLPKHKVK

SEQ ID NO: 18238 - protein, 192 aa, Zea mays
  VARIANT 23: note = Ancestral polymorphism is C, Derived polymorphism is F
  VARIANT 31: note = Ancestral polymorphism is L, Derived polymorphism is R
  VARIANT 99: note = Ancestral polymorphism is G, Derived polymorphism is R
  VARIANT 117: note = Ancestral polymorphism is Y, Derived polymorphism is C
MQSEKKTYNDAGEPSEEKGEEHCIQPVYFLRRSSGDPLHSELQKGIKFLWFDGKLSQKHKEKVLKEFSESQDKLVLMMSLKAGGVGLNLIAVSNVFYDGSMVESSCGRAGFHENSPYWAEKRGPSQKLHRQGYCRGASGCNRSKCASRGWFLGRSLMRRFVALALSISRCCLNDCCHELPMCIADAMSLMLL

SEQ ID NO: 18239 - protein, 679 aa, Zea mays
  VARIANT 19: note = Ancestral polymorphism is D, Derived polymorphism is E
MGSSSSKVDNEEPVRRSKDRRRLMKQLVRRRPELAAAHIAYLHALRNTGATLRQFVELESALSQQPPVGLAAPPSPTPQSLPQPQPPPPPEPSLPPSPHPPPPLPFSPVTTIRKMEKRDGEFPPPPPPLVLSPIRLRKRDDEIHVGDFTDDDDDTDSCSTPLPPPLPPGIDWEDLDPYNVRPLSFPSPFADRNDEEVASQVAMDNGPEVHTEFDGEEDESVLGIVDRVHVNPAKSRALGDGNSSTVSQVTKDSDSVAVPWRSMKSLVEIVKEIDEYFLKAAASGNDVVILLDSAGGRPDALEMEANKGAGKKSKSAKVFSTLSWSWSFKSQQANSESTVLNSSASGYGYHGKTLEKLYEEEQKLYKLIKDEEFARLQYKKHVSVLQKLESGEHDRLHAERVRDAIEELQTRIISLEEAVSLACFSISNLRDEELYPQIIELSAGLVHMWKNMHECHQVQNHIAQQLSLIGNRPGSEPTSDIHYQATSQLEIEVSGWHTAFCNLITLQREYISILNQWISLTDCLPDDGGLMRSSSGIRSLSKELQHALDRLPEKVAAEAIKTFMSIIHSIVVQQSEERQLKKKSDNMDSKFQTQLEKHSDNSIQNSAQPPNKNHYSVSKNETKLDAFRKKVEEEKARYLTSVRESRAMTLNNLQTALPNVFHALEGFSGVCVQAFEGIS

SEQ ID NO: 18240 - protein, 690 aa, Zea mays
  VARIANT 28..690: note = Derived polymorphism lacks residues 28 to 690
  VARIANT 64..690: note = Derived polymorphism lacks residues 64 to 690
  VARIANT 158..690: note = Derived polymorphism lacks residues 158 to 690
  VARIANT 224..690: note = Derived polymorphism lacks residues 224 to 690
  VARIANT 489..690: note = Derived polymorphism lacks residues 489 to 690
  VARIANT 562..690: note = Derived polymorphism lacks residues 562 to 690
  VARIANT 596..690: note = Derived polymorphism lacks residues 596 to 690
MREGQSKETASAPEGVSVLRRNSDDVGWEYGVLVDINNKDKVKCILCDKQMCGGVYRLKQHIAQEGKNAKKCQGMKTTKEKLLEAQEKCKKALDGAKRKREVKTVRELELREEVHVSRVGGSEEVTCVGSSEPHKLGPMDKWTKAIDPTTTKSESLTQQRLNRELWKERLHEVHKYIARWAFNHAISFNACDNDEFKQMCEAIGQFGPGIEPPTMFDLRGRLLEEEYARTKSLLQEREAEKMKNGCSIMTDAWSDKKRRSVMNVRTNCADGTSFISSKEMSDVSHTSEVIFELVDKAIEDIGPDDVVQVVTDNASNNMGAKKLLHVKRPHIFWTSCATHTINLMLQGIGNMPRFKKMIDQAKAFTIFVYGHTRTLECMRYFIEGKEIVRPGVTRFASNYLTLDNIQEKKDQLRKMVVHSRWNSLKDVKSKKGKNATTTILNPTFWKDVKLTLAVFAPLFKVLRLVDGDVKPSMGFVYGEILKAKRHVKEALGNVENRFKDVVAIIDKKMAGRLDSPLHLTAYLLNPHYSYADPSIFGVPKITEGFINCVETFYYHDDEMQEQAANIELQKFQNREGPFSKKLARTFENFDYNPASWWRLYGTETPALQKMATKILSLTASSSGCERNWSGFDGVHTKKRNRLTTDRLNKLVYIQFNNRLINKRAKIKSKKITDVLLSSGTTEAQECVPSV

SEQ ID NO: 18241 - protein, 150 aa, Zea mays
  VARIANT 127: note = Ancestral polymorphism is V, Derived polymorphism is L
  VARIANT 123: note = Ancestral polymorphism is S, Derived polymorphism is A
  VARIANT 108: note = Ancestral polymorphism is R, Derived polymorphism is H
  VARIANT 99: note = Ancestral polymorphism is L, Derived polymorphism is I
  VARIANT 98: note = Ancestral polymorphism is K, Derived polymorphism is R
  VARIANT 42: note = Ancestral polymorphism is G, Derived polymorphism is V
MAPKAEKKPAAKKPAEEEPATEKAEKAPAGKKPKAEKRLPAGKSGAGEGKKGKKKAKKSVETYKIYIFKVLKQVHPDIGISSKAMSIMNSFINDIFEKLAAEAAKLARYNKKPTITSREIQTSVRLVLPGELAKHAVSEGTKAVTKFTSS

SEQ ID NO: 18242 - protein, 298 aa, Zea mays
  VARIANT 159..298: note = Derived polymorphism lacks residues 159 to 298
  VARIANT 126: note = Ancestral polymorphism is T, Derived polymorphism is M
  VARIANT 56: note = Ancestral polymorphism is R, Derived polymorphism is G
MELKTTLVFKDEMMRGAGAAHKMNLGDDEPAAGPVLSLSLGPAANANRASFRAEGRRGEISASNDADDGTGLALGLRCGGGSGAKRQRVVIVDNDDGGSSEKALRRLPGAPPPPPQQRPDRVTVRTRCSAATVNDGCQWRKYGQKVAKGNPWPRAYYRCTATPDCPVRKKVQRCAHDTAVLVTTYDGVHSHPLTPYAAAAAAARRASCDGAPPRLAFPLAALPQRYCSPSGAVAISGLPAAASSHGHGNVVPMASIMQKAVADPNFRAAVMAAVASYVSEQCGGRNIDDGAFTLPPPG

SEQ ID NO: 18243 - protein, 257 aa, Zea mays
  VARIANT 230: note = Ancestral polymorphism is E, Derived polymorphism is D
  VARIANT 185: note = Ancestral polymorphism is A, Derived polymorphism is T
  VARIANT 181..257: note = Derived polymorphism lacks residues 181 to 257
  VARIANT 175: note = Ancestral polymorphism is V, Derived polymorphism is I
  VARIANT 174: note = Ancestral polymorphism is A, Derived polymorphism is V
MSHLHPSTTSSKSGEIKVGWPHARWAWTLARWDLAPWLSVLARGDAPDYGGLKPRMTDDKRCNNEARCNAMIVSRSSLEPSPLHTTTIVEKCTLKLVDDYKHMLCQATEPLSTFLQYITLVLVDTPLAPYFSECITSEDLDDMNIEIMRNLSTKHILRTSTNFARYPYGHEELVVCEDVDQVRSAMEKYPPYQSIFSRISYGKSQMLDKAFYEEEVKRLCLSFEQLREQEIRNLMWISECVAQNQKSQVHDSVVFIF

SEQ ID NO: 18244 - protein, 419 aa, Zea mays
  VARIANT 65..419: note = Derived polymorphism lacks residues 65 to 419
  VARIANT 223: note = Ancestral polymorphism is D, Derived polymorphism is A
MDALALGRVGEGVKEEVRSHGLVWDTEELSTGNLWWWRWLSRGDYWLPLPSGGARRTCWGLGRLWSTGRERRAGGTQGRSLEPLLCVEREWGREDRWRLESGFVPLRLMRLAGEVKKFRTYLGIQIFRFYFKCTKCSAEITFKTDPQNSDYTVESGASRNFEPWRAQDEAADKEKIKRDAEEMGDAMKALENRAMDSKQDMDILAALEEMRSMKSRHAGVSVDQMLEILKRSAHEKEEKAIAELDEEDEELIKSITFRNSGFYVKRIEDDDDDDDEDLAPGQSSRTIKDEGTVRAKKKQCTNFQIVTGGCIWITCSRLAGQEAGNAINESSESVTKPTDVLSKNNGSEVANKEGSKSWMPKFIVKPKSASADSHKRQKIESTAVQDTGKGQDDEQKSEPAKQTNVLQSLCQNYDSDDSE

SEQ ID NO: 18245 - protein, 328 aa, Zea mays
  VARIANT 17..328: note = Derived polymorphism lacks residues 17 to 328
  VARIANT 22: note = Ancestral polymorphism is R, Derived polymorphism is C
  VARIANT 72: note = Ancestral polymorphism is P, Derived polymorphism is S
  VARIANT 83: note = Ancestral polymorphism is I, Derived polymorphism is T
  VARIANT 97: note = Ancestral polymorphism is T, Derived polymorphism is M
  VARIANT 157..328: note = Derived polymorphism lacks residues 157 to 328
  VARIANT 169: note = Ancestral polymorphism is D, Derived polymorphism is V
  VARIANT 186: note = Ancestral polymorphism is R, Derived polymorphism is C
  VARIANT 192: note = Ancestral polymorphism is N, Derived polymorphism is Y
  VARIANT 195..328: note = Derived polymorphism lacks residues 195 to 328
  VARIANT 228: note = Ancestral polymorphism is V, Derived polymorphism is E
  VARIANT 232: note = Ancestral polymorphism is L, Derived polymorphism is P
MVRALWLGGRAAAAARWCTCRRATVALCVANLVATLLVTRALYAPGSFAFAPKREEAAKAFAREEKTRKGLPLELKQKVSLETLQILHDLGEGSNTTEQQGMLKRALEFNWQMLLEDIGLWIPPTIWYLNDVDYYGGFEQDELDELFEAMQSNYKAWCLGFAPLCVGGDMESVAVQEFSRTLFNIRPDIALNVAQTIFQSDVRSLLRHVSVPCHIVQSTKDLAVPVVVSEYLHRHLGGDSIVELLDTGFVGLIFSCFSEDAQKVGKIQVTAFQSEGGQHHALPLAIAPVIDLDSSLSSSDNALTSHSALVEGMEQDTGDSRASKHNKV

SEQ ID NO: 18246 - protein, 257 aa, Zea mays
  VARIANT 73: note = Ancestral polymorphism is D, Derived polymorphism is G
  VARIANT 85: note = Ancestral polymorphism is S, Derived polymorphism is L
  VARIANT 125: note = Ancestral polymorphism is A, Derived polymorphism is T
  VARIANT 131: note = Ancestral polymorphism is G, Derived polymorphism is A
  VARIANT 227: note = Ancestral polymorphism is C, Derived polymorphism is Y
MAGSRRTPLVRELPHDMLVEIAARVAATSPHPMEDICSLRATCRATRGACEEGAVGSRVALEREERMRWLEPDRYLALVGNLAALGNPEACFVRGLELVFAAAAEAAVRGGVEWLRRAATAGHKTAAYVLGVLHYGGDDRQEAERYIRQVEGEDGGEGGGAQGCEQQAGRKTNRECVRCRTLAVHAVREVTWKVVDGATMGSVPVPPPEKSCKGGGCDVAEGWNFGCAVFCSDGCRIRHEYSQFFSRVPFPVDLLVV

SEQ ID NO: 18247 - protein, 81 aa, Zea mays
  VARIANT 19: note = Ancestral polymorphism is A, Derived polymorphism is V
  VARIANT 24: note = Ancestral polymorphism is V, Derived polymorphism is A
  VARIANT 61: note = Ancestral polymorphism is Q, Derived polymorphism is K
MLGRSTIIIARRLCLIKNADYIAVMEEGHLVEMGTHDELLNLDGHTPFNKLLNHASIFELQSHQARQTSTPDSLSRLISLP

SEQ ID NO: 18248 - protein, 299 aa, Zea mays
  VARIANT 62: note = Ancestral polymorphism is G, Derived polymorphism is C
MGAPKQRWTPEEEAALKAGVAKHGPGKWRTILRDSDFSALLRLRSNVDLKDKWRNLSVTAGGYGSREKARMALKKGRRVVPKLTAEPMDVDVKDMDDAHDTAIDVEPLAMAFESLPTEESPDKSVARLDDLILEAIRKLKEPSGPSKAAIAAYIEDQYWPPADFQRLLSTKLKALVNSGKLIKVNQKYRIAPSPPPSGRIGTKVSSAEGMKAENNNAKRLTKHQVIAELEKMKGMTKEEAAAFAAKAVAEAEVAIAEAEEAARVAEAAENDAEAAKAFLDAVTLSMRNRNAASMMLRAC

SEQ ID NO: 18249 - protein, 231 aa, Zea mays
  VARIANT 151: note = Ancestral polymorphism is R, Derived polymorphism is I
  VARIANT 134: note = Ancestral polymorphism is T, Derived polymorphism is I
  VARIANT 130..231: note = Derived polymorphism lacks residues 130 to 231
  VARIANT 118: note = Ancestral polymorphism is V, Derived polymorphism is L
  VARIANT 107: note = Ancestral polymorphism is P, Derived polymorphism is L
  VARIANT 42: note = Ancestral polymorphism is P, Derived polymorphism is L
MYRFLVDGVWRCDETKPFVRDEYGLISNEVLVENNVLPVVQPEPSIRGTNMDKGTILKTMPLEPSSQNPSMQIAVIRHVVSGILLHNTIYDVVPLSSKLTVLDTQLPVKQAFKIMHDVGLALVPFWDDRQGTITGMLTASDFVLILRKLQRNIQVIGNEEPISAWKEAKLQFYGGPDAPLNTAKLMFFRVTGYLQIDVGSMDEHSTKSDEEYEGLAMRDVMATGPTMSSKL

SEQ ID NO: 18250 - protein, 226 aa, Zea mays
  VARIANT 126: note = Ancestral polymorphism is S, Derived polymorphism is N
  VARIANT 128..226: note = Derived polymorphism lacks residues 128 to 226
  VARIANT 151: note = Ancestral polymorphism is L, Derived polymorphism is S
  VARIANT 164: note = Ancestral polymorphism is A, Derived polymorphism is D
  VARIANT 194..226: note = Derived polymorphism lacks residues 194 to 226
MSSRVDIRVPKSPVSLPSCSRTALPRVDVRVPNPAPVRRFPTSRRHTIAAGPDSVDSAWPHRSRTNLAKGALLLTDKDLESEESLWSLYERWRSVHTVSRDLTEKQSRLERHEAVTAVKDQGQCASCWAWARCPTPFVPSRVSNNERVRLLVVFAAVQLGVVWAAQIDGFLAGKQAPPEKFVIPAKIKLTLEPWTSSLRGRSSRRHTRWTLPSCTTSDTTATVSQG

SEQ ID NO: 18251 - protein, 246 aa, Zea mays
  VARIANT 187..246: note = Ancestral polymorphism lacks residues 187 to 246
MLLAVEGGGFFSSSATGYSHGLALLLLGRKAEEKPVKVSPWNQYRLVDRETEQVYHLPSAKDQAPGKCAPFVCFGCTANGLEVASPPKATSSNALGTGTSQEEASCSANKTLTTSGSISGSERRGCLKSNSKRDSLEHRIVVSEGEEPRESLEEVQTLRSSMERRKVQWTDTCGKDLFEIREFETRSRSQIDVVIHIFCVLVFYYCFAVPVYYILIAAFWCLGSDESLSDDDPENEGFRKCECVIQ

SEQ ID NO: 18252 - protein, 185 aa, Zea mays
  VARIANT 128: note = Ancestral polymorphism is E, Derived polymorphism is D
MSLAPSIPSIKVKVGPVSVAPPHRACRSFAVVRSSKAEGPIRRPAAPPLSPPPKTPALSTPPTLSQPPKPAAPPTSSESTPPSPQPKAAVATAPAAALQRPLAGAVTLEYQRKVAKDLQDYFKKKKLDEADQGPFFGFVPKNEISNGRWAMFGFAVGMLTEYATGSDFVQQLKILLSNFGIVDLD

SEQ ID NO: 18253 - protein, 202 aa, Zea mays
  VARIANT 37: note = Ancestral polymorphism is H, Derived polymorphism is R
MAILGALRLAPSPPALAGAAPPATSPYTAVRSSVHFRLANAGAAALVAASLLAADPAVAFIGGGPYGKQVTRGQDLTGKDFSGQTLIKQDFKTSILRQANFKGANLLGASFFDADLTSADLSDADLRGADLSLANLTKANLSNANLEGALATGNTSFKGADITGADFTDVPLRDDQREYLCKIADGVNSTTGNPTKETLFCS

SEQ ID NO: 18254 - protein, 67 aa, Zea mays
  VARIANT 17: note = Ancestral polymorphism is A, Derived polymorphism is G
  VARIANT 46: note = Ancestral polymorphism is A, Derived polymorphism is E
MSSLTARLALLAYLLLATLLHPCLCHAAAAAPAARGAGNWRMDPKAIDQGVAYVLMLLALFVTYIVH

SEQ ID NO: 18255 - protein, 396 aa, Zea mays
  VARIANT 180: note = Ancestral polymorphism is H, Derived polymorphism is Y
  VARIANT 293: note = Ancestral polymorphism is L, Derived polymorphism is Q
MESSRSRKRTRQAHDCAAAPPPEREVVARGGASPPWREDDRDGHFVFDLGENLTRRYKILSKMGEGLGFLQSVVSSSAGYLRYYSNEEGYELDFRSIRKYRDAAMIEIDVLNRLAENEKYRSLCVQIQRWFDYRNHICIVFEKLGPSLYDFLKRNRYQPFPVELVREFGRQLLESVAYMHELRLIHTDLKPENILLVSSEYIKVPSTKKNSQGEMHFKCLPKSSAIKLIDFGSTAFDNRNHNSIVSTRHYRAPEIILGLGWSFPCDIWSVGCILVELCSVRSLHTLYFSSTSLVIVFLTSHFLGGSIVSDTRESGTPSNDGEGFGTSTRGYDTESKVVTDQDPETYEPQLQDLVSRNADHSKVALVDLLYGLLRFEPSERLTAEEALDHPFFRNPT

SEQ ID NO: 18256 - protein, 257 aa, Zea mays
  VARIANT 60: note = Ancestral polymorphism is V, Derived polymorphism is I
  VARIANT 82: note = Ancestral polymorphism is T, Derived polymorphism is A
  VARIANT 151: note = Ancestral polymorphism is P, Derived polymorphism is S
  VARIANT 163..257: note = Derived polymorphism lacks residues 163 to 257
MRPTSSFLKGCTVKRDGCTRLQGQEANTGHPSPPSCSLLSAGRVSAFVLSIEILTKNVTVVVRCIINCYLPQFPFSMSFAGTQNVSSLQKDEAWKVNVRIHGCDLDQGYLCGTMEALNVPLADTPVVTFWEGEIVDAKNYTFFTGKWEASPEDDIRHWSKFPSFTPLLGQIETDGGKSLDFSNYPYIFMRWKEQYFVNVGVDCGLTIAGFYYVCFSCSDGSISGFYYDPNSSPFQKLELKCTNEKKSGFTFSSYELQ

SEQ ID NO: 18257 - protein, 512 aa, Zea mays
  VARIANT 263: note = Ancestral polymorphism is L, Derived polymorphism is H
  VARIANT 288: note = Ancestral polymorphism is I, Derived polymorphism is N
MASNGDGTAIDMASNGNGDGTARVVVPEIKFTKLFINGEFVDAASGKTFETRDPRTGDVLAHVAEADQADVDLAVKSARDAFDHGKWPRMSGYERGRVMSKLADLVEQHTEELAALDGADAGKLLLLGKMIDIPAATQMLRYYAGAADKIHGDVLRVSGKYQGYTLKEPIGVVGVIIPWNFPMMMFFLKVSPALAAGCSVVVKPAEQTPLSALYYAHLAKLAGVPDGVINVVPGFGPTAGAALTSHMDVDSVAFTGSTEVGRLIMESAARSNLKTVWLELGGKSPLIIFDDADVDMAVNLSRLAVFFNKGEVCVAGSRVYVQEGIYDEFAKKTAEAAQNWKVGDPFDVTSNMGPQVDKDQFERVLKYIELGKSEGATLLTGGKPAADKGYYIEPTIFVDVTEDMRIAQEEIFGPVMSLMKFRTVDEVIEKANCTRYGLAAGIVTKSMDIANRVSRSVRAGTVWVNCYFAFDPDAPFGGYKMSGFGRDQGLAAMDKYLQVKSVITALPDSLWY

SEQ ID NO: 18258 - protein, 114 aa, Zea mays
  VARIANT 34: note = Ancestral polymorphism is A, Derived polymorphism is E
  VARIANT 18: note = Ancestral polymorphism is G, Derived polymorphism is R
MASVKAYVLLLFTAFFSGLMKLSTAAQKPATITETARLIDAKGIDQAIAYLLMRAACVFLFTAFFFSGLMQLSMAAQLEKPVAAARVVVDAKTIDQAIAYLLMLAALFVTYLAH

SEQ ID NO: 18259 - protein, 210 aa, Zea mays
  VARIANT 142: note = Ancestral polymorphism is P, Derived polymorphism is S
MGAAGGRAVAVAAMVAVAAALPLLACGGYAECYDYCFKDCISKDKSMRDYCSYACDKTCAPDARRRRPAVVPMNCQLACVRESCHRRRAADGDDDTKTKACYGQCYDDRGCETSAALPRPLRAGGGAGVVGRPGPAESPDHPFHERQDAHGPAAASPDHPFHVKQKQDALGPAAAASPGHPFHKMHGAVKPAGEPDPGYVVYPAWGPAVH

SEQ ID NO: 18260 - protein, 387 aa, Zea mays
  VARIANT 286: note = Ancestral polymorphism is A, Derived polymorphism is E
MEMRVVLLLCQVICMQAAVIGAVAAAAGARPPAMYVFGSSILDVGNNNYLRGPAVGRANSPYNGVDFPGSIPTGRFSNGYNIADYVAKSMGFACSPPPYLSLAQAPAPAPAQSSGPDLAQTALTIGINYASGGAGILDSTNAGNTIPLSEEVKYFGATKAKMVAAAGPSAVNPLISRSIFLIGMGNNDLYVFGASERARNRSDAEQRRDAAAALYASLVSNYSAAVTELYSLSLGARKFAVINVWPLGCVPGERVLSPTGACSGVLNDVAGGFNDALRSLLIGLAERLPGLVYALADSFGFTLDVLADPRASGYTDVASTCCGGGRRLGAEAWCTRSSTLCVDRDRHVFWDRVHPSQRTAFLLAQAFYDGPPKYTTPINFMQLAHSS

SEQ ID NO: 18261 - protein, 138 aa, Zea mays
  VARIANT 64: note = Ancestral polymorphism is A, Derived polymorphism is V
  VARIANT 77: note = Ancestral polymorphism is R, Derived polymorphism is C
MTITSSKWPHSLRSKPTCHRARGRPRTGKRSQARGARHRPCFGVHLLPLPLQAAALAVILFAIVSALLLLVLVLAVCAFRHHRGNCYHILSLDHVPSSLPLSVRLLPADIRRLLSFAFPSTCGCTDDETVIDSPSYPV

SEQ ID NO: 18262 - protein, 344 aa, Zea mays
  VARIANT 40: note = Ancestral polymorphism is R, Derived polymorphism is W
MGSGMSRGRRRGFGAGASGGMLPLLALQVLIEYGRAGASRPPVTAALLAGNALIYLRPGALDGILPSVTRVSFNPRLIVENGDLVRFFLSPFYHLSESHLFYNMTSLLWKGIQLETSMGSVEFASMVAALLGLSQGIALLLSKGLLLLGDYTAYYDQYAVGFSGVLFAMKVVLNAWSEDFVYLHGMVIPAKYAAWAELILIQVFIPGTSFLGHLSGILAGLVYLWLKRALNGPDPLTLLVSSITKVVTWPVRFAQNLLWSAHPQGRFRGRGRVGRRQSARDTPRGLWRCPACTYDNSVSTDICEMCSTAREDHDFSLRQYHQAGGTGELTVDEIRRRRLQRFGR

SEQ ID NO: 18263 - protein, 495 aa, Zea mays
  VARIANT 274: note = Ancestral polymorphism is R, Derived polymorphism is H
MGTAAVVEDTIRVVLTCLPDPPFRTTGSSRPYQSPSGGGGGGDRISRLSDAVLSNIVARLPAKDAARTTALSRRWRRVWASTPLVLDDSDLLVFHDDGGCSTPNWLAVTDTVSHVLSSHRGPIRFVRLTCCYMALASHNGALQYWLRVLAAGGVEDLVLVNRPLPTSVGLPIDVLHLASLRTLYLGFWCFPDTATLPRGRATVFPCLQEIGLCATVIHARDIDHLLACSPVLEKFASITSIYFTDPVRIRSCSLRCLVFWESLANELDLVVAPRLQRLILWQSRQWMIGSVHFRSRIRIGSATELKVLGYLEPSIHQLEIGGTIIDSGTKMTPSNMVPSVKILALKMQFRIRKEVKMLPTFLRCFPNVETLHVLSHETDEQNGKFNLKFWEEVGSISCLETRITKVVFDKFRGERCELAFLKFVLERAESLLKLVVVLANGDQASVDEMLAKLKSLTTVKRASDFPTLLAVAREGDSAWYFERASDLSVTDPFDL

SEQ ID NO: 18264 - protein, 519 aa, Zea mays
  VARIANT 251: note = Ancestral polymorphism is N, Derived polymorphism is S
  VARIANT 291: note = Ancestral polymorphism is L, Derived polymorphism is P
  VARIANT 299: note = Ancestral polymorphism is N, Derived polymorphism is I
  VARIANT 307: note = Ancestral polymorphism is P, Derived polymorphism is L
  VARIANT 312: note = Ancestral polymorphism is R, Derived polymorphism is I
  VARIANT 392: note = Ancestral polymorphism is S, Derived polymorphism is P
  VARIANT 393: note = Ancestral polymorphism is W, Derived polymorphism is C
MAAGSIVVDFPSMGAALCFPNLESLLRDSASGFLSAVSAAPAPGAADLTNFHRVFSRVLSTYSDPPLEVVWFFSALSFHDRPDDLRSLLQLLSAFAASSPGAAKPLALLAPVVSELFHSDKPRRETEAVVEAVLSYISICSSRPAPSSTEGTTADAVRLLPAFGDLVKVWSVRHSRERCPFQVLFPLAGDEARRELMKEGCSVDYLAGVVLVEAFLLRLCLKVQNATGVPRSELQKELKIWAVSSIPVFQSHQFFGVLLNMLLNSPLPVYSLVSADDEILVRDVLYDSLILVDYSFINNGAGVDLLPVYVSRLIITLDAVNDARRKGDQGRAVSFINAFSTSNIPNFLIKWATCQAGSGALSKPICNTPQAILKWLIDLEDKGLKVFGDYSSWVMRRFVCNEVKNGYGNMVQSDADLFFVDKQSGRELMDTKGSEDDEAVEEMETAGNAFMAAAQSMKGVTNGIRKRKSCGNEDAAAVKFVKYKVEDSSVKGYLLAANGMSSGSEVENPQSDDEMEESD

SEQ ID NO: 18265 - protein, 173 aa, Zea mays
  VARIANT 170..173: note = Derived polymorphism lacks residues 170 to 173
  VARIANT 65: note = Ancestral polymorphism is P, Derived polymorphism is T
  VARIANT 49: note = Ancestral polymorphism is P, Derived polymorphism is S
  VARIANT 9: note = Ancestral polymorphism is V, Derived polymorphism is A
MASAPAPAVVVVFDFDRTIIDWDSDEWVITKLGAADAFQRLLPTMRWNPLMDRMMAELHARGKTPEDIRDCLRSAPLDTHVVSAIKRAAALGCDLKVVSDANTFFIETVLAHHGALGCFSEIATNPASVDADGRLRISPYHDSAAAPHGCSLCPDNMCKMHKTKDVLTLCRAR

SEQ ID NO: 18266 - protein, 177 aa, Zea mays
  VARIANT 99: note = Ancestral polymorphism is R, Derived polymorphism is L
MPTASSRRTFSEAVSTDDEEAARGGKVGRPSPPRCSSRRSRSKVANSCDPTHRTYHSGEERNRAKKQARKMAGGGVVKHILLASFKEEVTQERLDELIRGYAALVGVVPSMKAFHWGTDVSIENMHQGFTHVFESTFESTEGIKEYIEHPAHVEFASVFLPVLEKVLIIDYKPTSAN

SEQ ID NO: 18267 - protein, 84 aa, Zea mays
  VARIANT 27: note = Ancestral polymorphism is K, Derived polymorphism is R
  VARIANT 49: note = Ancestral polymorphism is L, Derived polymorphism is H
  VARIANT 77..84: note = Derived polymorphism lacks residues 77 to 84
MGEPPGYHPRSPRWLPRPAAMGSRVQKATIGGVTIDGLLVAATEFSIGLAFVLIRFFTTQCAPDVFWNQLLAIPLAQLPAYVEV

SEQ ID NO: 18268 - protein, 748 aa, Zea mays
  VARIANT 248..748: note = Derived polymorphism lacks residues 248 to 748
MIVGSSQQQLLLQRKGKPVAGKGAASMTVKAEKVVVAVRAATREISKTAVIWALTHVVQPGGSIILLVVIPAQSSGIVSGRKFWGFPLFAGDCASGHKSMVDQKCDLSELCSQMLKKLDVYDIDMINVMYKLVSGSPSGVVAAECKQAQASWVVLDKDLKHEEKRCVEELQCNIVVMKRSQPKVLRLNLVGSPDKESKATCAVPPVLDCSSGKTATDVKEARSSIRGPAVTPNSSPDLDTPFRSTEAGTSSVSSSDPGASPFSASEINGSLKKEVLATKDKIQHSDVNISDSDSETLSPPANFSFQPWMSDILQGSASSRSLGKVPRKTRTATADVLLEKISKLDLLNEISAMRSRSDLNFRGDVRDAVSLARNAPPGPPPLCSICQHKAPVFGKPPRWFSYAELELATGGFSQANFLAEGGFGSVHQGVLPDGQAIAVKQHKLASSQGDVEFCSEVEVLSCAQHRNVVMLIGFCVEDRRRLLVYEYICNRSLDSHLYGRNRETLEWTARHKIAVGAARGLRYLHEECRVGCIIHRDMRPNNILVTHDFEPLVGDFGLARWQPDGDMGVETRVIGTFGYLAPEYAQSGQITEKADVYSFGVVLVELVTGRKAVDINRPKGQQLLTEWARPFLEEYAIDELIDPRLGARYSENEVHCMLHAANLCIRRDPHSRPRMSHVLRILEGDMVVESGSVNGSSDSGSRSWRLLSEQQHYCQEYRVARLNKNREGQARGNAPTADRDKQSISNRY

SEQ ID NO: 18269 - protein, 188 aa, Zea mays
  VARIANT 148: note = Ancestral polymorphism is P, Derived polymorphism is S
  VARIANT 142: note = Ancestral polymorphism is T, Derived polymorphism is I
  VARIANT 128: note = Ancestral polymorphism is C, Derived polymorphism is Y
  VARIANT 119: note = Ancestral polymorphism is N, Derived polymorphism is S
  VARIANT 99: note = Ancestral polymorphism is A, Derived polymorphism is T
  VARIANT 47: note = Ancestral polymorphism is V, Derived polymorphism is M
  VARIANT 46: note = Ancestral polymorphism is T, Derived polymorphism is I
  VARIANT 45..188: note = Derived polymorphism lacks residues 45 to 188
  VARIANT 44: note = Ancestral polymorphism is I, Derived polymorphism is L
  VARIANT 41: note = Ancestral polymorphism is T, Derived polymorphism is R
MDDCQLVNTSAESSNSEMVYGFEEDENDALAFLSAISEYDTELIETVMCHFREKFENLPEKFNGVEQLLQEFSLDDLFPLVAPLFMETPHSCSMYAEKAEQCFDEVATDPSQIVDLCYNVNIRQLQYCRCNLLFLSAHLLSTGYYKFPLQRYMALVDLQEGNERLFYKLLIDNIEEPLVRPAKSMDPY

SEQ ID NO: 18270 - protein, 279 aa, Zea mays
  VARIANT 240: note = Ancestral polymorphism is R, Derived polymorphism is W
  VARIANT 221: note = Ancestral polymorphism is R, Derived polymorphism is W
  VARIANT 215: note = Ancestral polymorphism is I, Derived polymorphism is N
  VARIANT 212: note = Ancestral polymorphism is A, Derived polymorphism is T
  VARIANT 211: note = Ancestral polymorphism is G, Derived polymorphism is D
  VARIANT 104..279: note = Derived polymorphism lacks residues 104 to 279
  VARIANT 53..279: note = Derived polymorphism lacks residues 53 to 279
  VARIANT 52..279: note = Derived polymorphism lacks residues 52 to 279
  VARIANT 15..279: note = Derived polymorphism lacks residues 15 to 279
  VARIANT 12: note = Ancestral polymorphism is P, Derived polymorphism is L
MDPVGPPLPTVPALQLQRRRHGETRSCRVPAEGNGAQQLRDGGFHPAVRRGQQQHPRPRSGAQEEEEVLLARSRTRGEPSVVFPVPSEDCVAGFVEVEAAHMPWEDYAERLRGGGTDLRVRTDAIDWIWKVGRSPRSMQSSLISRVCVPIPSIRAMNLTVLPLDRFTRTKEGKSWTTQLLSVACLSLAAKMEETYVPPSLDLQLVLPIFNGAAYIYEAHVRRYFKISSYVSPSYSEHHRRVLQMTSLDACRSVKRFIDTHGPDALDRIIRAAEQEAKRT

SEQ ID NO: 18271 - protein, 503 aa, Zea mays
  VARIANT 470..503: note = Derived polymorphism lacks residues 470 to 503
  VARIANT 404..503: note = Derived polymorphism lacks residues 404 to 503
  VARIANT 222..503: note = Derived polymorphism lacks residues 222 to 503
  VARIANT 201: note = Ancestral polymorphism is G, Derived polymorphism is D
  VARIANT 196: note = Ancestral polymorphism is W, Derived polymorphism is R
  VARIANT 185: note = Ancestral polymorphism is A, Derived polymorphism is T
  VARIANT 69: note = Ancestral polymorphism is Y, Derived polymorphism is D
  VARIANT 60..503: note = Derived polymorphism lacks residues 60 to 503
MAERKREETRSSRAASVDARARPELHLDIREEAAKKNREPPTASNIRRHSSSLQYNNFIGFNYCGIIFYSETPVESGSTWCLIPLFSPYGLPLAAAIHRGLGRHVDAIPVLERAVTVRHKNRLPTASLRPVQPAATTTSSCSLSSPTRGVSGAAPDEIAGGLMEIPIIYDALGDLDEAQKLLHMALRLLEGSSREWSIIAGVVAQMGVLYYMVGRYANSGNSFKSADANSRAIDEVAQLFEEARAVLEQECGASHPNTLGVYNNLAAIYNAMGRAHITKLENKKTHLQSKLTEEPTFFTSHFIKKRMVLYLTSVIVMVENLRDQLLKERSLRASLESGLMNMRRGQVSFPSTIDTKTKADLEEVAVAEADIMNLKQKVSDLRGQLNNQVQLSSTSLCESCNNKRSINADKLVEGEQNAALSPQIASVEAPPIVGSYSVPDMFWATNQMVQKMLYLKGEIAKDGQDGSLTSRWNFAQRPHSNSPVESRGAPSSALAKLTYVSFK

SEQ ID NO: 18272 - protein, 306 aa, Zea mays
  VARIANT 5: note = Ancestral polymorphism is C, Derived polymorphism is F
  VARIANT 130: note = Ancestral polymorphism is E, Derived polymorphism is D
MARKCSHCGNYGHNSRTCGLGLGLGHREIMLCEGGDDNNGRSGLRLFGVQVRIGGGGGAGSASMKKSYSMDCLQLAAPHACSSLVSSPSSSSLCSSSSPSSLLLSIDDGLQRGAADGYLSDGPHGRAVQERKKGVPWSEEEHRQFLAGLDKLGKGDWRGIARSYVPTRTPTQVASHAQKFFLRQSSMGKKKRRSSLFDMRQVPICENSASISDPLDVARHGVASADSERAAVDVDLMNSTTEGDDGRSRDVVSSASGAGTALRFPAAAAQTEPLHPSSSHGHGRGHHCSPLDLELGMSLPAPSVGT

SEQ ID NO: 18273 - protein, 108 aa, Zea mays
  VARIANT 34: note = Ancestral polymorphism is T, Derived polymorphism is M
  VARIANT 13: note = Ancestral polymorphism is R, Derived polymorphism is Q
  VARIANT 2: note = Ancestral polymorphism is R, Derived polymorphism is W
MRKPNRDIIEHERKRQVELRLLVLREALEEQGYMEAEIEARVDEARKATEAETASAAVEVDEGRPPLQHKGFKDTRSHHAAEQKEQQLRTVRAAFGLDRENVHKRGGI

SEQ ID NO: 18274 - protein, 275 aa, Zea mays
  VARIANT 176: note = Ancestral polymorphism is P, Derived polymorphism is L
  VARIANT 60: note = Ancestral polymorphism is F, Derived polymorphism is L
MAGLGKAMYAVGFWIRETGQALDRLGCRLQGKYFFHEQISRHRTIMNIFDKTPHVHRDAFVAPSASLIGDVQVGQGASIWYGCVLRGDANNIQIGSGTNIQDNSLVHVAKSNLSGKVFPTIIGNNVTIGHSAVLQGCTVEDEAFVGMGATLLDGVVVGKHGMVAAGSLVRQNTRIPCGEVEHNFSTALLLLVWGGNPAKFLRKLTDDEIAFITESASNYSNLSKVHAAENAKPLEKIEFEKVLRKKFAHQDEEYDSSIGITRGSPPELTSPNPAQ

SEQ ID NO: 18275 - protein, 951 aa, Zea mays
  VARIANT 72..951: note = Derived polymorphism lacks residues 72 to 951
MSQTNWEADKMLDVYIYDYFMKRNLQATAKAFQAEGKVSSDPVAIDAPGGFLFEWWSVFWDIFIARTNEKHSDVAASYIEVNIFLHLIVLSVIKFYLTCARLTYLLLFVQMSTLFQTQLMKAREQQHQQQQQIPQQRQQQPQHIQMQQMLLQRAVQQQQQQQQQQQQQQQQQQQQQQQQQPQQQQQQQLQQQQLQQQRRDGSHLLNGSANGISGNNPLMRQNQSTANVMATKMYEERLKVPSERDSLEEASLKQRYGENAGQLLDSNEASLLKAASSAQSSGQILHGTVGGLSGTLQQVQARSPQLPGPAQASLFWYPGLSCLIIGIKTEINPILTPRAAGPEGSFIGAQGSNQAGNNLTLKGWPLTGLEQLRSGILQQKSFIHNQQQLQQQIQMLTPQQQQQLMLHAQQNMSSPTSSDVDNRRLRMMLNRNAVLGRDGQTNSGSDIIPNIGSPSQSGGDIDMLIKVYLFYFCLLALHFSPTSGKPFYYRRNLLSSSNYYNSKAIANSSHSNISFSNLLSLASNLKVQINIFNKKSQELEVCLLMGAYQIHLGELNRALDLITYLRFMFIWCSNITLLSSVLCTANLELPTALDWQSEPVLFLVQTAKKRKKPGSSSGRANSSGTANTAGPSPSSAPSTPSTHTPGDVMSVPQLQQNGGSAKPMVMFGSDGTGSLTSPANPLDDVDRLLEDGSLDDNVESFLSQDDMDPRDNLGRCMDASKGFGFSEVAKARASTAKVVCCHFSADGKLLATGGHDKKVTLWCTDSLNPKSYLEEHSFLITDVRFSPSMSRLATSSFDKTVRVWDADNTDYSLRTFTGHSATVMSLDFHPNKEDMICSCDSDGEVRSWSINNGSCLTCVKVFKGGATQMRFQPRKGKYLAAASDKAIYILDGETQHACRSPLQSLELWDIREKNTMTFNNAHDGLVAALASSSATGKVASVSHDRTLKLWK

SEQ ID NO: 18276 - protein, 686 aa, Zea mays
  VARIANT 407: note = Ancestral polymorphism is R, Derived polymorphism is W
  VARIANT 398..686: note = Derived polymorphism lacks residues 398 to 686
MAGPGASVAALAVLLAAAAAFTRCAVAEPPPRERSALLAFLTATPHERRLGWNASTPACGWVGVTCDNANATVVEVRLPGVGLVGAIPPGTLGRLTNLRALSLRSNRVLGTIPDDVLQLPVLKALFLQHNLLSGPIPPGIQRLGGLERLVLSRNNLSGPIPFALNSLTALRVLRLDGNRLSGSIPSISIAGLGSFDVSDNNLNGSIPKSLSRFPRESFAGNLQLCGDPLPPCSSPFFPPAPSPGGPSPPSGGGGGGGPAPGSSKKRKLSGAAIAGIVVGAVVVGLLILIATVLCVVSRRRGAGARDGPKAATSAAARGQPPPASGGLTSSSKEDLGGGASGSAAAVAAAAAAAAGEQSRLVFVGKGAGYSFDLEDLLRASAEVLGKGSVGTSYKAVLEEGTTVVVKRLKDVAVQRREFDAHMEALGRVEHRNVLPVRAYYFSKDEKLLVYDYLPNGSLSAMLHGSRGSGRTPLDWETRMRFALSAARGLAHLHTAHNLVHGNVKASNVLLRADADAAALSDLSLHRLFAPSTTRAGGYRAPEVVDARRLTFKSDVYSLGVLLLELLTGRSPSHASLEGDGTLDLPRWVQSVVREEWTAEVFDVELVRLGASAEEEMVALLQVAMACVATVPDARLDAPDVVRMIEEIGGGRTTTATATEEESEGVRGTSEEEPSRSGGTPPAAPTP

SEQ ID NO: 18277 - protein, 73 aa, Zea mays
  VARIANT 2: note = Ancestral polymorphism is S, Derived polymorphism is P
MSATTAAVPFWRAAGMTYIGYSNICAALVRNCLKEPFKSEAASREKVHFSISKWTDGKQEKPSESIVTNANVL

SEQ ID NO: 18278 - protein, 513 aa, Zea mays
  VARIANT 65: note = Ancestral polymorphism is R, Derived polymorphism is H
MGDNYDDEGEPIVNLDEREPSPEHQPYEDLDDDLDGGGDWTRDRSPTPVHGDDGGAGSSSKPRKRLLKKGGGGGMPGDDGLDDFGLEDEDADPSAEARKRKGSSSLRDLARGGAGREKKAKKMRMEDDGRGRDTGMVRDRRGSGGRDSGGRDDQDDGEREIQELWDTIAGGESEDDQEGVRTVDDDNFIDDTGVDPADRYGSDNERHSPGRYAQAEEGEEDDEIERLFKGGKKKKKKNDRPRADIGLIVEQFIAEFEVAAEEDANLNRQSKPAINKLMKLPLLIDVLSKKNLQQEFLDHGVLTLLKNWLEPLPDGSMPNMNIRSAVLKLLTDFPIDLEQYDRREQLKKSGLGKVIMFLSKSDEETTANRKLAKELVDKWSRPIFNKSTRFEDMKRYDDERAPYRRPQMKKPSSSSSGMESRDDDLDADFSQRKSGQSSSRQHASRPEASPLDFVIRPQSKIDPEQIRARAKQAVQDQRRLKMNKKLQQLKAPKKKNLQASKLSVEGRGMIKYL

SEQ ID NO: 18279 - protein, 130 aa, Zea mays
  VARIANT 47..130: note = Derived polymorphism lacks residues 47 to 130
  VARIANT 45: note = Ancestral polymorphism is A, Derived polymorphism is G
  VARIANT 42..130: note = Derived polymorphism lacks residues 42 to 130
  VARIANT 39: note = Ancestral polymorphism is K, Derived polymorphism is N
  VARIANT 31: note = Ancestral polymorphism is L, Derived polymorphism is P
MFDVTSRLTYKNVPTWHRDLCRVCENIPIVLCGNKVDVKNMQVKAKQVTFYRKKSLQYYEVSAKSNYNFEKPFLYLARKLAGDSNLHFVETPALAPPDVTIDMAAQQQHEAELAAAAAQPLLDDDDGMIE

SEQ ID NO: 18280 - protein, 357 aa, Zea mays
  VARIANT 175: note = Ancestral polymorphism is R, Derived polymorphism is W
MEAPAPWRVLEFYSGIGGLRYSLMASGVRAEVVEAFDINDVANDVYEHNFGHRPCQGNIQTLTASDLDKYKAHAWLLSPPCQPYTRQGLQKHSADARAFSFIKILNLMQDMSYPPQMLFVENVVGFEVSDTHDQLLEVLSSLNFNTQEFILSPLQFGVPYSRPRYFCLAKREPVRFRHAFVNNKLLQTPMCLSLTLSSTSQGSDHQTEEELEPVCKPIKDFLVKEADGGTPDETVLQDYMVPVNLIERWGNAMDIVYPEFKRCCCFTKSYYRYVKGTGSLLATSKNLNVPEEKLQISSLKELGLRFFTPREVANFHSFPSNFCFPDHISLRQQYAMLGNSLSIAVVGPLLHYLFAEA

SEQ ID NO: 18281 - protein, 139 aa, Zea mays
  VARIANT 112: note = Ancestral polymorphism is A, Derived polymorphism is T
  VARIANT 108: note = Ancestral polymorphism is A, Derived polymorphism is V
  VARIANT 61: note = Ancestral polymorphism is P, Derived polymorphism is L
  VARIANT 45: note = Ancestral polymorphism is S, Derived polymorphism is N
  VARIANT 32: note = Ancestral polymorphism is V, Derived polymorphism is I
MNIYGDNGLACLTKISGASSASTVSPLPHMFVVKDLVVDMTNFYSQYKSVEPWLKRKDQPLQQGKEIPQTKADRAKLDGMYECILCACCSTSCSSYWWNPEEYLGPIALLHANRCDVPMLYILLAVTLMTSGIMTEWLL

SEQ ID NO: 18282 - protein, 432 aa, Zea mays
  VARIANT 284: note = Ancestral polymorphism is W, Derived polymorphism is C
MPTPTPPSPSPSPSSGTCPLLRIGAGRRFAMAFPSWATLFFAGMMVVLAAVEAEAEAGGGSVCFDRMFGFGDSLTDTGNFLLSVPDDFPDPARNLPYGQTFFGRPSGRYSDGRNLLDFFAEAFGLPYVPPYLGSGDFQNGANFAVGGATALNGSFFRERGVEPTWTPHSLDEQMQWFKKLLPFIAPSETELNEIMSKSLLFVGEIGGNDYNHLIVREKSVDELHEIVPNVVGAISSGITDLINLGAKKLVVPGNFPIGCVPLYLAIFQSQKEGYYEEQTGCIKWLNEFAEYHNRMLQEELEKLRNLHPDVTIIYADYYGAALNIFRAPLKFGFTVPLNACCGSDAPYNCSPSILCGRPGSTVCPDPSKYISWDGLHFTEASYKVVIQGVLGGYAKPPLSEACKGAEFKVSQLHQCTDNPTNTVSYDALSSFI

SEQ ID NO: 18283 - protein, 448 aa, Zea mays
  VARIANT 243: note = Ancestral polymorphism is G, Derived polymorphism is S
MDPFSKKRKPDDNGAVTASPAGGAATLGLTREDVLRLLEPLSRDQLADIAAAAALVSAHALDAVRAAADRDPALRKLFIRGLGWETTSDSLRAIFSAYGDLEEAVVITDKSTGRSKGYGFVTFRHADSAVLALKEPSKKIDGRMTVTQLAAAGSAGGPSVGAPGSGGAPVADVSLRKIFVGNVPADMSSERLLAHFASYGEIEEGPLGFDKQTGKFRGFALFVYKTPEGAQASLVDSVKVIDSHQLVCKLAIDGKKGKQGQSQQSGPGNQQQQQQQQMLPGGPQEIQGGLGLGSQMGAQYGGPGSGMPSFGFGGVGGGFGGPNPYANMPSSMGGGGAGGLGSVGGQVPTGLAGAGGFGPGGLGGGSFGGSSQFGAAGMGAYGGLGMGGGSMYRMQQGAGGLPAGAFGEGGNYPLPGSGFRGHDPQGGMSPPGPGGRAPPMYPNVPPYF

SEQ ID NO: 18284 - protein, 100 aa, Zea mays
  VARIANT 76: note = Ancestral polymorphism is P, Derived polymorphism is L
MDGGKGSGIGGNVGGGGGDGKIGGGAVKGGGSNSVGGAGSINSGGGVAGHGDGAGKSGSGGDGMMKAPGGGGCYIPRSDFEANPKEFFQGLHQQGGGGKK

SEQ ID NO: 18285 - protein, 99 aa, Zea mays
  VARIANT 75: note = Ancestral polymorphism is P, Derived polymorphism is L
MDGGKGSGIGGNVVGGGGDGKSGGGAVKGGGSNSVGGAGSGNSGGGVAGHGDGAGKSGSGADGMMKAPGGGGYIPRSDFEANPKEFFQGLHQQGGGGKK

SEQ ID NO: 18286 - protein, 96 aa, Zea mays
  VARIANT 74: note = Ancestral polymorphism is P, Derived polymorphism is L
MDGGKGSGIGGNDGKSGDGKTGGSAVKGGGSYSGGGAGSGNSGVGVAGHGDGAEKSGSGRDGMMKAPGGGGYILRSDFEANPKEFFQGLHQGGGKK

SEQ ID NO: 18287 - protein, 63 aa, Zea mays
  VARIANT 56..63: note = Derived polymorphism lacks residues 56 to 63
MRCGSDRYQPALAPTLHVAGRVLLTPFFGGAERTTTESEPPAGVLPTSSGVRRCRWARATTRR

SEQ ID NO: 18288 - protein, 1021 aa, Zea mays
  VARIANT 700: note = Ancestral polymorphism is A, Derived polymorphism is D
  VARIANT 359: note = Ancestral polymorphism is V, Derived polymorphism is G
  VARIANT 118: note = Ancestral polymorphism is D, Derived polymorphism is Y
MAGAGAMGFPRELMVQRIQSLVEEGFWDALRRHKLDVLGTDDSPIPITGYYTPRQRRPMASFFNLRSGSLVPPSHSSVGDRNNCPVPGTLINTNNMRGFENLDREQLLKAEAKKILHDIVSGKVEEDPSVLLRFLVTSFADLKNWKVYYNVAFPSLVFNSRITLLSLQPASKVLTKEEAASMYTSLQKWRTSSETTVIPFFLVSISSDSSASIRQLKEWKACQGNYQKLLFGFYDHGCRSDCPGWVLRNYVAFLSIRWKIEKAQIFCYREYKGNPDLEQSLIGEASFPSPYGWDNPEFLPDAIGWEGVKPGKGTKEMKPKEIDLQSMNPASQDEEKQLMHLKLMGWRHFPVNIDRLSHVRVLLLGAGTLGCEVARLLMTWGVRKLTVVDSGSVVMSDLAKQSLYIDKDCGVPRVSAIAPHLKERCPAVEVESIQLEIPMPGHPVSSSKMASVLDDCKHLQTLVAANDAIFLLTDTWESRWLPTLLCSSENKIAISALLGHDSYLVMRHGAGPGTSGGTDEVTTQKLSTENALGHQRLGCCFCNDTASLINPISYETLPGLTSVASGKAVELFARMLHHPDEIRAPGDTAGTETEHQLGLLPHQLRGSLPKCDLFVELNNSSVNCTACSVAVLSEYRRRGLDFVMQAINYPAYLKDFTGISDSKRPDTCPKIPPNISVNSDKISDVRCLLLGAGTLGCDVARILMDCGVRKITVVDSGHVVVSNLARQSLYTSDDRGAPKATAILRHLVERCPSVDAQGIKMEIPMPGHPVSPGEAAGVLQDCERLKELVLSHDAIFLLTDTRESRWLPTLLCTNENKIAITAALGYDSYLVMRHGAGPGISCEASSVVTAIDKMSTEDALGRQRLGCYFCNDVIAPVDSVSNRTLDQQCTVTRPGLASIASGRAADLFRRMLHHPDGIHAPGEIAGTGSGHEHGLLPHQMRGSLSQYNILTLLGYSSSNCTACSHAVLYQYRRRGMDFVMQVINEPTYLEDLTGLTELMKSASCSQVEWVDEIDEDDFVEV

SEQ ID NO: 18289 - protein, 428 aa, Zea mays
  VARIANT 196: note = Ancestral polymorphism is W, Derived polymorphism is R
MSTVAAAPTVVKSAPELVAPVGPTPGGTLPLSSIDKTAAVRVSVDFIQVFPPAVGAGGDKDAAVAAMRDGFAKALVPYYPVAGRIADASPGEPVVECTGQGVWFVEAAASCALADVNYLERPLLIPKEELLPRPPPEEKLEDLVLMAQVTKFACGGFAVGICFSHLVFDGQGAAQFLKAAGEMARGLPAPSVAPVWDRDAIPDPPKLPRGPPPSFTAFSFVTQVVEISPESIARIKDDFKDATGQTCSTFDAVTAVVFKCRALAMALPDDAEVRLGFAASTRHLLHGVLPSVDGYYGNCVYPVGITRTSKAIREASLPEVVGVMREAKEALTTRFTDWMRGGAKDDHYNVPLDYGTVTVSDWSRVGFNEVDYGFGEPGYVFTLNDDVNIVASVIYLKPPAPKRGIRLMLRCVEEPHAAAFAEELAKFA

SEQ ID NO: 18290 - protein, 428 aa, Zea mays
  VARIANT 61: note = Ancestral polymorphism is S, Derived polymorphism is L
MDAAPPTITKSPPSLVPPAGPTPGGSLPLSSIDKTAAVRVSVDFIQVFPAPTSGKEDWSPSSAIAAMREGFARALVPYYPIAGRIAEPVPGEPEIECTGEGVWFVEAEASCSLEEARNLERPLCIPKEELLPRPPAGVRVEDTLLLAQVTKFTCGGFSVGICFSHLVFDGQGAAQFLKAVGEMARGLPEPSIKPIWARDAIPNPPKPPLGPPPSFTAFNFEKSVVEIALDSIKRVKDQVASETNQKCSTFDVVTAMIFKCRALAVDFAPDAEVRLGFAASTRHLLSNVLPSVDGYYGNCVYPGGLTKTSQEVKEASLVEIVTAIREAKEALSSRFLDWLSGGAKENHYNVSLDYGTLVVTDWSHVGFNDVDYGFGEPSYVFTLNDDVNIVPSVVYLKPPKPKQGIRLVLQCVEGRHSAVFSEELQKHA

SEQ ID NO: 18291 - protein, 507 aa, Zea mays
  VARIANT 417..507: note = Derived polymorphism lacks residues 417 to 507
  VARIANT 156: note = Ancestral polymorphism is D, Derived polymorphism is Y
MDAAMFRRVSGHVPQDDALLPGLTVEESLVYSARLRLRSGGTSSGAEDRARELMAELGLGHVAASRVADVSGGERRRVSIGVELVHDPAVLLLDEPTSGLDSGSALHIVKMLRDMAAAHAKTVVLTIHQPGFRILELIDRVVLLADGAVRHHGSLDFLHSRLVATGHALPAHVNVLEYAMETIDSLKPDVAVATAVTAITAASSANRDDDVAPVLTVPSSARRAGYANSPAAEARILAGRFAKTMLRTPQLFAARMAQSVLAGAFLGSIFLGTTDLQSRLGFFAFTLTYLLSSTTEALPVFLQERRTLEREISRGAYRVSSYVASNAGVFLPFLLAAAVLYAAPVYWLVGLAREPAAFAYFVLVVWLVMLTANSFVACLGALVPNYIVGNSVVAGLIGCFFLFSGYFVAGKNIPRYWVFMHYASLFKYPFEALVVNEYGGARGARECLASAGGAGGLCVLDGAGLLRQQGMREGMRWSNLGVMLGFVVGYRVLCFVFLSFRCHRTWR

SEQ ID NO: 18292 - protein, 1030 aa, Zea mays
  VARIANT 389..1030: note = Derived polymorphism lacks residues 389 to 1030
  VARIANT 645..1030: note = Derived polymorphism lacks residues 645 to 1030
  VARIANT 812..1030: note = Derived polymorphism lacks residues 812 to 1030
MALNMKTLTQALAKASAVIEKTVSTTVQEVTGPRPLQDYELLDQAGSGGPGLAWRIYTARPRDGAPSAPYPVVSVWVLDKRALAEARARAGMSKAAEDAFLDLVRADAARLVRLRHPGVLHVVQALDETKAAMAMATEPVFASVANALGCLDNVGKVPKEVKGMEMGLLEIKHGLLQVAETLDFLHNNAHLAHRAISPETVFITSNGSWKLGGFGFALSVDQAAVGLSLTSSQLFHYSDYDVEDTALPLQPSLNYTAPELVQSRDSKVGSACDMFSFGCLAYNLVARRPLLDCHNNVKMYMNALTYLTSEAFSNIPSDLVLDLQRMLSMDALSRPSAMAFTGSSFFRDDTRLRALRFLDHLLERDNMQKTEFLKALSDMWKDFDSRVLRYKVLPPLCAELRNMVMQPMILPMVLTIAESQGEERCTRSGYGAWKVAVGRGGGGLRLLLGGGWWLYLGPLGRAGAPPWVVSLSWGEVGTAPGPCVPVAASSCSPADVWEWSVDGQDWDGRTDKGDFELATLPALVPVFASASGETLLLLVKHADLIINKATQEHLISHVLPMLVRAYDDNDPRLQEEVLRRTVPLSRQLDTKVRVNALRCLGDLVPSLDKEGIMGILETVRRCTAVDHTAPTLMCTLGVANAIYKQCGVEFAAEYVIPLIFPLLTAHQLNVQQFAKYMLFVKDITSKIEEKRGVTVTDNGNTEVKSSPSLANGIHSEPMSGQIPVAKSSPAWDEDWGPTKKSGVPSLSVDSSAQTKQPSVDPFDFGTQTKQSTTLPFDLSTQAKQPPSVSHVTAATIPPAQPQPSLQSLAASSGPKISGSCVPVDIEWPPRRSSSSNFNAPLSISKDNGSGRLSSDGVDDIDPFADWPPIPSNVNSISATEHWPSINQNISGFSSGNIVFGGSGNSVGQTKSNQMSWSNTSNLMGTNSTGSYLNQGSAALGFGNPNGGLSTGLSNPSSSSTGLSMMLPKSDSGSLSTSVNNAAHGLLRLAPPPSTSVGRGRGRNQGQSALSRASRPHANSASGQQPILDLL

SEQ ID NO: 18293 - protein, 250 aa, Zea mays
  VARIANT 50: note = Ancestral polymorphism is P, Derived polymorphism is S
MGRKFFVGGNWKCNGTTDQVEKIVKTLNEGNVPSSDVVEVVVSPPYVFLPVVKSQLRQEFQVAAQNCWVKKGGAFTGEISAEMLVNLGVPWVILGHSERRALLGESNEFVGDKVAFALSQGLKVIACVGETLEEREAGSTMDVVAAQTKAIAEKIKDWSNVVLAYEPVWAIGTGKVATPAQAQEVHASLRDWVKINVSPEVSESTRIIYGGSVTAANCKELAAQPDVDGFLVGGASLKPEFIDIINAAAV

SEQ ID NO: 18294 - protein, 239 aa, Zea mays
  VARIANT 71..239: note = Ancestral polymorphism lacks residues 71 to 239
  VARIANT 77: note = Ancestral polymorphism is S, Derived polymorphism is F
MSMFNRIFGKPKEQANSNALATLDKLNETLDMLEKKEKVLEKKAAAELERAKEFSKAKNKRGMIKYNIAIRNLYLYFGAAIQSLKRKKLYEQQIEQLGNFQLRIHDQMIMLEAAKATTETVDALRTGAAAMKAMQKATNIDDVDKTMDEINEQTENMKQIQDALSAPLGASADFDEDELEAELEELEGAELESQLLEPVAAPPVHPVHAPANKQPARPAPQKATAEDDELAALQAEMAL

SEQ ID NO: 18295 - protein, 696 aa, Zea mays
  VARIANT 235..696: note = Derived polymorphism lacks residues 235 to 696
  VARIANT 15..696: note = Derived polymorphism lacks residues 15 to 696
MAPSLSKPLLRLSPQPPCLHCLSTPFSSLSPPKTSIARAHERPRRGLQLVCPCERAVFLSRTVAPVRGLRRWGGGGGFVGPEIPGQGEMKYVLVTGGVVSGLGKGVTASSIGVVLKACGLRITSIKIDPYLNTDAGTMSPFEHGEVFVLDDGGEVDLDLGNYERFLDIKLTRDNNITTGKIYQSVIDKERKGEYLGKTVQVVPHITNAIQEWIERVAKIPVDGKEGPADVCVIELGGTIGDIESMPFIEALGQFSYRVGPGNFCLVHVSLVPVLNVVGEQKTKPTQHSVRGLRGLGLTPNILACRSTKELEENVKEKLSQFCHVPAANIITLYDVSNIWRIPLLLHEQKAHEAILKVLNLERMDSIAREPKLDEWIARATIFDTLHDTVRIAMVGKYTGLSDSYLSVLKALLHASVDCHRKLVVDWVASTDLEDSTAIEAPDSYKTAWNLLKGAGGILVPGGFGDRGVQGKILAAKYAREKNVPYLGICLGMQIAVVEYARHVMNLTDANSTEFDPNTKTPCVIFMPEGSKTHMGATMRLGSRRTFFKIADCKSSKLYGNVTYVDERHRHRYEVNPDMVPEFENAGLQFVGKDDTGRRMEIIEIPNHRYFVGAQFHPEFKSRPSKPSPLFVGLIAAASGQLDRVLQDRCTGHAVSEKHVLSNGSYTPAIHQNGHPKKLPNGLSNGTYYGNGNGVHA

SEQ ID NO: 18296 - protein, 271 aa, Zea mays
  VARIANT 213..271: note = Derived polymorphism lacks residues 213 to 271
  VARIANT 133..271: note = Derived polymorphism lacks residues 133 to 271
  VARIANT 132..271: note = Derived polymorphism lacks residues 132 to 271
  VARIANT 88: note = Ancestral polymorphism is P, Derived polymorphism is T
  VARIANT 11: note = Ancestral polymorphism is S, Derived polymorphism is I
MVWLSSMISSSNLIPRYPDFFSIHDVKGLDYLCLENWDSSLAVTIREKKSFEGFQICSRGIPKDGSLTMERRLTSDKLDIFHKEYRLPCKLLLCLVKNHGIFYITNKGSKKVLCMFHCCCDDWLAIIYPILQQLESSLIERDLKGKGRCKDIVSRRRMEDWKKVSGRDVEREDECGICMEACTKMVLPNCSHAMCIKCHRDWYKRSESCPFCRGSLKRICSTDLWVLTNSNDVIDPAHLEKENVRHFYSSIDSLPLILPDSIFFFYYEYLL

SEQ ID NO: 18297 - protein, 115 aa, Zea mays
  VARIANT 37: note = Ancestral polymorphism is Y, Derived polymorphism is D
MRQLHGKSHVKVNRSFLEKHSAPASLLHRAAGAEMMYLFEPDKKMEAIKLIDDSTNITSSGHSVLGSVKEWQIQDCNGVHKLLETVFGDQDVANSKFQNVVPVLCHILHCFDRHE

SEQ ID NO: 18298 - protein, 687 aa, Zea mays
  VARIANT 130: note = Ancestral polymorphism is R, Derived polymorphism is W
  VARIANT 476..687: note = Derived polymorphism lacks residues 476 to 687
  VARIANT 496..687: note = Derived polymorphism lacks residues 496 to 687
MDAADPLCAITSPARLLPRTLGPTPSKVRGALLEAIALARSRKGSEELVKQAAMVLKEHGDIQTLYHDDAMKAMPPTNVSKGQQGRRAALDRKRARFTMKDTGSKAVPVVDRSKLLNISDPVAFFMALDRLEEAEDEIKRLNGEAEKRILIFDPLDEPIRQPGLRGRKSFRSFKVTEDATTQDPIEVLASQTATMTGSQFSQDVMHAVADKNEQSVPSRSGEAISDVSGKEDSLAEKDGRDDLAYLLTSIQDLDESEEEAFIRKTLGLKEIRKGRVSLCNSIPGVRSLRSDTEQKGSMKVRPPESHLPQTRQDRISELEKHLFPGGAANAKCTDDESEGSPDIVMGEPSLVHDSSEVLMTNENSTGSEIDRRTPNLCARAADHALDPEPNLPDHAYERQTRGSSLGLCKNTEVANEHEEDDVHIEYPTTGGSTYQTEVSSHDLEGSLTEELVSEPGRHAAPDDIYRTSHAAEDSIQHLEVVKQGGVLQDKSSQSLEMPLEDIDPLYRPQMHGGSTKKSTPVLCNALSPIEQKQQAAQEGKRKQQAKRVKKVSDESSHALEISQANFEPENEPHNVDVNMEQPTVMSSAKGQKGAQRRNKTKKLNQRKILGDVDLARQSGVRRSSRIRSRPLEYWLGERLLYGPIQDTLPAVIGIKAYSPGQDGKKTLKVKSFVSEQYSDLVAQFAKY

SEQ ID NO: 18299 - protein, 431 aa, Zea mays
  VARIANT 79..431: note = Derived polymorphism lacks residues 79 to 431
MAGALLSSPHTLPSPTSQSPFRPRHALPLPLTRFPARRLFVLLCTEHPPSLTALLILVPGDCAGAGDHSTLGQRVFCHRGGGPLCSLRALASLPLGTAGWRWRGGAFSCPGSCLLSQSCSPFQSKSMTCTVFMIVHNVLHIYLLDLLFSIYNSLILPRGHSLTVLFLKDQFLNDHKCFARNDSVEAYAVMETDEDVKMNTQIDEINAYSFLYPVELPGKKFTFKWIKLFAYKLLSYYSVPRVESRKPERYSSAAPLSPDARQRIVSERVDMIHNVVISVSIGPPNSRFLPSKDKSSWDPKDVADCILSDRSTMVHTCVLGFLLNMLFLAFLKLNCKVTTGQRMTESSVLDAHVAEVDGEPYWYYEYLVRKSPTKSAPEPNLFRHNVACTAERDGYLYSLNASTLSKQWESVCLLCPVVAYYHFSKEIFFSV

SEQ ID NO: 18300 - protein, 356 aa, Zea mays
  VARIANT 254: note = Ancestral polymorphism is E, Derived polymorphism is K
  VARIANT 247: note = Ancestral polymorphism is G, Derived polymorphism is A
MDTQARPVPPRVKLGIQGFEVSKLGFGCMGLTGAYNSPLDDEAGIAVIAHAFSRGVTLFDTSDVYGPLTNEILLGKALKQLPREQVQVATKFGIRHDESGTRTVCGRPEYVRACCEASLRRLGIDCIDLYYQHRIDTTTPIEETVSGACLHIRLASSRSWWRRILYAVDFRELGIGIVPYSPLGRGFFGGRGVKEQVSAESNLVSSIDTVYLRISFLSFVAKKTFLGLHQNLFLSSLTDFTLACQHGIPRFAPENLEKNKQIYLRMEELANKHQCSPAQLALAWVLHQGDDVVPIPGTTKIKNLDSNIDSLKVKLTDEDLKEMGSQIREEDVAGGRQFTSFAHTTWKYADTPKKQS

SEQ ID NO: 18301 - protein, 445 aa, Zea mays
  VARIANT 231..445: note = Derived polymorphism lacks residues 231 to 445
MARRCPCRLLLAVAAAAVLVAAAAQAQETCSGTVPAPPRRGARVSVASFGGAGDGRTLNTAAFARAVASIERRAAPGGAELYVPPGVWLTGPFNLTSRMTLFLARGAVIRATQDTSSWPLIEPLPSYGRGRELPGGRYTSLIHGNGLQDVVITGENGTIDGQGSAWWDMWKNRTLLYTRPHLLELMSSSDIIVSNVVFQDSPFWNIHPVYCRYRCTNVLRSLDIKAGAVVRNFADSSSNICIEDCYISTGDDSIAIKSGWDEYGIAYGRASSGITVRRITGSSPFAGFAVGSETSGGVENVLAEHLNFFNSGFGIHVKTNTGRGGFIRNITVSDVTLDNVRYGLRIVGDVGNHPDDSYNRSALPIVDALTVKNVQGQNVREAGLIKGIPNSAFSRICLSNVKFTGGAPVRPWKCEAVSGGALDVQPSPCTELTSTSGTSFCTNSL

SEQ ID NO: 18302 - protein, 430 aa, Zea mays
  VARIANT 214..430: note = Derived polymorphism lacks residues 214 to 430
  VARIANT 224..430: note = Derived polymorphism lacks residues 224 to 430
  VARIANT 227: note = Ancestral polymorphism is R, Derived polymorphism is C
  VARIANT 260: note = Ancestral polymorphism is P, Derived polymorphism is L
  VARIANT 288: note = Ancestral polymorphism is S, Derived polymorphism is F
MPPRRRDRRRLRDPSPPSSDARAPPSALGLRLTLLVPLLILVLVLAALGFSGLLSHSPPHSQTLQTTAHSVYERGLVKRDVSAREILSEHTRVSENRSQRNFANPVLAYVTPWNSKGYDMAKLFITKLTHVSPVWYDLKSDRNRLVLEGEHNFDAKWVSELQTNGSLVVPRIVLEALPAVLLFEKKQKAKAIDIIVSECRDKGYDGIVLESWSRWAIYGVLDDQELRYMALEFVKQLGEALHSVNSKSSSHHLELIYVIPAPRMQKLNNQDFGPKDLMHLADTVDGFSLMTYDFSGPQNPGPSAPLKWIHHSLAALLSAKGSSHSNSHSRMIFLGINFYGNDFLLSGGSGGGAITGRDFVHLLEKYKPSLQWDGKSLEHFFIYSDEGVKHAVFYPTLMSLSVRLDEARNWGTGLSIWEIGQGLDYFFDIL

SEQ ID NO: 18303 - protein, 104 aa, Zea mays
  VARIANT 74: note = Ancestral polymorphism is V, Derived polymorphism is E
  VARIANT 67: note = Ancestral polymorphism is P, Derived polymorphism is T
  VARIANT 60: note = Ancestral polymorphism is S, Derived polymorphism is F
  VARIANT 58: note = Ancestral polymorphism is Q, Derived polymorphism is R
  VARIANT 56: note = Ancestral polymorphism is M, Derived polymorphism is I
  VARIANT 54: note = Ancestral polymorphism is D, Derived polymorphism is Y
  VARIANT 40: note = Ancestral polymorphism is F, Derived polymorphism is L
  VARIANT 29: note = Ancestral polymorphism is L, Derived polymorphism is P
  VARIANT 22: note = Ancestral polymorphism is L, Derived polymorphism is M
  VARIANT 17: note = Ancestral polymorphism is G, Derived polymorphism is E
  VARIANT 15..104: note = Derived polymorphism lacks residues 15 to 104
  VARIANT 13: note = Ancestral polymorphism is A, Derived polymorphism is V
  VARIANT 11: note = Ancestral polymorphism is P, Derived polymorphism is L
MTSPSASSHVPVAAYTGDAEMLNKTLLSLPLKQNLMDVKFNNSASASKRLAITYQMYRPSAFQTLAPICKGLWVAFDCPTSSHCGRTNFNNVSTENLDNSHGTP

SEQ ID NO: 18304 - protein, 711 aa, Zea mays
  VARIANT 561..711: note = Derived polymorphism lacks residues 561 to 711
  VARIANT 519..711: note = Derived polymorphism lacks residues 519 to 711
  VARIANT 193: note = Ancestral polymorphism is S, Derived polymorphism is L
MEQLRQLGEVVGAIDALMAFEPELRVNPRQCRLLADACARALAAVTGEVRAHLRFEERGAKWRAVEPALRELHRAFRDAEGYVRQCLDPRGGGSWWGRAAAAAHCTDCVEQHLHGILWCVAIAVEAVEAAAEIAGHDADETARRRLVLANKYDSRSMLEPRLFQHAYGKLYLVSQELVARMDTVWKEDRWLLLQLLDEMKSPAAPKPLTKSEQRLADVLAAPRGKLHSASVLLNGDYSVRRRLGGNLKEAHWMGESFAVKHFIGDSEAEVSMLSSVAHPNVAHAAYCFHDEERKEYFVVMDQLMVKDLASYVKEMSSPRRRIPFPLVVAVDIMLQIARGMEHLHSKKIYHGELNPSNVLVKPRQPDGYVHVKVAGFERRGAVTNGAKASANGSGNASAAGSGGDDTCIWYAPEVLEHQESRDRHTEKADVYSFAMICFELLTGKVPFEDNHLQGDKTSKNIRAGERPLFPFQAPKYLVALTKRCWHADPAQRPPFASVCRVLRYVKRFLVMNPEQQQGQADAPPAVPAADYLDIEAQLLRRIPAWQRGQGAPPRVVDVPFQMFAYRAVEREKTAGAHASRDRVTDSGSEEDSLCGDENGVGATTPDDDASTVSNGTVRSRPDSCDGKKTPVRKADVKAPPRQGGALHPVATSSSRKLERTDSEHGTSGFSAGSQQKVKPASAVKPPPATRKTVGVKPEHPARRPKSGHASD

SEQ ID NO: 18305 - protein, 190 aa, Zea mays
  VARIANT 177: note = Ancestral polymorphism is S, Derived polymorphism is L
  VARIANT 171..190: note = Derived polymorphism lacks residues 171 to 190
  VARIANT 162: note = Ancestral polymorphism is D, Derived polymorphism is V
  VARIANT 161: note = Ancestral polymorphism is G, Derived polymorphism is C
  VARIANT 154: note = Ancestral polymorphism is P, Derived polymorphism is S
  VARIANT 117: note = Ancestral polymorphism is F, Derived polymorphism is S
MGSLDKGGAAAAAGRYKRVPGPALRAGFVGGARKVRARSRLARFLLSEKVDYLQWIVGATAFFFVVIVFVAFLPELGVFERPRLTLPSRRAGEGRVGGGGGIEGRSGLVMWEAGVASQFQPTRLREKWASERREEAKSLAELGTPVTRLGARKPRLAMVFGDLYPSAMQLQMVSVASVLEAMGYEMKVRP

SEQ ID NO: 18306 - protein, 1041 aa, Zea mays
  VARIANT 177: note = Ancestral polymorphism is S, Derived polymorphism is L
  VARIANT 171..1041: note = Derived polymorphism lacks residues 171 to 1041
  VARIANT 162: note = Ancestral polymorphism is D, Derived polymorphism is V
  VARIANT 161: note = Ancestral polymorphism is G, Derived polymorphism is C
  VARIANT 154: note = Ancestral polymorphism is P, Derived polymorphism is S
  VARIANT 117: note = Ancestral polymorphism is F, Derived polymorphism is S
MGSLDKGGAAAAAGRYKRVPGPALRAGFVGGARKVRARSRLARFLLSEKVDYLQWIVGATAFFFVVIVFVAFLPELGVFERPRLTLPSRRAGEGRVGGGGGIEGRSGLVMWEAGVASQFQPTRLREKWASERREEAKSLAELGTPVTRLGARKPRLAMVFGDLYPSAMQLQMVSVASVLEAMGYEMKVFSLEDGPCGNIWRAIGVPVSILPEDTNLPISVDWLDYDGILVNSIEARPVFSSLLHEPFKSIPVIWTVHEHSLAHRAKEYNASGMIQLINAWKDVFSRANVIVFPNYILPVMYAAFDSGNYFVIPGPPSEAFSYHEDVRISLGLSPKDFLIAIVGTPFSYGDNLMEEALVLQAVSPLLRRYHSENSAQSELKVKIFTGNITEKHRMALESVALSVGFPRGAAEHVAAEDKDILLRTADLVIYYSCLEEQLFPSVLVEAMSLEKLVIAPDLGIIRKHIDDGVNGLLFPRKNVGMLAQVLLQAVSNGKVSISGQKIASAGKAHAKNLMASETIEGYAVLLENVVKFPTDALHPLTVDEIPLALKKEWKWHLFEDVKHLHHMNTSLSSYKILKKLEQEWHRNQMENSSLSTTKISDTFSAIAWEEQRANEVMDIKRKMEEDELKDRNDQPHGTWEEVYRNVKRVDRLKNELHERDDKELERTGQPLCIYEPFFGEGTWPFLHQSSLYRGVGLSSKGRRPGADDIDASSRLPLLNNVYYRDILGEFGAFFALANRIDRIHKNSWIGFQSWRGTARKANLSNNAEFAILEAVQSQKHGDSFYFWVRMDQDPRNHTYKDFWSFCDAINAGNCRLAVLEAFQRMYGVHLDHDLDSLLHMPNDGDTWSVMQSWVLPTRSFLEFVMFSRMFVDALDAQMYDKHHQTGHCILSLHKDRHCYSRVLELIVNVWAFHSARRMVYVNPQTGAMQEQHHLSGRRGQMSVQFFSYTTLKSMDEELAEEFDLDHPDRRWLWPQTGEVFWQGLYQRERIMRQQEKERRKQQSREKIQRIKNRARQKTLGKYIKPPPDDTGGSNDTTSVDL

SEQ ID NO: 18307 - protein, 87 aa, Zea mays
  VARIANT 16: note = Ancestral polymorphism is R, Derived polymorphism is W
MASAAAATQVGTYFLRNYYNLLQQTPDVVHQFYSEASTMVRVDDLTGNNTATRSCRSAIAKPRAGNKLLLRPSPKTCMVMALAPCSN

SEQ ID NO: 18308 - protein, 204 aa, Zea mays
  VARIANT 16: note = Ancestral polymorphism is P, Derived polymorphism is L
  VARIANT 17: note = Ancestral polymorphism is D, Derived polymorphism is Y
  VARIANT 46: note = Ancestral polymorphism is Q, Derived polymorphism is H
  VARIANT 74: note = Ancestral polymorphism is R, Derived polymorphism is M
  VARIANT 79: note = Ancestral polymorphism is C, Derived polymorphism is S
  VARIANT 97: note = Ancestral polymorphism is R, Derived polymorphism is H
  VARIANT 110: note = Ancestral polymorphism is W, Derived polymorphism is S
  VARIANT 111: note = Ancestral polymorphism is T, Derived polymorphism is I
  VARIANT 126: note = Ancestral polymorphism is S, Derived polymorphism is I
  VARIANT 141: note = Ancestral polymorphism is P, Derived polymorphism is L
MTNTYTNIKSMCHTAPDVLKGLLSHLAQAISDYIIYQVNSGAQCIQIFDSWGGQLPPHVWEQWSKPYIKQIVSRIKKECPNVPLVLYINGNGGLLERMKNTGVDVIGLDWTVDMTDGRRRLGNGISVQGNVDPAFLFSPLPVLTDEIHRVVKAAGPKGHILNLGHGVLQKTPEEAVAHFFDVTRRLRYDTLFQGSVAEELHHVA

SEQ ID NO: 18309 - protein, 272 aa, Zea mays
  VARIANT 139..272: note = Derived polymorphism lacks residues 139 to 272
  VARIANT 222: note = Ancestral polymorphism is D, Derived polymorphism is A
MKEKVDVSAVDLEAGIGETLYRGSREDVIPSVFLSSPPPPLDPPSLPQLSSMWDKEGAAKGNAVTPTLATAMLGSLAPWVCAAAGAPVMAPRLKLLQGFHAHKGPTLSRTQPVAQGWRGVGEEACESKHCGPASPSPSWSRWSVPRWRPPSCSDGFYILVWYTFSTCLTLYNKTLLGDKLGKFSASLLMNTMHFALQAGLSKLIICFQPKGPEAAVDMGWKDYFMRVVPTALGTALDINLSNASLVFMSVTFATMCKSASPIFLLLFAFAFR

SEQ ID NO: 18310 - protein, 634 aa, Zea mays
  VARIANT 147..634: note = Derived polymorphism lacks residues 147 to 634
MEFIGSGKDVVKKIQLVAAGGLSTELPSSSSSRGEGDALPALLVKAPSQTVAGFDCVGADDVAVSLHEMDDKVEELQGRPGSNKDTAIRAYDDAHVVPYSVSLSMPASPSGFHLSQFMPVAPTDHVHRPEPTARSPRLVKQTRFHSQPIVLNMNLHPSSSTNKNVDEARRWDSARDKRFDPFKTFSGRLERQLSNLRGRPQDPVDGVSSSPDSEEETDQVPAADRYFDALEGPELDTLRATEVPVLPKDEKWPFLLRFPISAFGMCLGVSSQAILWKTLASAPATAFLRVSPAVSHALWYVALALTALVSSTYLLKVVFYLEAVRREFYHPVRANFFFAPWIACLFLALGAPRLVVAEMHRGVWYALMAPILCLELKIYGQWMSGGQRRLSKVANPSNHLSVVGNFVGALLGARMGLREGPVFFFAVGLAHYLVLFVTLYQRLPTNVTLPKELHPVFFLFVAAPSVASMAWAKINGQFDNGARIAYFIALFLYMSLAVRINFFRGFRFSLAWWAYTFPMTGASVATITYATEVTNVLTRALSIGLSGISTVTAAGLLVTTVFHAFVLRDLFPNDVSIAITRKKPKFSKILAQVRSSSSDMKELVLSLSNKPAAQSDCGDTETDPSVTAKSRAEP

SEQ ID NO: 18311 - protein, 176 aa, Zea mays
  VARIANT 4: note = Ancestral polymorphism is K, Derived polymorphism is E
  VARIANT 8: note = Ancestral polymorphism is I, Derived polymorphism is V
  VARIANT 32: note = Ancestral polymorphism is R, Derived polymorphism is H
  VARIANT 35..176: note = Derived polymorphism lacks residues 35 to 176
  VARIANT 41: note = Ancestral polymorphism is V, Derived polymorphism is I
  VARIANT 44: note = Ancestral polymorphism is R, Derived polymorphism is H
  VARIANT 46: note = Ancestral polymorphism is G, Derived polymorphism is S
  VARIANT 49..176: note = Derived polymorphism lacks residues 49 to 176
  VARIANT 65: note = Ancestral polymorphism is N, Derived polymorphism is K
  VARIANT 67: note = Ancestral polymorphism is K, Derived polymorphism is R
  VARIANT 82: note = Ancestral polymorphism is E, Derived polymorphism is Q
  VARIANT 93: note = Ancestral polymorphism is T, Derived polymorphism is A
MVGKKRGVISPLDHLAGLLEVRVVRGVDLAIRDLRSSDPYVVLRIGKAQKVKTRVVKKSINPEWNEKLTLSIEDPAVPIRLEVFDKDTFVDDAMGNAELDIRPLVEIVKMKLQGVADKTVVKKLVPNRQNCLAEESSIYISEGKVKQDLVVRLRNVECGEIELQLQWVHLPGSKGV

SEQ ID NO: 18312 - protein, 160 aa, Zea mays
  VARIANT 1: note = Ancestral polymorphism is M, Derived polymorphism is V
  VARIANT 10..160: note = Derived polymorphism lacks residues 10 to 160
  VARIANT 52: note = Ancestral polymorphism is E, Derived polymorphism is K
  VARIANT 60: note = Ancestral polymorphism is R, Derived polymorphism is C
  VARIANT 70: note = Ancestral polymorphism is G, Derived polymorphism is D
  VARIANT 77: note = Ancestral polymorphism is T, Derived polymorphism is I
  VARIANT 78: note = Ancestral polymorphism is H, Derived polymorphism is Y
  VARIANT 93: note = Ancestral polymorphism is V, Derived polymorphism is A
  VARIANT 96..160: note = Derived polymorphism lacks residues 96 to 160
  VARIANT 108: note = Ancestral polymorphism is G, Derived polymorphism is S
  VARIANT 111: note = Ancestral polymorphism is S, Derived polymorphism is Y
  VARIANT 116..160: note = Derived polymorphism lacks residues 116 to 160
  VARIANT 120: note = Ancestral polymorphism is N, Derived polymorphism is I
  VARIANT 135: note = Ancestral polymorphism is N, Derived polymorphism is I
  VARIANT 136..160: note = Derived polymorphism lacks residues 136 to 160
MKVCMLGDAQHVEEAKKMGLDYMDVEALKKMNKNKKLVKKLAKKYHAFLASETIIKQIPRLLGPGLNKAGKFPTLVTHQESLESKVNETKATVKFQLKKVLCMGVAVGNLSMEEKQIQQNIQMSVNFLVSLLTKNWQNVRCLYIKSTMGNHAGCSKSAFL

SEQ ID NO: 18313 - protein, 298 aa, Zea mays
  VARIANT 43: note = Ancestral polymorphism is Y, Derived polymorphism is C
MQILRLLAARRFRRRRRRPVSTITATATAPVTPRGGAAGGCMYGYGEEEDEGPFFDLDLTCCSAPASSAGSQAAESGSESEDTSSCGAAADGGAAARSDLDFVISLHRSRPSSPSYEERLFCRGAAPARPPPLMFCASEPSDAASRSRARDSSGGGRLRLRTLSFGSAKAAFSGGRASFSRSTSGARSARLFAAYDQDLPDEGRALRPPSGDVIRRYLSKISSRLRRVGVGVGVSHPAAATDLRLRKSRSASAAQASSTAQSPPPRRDDSLAEKQDGIASAIAHCKESLHRGSYPPYA

SEQ ID NO: 18314 - protein, 181 aa, Zea mays
  VARIANT 90: note = Ancestral polymorphism is T, Derived polymorphism is A
MSTTEDERSGAAAEAGGGEEERRERSVGLMAGLVDRAKGFVVEKVAQIPKPEAALDRVSFQSISREGVELHSHVDVSNPYSHRIPICEITYTFKSAGKVIASGMMPDPGWIAASGSTKLELPVKVPYDFILTLMKDLGGDWDIDYLLEVGLTIDLPVIGAFTIPLTTEGEIKLPTFRDLLF

SEQ ID NO: 18315 - protein, 414 aa, Zea mays
  VARIANT 185: note = Ancestral polymorphism is P, Derived polymorphism is S
MPLSFDNSTTEDSVAVVKPKPKAKVRKNPMKQSCFDFTKVDAVLLSIVFLLVRPNVGKSTLFNRIIVSLREIECECFTLSIPPYWLSDCVFVAYVAIAQVRTVYSFVGESKALNSYSEAIQNTLKLGYKAGMAKGLRIGCTYGIACMSWALVFWSLGQAFSNLGAFKVHGNIEFKEVTFSYPSRPDVIIFREFSLFFPAGKTVAVVGGSGSGKSTVVALIKRFYDPNEGQVLLDNVDIKTLQLRWFREQIGLVNQEPALFATTILENMLYGKPNATIAEVEAATTASRSNAHSFISLLPNGYNTMAGERGIQLSGGQKQRIAIARAMLKNPKIHLLDVATSALNADSESIVQEALDRLMVGRMTIIVAHRLSTIRNVNMIAVIQQGQVVETGTHDELIAKNNIVFLIVMLVVPA

SEQ ID NO: 18316 - protein, 81 aa, Zea mays
  VARIANT 41..81: note = Derived polymorphism lacks residues 41 to 81
MAGDSPLLVDAPGTSPFPLGANFVGTFILIFFATAAQIVNQKYGGAISPSALMLGTLARTTMCKTVKLKDKNDEMPRSFRR

SEQ ID NO: 18317 - protein, 387 aa, Zea mays
  VARIANT 68: note = Ancestral polymorphism is G, Derived polymorphism is S
  VARIANT 108: note = Ancestral polymorphism is I, Derived polymorphism is T
  VARIANT 139: note = Ancestral polymorphism is P, Derived polymorphism is S
  VARIANT 142: note = Ancestral polymorphism is W, Derived polymorphism is C
MMDGLHTDLALGLLGCGGVGVGSSGRGEQLQTAPFVAKTYQMVCDPRTDALVRWGSENNSFVVVDPAGFSRLLLPCFFKHRNFSSFVRQLNTYVSAPVSEARLPQPWILRSLTASHAVLYTYLEPWSSGCMQGFRKVHPDRWEFAHESFLRGQTHLLPRIVRRKKRGEGACTSSGGDAQAQYAAAAAGCCISMGGEDHRTEGEAEAAVLEEVQRLRQEQTAIGEELAQMSRRLQATERRPDQLMSFLARLAEDPDGVTRHLVEQAAEKKRRRMMQLASQPVRRLPPPPPPPPVLHHPLLALGGAAAAAAKGLDGGCQWAEQKKPSVVLTAAFDHPAASYCGAQHAVPNLGGGNGGGGINGMGLTADETAVETTTTPFPFCLLGQGFF

SEQ ID NO: 18318 - protein, 201 aa, Zea mays
  VARIANT 178: note = Ancestral polymorphism is A, Derived polymorphism is D
  VARIANT 105..201: note = Derived polymorphism lacks residues 105 to 201
  VARIANT 87..201: note = Derived polymorphism lacks residues 87 to 201
  VARIANT 82: note = Ancestral polymorphism is P, Derived polymorphism is L
  VARIANT 78: note = Ancestral polymorphism is D, Derived polymorphism is V
MSAPPPPFSTPPHPCALDPDLAPVLGTSSPARPKSGFPPPPPPLWTPPSPPYPTPTTAPTSCPRSIYPAVKVRRSEFDVEVPVLEVCTGYFVGGDHIFGPDPSSQRRWTMKRWIKEMEEVAATATTSRSIMPSRAIHKGKPLSVSLASRRSPPLSSRTPDIVTLMLQPTISFQILKLAERETKFMGQKNVTLKAICFQQLK

SEQ ID NO: 18319 - protein, 79 aa, Zea mays
  VARIANT 62: note = Ancestral polymorphism is I, Derived polymorphism is T
  VARIANT 61: note = Ancestral polymorphism is V, Derived polymorphism is I
  VARIANT 58: note = Ancestral polymorphism is L, Derived polymorphism is F
  VARIANT 56: note = Ancestral polymorphism is I, Derived polymorphism is V
  VARIANT 51: note = Ancestral polymorphism is A, Derived polymorphism is V
  VARIANT 41: note = Ancestral polymorphism is T, Derived polymorphism is S
  VARIANT 35: note = Ancestral polymorphism is L, Derived polymorphism is I
  VARIANT 25: note = Ancestral polymorphism is D, Derived polymorphism is N
MASRPSLKSKPKGKGGKKATADDEDATAAATTVRLMKEWTTWTMKKAKVVAHYGFIPLVIVIGMNSEPKPSVFQLLSPV

SEQ ID NO: 18320 - protein, 145 aa, Zea mays
  VARIANT 107: note = Ancestral polymorphism is K, Derived polymorphism is N
  VARIANT 97..145: note = Derived polymorphism lacks residues 97 to 145
  VARIANT 78..145: note = Derived polymorphism lacks residues 78 to 145
  VARIANT 66: note = Ancestral polymorphism is L, Derived polymorphism is P
  VARIANT 21..145: note = Derived polymorphism lacks residues 21 to 145
  VARIANT 8: note = Ancestral polymorphism is S, Derived polymorphism is I
METVFDSSMLGIEPYSREVTQSGELLVMDNVDSRPKLVAGSPEGFPGHIDGKLDNMVDPAAVFGMLFGSDYFEDYVGQLGLASIASVEVEENSNSQEARAKVQEKIKELQREREQKLTQSLKDRLQSYVDGRNDEFACELCKRRS

SEQ ID NO: 18321 - protein, 563 aa, Zea mays
  VARIANT 30: note = Ancestral polymorphism is E, Derived polymorphism is K
  VARIANT 388: note = Ancestral polymorphism is V, Derived polymorphism is A
MDGHGAVSPWSVLGGAAAVLFLWLASQVLEWAWWAPRRVNRALRAQGLRGTRYRLLCGDLIEEQRLRAAALARPVPVDRPHDFLPRVAPFLHRVLQEHGRYDEPAWMYTNQEEHGTETFAPGCVPLCFVNFRHENAGKLSFTWFGPTPRVLITDPELAREVLSNKCGDFVKSLLSPLSTLLVAGLVVLDGEKWVKHRRILNPAFHAEKLKGMLPAFLACCNELVDRWEKQISASAEPTELDVWPEFQNLSGDVISRAAFGVSYEEGRRIFLLQAEQAERLVQSFKTNYIPGFSLLPTENNRRMNEIDREVKTILRGIIEKRQKAAKNGEATKDDDLLGLLLESNMNYSDSDGKSSKGITVEEVIGECKVFYFAGMETTAVLLTWTVAVLSMHPEWQDRAREEVLQVFGENKPDFNGVARLKVVTMVLYEVLRLYPPVAAINRRTRQPTKLGGVTYPAGVMLTTPVMFIHRDPALWGSDADEFNPGRFADGVSKACRDPGAFAPFSWGPRVCIGQNFALLEAKLAVSMILQRFAFEVSPAYVHAPYTVLTLHPQHGAPVRLRRL

SEQ ID NO: 18322 - protein, 566 aa, Zea mays
  VARIANT 39..566: note = Derived polymorphism lacks residues 39 to 566
MATLPLLLHLLWEASPWARAGAATAAVVLVWLAAWTLEWAWWTPRRLDRALRAQGLKGTRYRLLTGDVRENARLNREARTKPLPLGSHDIIPRVLPMFHNAVKENGTNSFTWFGPIPRVIIPDPELMREVLSNKFGHFGKPLFSRVGKLLANGLANHEGEKWAKHRRILNPAFHHEKIKRMLPVFATCCADMINRWENSMSSKEPSEMDVWPEFQNLTGDVISRTAFGSNYQEGRNIFQLQGEQAERLIQSFQTIFIPGYCKGERVSNLSKLSRGIKTREVLRQESRICFVITLLNICRLLPTKNNRRMKEIDREIRKILHGIIRKRERAFIDSEGTNDDLLGLLVESNMRESNGNAKLGMTTEDIIEECKLFYFAGMETTSVLLTWTLILLSMHPEWQEQAREEVLNHFGMGTPDFDNLNRLKIVTMILYEVLRLYPPVVFLSRRTYKEMELGGIKYPSGVSLLLPIIFIHHDPNIWGKDASEFNPQRFEDGISNATKHQAAFFPFGWGPRICIGQNFALLEAKMALSTILQRFSFELSSSYTHAPYTVITLHPQHGAQIRLKKL

SEQ ID NO: 18323 - protein, 528 aa, Zea mays
  VARIANT 284: note = Ancestral polymorphism is S, Derived polymorphism is L
  VARIANT 291: note = Ancestral polymorphism is G, Derived polymorphism is R
MVVLEVSFAAAASSVVRWILMLGGLMAAAALLWQAGRLLRLLWWQPRRLERALRAQGVRGTSYRFPAGDLKEYGRLAKEAWSKPLPLRCHDTAPRVAPFLHRLVLEHGRTSMSWFGPSPKVTIVDPELAKDVLSNKFGHFEKLKVPALSKMLGSGVASHEGEKWVKHRRILNPAFHLEKLKRMLPAFSACCEELVNRWAAESLGSDGSCELDVWPELQNLTGDVISRTAFSSSYREGRRIFQLQAEQASLVMTNIRKIMMIPGYMYLPTANNRKMRRNNREVESILREIIGKRIQAMERGEGTKDDMLGLLLETNMRDDMGMTIEDVIEECKVFYFAGMETTSVLLTWTMVVLSMHPEWQDRAREEVTALFGRDDKPEYDGLSRLKVVTMVLYEVLRLYPPATSVVRQTYKEMEVGGVTYPAGVILELPVLLIHHDPDIWGGDAREFRPDRFSDGVSRASKDPGAFLPFGWGPRICIGQNFALLEAKMALCMILQRFEFRLAPSYTHAPHTVITLHPMHGAQLKLRAI

SEQ ID NO: 18324 - protein, 546 aa, Zea mays
  VARIANT 29: note = Ancestral polymorphism is V, Derived polymorphism is A
  VARIANT 125: note = Ancestral polymorphism is D, Derived polymorphism is Y
  VARIANT 427: note = Ancestral polymorphism is Y, Derived polymorphism is D
MFLGALFAAVTTSAPAARSLLVYGVPGLVLLWQGGRLLSRLWREPRRLERALRAQGLRGTSYRFLTGDLREFGRLNKEAWARPPLPLGCHDIVPRVTPFLCGNVREHGKTCFSWFGPIPNVTITDPALVRDVLSNKFGHFGKPQFPALTKLLSDGLTSHEGEKWVRHRRILNPAFHLEKLRLMLPTFSACCEELVGRWAARCLGPDGGSCELDVWPELQALTGDVISRTAFGSSYLEGRRIFELQSEQAERFVGAIQKIVIPGYMYLPTKNNRRMRQINKEVNSILRGVVGKRMRAMAMREGGESTTGADDLLGLLLESNNTRHEGETGHGQQSALGMTIEDVIEECKLFYFAGMETTSVLLTWAMVLLSMHREWQDRAREEVTGLFGRDDNKPEYEGLSRLKTVNMILYETLRLYPPAVVFSRKAYKEMKVGGVTLPAGAIIEIPVLFIHHDPDTWGDDAHEFKPERFAEGVSRACNGASGAFIPFGWGPRTCIGQSFALLEAKMALCVILQRFEMELAPSYTHAPHTVMTLHPMHGAQIKLTAI

SEQ ID NO: 18325 - protein, 315 aa, Zea mays
  VARIANT 66: note = Ancestral polymorphism is A, Derived polymorphism is V
  VARIANT 152..315: note = Derived polymorphism lacks residues 152 to 315
MISSSSNAVAVLELQQSSFGTVAPTMAWSLARTTSVGRRARYLSTAHVPTTGKREQKGLFDTIFGALYREEQMLETNPILNKVGSKSKPPVVIAASAPKKVAEESGSGGLSLGGFFSRPKKGGDANGDIKGFTARRLFTQDQALKLVICILWNSRQMHILSEYRVSIGEGCVVVHPDGLINWIRCVDQAGHQGMEPKDHHTIHPEFPTKAFKAHKVYYLNEAKRDELLQFAQGAISGQKINADIARLDKEITQLQHQISSMDALHATSIVNQNKKAQTATEIQATMSMTKLSISYYYILNLMIQLNFPRLRLKSC

SEQ ID NO: 18326 - protein, 476 aa, Zea mays
  VARIANT 64: note = Ancestral polymorphism is T, Derived polymorphism is R
  VARIANT 103: note = Ancestral polymorphism is L, Derived polymorphism is S
  VARIANT 109: note = Ancestral polymorphism is L, Derived polymorphism is S
  VARIANT 118..476: note = Derived polymorphism lacks residues 118 to 476
  VARIANT 119..476: note = Derived polymorphism lacks residues 119 to 476
  VARIANT 153..476: note = Derived polymorphism lacks residues 153 to 476
  VARIANT 174..476: note = Derived polymorphism lacks residues 174 to 476
MSAAGSAALPLRLQLGRLLRLQQPPSWSTDLSVFFFSGGGGVGASDSSWACRVGEVSSLCNSSTNWIQIIPHVRCLVEFSRGLKAFARTREHAVDGYVTFRTLRLVNYSIFKSDNGTQSHLLATALIISWSVTEIIRYSFFAMKEAFGSAPSWLSWLCSPSHKMRNTWNLSYDYLYPSVLALLVYVPGKPFPSLGCCCTALLRSSKQCMIILCPGTFFIMAVHHAVKATTLKPWAAASQGLRLPPCSASMAAGDDGSAVRRLYLSVYNWVSFFGWLQVLYHVTLALLGSGHQAVYAAVKLPLLFSQTAALAEILHSITGLVRSPISATLPQVGARIFVTWCIVWSFPETQSHVLVTSLVLSWSITEVIRYPFFGLREAFGITPSWLLWLRYSTFTVLYPVGLISELGLIFTAMPHMKGRSFYICAALTTIYIPGSGSDMTWRALLHAASFWLSAFPHMYGHMLAQRKKNLSKAKAA

SEQ ID NO: 18327 - protein, 547 aa, Zea mays
  VARIANT 288: note = Ancestral polymorphism is E, Derived polymorphism is G
MASSGETTALLGSSSAGDAQAAPFPWKLLLVLYAAAALAWCAVRVLAWAWWRPRRLGRVLRSQGLRGTAYRSLAGDARLTQRLNREARSRPMPLGCHDVAPRAMPLFHHTMKEHGKTSITWFGPVPRVTITEPELVREVLSNKFGHYEKLKFGRLQRMLHNGLGSLEGEKWAKHRRIINPAFHLEKLKGMLPAFAACCTELVQRWEGLVADGQPCEVDVWPEMQNLTGDVISRAAFGSSYLEGRRIFQLQGEQVQLVVQAMHKLHIPGHLYLPTKTNRRMKQIASEVEELLKGIIAKRENALRSGSAAGDDDLLGLLLESNMEHCRGDGSDAARAGITTDDVIGECKLFYFAGMETTSVLLTWTMVVLSMHPDWQHRAREEVLHVLGHTTTAPDYDALSRLRIVTMVLYEVLRLYTPLTALQRQTYKPMELGGVRYPAGVMLMLPLLCIHHDKDVWGPDASEFRPERFAEGVSKASRDAPAFFPFGWGPRTCVGQNFALLEAKMGLAMILQRFAFELSPAYTHAPFPHGMLQPEHGAQIVLRARGLP

SEQ ID NO: 18328 - protein, 463 aa, Zea mays
  VARIANT 31..463: note = Derived polymorphism lacks residues 31 to 463
  VARIANT 32..463: note = Derived polymorphism lacks residues 32 to 463
  VARIANT 319: note = Ancestral polymorphism is M, Derived polymorphism is I
MNKMLSNDCLGTQEPHTFCKTTETLEHSHLQEITLDKTAAGSTLISHQNVCCIAELSGENTEIMEISLLHNESDAGSTSLLPLPLLSYGPRSMVPIQVPPSSDFESILSPEPIYSDLQLKEMNYNAAAMDESTEFLHLILSGNDEGYNSTTELQVWDVVDFYVSENFSALQFDSLMGFTNEVSTSYNDCMNLVDMVERPVARLSLDDTPKPSNSDDAVPADNVTMDPDETSLYLQTKPTDSETESSSAAGDVETEYLDLKLLSRCMPDLMDVDSPNCLSKTPVKKKHVTLVLDLDETLVHSTLDHCDNADFTLEVFFNMKNHTVYVRKRPYLKMFLEKVAQMFEVVIFTASQRVYAEQLIDKLDPDGKYISRRIYRESCVFSDGCYTKDLTILGIDLAKVAIVDNTPQVFQLQVDNGIPIKSWFDDPSDQELIELLPFLESLVDSEDVRPIISKTFHDKLEQN

SEQ ID NO: 18329 - protein, 447 aa, Zea mays
  VARIANT 204..447: note = Derived polymorphism lacks residues 204 to 447
MASLVPRAAAASLLAVLVMTTTTTTTPASAQRFPVRARPTRSGYLNITSTNSLYFAFYEATEPVTTPATAVPLLVWLQGGPGCSSLIGNFAEVGPFLLLNSSSSGLSRNRNRWNRRFGVIFIDNPLGSGFSAPASLADIPRDEPTIAAHLLAALQSFMALDAAFRARPLFLAGESYAGKYIPAAARHILDANDKLPAGQRVNLQGIVIGNGMTHPVAQVTVHADQAYFAGLINAKQKATVEGMQNRTEGAERHHKLPPESHRRGDGLQLRARECETKYPTRPLRNFLNTDEAKAALGARRDVRWVRCSKDVSEALGDDIMKSVKGDVENILARNGTARVLLFQGVFDLHSAPASVAAWVRELSWPGLPAFLDADRAVWKLGGGRLAGYVQSSGALSNTVIVGAGHMAAGDNRPAAQAMIEGWVLQTGPFATAGGQASTPAAIEPVPV

SEQ ID NO: 18330 - protein, 1138 aa, Zea mays
  VARIANT 167..1138: note = Derived polymorphism lacks residues 167 to 1138
  VARIANT 583..1138: note = Derived polymorphism lacks residues 583 to 1138
  VARIANT 839..1138: note = Derived polymorphism lacks residues 839 to 1138
MGFDNECILNIQSLPGEYFCPVCRTLVYPNEALQTQCTHLYCKSCLAYVVATTQACPYDGYLVTEADSKPLMESNKTLAETIGKVAVYCLYNKSGCQWHGELSACTTHGTTCAYGNSPVVCNRCGTQIVHRQVQEHAQLCHGLQSQTQQADGSQVQLAAATTQPVTQDPSLASAGSAAPAVTTLPKPSLTTATAVTSSATATGGAAGATTAAVPSSAASISASQTPTAEQWYQQQQQLQYSQYYQQQHPGSNPYMQQYQQYNQYQQAYQHYMQPSMQVPSQNVVQGSAQPASYVQPQVQSSQLMMQAQSQPQVHPLTSQPQLQQHPVQPHPQSHPHLSHVQLPADQSQLHQSIQSAQVPQFQPSHVPLQPSGLQVQPAAHPSALTQVGNQQVATQATAHQVQPHVRVQPPQQQHIVAQQQHPHLQALPPHQNIQPQMQLNSQVQLQPPHAQQQAYPQPQAYPQQTHHMHPQNASYTQQQTQGALLQPVPVSHQQAHVSHHPAPMRPPLPSQQPALQPFQGIQRTTQHGKHIGFHAQWPPMGSNISSQAPPQGFPANSSVSSQSVQPYQQGMSSSQQVHSQPGQPYTQHHVTGNTGHVQTSAGRSMTHLAPTQQFQHQQSAVLRTESPAAAHPIGQGSLDLEKHTSKSGKSENAINAAVSENKISGADSAAMRPTKPQSGEENMNSEQNGFVGVRKDAVQTGIVSHGLDGSIRRDGNTDQAGNSHGLVVQGGKDHKASDVTNREKEQSFQQASLQNAGALGSYVPPGVVPQHPSGPDKMLPQHIMNPGHKHGSSENIRPPLQQPYGLFHSGKISRPFGENQIQMPMSQPGGIRPGDGMIRPPVVGPLPGHHGAVLSPFDLEHLGQPHSLGMLNSNDFGGEGFNTSRGAAYPGRHDNIEDDRKHFPAPALLDGQGLQRDPRHFERALVRPDGFLDSVPGRPPFPNHRSVGLHEGFPRKQNTTASHPDVLSHGAEFDHHRAIGMPNFRNPGPFAQGTSGGPGAPPKNQLGSGNLPGNIQHAFAGPDIPPAPFNLGDMHPGDPHLVADYSQHGFPKTAAHFGLGGFSRNGNSGWCRICMFNCGTAENLDLHVQTREHQQCAMDIILKMKQDVAKRKKLNYGGPKSVNNKKVSGKGHFRGNRR

SEQ ID NO: 18331 - protein, 557 aa, Zea mays
  VARIANT 84: note = Ancestral polymorphism is A, Derived polymorphism is G
  VARIANT 99: note = Ancestral polymorphism is A, Derived polymorphism is S
  VARIANT 106: note = Ancestral polymorphism is V, Derived polymorphism is D
MVFPAILPKVAARWLFTFYRAARKLRRHAFQLYYRNTTAAKPSSAAAAAVSQQQTGAAATAALKTGAAIPDAAGRTVVCEMHGALLRSTALFPYFMLVACEGGSLVRAMLLLCAFPLVWALGERRGAGVRVMAFVTFAGLRPRDVDLVARAVLPKHYMEQLNALVYGSLWLPARRKVAVTSAPRVMSEWFLKEYMAADAVVGLELQHVNVGRRRYFTGLLSSSGHATGPELRQKAIREALLGAEDDPIAVVGIINDSSPLDDELFVPYCKEVYVVSRESAKNDKLSREKYPKPLIFHDGRLAFLPTPAAMLAFFLFLPLGVVLSVIRINIGIVLPYKINFATAAIFGVRFRASGLRAPPADGKRRRGVLYVCTHRTLVDPIMLTTALQKPVPALTYSLSRLSELIAPIKTVRLTRDRARDAETMSRLLAQGDLAVCPEGTTCREPYLLRFSPLFAELADDMEPVALDAQVTTLYGTTASGHKWLDPVAFFANPVPSYRVEFLGAVPREWTRAGGRTGVEVANWVQRRLGQALDFECTGLSRRDKYMMLAGNDGVVAK

SEQ ID NO: 18332 - protein, 309 aa, Zea mays
  VARIANT 33..309: note = Derived polymorphism lacks residues 33 to 309
MGHRMFSPLGFFLLAIVVLYGGTEQRRAEAAEGASPHRMLATISVSKPSYPMVTTPMSAYGDPVSTPGTPYSTFPSLATGNGGAGAGAGAGGGAGVGGGGGGGAGVGGGGGGGGTWCVASQSASPTALQVALDYACGYGADCSPIQQGGSCFNPDTVHDHASYAFNSYYQKNPAPTSCDFGGTATITNTDPSSGSCQYPSSSGGAQSTMPPPSPTSMPPTVPTAPMTPTPMTPDTTPTTGTPVYGLSPPDYGSLSPPDSGSMSPPGYGSTSPPDYNDVGAAATTGQGGAALALALLCVLVATVSLHVSK

SEQ ID NO: 18333 - protein, 114 aa, Zea mays
  VARIANT 20: note = Ancestral polymorphism is M, Derived polymorphism is I
MAGAGSRIKSKVREWMRKRMAPRRKTAAAAAATGSGDNSGGVGGSASASAPAQSSPRRKLLAAALPSALRWRKPRGNVLAALFQRAAYHLLWLVESVVVVAQLCFFFVRFGFRL

SEQ ID NO: 18334 - protein, 91 aa, Zea mays
  VARIANT 65: note = Ancestral polymorphism is G, Derived polymorphism is D
  VARIANT 52: note = Ancestral polymorphism is A, Derived polymorphism is V
  VARIANT 50: note = Ancestral polymorphism is L, Derived polymorphism is M
  VARIANT 47: note = Ancestral polymorphism is R, Derived polymorphism is T
  VARIANT 46: note = Ancestral polymorphism is R, Derived polymorphism is I
  VARIANT 16: note = Ancestral polymorphism is P, Derived polymorphism is L
MEPTRRARSGAGAPSLAPCSAPMASMSMCHIMERMQHNWLVPRSRRRKHLGAVMPTMVIQDISVGTQTSKTLINHGHYFFITDTTIIFPIL

SEQ ID NO: 18335 - protein, 169 aa, Zea mays
  VARIANT 117: note = Ancestral polymorphism is Y, Derived polymorphism is C
  VARIANT 108: note = Ancestral polymorphism is R, Derived polymorphism is S
MCPAIPVKDITPAPPPSVAMAKVTDKKKIKKKSLGTIYEEESPEPANGDDDGALALPEIGLGLSLNTNGVLKAWCGRGSAFADGNGPDLPLSPAHVVGLRLFNIDMIREHETRDQFYVIDMNYFPGKGAPSPRRAPWPLPTLVVVTEGATTSQRMSVAIPLEQSITPVL

SEQ ID NO: 18336 - protein, 655 aa, Zea mays
  VARIANT 271: note = Ancestral polymorphism is R, Derived polymorphism is M
  VARIANT 201: note = Ancestral polymorphism is S, Derived polymorphism is L
  VARIANT 200: note = Ancestral polymorphism is T, Derived polymorphism is M
  VARIANT 146: note = Ancestral polymorphism is D, Derived polymorphism is A
MSTENYDPCYPDQPVVDRYLPVWAEQPAFARKPAFVWADDAGGGAPSYTALTYSELNTAAQRMALGLLQTVRRGDTVLLLGSPGLRLVKLIFACQRAGLVAVPIIPPTDPSKLGTSAQGAAHRHLLRAVAQTRPAAAVADDAGYIATVLESPVAALKRLRWLSVAHLESRGPRDVAADERTRTAAYCGCAPGETYLIQYTSGATGAPRPVVVTAGAAAHNVRAARKAYDLHPAGVVASWLPQYHDCGLMFLLLTVVAGATCVLASPAAFARRPRLWLELVTEFKATCTPVPSFALPLVLKRGRRSEHGTRPLDLASLRNLILVNEPIYKSPVDDFVEEFGRAGLDASSISPSYGLAENCTFVSTAWCGGRPSLPSYKKLLPSARLPSLASSSGEETEIDIVVVDGRTGEPVEDGVEGEIWVSSPSNASGYLGHPSASREVFRARLPGTGGTSFVRTGDCGVVRGTERYLYVLGRSTDAIAIDGGQGQRRLHAHYIETAAFRSSPGALRGGCVVAFAAPSPSSPVTVVVVAELQKGRDNVHLSSICDGIRRAVWKEEGAKVGCVVLVDSGGVPKTTSGKLRRGYTRDMLAGKLIPKVFEVLYDEYAKGGATPEKETEVCGTSASWVVGEAAGDTAASMVVMASGNASHRMRLRSSL

SEQ ID NO: 18337 - protein, 264 aa, Zea mays
  VARIANT 211: note = Ancestral polymorphism is L, Derived polymorphism is Q
  VARIANT 204..264: note = Derived polymorphism lacks residues 204 to 264
  VARIANT 197: note = Ancestral polymorphism is G, Derived polymorphism is R
  VARIANT 192: note = Ancestral polymorphism is K, Derived polymorphism is E
  VARIANT 191: note = Ancestral polymorphism is I, Derived polymorphism is T
  VARIANT 184..264: note = Derived polymorphism lacks residues 184 to 264
  VARIANT 153: note = Ancestral polymorphism is A, Derived polymorphism is V
  VARIANT 144: note = Ancestral polymorphism is L, Derived polymorphism is I
MAAALCPRLRGFMASSRPLLALRPVALRLPMRRAVPAMPLAARARRGLGSSTANAQLDEDFATASDLRFESPLEVVKYPDPVLRARNKRINTFDDNLRALADEMFDVMYKTDGIGLSAPQVGVNVQLMVFNPAGVKGEGEEIVLVNPVIYKSAKRLLVFEEGCLSFPGIYGNVVRPESVKIEAQDVTGAKIKVKLSGIHARVFQHEFDHLLGILFFDRMTIDVLETVREELKNLEKKYEEITGLASPETVENCKGAKDVFSLPR

SEQ ID NO: 18338 - protein, 381 aa, Zea mays
  VARIANT 234: note = Ancestral polymorphism is A, Derived polymorphism is T
  VARIANT 226: note = Ancestral polymorphism is L, Derived polymorphism is H
  VARIANT 58: note = Ancestral polymorphism is S, Derived polymorphism is F
  VARIANT 55: note = Ancestral polymorphism is G, Derived polymorphism is R
  VARIANT 51: note = Ancestral polymorphism is V, Derived polymorphism is M
  VARIANT 48: note = Ancestral polymorphism is A, Derived polymorphism is P
MGVLRSTQSLEAEVDELRAALLAGGWRRSAGHADAKRAPRGDAGGAAARAVCVTGGISFVGFAVVDRLLRHGYTVRLALETQEDMDKLREMEMFGEDGRDGGVSTVMANVMDPDGLRRAFDGCAGVFHTSAFVDPGGMSGYTKHMAALEAQAAERVIEACVRTESVRKCVFTSSLLACVWRQDYPHDRRCPTTIDESCWSDESFCRDNKEEATYCDASFFQLWFALGKTAAEKAAWRAARGRDLKLVTICPALVTGPGFRRRNSTASIAYLKGARAMLADGLLATANVETVAEAHVHAYEAMGDNTAGGRYICYDHVVKRPEEFAELERQLGLPGGAAPAPAHGSDDRPARFELCKRKLSRLMSSRRRCAYDTYYSVAFEV

SEQ ID NO: 18339 - protein, 540 aa, Zea mays
  VARIANT 396..540: note = Derived polymorphism lacks residues 396 to 540
MASVSPAAAAAAVSGSHHGRLLLPSSPRRLPRPRPRLRFASCHADTLLPSSSSEVRTPLVPAVEPSSESSTDCFVDWLRARGLPPGKVDIRERPVPCLRDGKDRPLRYVAAGVDLQEGDVAFEVPMSLVVTLERVLGDESIAELLTNNKLSELACLALYLMYEKKQGKDSFWYPYIKELDRHRGRGQLAVESPLLWTESELDYLSGSPLKDEVVARDEAIRREYNELDTLWFMAGSLFQQYPFDIPTEAFPFEIFKQAFVAVQSCVVHLQCLIGRCKLMHCCHCKSTEMLLIDSVMLLIQEQKVSLARRFALVPLGPPLLTYKSNCKAMLTVDGESVRLVVDRPYKAGEPIIIWCGPQTNSRLVLNYGFVDENNPFDRISIEASLNTEDPQYQEKRMVAQRNGKHAIQNFNVYVGKEKQTVAEMLPYLRLGYISDPDEMQSILSSEGDTCPVSPCTERAVLDQLGGYLESRLAGYPTTLNEDEAMLADGSLEPKQEVATRLVRLEKKMLHACLQATNEFITDLPDHTVSPCPAQYAPEMK

SEQ ID NO: 18340 - protein, 245 aa, Zea mays
  VARIANT 156: note = Ancestral polymorphism is L, Derived polymorphism is F
  VARIANT 184: note = Ancestral polymorphism is K, Derived polymorphism is T
MPAFPVRASASSSVVGSLTGTRRPRLIKNTTVIFATAPSTLVAMGDAVEHLKSGFQKFKTEVYDKKPELFEPLKAGQAPKYMVFACSDSRVCPSVTLGLQPGEAFTVRNIAAMVPAYDKTKYTGIGSAIEYAVCALKVEVLVVIGHSCCGGIRALLSLQDGAPDNFHFVENWVKIGFPAKVKVKKEHASVPFDDQCSILEKEAVNVSLENLKTYPFVQEGLAKGTLKLVGAHYDFVSGNFLVWET

SEQ ID NO: 18341 - protein, 410 aa, Zea mays
  VARIANT 45..410: note = Derived polymorphism lacks residues 45 to 410
MAAPAQAQAQVLPLLRWSRSASFLCASSRRLFSALQRPSAAARCEAGSKAMLKGMDYSELENWVQAQGFRPGQAMMLWKCLYGNNVWAHCYDELAGLNKDFRKMITEHADLKALTMKDIHIASDGTRKILFSLEDGSVIETVIIPCARGRTTICVSSQVGCAMNCQFCFTGRMGLRKHLSTAEIVEQAVFARRLFSDELGSINNVVFMGMGEPFHNIDNVIKASAIMVDEQGLHFSPRKVTVSTSGLVPQLKRFLQESNCSLAVSLNATTDEVVRNWIMPINRKYNLNLLLGTLREELNLRQKQIVLFEYVMLSGVNDSMDDAKRLIELVQGIPCKINLISFNPHGGSQFKPTPDDKIIEFRNVLIQGGLTVFVRLSRGDDQMAACGQLGEPGGYQLPLLRVPEKFQVAL

SEQ ID NO: 18342 - protein, 408 aa, Zea mays
  VARIANT 115..408: note = Derived polymorphism lacks residues 115 to 408
MRQPTSAGGDAGFVRADQIDLKSLDEQLERHLGRRAERGVGLPSGTGSRGGESARLGPEELTPLRRCREDWEIDPTKLVIKGVIARGTFGTVHRGVYDGQDVAAYDEALEVRRLQDKAADFSGGSVALFMGPGKLESICTRSEQEIAALRAAFAQEVVVWHKLEHPNVTKFIGAIMGARDLNIQTEHGHLGMPSNICCVVVEYLPGGALKSFLIKNRRRKLAFKVVVQIALDIARGLCYLHSEKIVHRDVKTENMLLDKTRTVKIADFGVARVEASNPSDMTGETGTLGYMAPEVLNGHAYNRKCDVYSFGICLWEVYCCDMPYPDLSFSEVTSAVVRQNLRPEIPRCCPSSLANVMKRCWDANPDKRPEMAEVVSMLEVIDTSKGGGMIPKDQTQGWLSCFRRYRGP

SEQ ID NO: 18343 - protein, 542 aa, Zea mays
  VARIANT 342..542: note = Derived polymorphism lacks residues 342 to 542
MGEPLLTSLSMENSNSHPCTLLSMDPAGSRPASAESSGGGGAATNGVGSGGDRELFIVPRRESAHPGPPDINLPLSADPLPPPPSWSLDTFDILDVTLGTHNYESEVALTLPKSTGNGNGSATATVSVGTRKCAKRGDSIWGAWFFFNHYFKPALVEKPKGKVTRDASGSISGFDKSDLRLDVFLVQHDMENMYMWVFKERPDNALGKMQLRSFMNGHSKHGEPSFPFSADKGFSRSHRMQRKQYRGLSNPQCLHGIEIVGSPNLSAVPDADLKRWAELTGRELNFSIPSEASDFEAWRNLPSTDFELDRPHPPAAKSATHGSHSHKKGLNGSGLNLSTPPSSDDGMDLSPKCAKRRKGFFGHGVEEDCVMANNSCSDREQEVEAHAGEPSWMHEFTGVAKHASGPVTAAKTIYEDEEGYLIVVSMLFSDPHSVKVSWRNTLTHGIVKITCVSTARMPYIKRHDRTFKLTDPSPEHCPPGEFVREIPLATRIPEDAKIEAYYDETGTGLEIMVPKHRVGPEEHEVRVCMRPPHLGDSDLVLS

SEQ ID NO: 18344 - protein, 293 aa, Zea mays
  VARIANT 223: note = Ancestral polymorphism is R, Derived polymorphism is L
MRTIMAKSPHDSSFSRRNFKWPVLVKSSSHGAAAGGGEDSSGKGAEDADEDEATMAFSSSCPSFHSEDFVSPPPNPKAPPPPKQRGKRCRAAVSRLRAALAAAIAGRHRQVGLGARITGTLYGRRRGHVHLAFQVDPRACPALLLELAAPTASLVREMASGLVRIALECDRAKGACAFPSAAAATNGGAGGCRKLVEEKAWRAYCNGKGCGYAVRRECGAADLRVLRALEPVSMGAGVIPAACGGGEGDVMYMRARFERVVGSRDSEAFYMMNPDSSTGGNGGPELSIYLLRV

SEQ ID NO: 18345 - protein, 130 aa, Zea mays
  VARIANT 3: note = Ancestral polymorphism is G, Derived polymorphism is R
MMGGRTVAPPLVLALVTIIAIAAAEGDEVKCGGCSPCGGADCPVLYPSPPPPPYYYYSPPPPATYPGESSSYYQPPPPGAYIQIGSAPPGKGPLYPQDPGFIPAGAPGRAAPLAVVAALAPALACAWALL

SEQ ID NO: 18346 - protein, 913 aa, Zea mays
  VARIANT 329..913: note = Derived polymorphism lacks residues 329 to 913
MAGCAPSRVASCGPWGGRAALESELSWDGSHYSISSGILPSLGARSNRRVKLRPFIVSPYDRRYRCWETFLIILVVYSAWVSPFEFGFIQKPTGALAAVDNVVNAFFAVDIILTFFVAYLDRMTYLLEDDPKRIAWRYTTSWFVLDVASTIPSEFARKILPPDLRSYGFFNMLRLWRLRRVSSLFARLEKDRHFNYFWVRCAKLICVTLFAVHCSACFYYLLADMYPTPTDTWIGNSMPDFHQRGLWIRYVVSVYWSITTLTTVGYGDLHAENTREMIFNIFYMLFNLGLTAYLIGNMTNLVVHGTSRTRKYVSRFSPFCLVLADTNLYKGHIEVAPNTLLFLLCFGRKRDTIQAATSFALRNQLPSRLQDQMISHLCLKFRTDSEGLQQQETLDVLPKAIRSSISQYLFFNLVQKVYLFEGVSNDLIFQLVSEMKAEYFPPREDVILQNEAPTDFYILVTGSAMVGVAKAGDVVGEIGVLCYRPQLFTVRTKSLCQLLRMNRTAFLSLVQSNVADGTIIMNNLIRLLKQQNDNSVMMGVLKEIENMLARGRLDLPVTLCFAVNKGDDFMLHQLLKRGLDPNESDNNGHTALHIAASKGDEQCVKLLLEHGADPNARDSEGKVPLWEALCEKQNPVVELLVQSGAGLSSGDVALYACVAVEENDPELLENIIRYGGNVNSSMKDGTTPLHRAVCDGNVQMVELLLEHGADIDKQDNNGWSARALADQQGHDDIQSLFRSRKAHRQQHASKGRVAPVPIWRFNSEPTMPKMKHEEDAELRGKVVPQKLLRKRVSFQNSLFGVISSSHARQDTGRLLSKGLAGTGSPGCSHGSLVRVTIGCPEKGNAAGKLVLLPRSMTELLELGARKFGFKPTKVLTTGGAEIDEVELIRDGDHVVLVSDDWAPDVAQLRPNDK

SEQ ID NO: 18347 - protein, 368 aa, Zea mays
  VARIANT 3: note = Ancestral polymorphism is E, Derived polymorphism is G
  VARIANT 33: note = Ancestral polymorphism is R, Derived polymorphism is G
  VARIANT 148: note = Ancestral polymorphism is L, Derived polymorphism is V
MQEVEMRRGAVLLVSLVLLLINSPVGLCGCFKRIFSFGDSIIDTGNFASTVGSAPIKELPYGMTYFNRSTGRVCDGRVIIDFYAQALGLPLVPPSIPEEETSPFPTGANFAVFAATALSPDYYRTNYNFTMPSPSHLDLQLQSFKKVLARIAPGDATKSLLGESLVVMGEIGGNDYNFWFFALDSRDTPSQYMPAVVGRIGAAVQEVVNLGARTVLVPGNFPIGCVPQYLSMFQSSSSNASSDYDQYGCLVWFNDFSQKHNQLLRQEVGRLRSQNPGVQIIFADYFGAAMQFVQNPKNYGIDDPLVACCGGDGRYHTGKGCDKSATLWGNPATFASWDGIHMTEKAYSIIADGVLNGPFADTPLLKTC

SEQ ID NO: 18348 - protein, 594 aa, Zea mays
  VARIANT 24: note = Ancestral polymorphism is A, Derived polymorphism is D
MPAPLILPTVARELAELLVALSAARALPKGQQLHGHLLKAGHVPATASSHALLAHHLLTFYARCALPDLSLRAFLDLPAPPLPAAWSSLISSFAQNGLAAAAFDTFRRMLAAGVPATDRSIPLAAKAVAAAETLSRPPFSPHALHGLAAKTPFAGDVFVGSAIVDMYAKCGHLADARRLFDDMPERNVVSWSALICGYADAGMHPAAMGIFRLALEEAVPVNDYTVSSIIRVCAAATLFELGAQVHARATKTALDASPFVSSSLVSVYSKCGLVECAYRVFNEAPEKNLGIWNAVLIASAQHGHTAAAFERFMEMQKAGFQPNHITFLCLLTACSYAGLVDEGKRYFSIMKDYGIEPQAEHYASMVDLLGRVGLIKEALDLIESMPMEPPESVWGALLMSCRIFKDADTAAIAAKRLFETGSRSSGAHMLLSSTYAAAGRHIDAALARKAMRDAGVRKETGLSWLEAAGEVHTFASNCRRHQRSEEIYKVLENVGEKMEAAGYVADTSAVVKDVDGDEKRATVRYHSERLAIGLGLLIVPHGVPIRVMKNLRVCDDCHNAIKYLTKCTGRVVVLRDNRRFHRFEGGVCSCGDFW

SEQ ID NO: 18349 - protein, 430 aa, Zea mays
  VARIANT 3: note = Ancestral polymorphism is R, Derived polymorphism is L
MHRSFLLVCALVATALSTDTTVAAAQSQSQSQSQRSWAELSGRDNWDGLLDPLDGDLRRAVIRYGELAQATSDAFIGDPASPYAGASRYAPGAFLRRAQAPDPDAYNVTRFLYATSSARVPGQFITRPAPPGAWSAESNWMGYVAVATDAGVARLGRRDIVVAWRGTKRAVEWANDLDITLVPAAGVVGPGPGWSQPAVHRGFLSVYASRNSTSRFNKQSAREQVLAEIRRLLDAYKGENCSITLTGHSLGAALSTLTAIDIVANGLNVRGPNNDTVPVAAIVFGSPRVGDDQFKKAFDSTPGARLLRVRNAPDVVPTVLPNAFYKDVGVELLLDTRKSPHLKRPGPGPAAWHNLECYLHGVAGTQGAGDAAGFSLEVDRDVALVNKEVDALSDDYPVPAAWWVEGNKGMTRDASGRWVLQDHEEGNLAM

SEQ ID NO: 18350 - protein, 137 aa, Zea mays
  VARIANT 54..137: note = Derived polymorphism lacks residues 54 to 137
  VARIANT 47..137: note = Derived polymorphism lacks residues 47 to 137
  VARIANT 42: note = Ancestral polymorphism is T, Derived polymorphism is I
MTKQPVKVYKWDMDGTLILLKSLLVGSYARDFEGLKDCEKSTQTRKRWENLILELCDEHFFYEEVTECRSKRDSPSLFSHARSIMYALKEKKIDMRPVYGGWEQHLGLEHTATTPKRSYLGNNQNRHSFEKPVRIYN

SEQ ID NO: 18351 - protein, 157 aa, Zea mays
  VARIANT 2: note = Ancestral polymorphism is A, Derived polymorphism is T
  VARIANT 11: note = Ancestral polymorphism is C, Derived polymorphism is Y
  VARIANT 88: note = Ancestral polymorphism is A, Derived polymorphism is V
  VARIANT 95: note = Ancestral polymorphism is R, Derived polymorphism is T
  VARIANT 103: note = Ancestral polymorphism is R, Derived polymorphism is H
  VARIANT 105: note = Ancestral polymorphism is D, Derived polymorphism is N
MAVWVRGLGVCVLLDPVDTDSLRPSVNIIFACRRREKQQPPPGHRLARMFRPSSLLCSTCNNTDVASSSYYSSPAGDDQGSSSRALLVMNGAIDRDLFVASLRRDLSTEPSQSPLLSTTSAMVVSTTEEKVHRGFVVVKRSRDPYSNFQSSMVAMIV

SEQ ID NO: 18352 - protein, 1499 aa, Zea mays
  VARIANT 899..1499: note = Derived polymorphism lacks residues 899 to 1499
  VARIANT 912..1499: note = Derived polymorphism lacks residues 912 to 1499
MEMGSELSKTEFGDQGEDSNILSSRLKEISTPDRPATLRFLAGLSRPIRPAHFSLLFASFLTVAVAVAALLVQISPTLPRRHQTSTTSLLPPLCSSPDLQTPDLCSCPRLPLASDNPAAARGGRGEMLRLRAFRPTSDKVVKIQLHPTHPWLVTADANDRVSVWNWEHRQVIYELKAGGVDERRLVGAKLEKLAEGDDSKGKPTEAIRGGSVKQVSFYDDDVRFWQHWRNCSAAAEAPTAVNQQSSMFSAPAPSTRGRHFVVICCENKVIFLDLVTMRGRDVPKQELDNRSLLCMEFLSRSSSSDAPLVAFGSSDGVIRVLSMLTWKLVRRYTGGHKGAIACLMTYMSAAGEVHLVSGGNDGLLILWSADHIHDSRELVPKISMKAHDGGVVAVELSRVMGSAPQLITIGADKTLAIWDTVTFKEIRRIKPVPKLACHSVASWCHPRAPNLDILTCVKDSHIWAIEHPTYSALTRPLCELSSLVPPQVLAQHKKLRVYCMVAHPLQPHLVATGTNIGVILSEFDPRALPAIAPLPTPTGSKEHSAVYIVERELKLLNFQLSNTANPSLGNAGVASDAGRSRNDSLEQLIVNQSKKHISTPAPHDSYSVLSVSSSGKYVAIVWPDIPSFAVCKASDWSVVDSGTGKLFAWDTCRDRYALVESALAPRMPLVVKGGSSKKAKEAAAAAAQAAAAAASAASAATVQVRILLDDGTAHVLQRSIDGRSEPVTKTLLSSVMAVIFQVIGLHGGALLGVTYRTSRRISPLTATAISTVQSMPLSGFGGSGSSFASDDPWETYQPVSGLLAQPEWTAWDQTVEYCAFAYQQYIVISSLRPQFRYLGDVSIPFATGAVWHRRQLFVATPTTIECVFVDAGVADIDIETKRRKEEMKAREAQSRAVEEHGDLALITVEAPQVTVSEKVPLRPPMLQVVRLASFQHAPSIPPFIVPKQSKFDGDDSVFQKELDDRRYAEVAVAGGGVSVAVTRFPPEQKRPIGPLVVVGVRDGVLWLVDRYMCAHALSLSHPGIRCRCLAAYGDPVSAVKWATRLGREHHDDLAQFMLGMGYATEALHLPGISKRLEFDLAMQSNDLKRALACLLTMSNSRDVGQETAAADATDVTQILNLAVAKQAKQESLADAVQGIVKFVKEFFDLIDAADATGQSDIAREVLKRLAAAASVKGALHGQMLRGLALRLANHGELTRLSGLVSNLITAGHGREAAFAAAVLGDNALMEKAWQDTGMLAEAVLHAQAHGRPSLRNLVITWNKMLQKELDHTPTVKTDAAAAFLASLEDPKLTSLGETEKKPPIEILPPGMPPLSAPPIVIKKSGTKPGLPNAVKASNGPIGAPMVQGAPMAQGTPGAQGIPMNQVTPSQGSDEAKPLEATVVDAAPTTSEGTAAPAAAEGTAAPSSEEAKAAPGSEGGTSHPINEEATAVAVSDAPGSPDAAAAAALAPAADTSSSDAPAVTPSEVTVSPPSTDAPELTDKPSPTEASLPPPPSVSGV

SEQ ID NO: 18353 - protein, 253 aa, Zea mays
  VARIANT 225: note = Ancestral polymorphism is S, Derived polymorphism is F
MEPAAEDTTSAMPNSWETADIDAHMSRLILSACRVSSPLDLAFSMKKTVQDNNLLSSETCVHFLLKLLNPPVNVVDAKAPSIEDILSKVEEIFLSCKEIKPADRDYKRTTRPELCSKWLALLTMEKACLSVVALEDTSDMVLELGGNFKETLRQLGGLDDIFNVMVNCHSELEIEGCSKVTLMGILAFFLNCNPKFKSLSLSKCIEIKDICSAPAQLPECKSLQSLAIKDCSGFTDTNLPMLACSALSWRTSI

SEQ ID NO: 18354 - protein, 239 aa, Zea mays
  VARIANT 82..239: note = Derived polymorphism lacks residues 82 to 239
  VARIANT 116: note = Ancestral polymorphism is V, Derived polymorphism is L
  VARIANT 119: note = Ancestral polymorphism is V, Derived polymorphism is I
  VARIANT 225: note = Ancestral polymorphism is F, Derived polymorphism is C
MREILHIQGGQCGNQIGSKFWEVVCDEHGIDPTGRYVGTSDLQLERVNVYYNEASCGRFVPRAVLMDLEPGTMDSVRTGPYGQIFRPDNFVFGQSGAGNNWAKGHYTEGAELIDSVLDVVRKEAENCDCLQGFQVCHSLGGGTGSGMGTLLISKIREEYPDRMMLTFSVFPSPKVSDTVVEPYNATLSVHQLVENADECMVLDNEALYDICFRTLKLTTPSCESFILMFNFPLLKLCYL

SEQ ID NO: 18355 - protein, 412 aa, Zea mays
  VARIANT 124: note = Ancestral polymorphism is P, Derived polymorphism is L
MAFEKIKVSNPIVEMDGDEMTRVFWQSIKDKLILPFLDLDIKYYDLGILHREATDDKVTVEAAEATLKYNVAIKCATITPDETRVKEFNLKHMWKSPNGTIRNIINGTVFREPIICKNVPRLVPGWTKPICIGRHAFGDQYRATDAVLKGPGKLKLVFEGKEEQIDLEVFNFTGAGGVALSMYNTDESIRAFAEASMTTAYEKKWPLYLSTKNTILKKYDGRFKDIFQEVYEADWKSKFEAAGIWYEHRLIDDMVAYALKSEGGYVWACKNYDGDVQSDFLAQGFGSLGLMTSVLVCPDGKTIEAEAAHGTVTRHFRVHQKGGETSTNSIASIFAWTRGLAHRAKLDDNARLLDFALKLEAACVETVESGKMTKDLAILVHGSSSVTRSHYLNTEEFIDAVATELRSRLGAN

SEQ ID NO: 18356 - protein, 1038 aa, Zea mays
  VARIANT 111..1038: note = Derived polymorphism lacks residues 111 to 1038
MIFKRSQRSEILAPRRCNAADSGGEDEGGGGPRPRKRRRGDEFFPVDLLGDVPASSIPYAAFGLRWSEAPEAPPEAAQPPPAARPPVVRSSRGRTLVLPSRFNDSVLTDPWKKEKPARPPPPVKTEHLARRNELLHKKGANFDSSVALSEVDDDDEEEAMVERYRARRSFGASRKHLASWSTLTSVHDEPYSNHHRKEVKLRHYYEEDEEEEEEKEDIFHCTEELVYGDIVWAKLGKRQPMWPGVVVDPTQQAAADAMPPQPRGVAVLCVMLFGWRTEFSGEKKYVWVRQGLIFPFSDYMNRFQGQTELSSCKPADFRRAVEEAFLADQGFSEVVVHCSTKGQSVVCHSFPDDLHEVTGSNELEYQPQIKARRIQQCRRVLQCESCGNCFPNKDTNKMVYVMEQLACRLCARILALKKYCGICLKNLQHKYGGRRVCCHGCESWVHAECDENCSNLKDLQDKKYHCPYCRVKMNSTLPGKNTKISDVRKDSSAQKGSKPDKVALVCFDMEGTYEPDLELISCHCGPCKGQKFLFNEWERHAGCRSKNWRSSIKLKGSLMPFGKWIDRHQPGVCPTNPPKRSSQKMKKQKLIDLLNDPYDPVNVKWTTERCAVCRWVEDWDYNKIVICNRCQIAVHQECYGVRGKQDFTSWVCRACEKPEQKRECCLCPVKGGALKPTNVDNLWVHVTCAWFQSQVAFASDELMEPAIGILNIQPLLFMKMCVICKQIHGSCTQCYRCSTYYHAICASRAGYRMELHCLEKNGRQTTKKISYCAQHRSPNPDNVLIIQTPAGTFSSKKLVHSNGKVAASRLIRKDIPLDLPSEVKISENLSAARCRVYVRKDLKRSREGTIVHHVRGPCQHRWEEIDNLNPPREERDPESFCTFKERLCYLQKTEHGRVCFGRSGIHRWGLFARRDIQEGEMVLEYRGEQVRRSVADLREEKYRVQGKDCYLFKISEEVVVDATDKGNVARLINHSCTPNCYARIMSVGHDESRIVLIAKKKVCAGDELTYDYLFDPDEADERKVPCLCQTANCRKFMN

SEQ ID NO: 18357 - protein, 741 aa, Zea mays
  VARIANT 188..741: note = Derived polymorphism lacks residues 188 to 741
  VARIANT 438: note = Ancestral polymorphism is P, Derived polymorphism is S
MAANGEDFRGPLLLGARDDGAAWWGRDDAGPPRGRRSSSRPWTALAIAAALLALAGVVFLLSSSSYGGRPGPGPGPGASRAAAAARRSPQEVESAVGAAAADDARCSEVAAAALRAGGHAVDAAVAAALCLGVVHPMSSGMGGGAFVVVRDAAASGQAVAFDAREAAPAAATPIAEPAAAALRVCLCWCQLQDMYAADPAAKYRGALAAGVPGELAGLHAAWSRYGRLPWRDLVAPAIRLARDGYEVVPYLARALQECEGDVLADPGLRAVFAPGGRRVLAAGETCRNPALAAALERVAEEGAAALYGGAVGEALVRDVRAAGGVLTVDDLRGYRVEVGAALRADAMGFTFLGMPPPSSGTLGMALILNILQGYSSLEFLKELLGIHRVIESIKHMLAIRMDLGDPDFVDVTSDVAEMLSTTFADKVRQRIVDNTTFPPGYYFPKYVCLIWRCGFYRSQPCSQRASLIPVLVIGGNGIRWSQLDDHGTSHLCVVDGDRNAVAMTTTVNAYFGAKVLSPSTGIVLNDEMDDFSVPAKRTPDRLPPAPANFIAPGKRPLSSMTPLIILKVSLFYSPRAVWLALHEPDVGRLSLTARARTSRSVPKLKAVELCAQDGELAGVLGGSGGTNIIATVVQVFVNHFIVGMDPLAAVQHPRVYHKLIPNVVTYENQTVGDGEVIALGGAARAFLEERGHRLRSTDSGAVCQFIVHELAEPPAAPGHGVFRGRLTAVSDPRKGGSPAGL

SEQ ID NO: 18358 - protein, 394 aa, Zea mays
  VARIANT 318: note = Ancestral polymorphism is W, Derived polymorphism is C
MNSSEASTQDRVAPALEATEKILAAVARLPGRRMLELRRLGRAAPSAGAETEAAKRGRSVSDDTSAGSSRESSAKVAPEPEPQGGGAPAVAPGWPRPVSHGAMSVIGRRREMEDAVAVAAPFPAGVEFFAVYDGHGGSRVADACRERLHVVLAEEVAARLHLVRNGGEDEEGDGARWREAMEACFARVDGEVAVVESESNNVGHAVTVGSTAVVVVVGPRHIVVANCGDSRAVLSRGGVPVPLSSDHKPDRPDELERVESAGGRVINWMGYRVLGVLATSRSIGDYYMKPFISAEPEVTVTERTHRDEFIILASDGLWDVMSNEVACRVAKSCLCGRAASKCPDTIHGSSASDAAAVLVEFAMSRGSTDNISVVVVELKRLKRWKGGSRQNGRT

SEQ ID NO: 18359 - protein, 327 aa, Zea mays
  VARIANT 42: note = Ancestral polymorphism is D, Derived polymorphism is N
  VARIANT 38: note = Ancestral polymorphism is G, Derived polymorphism is A
  VARIANT 37: note = Ancestral polymorphism is G, Derived polymorphism is D
  VARIANT 30: note = Ancestral polymorphism is A, Derived polymorphism is T
  VARIANT 29: note = Ancestral polymorphism is M, Derived polymorphism is I
  VARIANT 11: note = Ancestral polymorphism is L, Derived polymorphism is P
MEGVPEDKCTLIAELVRVLEMARQLETYMAVQQQQGDAAGGDQRCRALVSTMRACIDRAVSCCAEGRPDSPPSGGDGSPRSGVSDQAGGEFRGRGNAAGQCKKRKTLPKWSSQVRVSAVQDVSPLDDGLSWRKYGQKDILGAKYPRSYFRCTHRHTQSCQASKHVQRTDGDPLLFDVVYHGSHTCAQAQGAAARPVNQPAQQQTDTEQTTSPGFQAGPAVLPFSLRPASNKPPGAHDAGDGATSSRFIATGCTVTASPFVSPATSECRIVSGGYALGGGVTMAGVRNVPDVELAATTNSLMAMGQMDFMFPLDAASFLELESPASYC

SEQ ID NO: 18360 - protein, 72 aa, Zea mays
  VARIANT 18: note = Ancestral polymorphism is M, Derived polymorphism is T
  VARIANT 27: note = Ancestral polymorphism is A, Derived polymorphism is V
MAPISGATAVLVMAVVATLAAAANALAPAPAPATSDGTSVDQGIAYVLMLVALVLTYLIHPLDASSAYKQLF

SEQ ID NO: 18361 - protein, 554 aa, Zea mays
  VARIANT 27: note = Ancestral polymorphism is A, Derived polymorphism is V
MAAPGGSNLAVLDALDSARTQMYHMKAIVIAGMGFFTDAYDLFCISTVSKLLGRIYYPDDNLYIDKPKPGTLPVSVNNMVTGVALVGTLMGQLVFGYFGDKLGRKRVYGITLVLMAACAIGSGLSFGSSAHAVIGTLCFFRFWLGFGIGGDYPLSATIMSEYSNKKTRGAFIAAVFAMQGVGIIFAGLVSMIVSGILLHYHPAPAWKENHDRSWQDQMPAADYMWRIVLMIGAFPALATFYWRMKMPETARYTALIEGNAKQAANDMQKVMDVEIQAEQDKLARYKAANDYPLLSREFARRHGLHLIGTATTWFLLDIAFYSQNLTQKDIFPAIKLTSPVDDINALKEVFEISKAMFLVALLGTFPGYWVTVALIDKMGRYLIQLIGFFMMSVFMLLMGVMYNDLKNKHTTLFALFYALTFFFANFGPNSTTFVLPAELFPTRVRSTCHAISAASGKAGAIVAAFGVQSLTLKGDVGHIKKALIILSVTNILGFFFTFLVPETMGRSLEEISGEDGNVENGPGAPAGVAMGVADVSKDDKMPVSSTEWQSSMHA

SEQ ID NO: 18362 - protein, 162 aa, Zea mays
  VARIANT 99: note = Ancestral polymorphism is I, Derived polymorphism is T
MASKRIQKELKDLQKDPPTSCSAGPVGEDIFHWQATIMGPSDSPYSGGVFLVTIHFPPDYPFKPPKVAFRTKVFHPNINSNGSICLDILKDQWSPALTISKVLLSICSLLTGPRGTPCREGVPYLALWGSAGIAAAATGRVSVYSILCCIMMHQIGFAVQCA

SEQ ID NO: 18363 - protein, 48 aa, Zea mays
  VARIANT 46: note = Ancestral polymorphism is R, Derived polymorphism is C
  VARIANT 2: note = Ancestral polymorphism is D, Derived polymorphism is E
MDKGHKKCLILWLRIQDWANFIFNFVKDNGLEVMTIEEIRSGIDTRGT

SEQ ID NO: 18364 - protein, 277 aa, Zea mays
  VARIANT 186: note = Ancestral polymorphism is P, Derived polymorphism is L
  VARIANT 26: note = Ancestral polymorphism is G, Derived polymorphism is A
MWWMMMSGEELVVTLAPVAVYWVYAGIYEALLARTAVLDRYRLHSRRDEETKNVASRKDVVKGVLLQQGIQVSISVAILKMKGHGAAAADATATNDDLAAAVAVAEPFLLVAAARFGVAMLVLDAWQYFTHRLMHSVPYMYRQFHSCHHRVAAPYAYAAQYGHPVDGVLTETMSGVAAYLASGMPPRVATAFFVFATVKGVDDHCGVAAPWNPFHVVFRNNTVYHDVHHQRGGGRHNFSQPFFVIWDRLLGTHASYVLRHRNDGGLEVKAFEDRRMR

SEQ ID NO: 18365 - protein, 351 aa, Zea mays
  VARIANT 124..351: note = Derived polymorphism lacks residues 124 to 351
  VARIANT 83..351: note = Derived polymorphism lacks residues 83 to 351
  VARIANT 27: note = Ancestral polymorphism is S, Derived polymorphism is L
  VARIANT 20: note = Ancestral polymorphism is S, Derived polymorphism is L
  VARIANT 18: note = Ancestral polymorphism is S, Derived polymorphism is C
  VARIANT 2: note = Ancestral polymorphism is K, Derived polymorphism is Q
MQHVILCLQISLLLSSFSYSMQAQYTSIFSFGDSYTDTGNKIILYGPAAADLWINKPPFGMTFFGHPAGRLSDGRLVIDFIAQALGLPLLPPSLAKDQSFKQGANFAVAGATALKTSTTSPALYPQLAVAGGAVPPPNNISLADELGWFDAMKPALCGSPQACKDYFAKALFVVGELGWNDYGVMVKLINDGATAVVVSGISPMGCAPGNLVLLASQDPADYETDTGCLKGMNELSRDHNAQLSQALTTLGGRYPGALVTYADLYGPVIAFAAAPARFGFDSVLRDCCGGGGGKYNFNLSAACGMPGVAACPNPSAYVNWDGVHLTEAAYHRVADGWLRGPYANPPILATA

SEQ ID NO: 18366 - protein, 535 aa, Zea mays
  VARIANT 105: note = Ancestral polymorphism is A, Derived polymorphism is V
  VARIANT 121: note = Ancestral polymorphism is R, Derived polymorphism is L
  VARIANT 138: note = Ancestral polymorphism is P, Derived polymorphism is S
  VARIANT 154: note = Ancestral polymorphism is L, Derived polymorphism is F
  VARIANT 162: note = Ancestral polymorphism is H, Derived polymorphism is Y
MPPPLLEFAILATACRFSKPLTVLRRLGVLGPPTVRRNAAEAFVPSPFRQVVVQSGKLLGTPRFCHTTAGMSECLPDVYASQVLKVLKSTSADNTDLSGALHQFAVHMDEDIILMVLQKQRSNWQVALAFFNWAATLPGYAHGSRAYTEMLDILGRMKKVRHMRQLFDEIPEERRQVVVTNKMFAVLLNRYAGAHKVQEAIEVFYLRKDYGFELDLVGFQILLMSLCRYKHVEEAEALFREKKDEFPHVTKSWNIILNGWCVKGSLRDAQRIWNDIIASKVERDLFTFGTFINALAKNGRISAAVKLFKQMWEKGINPDVAICNCIIDQLCFKKKIPEALEIFGEMNDRLCQADVATYNTLIKYMCKIKRMEKVYELLDDMEAKGCPPNNRTYSYILKTTEKPKDVIALMQRMERTGCKLDSDIYNLILNLYIKWKYEKGMQQIWDEMERRGSGPDQRSFTIMVHGLHSQGKLDEALQYYTTMKSRGMIPEPRTKILVKAMHMKKDGAATEDDSASMAGKHLKLDHRSRLFNVHR

SEQ ID NO: 18367 - protein, 1052 aa, Zea mays
  VARIANT 7: note = Ancestral polymorphism is S, Derived polymorphism is R
MALRAMSLLLPAATFVMVAMASWGAHGGASDSDDASSLLAFKAELAGSGSGVLASWNGTAGVCRWEGVACSGGGQVVSLSLPSYGLAGALSPAIGNLTSLRTLNLSSNWFRGEVPAAIGRLARLQALDLSYNVFSGTLPANLSSCVSLQVLSLSSNQIHGSVPAELGSKLSSLRGLLLANNSLAGAIPGSLGNLSSLEYLDLTENQLDGPVPHELGGIGGLQSLYLFANSLSGVLPRSLYNLSSLKNFGVEYNMLSGTLPADIGDRFPSMETLSFSGNRFSGAIPPSVSNLSALTKLDLSGNGFIGHVPPALGKLQGLAVLNLGNNRLEANDSHGWEFITSLANCSQLQNLILGNNSFGGKLPASIANLSTALETLYLGDNRISGPIPSDIGNLVGLKLLEMANISISGEIPESIGRLKNLVELGLYNTSLSGLIPPSLGNLTQLNRLYAYYGNLEGPIPSSLGNLKNVFVFDLSTNALNGSIPRGVLKLPRLSWYLDLSYNSLSGPLPVEVGGLANLNQLILSGNRLSSSIPDSIGNCISLDRLLLDHNSFEGTIPESLKNLKGLGLLNLTMNKLSGAIPDALAGIGNLQQLYLAHNNLSGPIPAVLQNLTLLSKLDLSFNDLQGEVPEGGVFANATALSIHGNDELCGGAPQLRLAPCSEAAAEKNARQVPRSVVVTLASLGALGCLGLVAALVLLVHKRCRRQRKASQPVSSAIDEQFGRVSYQALSNGTGGFSEAALLGQGSYGAVYKCTLHDHQAGNTITTAVKVFNARQSGSTRSFVAECEALRRVRHRCLMKIVTCCSSIDHQGQEFKALVFEFMPNGSLDDWLHPASGAHPLNNTLSLAQRLDIAVDVSDALEYLHNQCQPPIIHCDLKPSNILLAEDMSARVGDFGISKILSDDTSKALLNSISFTGLRGSIGYVPPEYGEGRSVSALGDVYSLGILLLEMFTGRSPTDGVFQGSLDLHRFAEAALPDRASEIADPSIWQHDEATAKDPADAAALRSRSEECLASAIRLGVSCSKQQPRERVAMRDAAVEMRAIRDAYLRVAS

SEQ ID NO: 18368 - protein, 217 aa, Zea mays
  VARIANT 111: note = Ancestral polymorphism is S, Derived polymorphism is L
  VARIANT 129: note = Ancestral polymorphism is P, Derived polymorphism is T
MEAPDEEAGLGLLHEGEQILEVALISAQGLKPPSSQRRRLQAYAVAWVDAGHKIQTQPDDTGGLDPVWHARLLFRVREASLADDSRAAVSVEIYAAAAGSWHLGGDSLVGLVRFLLGDHPPPVPPRRLPLYVRCRRAPHLRQGPRSPQRGHEPRRGAAVSGRLPCPPPLAGRLPQRSLRGAHPKSRAPRPQPRALDASTLPEASYAQEAADGGQRQR

SEQ ID NO: 18369 - protein, 202 aa, Zea mays
  VARIANT 194: note = Ancestral polymorphism is A, Derived polymorphism is T
MADPDVIEVTFGNDVINTTVTSSGQAVERWIAEILALHRPGSNGYSIIVGLDVEWRPSFGPHQNPVATLQLCVGHSCLIFQLLYADYVPGALAEFLGDRGIRFVGVGVEADAERLSDDHGLVVANAEDLRGRAAERMNRPDLRQAGLRALVQVVMGVNLVKPQRVTMSRWDASCLSYEQIKYACIDAFVSFEVARRLLGGAY

SEQ ID NO: 18370 - protein, 57 aa, Zea mays
  VARIANT 32: note = Ancestral polymorphism is S, Derived polymorphism is R
MSSSGGPWEKKLSFEIAVGINGRVWVNAPAASTVILVSNAIMRSESLSGIKQRAMVR

SEQ ID NO: 18371 - protein, 284 aa, Zea mays
  VARIANT 181: note = Ancestral polymorphism is D, Derived polymorphism is G
MGSRRYDIDTRRCGIHSRPTKSMYLDAQQIVSCQTRVGDHDVGSCAVKHHFPSPIVSWIEDLSSFGNASFNPVSEYVDEQARASVGQSSASSNLHDMQISVRLTAEFMELAKENTSNNLETCGILGASFRDGTYFVTMLIIPKQEGTAHSVFFLSFPNSVRLLVRRRYMPCYQSSHFILQGGFILILHKHAFYHRSTCILNTLTRLCYQRLLQLWSHPQIQPGKSYGIFRLTEPGGMDVLRECDESGFHTHRETTNGSPIYETCSKVHFNPNLRFEIVDLRSAQ

SEQ ID NO: 18372 - protein, 436 aa, Zea mays
  VARIANT 261: note = Ancestral polymorphism is L, Derived polymorphism is Q
MASTTLSSAFSLLSRPSTSPCPAVSLPRSSFPVPDSRRRRRAVTVASTATESPKVLELGDTIAGLTLEEARNLVDHLQERLGVTAAAFAPAAVVAAPGAGGGAAAEEEAPVEKTEFDVVIEEVPSSARIATIKVVRVLTSLALKEAKDLIEGLPKKLKEAVSKDEAEDAKKQLEEVGAKCECDMLKTASWLSTRQGDQGTTTTARASRPCPLLPAGAGAMTFAYDTDVVMDDGTIIKTTVTNSGDATKLFLREVRQTRKPLIVGLDTEWRVIRRQGRRPRNRMAVLQLCVGHRCLVFQIVAADYVPAALKAFLASPQHRFVGVVVDVDVERLRCDCNIVVNNTVDLRYAAADVLGRPHLRTAGLKILAREVMGVEIEKPKHLTCSEWDRPLSQAQVRYAAIDAFVSYEVGRLVLTREHAQDAAFTGAMTILPSQLP

SEQ ID NO: 18373 - protein, 200 aa, Zea mays
  VARIANT 6: note = Ancestral polymorphism is G, Derived polymorphism is A
  VARIANT 4: note = Ancestral polymorphism is A, Derived polymorphism is T
MLRAGARQLLAPGLRRLGLGTGAAGQVGPAAAAAGMRAYHERVVDHYNNPRNVGSFDKEDPNVGTGLVGAPACGDVMKLQIRVDEDSGKIVDACFKTFGCGSAIASSSVGMWQAALSATLASYSSGVHAAGCSAIKYHADNARELWQCEIAKHLSLPPVKLHCSMLAEDAIKAAVKDYEAKKAKMGQKSEDSPSEKAAEA

SEQ ID NO: 18374 - protein, 558 aa, Zea mays
  VARIANT 144..558: note = Derived polymorphism lacks residues 144 to 558
MNGAEEEEPPHVSSMPKTQDGVTKPSLGKEPIPGSELWTDGLICAFELVKSHRKPVQHKSWLATEQIQEKGPTMCTRKHSRRNGHQITEPKVDESIVLENPQQTDFSNDPSVLKDRPLYAGEILDHKWVPIGWNRIAELVLRVQSDSSWENELMEMSDSEDDYTVADLAAPYWQRPVGPTWWCHVTAGHPSIDAWLNSAHWMHPAIRIALRDESKLISDRMKYLLYEVPVRVAGGLLFELLGQSIGDPNHEEEDIPIVLRSWQAQNFLVTTMHVKGPSSNINVLGVTEVQELLLAGGSQTPRSVHEVIAHLVSRLSRWDDRLFRKYVFGEADEIELKFVNRRNHEDLNLVSIILNQEIRRLATQVIRVKWSLHAREEILIELLRHLRGNATRAILESIRKCTRDMLEEQEAVRGRLFTIQDVMQSTVRAWLQDRSLRVTHNLAIFGGGGMVLSIITGLFGINVDGIPGAQNTPYAFGLFAGLLFFVGIVLIGMGMLYLGLQNPVNSEKVKVRKLELQHLVSMFQHEAEQHGKVREGVSRHGASPSSSTASDEGYILIS

SEQ ID NO: 18375 - protein, 196 aa, Zea mays
  VARIANT 115: note = Ancestral polymorphism is H, Derived polymorphism is L
  VARIANT 13..196: note = Derived polymorphism lacks residues 13 to 196
MWIDKAHKFYEEENKGVHFVFMDVWNMVRNEAKWFSYNDHSNKRKEMDSSNPIVDEAKDLELPRPIGQKAAKKVAYDATDKVAKKGAKKAAYDATDKVSRLDELDRFEKIQNGCHANRMKVLEMQQKISNDKIEASKLSLQAAKDEKEARLLEKESKMLETYACLLKQDMSAMHDEIRAEHIAALKSLRKKLFPDS

SEQ ID NO: 18376 - protein, 577 aa, Zea mays
  VARIANT 8: note = Ancestral polymorphism is V, Derived polymorphism is A
  VARIANT 17: note = Ancestral polymorphism is K, Derived polymorphism is E
  VARIANT 61..577: note = Derived polymorphism lacks residues 61 to 577
  VARIANT 71..577: note = Derived polymorphism lacks residues 71 to 577
  VARIANT 117..577: note = Derived polymorphism lacks residues 117 to 577
  VARIANT 181..577: note = Derived polymorphism lacks residues 181 to 577
  VARIANT 232..577: note = Derived polymorphism lacks residues 232 to 577
  VARIANT 283..577: note = Derived polymorphism lacks residues 283 to 577
MSFDLFRVWGIWDLGFKEVLRVWDVLLFEGNRVMLFRTALAPMELYGLRMYTWFLLCFPSQSHHFGLTRWQAAALAALAGWVWAASFYDLTHRARALVQPWVTRQVHAETPAILRFQKLEHKMLDNFFSVLSCVVSVPFYTGFLPLLFWSGHDRLAGQMTLLMAFYDYLGNSVKDMVSAPRPCSLPIRRVTATEDEKENAMEYGLPSSHALNTVCLTGYIFVTLCPDIRRTWQSYSCCRQSKDVVKALKKRIGHKNPKVQLLALTEDGWTTRPHPCKRVAPYREALLLAEKHQNLETDSDRSAAVVADAPPQQEMVAANRTGQPQITGGAEAVKKALFGVSTIIYKHPSKENIHLETSIPDPTPSIIIPSELPVYPASNFYSAPGAAIPSVHPSLKSEHGVSRLHFLEKRDEETLPRRLIKLSQNNKVRSATELFDSMRASGLQPSAHACNSLLPCYVRRSPLANAMRIFEFMKAKGMATGHTYTMILKAVASNQGYVSALEMFNKIEEEEESKKIIDVIVYNTMIYVCGRAKEWMLVERLWRRLEQHSLNGTLLTYDLLVSIFVQCGQSELAIAAY

SEQ ID NO: 18377 - protein, 89 aa, Zea mays
  VARIANT 19..89: note = Derived polymorphism lacks residues 19 to 89
  VARIANT 12: note = Ancestral polymorphism is L, Derived polymorphism is M
  VARIANT 9: note = Ancestral polymorphism is W, Derived polymorphism is G
  VARIANT 5: note = Ancestral polymorphism is R, Derived polymorphism is H
MAGTRWGLWLGLVTAVWVQCISGNNYTFSNYSHALKTLMGLTQLQLNGLSVAKDVGKAFGLLARLASDRVPTWILLAVGSLELRSLALG

SEQ ID NO: 18378 - protein, 592 aa, Zea mays
  VARIANT 396..592: note = Derived polymorphism lacks residues 396 to 592
MQAPEQQQQHQQRQRKGSSEMDFFSEYGDANRYKIQEVIGKGSYGVVCSAVDQHTGDKVAIKKIHNIFEHLSDAARILREIKLLRLLRHPDIVEIKHIMLPPSRRDFKDIYVVFELMDTDLHQVIKANDDLTREHHQFFLYQMLRALKYIHTANVYHRDLKPKNILANANCKLKICDFGLARVAFNDTPTTVFWTDYVATRWYRAPELCGSFFSKYSPAIDIWSIGCIFAEVLTGKPLFPGKNVVHQLDLMTDLLGTPSLDTVSRIRNEKARRYLNSMRKKQPVSFPGRFPKADPAALKLLQRLLAFDPKDRPTPEEASALADPYFKGLAKVEREPSCQPITKMEFEFERRKVTKEDVKELIFREILEYHPQLLKDYMNGTEKTNFIYPSAVDNFRRQFANLEENGGKSVAHTASSDRKHVSLPRTTTVHSNPIPPNGTSQVPRKIPTGGRPGRVVGSVIPFENATAVDPYSQRRVVRNPVLPPATSNLSAYTYHRKSDNSDGELQQELEKDRMKYQPAQRFMDSKLVSHMSPDLRSSYYIPKAFPKADAADRAALHSNMIHGIAPFSGIAAAGGGGYNKVNGVQYGVSRIY

SEQ ID NO: 18379 - protein, 111 aa, Zea mays
  VARIANT 1: note = Ancestral polymorphism is M, Derived polymorphism is T
  VARIANT 24: note = Ancestral polymorphism is P, Derived polymorphism is L
  VARIANT 25..111: note = Derived polymorphism lacks residues 25 to 111
  VARIANT 62: note = Ancestral polymorphism is S, Derived polymorphism is L
  VARIANT 63: note = Ancestral polymorphism is V, Derived polymorphism is F
MKARSQIAPKPLKAVAMAPRPSGPKRKPRPKPAGKGDPRAPKKPPTTFFYFMYHFHLGLRLLVNVIAELNIWHWEDFRKVYKQEKTSVKSMQEIGKACGEKWNTMAFEESG

SEQ ID NO: 18380 - protein, 131 aa, Zea mays
  VARIANT 81..131: note = Derived polymorphism lacks residues 81 to 131
  VARIANT 79: note = Ancestral polymorphism is R, Derived polymorphism is C
  VARIANT 52..131: note = Derived polymorphism lacks residues 52 to 131
  VARIANT 11..131: note = Derived polymorphism lacks residues 11 to 131
  VARIANT 3: note = Ancestral polymorphism is S, Derived polymorphism is L
MPSAFFAWRSQHGTSLVGILFSALGVLGVGREVARRDFRPTSLGHREARVPWDRLTWSSARFALSYLAPTPGSSRACRRTRCSAGRCGQILTRLCKDKHSVWFNTHVEVERLSLHAVPAKEGLAAEWYASQ

SEQ ID NO: 18381 - protein, 402 aa, Zea mays
  VARIANT 365: note = Ancestral polymorphism is A, Derived polymorphism is V
  VARIANT 364: note = Ancestral polymorphism is T, Derived polymorphism is I
  VARIANT 235: note = Ancestral polymorphism is R, Derived polymorphism is W
  VARIANT 202: note = Ancestral polymorphism is T, Derived polymorphism is I
  VARIANT 189: note = Ancestral polymorphism is P, Derived polymorphism is T
MSSLESRVGPAASRDPSYPTKPVLGFCRRLPSRDGSPLPPAAPSCLAPTAAPGRGRRAIGLREAKHKRRGAPRSEVAAALRRSAVGVLRGDRDAEEQQSSPSGEERFDWLDKWYPLAPVCDLDPHVPHGKTVLGLSIVDWYDRGAGEGRVFDDACLHCLASLSEGRIDDRGRLQGLTLEYRDVLQRKRPPLIPEIDDPDFVTVYGIRDLPYGYDILVENLMDPAHAPYAHKGIMRGIRKKEDPGRFSWTLLMSRTVPKFTGKFSFGEPYMDVRTPQCRRTKELSINQLLKFRDRRYEYKGLNETWKGKLAEAKASGNSMKIQKAQDMLVLYDSLQLAHKCILNFFMDMLCANIERPSKQDIYNTAMILHASKEEGILIKKRYAVFNEDGTLAELKGFEIKRR

SEQ ID NO: 18382 - protein, 331 aa, Zea mays
  VARIANT 44: note = Ancestral polymorphism is G, Derived polymorphism is V
MSGDTAPHVVEDFFGAIQLLSDGTVVRGDEAALLPPKPFPDVPGVQWKDAVYDAARGLKVRVYRPTADAGDSKLPVLVHFHGGGYCVGSYDELGGADYLRRRLAADLPALVLSVQYRLAPEHRLPAAIEDGATFLAWLRGQAALAGAGGAGAGVEQWLAESADFARTFLSGVSAGANLAHHLAVRAGSGQVDLAPARLAGLVLLSLFLGGVERTATESAPPDGVSLTVAMSDQLWRMALPVGASMDHPLANPFGPGSPGLEPVALPPVLVEAPGVDVLRDRVLLYAARLREMGKDVELAEFPGEQHGFSVLRWGQANEELMQILKRFLHRK

SEQ ID NO: 18383 - protein, 340 aa, Zea mays
  VARIANT 303: note = Ancestral polymorphism is D, Derived polymorphism is Y
MSSAPAPRVVEDYRGVIQLLSDGTVVRSDPAVLRPSGEHFPDVPGVQWEDVVYDAAHGLSLRVYRPAAATATAGDAAREEEKKKKLPVLMYFHSGGFCLGTFSQPNFHAGSLRLASELPAVVISADYRLGPEHRLPAAIDDAAAALSWLREQRHPWLAESADFTRVFVAGESSGANMSHHVAVRHGSSGGQLALALAPLRVAGYLLLTPFFGGAVRTAAEEASPPPGAPFTPEMADKMWRLSLPAGATMDHPATNPFGPDSRALGPVAFPRVLVVSAGRDFLHERVLRYAARLREMGKPVEVYVLEGQEHAFFSRQPWSEGTDELIRVVRRFVYTENGVE

SEQ ID NO: 18384 - protein, 146 aa, Zea mays
  VARIANT 59..146: note = Derived polymorphism lacks residues 59 to 146
  VARIANT 33: note = Ancestral polymorphism is M, Derived polymorphism is I
  VARIANT 14: note = Ancestral polymorphism is P, Derived polymorphism is A
MGLSISYPPDDYLPAVEDDMGRLFIRSLSFDDMEAAADSPSYSPSALPPAFGSRKLIMEGSLGFFERREADSVQMQNVLSIRNPKPPDREACSSVSPGHENLHNSIDEAIMLKVLIKIISDMYHFHAHLWWEIEIQCGLNHPNVPR

SEQ ID NO: 18385 - protein, 183 aa, Zea mays
  VARIANT 110: note = Ancestral polymorphism is R, Derived polymorphism is I
MGGQMPDADGKARSADSSSSYGYPPSAPPQHQYGTFGPPSGASGEFPQPAVGFPQPAAPPGMQHYPQPPPASYAVYPPPQQPYSAAAPYYAQGYQIAQGYIPVVEGRPVRIRPLPCCGLGMGWFLFIIGFFFAAIPWYLGAFVLICVRVRDYREKPGYVACTIAASLAAIAVLLGATKGAEVW

SEQ ID NO: 18386 - protein, 170 aa, Zea mays
  VARIANT 46: note = Ancestral polymorphism is S, Derived polymorphism is R
  VARIANT 122: note = Ancestral polymorphism is D, Derived polymorphism is G
MASSFNNKTSHWPSMFRSKHAAEPWQAQPDISSSPPSLLSGGGSSSTTTIGRCLKHPLSGYSGLAVPGSGSGAVGVSTGGAPPVAVAAAPTAAQEGVVVALCITDSVTGKSVAHNVAAARLDVRAQFGEAAVLLRAVGDRGGLDLVPVPVDALGCTVEPLQHGAFYYVLV

SEQ ID NO: 18387 - protein, 75 aa, Zea mays
  VARIANT 27: note = Ancestral polymorphism is H, Derived polymorphism is R
  VARIANT 32: note = Ancestral polymorphism is M, Derived polymorphism is V
MLVGNKADLRHLRAVSPEDAAAFAQRHGTFSMETSALDATNVERAFAEVLRQIYHVMGHKFFTISHCFTHSAWYL

SEQ ID NO: 18388 - protein, 530 aa, Zea mays
  VARIANT 271..530: note = Derived polymorphism lacks residues 271 to 530
MAFRNMVCTPQVINLTSDSERGQAQGGNGSEISEQGAQHAVRVVGNAMNIGLSGVRSYYDMSINHHHQSVHNPPPNLGVDSGFVFASNMYNPCMSSTSMNRHVSHAQSFGSGNQVLPQNQVPGTMDESSRNDSIGESAREHIKRKNAAVAGSYHFVNGFASSSSSSHAPQNPMLGPWDPSFESTVSSNVAPFNPSEYHGHNNSWPSLEGSSITGSNGFNSMVVHPDSVQRGNYTFPPTHISHSWMSHATNGIADGVPQWEYANATANIQGRFAHSGATEIANVGFHEYQNGPSTICRGPVPYFHQHAMHGMQALDPTQMQVPYQQCHSNGFLHGGINYPGNRLQLGPRNPVLFTSSERAFGPPQHPFLANPVNHRNIRILPPELIWLTFLSQQHATIMDFSRLYEVSNTVDEHRDMRLDIDSMTYEELLALEEQIGDVNTGLTKSHIVDKLRTSLYVPGISSMSDQPSKSSLENDACIICQEEYQARDCVGTLDCGHRYHAECVKQWLMVKNLCPICKTTALSANRRQGQ

SEQ ID NO: 18389 - protein, 159 aa, Zea mays
  VARIANT 70: note = Ancestral polymorphism is P, Derived polymorphism is S
  VARIANT 69: note = Ancestral polymorphism is S, Derived polymorphism is R
  VARIANT 50: note = Ancestral polymorphism is G, Derived polymorphism is R
MYQAIPYSSARPWLMPAGEAAAVVAVKPEPEPAAAATVAEERARADAAGGTDDDGDGGRAEVGRAVAESPVLVVGRRGCCLSHVVKRLLQGLGVNPAVHEVADEAALAGVVPAGAEAAAAALPAVFVGGKLLGGLDRLMAVHISGELVPILKKAGALWL

SEQ ID NO: 18390 - protein, 183 aa, Zea mays
  VARIANT 12..183: note = Derived polymorphism lacks residues 12 to 183
MIIADIISFVFQVASIFVPIVITLSIVTFSAWFLCGWLGAYPKSWVAENSNCFVFSLMFAISVVVIACPCALGLATPTVVMVATGIGANHGVLVKGGDALERAQNVNYVVFDKTGKLTQGKAIVTAAKVFPGMDLGDFLTLVASAEASSEHPLAKAILDYALHFHFFGKLPSSKDGIEQRKDK

SEQ ID NO: 18391 - protein, 287 aa, Zea mays
  VARIANT 88: note = Ancestral polymorphism is P, Derived polymorphism is L
  VARIANT 72: note = Ancestral polymorphism is D, Derived polymorphism is V
MTWCNSFNDVRAVEDNLATAAAAKKQQLQASSHVNLIRTCPSCGHRAQYDEQVQQAAAIQDLPGLPAGVKFDPTDQELLEHLEGKARPDTRKLHPLVDEFIPTIEGENGICYTHPERLPGVGKDGLIRHFFHRPSKAYTTGTRKRRKVHTDEEGGETRWHKTGKTRPVFTGGKLSGYKKILVLYTNYGKQRKPEKTNWVMHQYHMGSDEEEKDGELVVSKVFYQTQPRQCGTVSSTARDAVPLAASATTGHHHHDGGNGGDDENSMLMKEVGIVDFYSRGGGGGGGR

SEQ ID NO: 18392 - protein, 208 aa, Zea mays
  VARIANT 25: note = Ancestral polymorphism is G, Derived polymorphism is R
  VARIANT 124: note = Ancestral polymorphism is P, Derived polymorphism is H
  VARIANT 135: note = Ancestral polymorphism is M, Derived polymorphism is T
  VARIANT 146..208: note = Derived polymorphism lacks residues 146 to 208
MVATHLDAELQHNERRPLLTNRADGNNNMSPMQKAIGQTYQSTAHLAKLLPSGTVLSFQILAPTLAKQGHCSDMNRMMTGGLVVLCALSCCVLSFTDSFRDEEGKVRFGFATPRGLWVIDGGAPLDPLGAAGFRMRFLDFVHAIVSAMIFVAIALFDQHVVSCFYPTPSEDTKQLLTALPVGIGIIGSMLFVSFPTTRHSIGSTLSSQ

SEQ ID NO: 18393 - protein, 199 aa, Zea mays
  VARIANT 53: note = Ancestral polymorphism is I, Derived polymorphism is V
  VARIANT 41: note = Ancestral polymorphism is I, Derived polymorphism is V
MANSNLPRRIIKETQRLLSEPAPGISASPSEENMRYFNVMILGPAQSPYEVVILECFQISIVESNQFFSKDATGNGRNAEMFALVYAHIGGVFKLELFLPEEYPMAAPKVRFLTKIYHPNIDKSRTSLLQLGRICLDILKDKWSPALQIRTVLLSIQALLSAPNPDDPLSDNIAKHWKANEVEAVETAKEWTRLYASGA

SEQ ID NO: 18394 - protein, 149 aa, Zea mays
  VARIANT 75: note = Ancestral polymorphism is L, Derived polymorphism is P
MDAEAGVAGIDQLPRRQYYMNLLLLAYQSFGVVYGDLSTSHLYVYKSTFFGKLNQYQDEEKVFGVLSLIFWTFTLIPLLKYVTIVLSADDNGEGRPFALYSLLCRHTKLSLLPNQQGADEELSSYYRNGFAPRNGSSPLLRRFLEKHKK

SEQ ID NO: 18395 - protein, 642 aa, Zea mays
  VARIANT 333..642: note = Derived polymorphism lacks residues 333 to 642
MAFSSARKNRQVYSNQPMKPRCSEFAYSIPRCQLNSRSRLIRHPTRYEVMEYLKVEERATGPAAHELEGTDRRVLCSIPRRHQPPKPPAARPFSRSWWARSTLRLPRPPPLPLSFALLSFQTPRRCRAHRRAPAHPTASPRILLQQFVALLLPLPSSTGVRRLGSMRTRHLYFTSLGMEVQVLDLSSDSEGEVSAHSPDHKRPSQQPGVDPNRRVGDNGSSAVDSLFEEAGAARPPRHPSDALNKGKEKVVDVESVESPKHGGESLGAAGRVLGAGSDPWSALVSKCKAGDSGNNGTECWDSWGDWGDQLTNSAPVARLGSERTGFHETYELRGTPQLHSDSSAFSDQWKGILGASPADPVNSLWCSRDTSMKDSEDETLSQRSVSVREISSCDYFLTEDSSSSWLSKVKGLNFPLPDEHQLRTRQIENDEMFARRLQEQLNQQQPGSQHSEAVVTLDYSSLNVDKTIAWTLHEQDAEHARFAAREVQSSSSQRDRSMAHLYSYGRHSPVQSFASWASNHTPISMSSRGGLQRNSNCPQAEQRNMLISQLTRGCFREDMDLQTRLAVLDSLSEAFRNCEDTHSPDSDDDDYEDQIALGVDSQQRGASDDQINSLPLSVIECIDRWLGMKIWCPVCKSNVFSQ

SEQ ID NO: 18396 - protein, 315 aa, Zea mays
  VARIANT 223: note = Ancestral polymorphism is M, Derived polymorphism is R
MDGKLPPPNPNLPYREDCWSEGETAALVDAWGSRYLDLNRGSLRQPQWREVADAVNSRPGASARGRPPRTDIQCKNRVDTLKKKYKAERARGGPSPWSFYGQLDILVGPTLNGTKKPSPPRAALPVFRRRQTPPRSPSPQSPPPLPVALPLHNYRRGSDLPSANFIHKAAAAAAAAAAAAESDSEDGYNNNEYDDDEGSQQSPSRSVSSRSGGAPAVGTKRKRRSGSGGFGELARAIETFADMYERMEAAKQRHAEEMERQRIKFLKDLELKRMRSFVDMQLQLSRAKHARKGDASSEMLMSLAALPFLSSSAYL

SEQ ID NO: 18397 - protein, 322 aa, Zea mays
  VARIANT 239..322: note = Derived polymorphism lacks residues 239 to 322
  VARIANT 223: note = Ancestral polymorphism is S, Derived polymorphism is F
  VARIANT 191: note = Ancestral polymorphism is K, Derived polymorphism is N
  VARIANT 146..322: note = Derived polymorphism lacks residues 146 to 322
MDETPTSSGQSEASSCEPNWWPPDFLEKIQSASIPRKHDVLGNQSSSSWKASQLLWSTGSYSGLIPNGFYSIIPDKKLKETFPTIPSLDDLQTLEADGLKADIIIVDTERDKKVFMLKQLSAALVKGLSSSPALVIKKIAGLVFDCFKRQIPDASPTRGSIEDTHFFGNKGPQLLGQIRHGSCRPRAILFKVLADAVGLESKLVVGLPDDGAVGFVDSYKHMSVVVSLNSMVLLVDLMRFPGQLIPFSAKAIFISHISAAGESDSAENDSCDSPLEPNSPLYGLSDKVEVEGYAYVLNISSQLCASVLVYVLVYCKYLCGKP

SEQ ID NO: 18398 - protein, 153 aa, Zea mays
  VARIANT 116: note = Ancestral polymorphism is R, Derived polymorphism is W
  VARIANT 111: note = Ancestral polymorphism is P, Derived polymorphism is S
  VARIANT 62: note = Ancestral polymorphism is H, Derived polymorphism is Y
  VARIANT 50: note = Ancestral polymorphism is N, Derived polymorphism is S
  VARIANT 45: note = Ancestral polymorphism is R, Derived polymorphism is H
  VARIANT 38: note = Ancestral polymorphism is L, Derived polymorphism is P
MRSAATVTPAVATTSLALSLHLPELPSQVKDKILSLELMGVDYGRALEQSPALRDAAPESIHAVVSFLQSRGLQFKDLGRVFGMCTSVLTANVRADLCPVFAFLSADLGVPESAHWRVVIKCPRVLACSVRDQLRPALIYLRRLGFRLCMLIK

SEQ ID NO: 18399 - protein, 94 aa, Zea mays
  VARIANT 43: note = Ancestral polymorphism is E, Derived polymorphism is G
  VARIANT 66: note = Ancestral polymorphism is Q, Derived polymorphism is R
MLASATRAGTSSTTKPDHAAGAVHGAGAGAGGTPIVVTDGGQEVTVSQFVAQLDEAARRRLDSIHQRLRLLEQQMETLEAEVGKATSSRMHTYA

SEQ ID NO: 18400 - protein, 82 aa, Zea mays
  VARIANT 22: note = Ancestral polymorphism is G, Derived polymorphism is D
  VARIANT 36: note = Ancestral polymorphism is A, Derived polymorphism is V
  VARIANT 45: note = Ancestral polymorphism is G, Derived polymorphism is R
  VARIANT 53: note = Ancestral polymorphism is E, Derived polymorphism is K
  VARIANT 58: note = Ancestral polymorphism is P, Derived polymorphism is L
MSEDDLPYHVHVADDGDLETVGRYDFDGQLGCPMIAHPKLDPATGELHALSYEVVRRPYLKYFYFRPDGTKSDDVEIPLASN

SEQ ID NO: 18401 - protein, 358 aa, Zea mays
  VARIANT 103: note = Ancestral polymorphism is P, Derived polymorphism is S
  VARIANT 92: note = Ancestral polymorphism is I, Derived polymorphism is T
MPRDGAQAAPPPERGEMDEVVEADPDTEAEDQEERWARLLPELLSDVVRRVEASGGERWPARKDVVSCACVCRRWREAAVSVVRPPAESGKITFPSSLKQPGPRERPMQCFIKRNKNNSTFYLYLGFTSSPVDKGKFLMAARRFRRGPHTEYIISLDAEDLSQGSNAYMGKLRSDFWGTNFKIYDSKPPYDGAKASSSRSSRRFGSRRISPQVSAGNYEVGQVSYKYNLLKSRGPRRMYCTLECPSAQETWENSLKTKFRRPLGPTTLRNKAPRWHEHLQCWCLNFHGRVTVASVKNFQLVAAADPSEPTTNVDDETVLLQFGKVDSDMFTMDYRQPLSAFQAFAISLSSFGTKLACE

SEQ ID NO: 18402 - protein, 162 aa, Zea mays
  VARIANT 26: note = Ancestral polymorphism is Q, Derived polymorphism is K
MAPIAVGDALPDGQLGWFDENDQLQQVSVHALAAGKKVILFGVPGAFTPTCSNQHVPGFITQAEQLKAKGVDEILLISVNDPFVMKAWAKTYPENKHVKFLADGSGAYTKALDLELDLTDKGLGVRSKRFALLADDLTVTVANIEEGGQFTISGAEEILKAL

SEQ ID NO: 18403 - protein, 315 aa, Zea mays
  VARIANT 257: note = Ancestral polymorphism is I, Derived polymorphism is T
  VARIANT 240..315: note = Derived polymorphism lacks residues 240 to 315
MATIYISRRRGSEAINPFHVPFCRATKHQQMCLVDAKRSLEIVVYDRAFAESQQRANKRARQDEAATESSPSSSSLPEEATASAGAIVPYVGAVHDVAPINSVVVPPSLQPPPPAAGSREAPPCLRRHFLQALGLRADLPVHFIHDKRVSKTDLDGHQSRFRIPLDGVERHLRPILSPQELEAANLLEGPRRRPRGQQPEPQDGNNRRTTAKKKGKAHGGLPVMLVDLQAGAKELRLSRWDSSQGTIVKGEGYLQFTRQCTFKEGDDVAIWAFVQRRFRLFGVDVWDDSLLHILVVKKQAEARCCVCHAHAQPES

SEQ ID NO: 18404 - protein, 270 aa, Zea mays
  VARIANT 3: note = Ancestral polymorphism is V, Derived polymorphism is M
  VARIANT 7: note = Ancestral polymorphism is A, Derived polymorphism is V
  VARIANT 60: note = Ancestral polymorphism is A, Derived polymorphism is T
  VARIANT 99: note = Ancestral polymorphism is F, Derived polymorphism is L
MLVFGYATKEADEAMLFRHMVPSKLWKVLSWLNVGTEKKLANVKVVVDQFIYEEIYKRKAWGSNKSQADVLSMYTKLSLDPSMSEQQKTDFLREMVVGFIIARKDLIVVKLTWFFYMMCKHPKVEAMILEELKDLQSCITVMWLKQVSLLFLSNQISSLPASVFERAQLSRLQVHRTAVWLAEPAVRMRLMALLVDGCRGLSGGAMAGVIHGQAQHGDPMFQEFAGRLLRWVCSSLFEMVRSWVLEGELEDVFAEFFIVGKPVNYQPERR

SEQ ID NO: 18405 - protein, 312 aa, Zea mays
  VARIANT 109: note = Ancestral polymorphism is W, Derived polymorphism is R
  VARIANT 94: note = Ancestral polymorphism is D, Derived polymorphism is E
MVATTRSKTRLGLGSRLQHNMETHPSEAELITSFLRPRVVVSDDSDTPCASFVHDVDVYSAGPGELTGRLAPVLASNGDRAWYFFCAVRAKKSDGQRKARKVHTGEGCWHSEAGAKPVVEGPGRLLVGHRQAFSFMTKVKGRRVRSGWLMVELSLDGADADDVVLCKVYFSPRARASPAAASGRKERKAAADDKNPASSARRRRDPPADDAEAGTPTPDNDEDRDSAQSRGLADDDNSSTTVADDPDAVGLGTDDSAFSWWMRNRDRLMEKYKIVDRPDEELQKTLDLDEYLRLLSRDLDPADALPRATSYM

SEQ ID NO: 18406 - protein, 431 aa, Zea mays
  VARIANT 39: note = Ancestral polymorphism is A, Derived polymorphism is V
  VARIANT 79..431: note = Derived polymorphism lacks residues 79 to 431
  VARIANT 131: note = Ancestral polymorphism is R, Derived polymorphism is H
  VARIANT 138: note = Ancestral polymorphism is A, Derived polymorphism is V
  VARIANT 237..431: note = Derived polymorphism lacks residues 237 to 431
  VARIANT 263..431: note = Derived polymorphism lacks residues 263 to 431
  VARIANT 270..431: note = Derived polymorphism lacks residues 270 to 431
  VARIANT 327..431: note = Derived polymorphism lacks residues 327 to 431
MPRVVWFKKCNANGNGNGLRSITGATPRRDRRRHRPLLAPFDLSRLRATLSSHPLTPRLLARLLALSLAPATSLLLLDWYALSHPALSLSSLPLRPILAAADPDHALALLDSLSASRLPSLRESLLLPLLRSLPPGRALHLLDQMPCRFAVAPSFCSYNVILSTLARADCHADALLLYRRMLRDRVPPTTFTFSVAAHGRVAEAAMLLDEMLLMGCAADVNTFNDLVLGLCGLGRVREAARLVDRMMTRGCMPSAVTYGFLLQGLCRTRQADEACALLERLPEVNVVMLNTVIRGCLTEGKLARATELYEMMGSKGCPPDVHTYNILMHGLCKLGRFGSAVRMLDKMEENGCAPNIVTYSTLLHSFCRNGMWDDARTMLDQMLAKGFSMNSQGYNGIIYALCKDGKLDQATRLVQEMKSQGASRIFARTIQ

SEQ ID NO: 18407 - protein, 167 aa, Zea mays
  VARIANT 122: note = Ancestral polymorphism is R, Derived polymorphism is T
  VARIANT 24..167: note = Ancestral polymorphism lacks residues 24 to 167
  VARIANT 20: note = Ancestral polymorphism is G, Derived polymorphism is R
MELAVAQVQPRYIVLDLSGGGLRRRLGPPPPAAGVPPDAPAMAALEAHHRTRRSGAEDDLATSRPMIQSGAVMARSVHAETTGADADAVSGAGTSGSEAAEEESGDEADSFDASFCQEGFARKIEALAELVGMDGACEPVAVLSEVVRVLRSIDTHRHSEYIPCASD

SEQ ID NO: 18408 - protein, 730 aa, Zea mays
  VARIANT 517..730: note = Derived polymorphism lacks residues 517 to 730
  VARIANT 470..730: note = Derived polymorphism lacks residues 470 to 730
  VARIANT 13..730: note = Derived polymorphism lacks residues 13 to 730
  VARIANT 4: note = Ancestral polymorphism is G, Derived polymorphism is E
MRMGELRRSSCTQGIDLDTPGIPGNQRSPQGGAMTEVEAPLITEVEGVEGRGFCGSASTGGGSSGLGSGVRGTRQYHRRSDALAYGDRYQKAAALVDLAEDGVGIPEDVLNDTRFERAMRFYFVYLRLDWLWSLNLFALILLNFLEKPLWCQKYAPHTCDQRDLYFLGQLPYLSKTESLIYEALTLVILVLDIFYPLSYEGLNLFWKNSMNKLKVLLLFILACDILVFMLSSGPFRVAPYIRVVFLIMTIRELRMCAVTLVGIVGTYLNVLALSLLFLLFASWLAYVTFEDTPQGKTIFTSYGTTLYQMFVLFTTSNNPDVWVPAYKSSRWNALFIVIYVLLGVYFLTNLILAVIYDSFKEQLAKQLAQMDSIRKSILQKAFDLIDTNGQGYLNKEQCISLLDELNKYRSLPKTSREDFELIFSELDRSGDFKVTSEEFADLCNTIAIKFQKEPPPSYLEKYPSFYHSPQCERLKSFVRSRLFEYIVVFVLLVNLIAVVIETTLDIENSSSQKVWQEVEFVFGWIYVVEMALKIFSLGFGAYWMEGQNKFDFVITWTICKFIGETLTFAFPSTLPFLSNGECYEFFGGIVYAGNLKLEETDLFGNDYLLFNFNDYPSGMVTLFNLLVMGNWQVWMESYAHLTGSSWSLVYFISFYLISVLLLLNLIVAFVLEAFFAEMELEKAGEADTQDSTPQGRNKRRSMRVRTKGTMVDILLHHMLSNELDGSQNSD

SEQ ID NO: 18409 - protein, 526 aa, Zea mays
  VARIANT 188: note = Ancestral polymorphism is K, Derived polymorphism is N
  VARIANT 265: note = Ancestral polymorphism is L, Derived polymorphism is P
  VARIANT 280: note = Ancestral polymorphism is A, Derived polymorphism is V
  VARIANT 394: note = Ancestral polymorphism is A, Derived polymorphism is G
MADGSASASPPSVSPHQYHRDAIKSSVRNTAANRRREHAIAIGKERREALMRAKRVCRAPLSGSDEAAGEEGDMVVDEEKADLETRTTQAVEELKSALSSQGKGAQNRKTEVLRALRRLLSQSEVPPVDAAIKAGAVPLLVQSLSFGSPDEQLLEAAWCLTNIAAGKPEETKSLLPALPLLIAHLGENSSTLVAEQCAWAIGNVAGEGAELRNTLLAQGALWPLARLMLSNKGSTTRTAAWALSNLIKGPDSKAANELIGIDGILNAIIRNLEKADEELVTEVAWVVVYLSALSEKATSLIVRSSMPQLLIGRLLASENLQLLIPVLRGLGNLVAGDGYMVDSVLIVGNSVTDQALSSLIKCLKSDHRVLKKEASWAMSNIAAGSFEHKKLIFGSEATPLLMHLLRTAQFDIRREAAYTLGNLCVVPAGSGNPPTIIVEHLVAIVDGGALPGFINLVRSADIESARLGLQFLELVMRGYPDSQGPKLVETEDGIEAMERFQFHENEMMRNMANGLVDKYFGEDYGL

SEQ ID NO: 18410 - protein, 119 aa, Zea mays
  VARIANT 33: note = Ancestral polymorphism is A, Derived polymorphism is T
  VARIANT 34: note = Ancestral polymorphism is L, Derived polymorphism is R
MVTATTSPLFSLSSLRASLPSPTRFHTSLSLRALSPRARLSAALPFASPLVSGGYGTWAATSISSAGRLRRRGLEVVCEATTGRRPDSVKKRERQNDKHRIRNHARKAEMRTRMKKVPA

SEQ ID NO: 18411 - protein, 252 aa, Zea mays
  VARIANT 173: note = Ancestral polymorphism is Q, Derived polymorphism is H
  VARIANT 137: note = Ancestral polymorphism is M, Derived polymorphism is T
MASPCGDAAAAAELTSLRISEGAGIPPLPGRRSVGGNAAEGEEEGDKNKKARKGKAGTQRIAGWGLREFSKIVSKKVETKGRTTYSEVADEICGELKLTLIGQEFDEKNIRRRVYDAFNVLIALRVITKDEKEIKWMGLSNFQYEKIKLEETRKELMIRIKNKKKLLQEIERQFDDLQNIKFRNQFLQRPAESVNGICLPFLLVKASRKARVEIEISENSKFAGLDFNCVPFTLHDDVSILEAIRCNSVKKS

SEQ ID NO: 18412 - protein, 263 aa, Zea mays
  VARIANT 196: note = Ancestral polymorphism is A, Derived polymorphism is T
  VARIANT 103: note = Ancestral polymorphism is L, Derived polymorphism is F
MASLLLVPRLTRSPCSNPGPSAGHKPRPVSITCGPRDNRGPLQRGRSLSTEAILAIQSLKRLTSADRSPAAASAAAATALGRLLKADLVAAMAELQRQGHWSLALAALHIARAEPWYRPDPALYATFVSSAPHSPSGGEGDAEAAVDALVEAFLEEKASGGGFVDGEEDVYKLTRLLRALVAKGRGRAAWRVYEAAVRKGGLNVDAYVYRVMARGMKRLGFQEEAAEVEEDFAEWETTVSPPARDVLDEMRARDEIKTTAAAS

SEQ ID NO: 18413 - protein, 508 aa, Zea mays
  VARIANT 99: note = Ancestral polymorphism is T, Derived polymorphism is M
MAGRRLVTLTLLAAAFLAAAPGGAGSKPSAKFELIHRGQAPWDEVARMDQERTAFISSHARRRATEAGRAKPKPKAKAKAAPADEAFAMPLSSGAYTGTGQYFVRFRVGTPARPFLLVADTGSDLTWVKCRRHAAPAPAPAPAPGYNYGYGAPASNDSSSVSAAASSPARVFRPDRSRTWAPIPCSSDTCTASLPFSLAACPTPGSPCAYEYRYKDGSAARGTVGTDSATIALSGRRAGKKQRRAKLRGVVLGCTTSYTGESFLASDGVLSLGYSNVSFASRAAARFGGRFSYCLVDHLAPRNATSYLTFGPNPAVSSASASRTACAGSAAAPGARQTPLLLDHRMRPFYAVAVNGVSVDGELLRIPRLVWDVQKGGGAILDSGTSLTVLVSPAYRAVVAALGKKLVGLPRVAMDPFDYCYNWTSPLTGEDLAVAVPALAVHFAGSARLQPPPKSYVIDAAPGVKCIGLQEGDWPGVSVIGNILQQEHLWEFDLKNRRLRFKRSRCMQ

SEQ ID NO: 18414 - protein, 172 aa, Zea mays
  VARIANT 29: note = Ancestral polymorphism is L, Derived polymorphism is P
  VARIANT 35: note = Ancestral polymorphism is C, Derived polymorphism is F
  VARIANT 36: note = Ancestral polymorphism is R, Derived polymorphism is C
  VARIANT 40: note = Ancestral polymorphism is A, Derived polymorphism is D
  VARIANT 85..172: note = Derived polymorphism lacks residues 85 to 172
  VARIANT 94..172: note = Derived polymorphism lacks residues 94 to 172
  VARIANT 101..172: note = Derived polymorphism lacks residues 101 to 172
  VARIANT 104: note = Ancestral polymorphism is R, Derived polymorphism is W
  VARIANT 105..172: note = Derived polymorphism lacks residues 105 to 172
  VARIANT 108: note = Ancestral polymorphism is S, Derived polymorphism is L
  VARIANT 111: note = Ancestral polymorphism is D, Derived polymorphism is G
  VARIANT 123..172: note = Derived polymorphism lacks residues 123 to 172
  VARIANT 141: note = Ancestral polymorphism is S, Derived polymorphism is L
MESSPASAMAPASSSRAARDPLLFARFDLPAGWGCRKPLAFCREARDTDDAPVASESAATAAPTEGVKDSDGTRSPTRAAATVQQAPATGEVAQEAPRKQWNLRERTSWRDYSNRADDLRARQDRKLGRADAGGNRRLSLSVKLTRQKIDADFAKITGSKAPYRPTKQSKTV

SEQ ID NO: 18415 - protein, 464 aa, Zea mays
  VARIANT 117..464: note = Derived polymorphism lacks residues 117 to 464
MDSPSGLWWRPAPSSCPPFPSTPSMSPRYVGDPIVASFASSQLPPSTIEARPQRPPLPARHGARLATATAGPAPPTATPLVLHHPLAKAPSVSLKPPSPTDFCGSPRDADACGRARQDLSLTDAPPRSRRRGRRDTYCRGSPGDADACGGAWLDLSLTDERLRPTHRVPVVHLGLLLGATSPPSPRCCTCLYRGDMPKHVTEANLLVLFCEVATVEEVTIIKDKATKVSRGVDLPGPRSGLAALPSPRLLPLETFCAQVGRYGRYGHLGLAVNLTTYKDCFNFDGNRISINRSGDWSSFCWDKLCTGPEHLISGCECHESDTQQTTNSGTPLIDHPECKSRPDSGLSAITELDPGYITGTVICISLTLLLLSKEKGKGKHLALILFYWARFQVLSLQYGKNGSNGSVRVNGPVTDSRYPAHQQIPQAYGYRQMPARLDSTNPSQAMGGYTLQSQKETLFEELPF

SEQ ID NO: 18416 - protein, 475 aa, Zea mays
  VARIANT 35..475: note = Derived polymorphism lacks residues 35 to 475
  VARIANT 43..475: note = Derived polymorphism lacks residues 43 to 475
  VARIANT 161..475: note = Derived polymorphism lacks residues 161 to 475
  VARIANT 340..475: note = Derived polymorphism lacks residues 340 to 475
  VARIANT 370..475: note = Derived polymorphism lacks residues 370 to 475
MVWHLLSQIPNMLRRRLPHWNSCAPLAFLLPFNPQAFPGSIAQLGDVRRYLHIGNDRFRFSGDAWSGSRINQNKCEISVKFERLLNFQIRPLPQHFLGFREGNCIFAQIFVVSNVHICSVCSCEILNETKELQQITNDKQKNQVVRIQHFTFIFAEDVNKQNRQAVHSTFTTDMFVFDNFGTLQHVGLKAQTMEMMYTIIADEFKSMDNKDMRPEDYLNFFCLGNREEPPSNGSPESEKSTYKSAEIVCFCIFLILKEAFEDAEITHVDDTVDPDIEFMKKKLEDLDKPMKRRNDKLLKIEHELCERIDPAQCRGDWRLNLEVLLKDVTLSQRTIVLYSQPKSIVGTPAYIAHEVLLKKEYNGKVADVWSCGVMPYVMLTITIPEIRNHPWFLKNLLADQMDDNTMSKQYEEPEQPMQSMNEFMQILVEATIPAVGSRGLNQFLNDDIDLDDDMEDLDSDAGLDLESSGEIVYAI

SEQ ID NO: 18417 - protein, 274 aa, Zea mays
  VARIANT 100: note = Ancestral polymorphism is F, Derived polymorphism is S
  VARIANT 138: note = Ancestral polymorphism is S, Derived polymorphism is F
MKDPFEADVEEQDSPPESPAPPEDEPGAAGPAEDPEDYDGGPPPRQPSAPASHAAGAKAKARVHREQQEDDDEDEDQIEVDLEKLPSSTGDPDKLAKMKFVLEYAFAILSQFTQQQMNRYESFRRSGFQKSNMKRLHSLHLTLVGLLASITGSQKISIPTSIVVSGIAKIFVGELIETGKFRIVVLFTLFLWNRICYSVAEFLPFVSVWNQRPIFFFPPHYVTRNLLAEQTLARVVMSERKDSGPIRPCHIREAYRRLKLEGKIPRRSVPRLFR

SEQ ID NO: 18418 - protein, 572 aa, Zea mays
  VARIANT 17: note = Ancestral polymorphism is R, Derived polymorphism is H
  VARIANT 302..572: note = Derived polymorphism lacks residues 302 to 572
MAEAPTYQILVRLLDGRTTCLRFSTPTVSGAVLLEAVASISRVPAAALRIVTGRFDVSPSNVLTSSADGQFPSASALLRLRGGKGGFGSLLRGAASKAGQKKTSNFDACRDINGRRLRHVNAERRLEEWKAEAGDRHLEKLAENFIKKKAKEAGRRGGPSAAEVDKYLEKYRKDAEICVNAVEESVRASLGKRKTAPKPPSGADAKKLKIWAICSLEEQQLVKLVARVYALDAGDEARGSISDYLLEIRVGCEKDPSFARGRNLITCATGLMPIDMVPSASASSGDVVAKNLVRFIRARVPESVQLRESEASHRQHKETRVTPHRLGKNKVEEDESDSDSDSDMDDEDSEDQESADAKSLVVDEGNCSNGSIKNEKLDLGSVSGSHSEGESSGEKSQPTTKSGAEGGDFESDGSAEPELGMVDHPIPVNNAVAAASEEVLKSDEVTADEDNTTSATSNQNNPVVPQVKEALKADEDNSASATSNQNNPEVPKVEEYADASKSYSEPLDLAKYSSAVELEVLGLEKLKIELQSRGLKCGGTLQERATRLFLLKTTPLDKLPKKLLAKAAIGGK

SEQ ID NO: 18419 - protein, 178 aa, Zea mays
  VARIANT 116: note = Ancestral polymorphism is V, Derived polymorphism is M
MGNTVAPRMCRKEASAAAATARAQRTRPKSLVAEVSAAVAPDVEPRRSAAAAAAASVTPRKRRDDVELDETTRAGPGRSRARAGGVRVSWAGGVGSDDDDAVRKAKASVVVTVKVVLKRKDAEALVARLNAQGARERKARMEELKGELRAEDCVGGGASTSPCRDPWKPRLAPIKENY

SEQ ID NO: 18420 - protein, 57 aa, Zea mays
  VARIANT 5: note = Ancestral polymorphism is C, Derived polymorphism is Y
  VARIANT 49: note = Ancestral polymorphism is S, Derived polymorphism is N
MEAPCACCGSLKVKLDERMKLDLLRFIDILVDNNNLSGPLPPELVDTCSLLAILTSG

SEQ ID NO: 18421 - protein, 326 aa, Zea mays
  VARIANT 27: note = Ancestral polymorphism is S, Derived polymorphism is R
MGRAPCCDKTSVKRGPWSPEEDDLLRSYVQNHGTGGNWIALPHKAGLNRCGKSCRLRWLNYLRPDIKHGGYTEQEDRIICSLYNCIGSRWSIIASKLPGRTDNDVKNYWNTKLKKKAVAMQEQQKEKEEEEEYYQQQQQHTSGGRGAAPRSQQCASMQPSPASASSAVTTASPSDACSFGAMYPSPTTLQAPVHARYDVTAPVPPVPQQQASSSSLAEFSPAPAPAPAATPPAASIIGGTCTWAGGPLLDDMFLPELLGDVSEFPPGDFFGTGGLAPLLQDRAAAASLQELSAFYFPNAQAEMWAAADHHVHANNKPAAGLCHSLT

SEQ ID NO: 18422 - protein, 705 aa, Zea mays
  VARIANT 192: note = Ancestral polymorphism is S, Derived polymorphism is L
  VARIANT 436..705: note = Derived polymorphism lacks residues 436 to 705
  VARIANT 572..705: note = Derived polymorphism lacks residues 572 to 705
MSSAVKDQLQQMSTTCDSLLLELNVIWDEVGEPDMARDRMLLELEQECLDVYKRKVDQANRCRAQLRQAIAEAEAELAGICSAMGEPPIHVRQSNQKLQGLREVLNAIVPYLEEMRKKKVERWDQFVDVIEQIKKVASEIRPADFVPFRIPVDQSDLSLRKLEELTKELQSLQKEKSDRLKQVMEHLNTLHSLCEVLGVDFKQTVNEVHPSLGEADGSKNLSNCTIESLASAASRLRELKVQRMQKLQDLASSMLELWNLMDTPLEEQQMFQNVTCNIAASEHEITEPNTLSIDFLSYVESEVLRLEQLKASKMKDLVLKKKTELEEHRRRAHLIGEEGYAAEFSDEAIEAGAVDPSLVLEQIEAHIATVKEEAFSRKDILEKVERWLNACEEEAWLEDYNKVAMLDDNRYNAGRGAHLTLKRAEKARILVNKIPGLVDVLTTKIVAWEAERGKEFTYDGVRLMSMLEEYMIVRQEKELQKKRQRDQKKIQDQLKAEQEALYGSKPSPSKPQSTKKAPRHSMGGANRRLSLGGATMQAPKTDILHSKTARAAKKAEDLGALSPSNLSFPFIYCNAGSRGLDIAGLPIKKLSFNASTLREAETPRKPFAQIMPGNNVSPMPTRPISSATEEENKTPRTFVGGLNAKTPATVTAPMQMAMTPAVANKVIATPATLFQEKADSPALPADIEYSFEERRLAVYLARQVA

SEQ ID NO: 18423 - protein, 374 aa, Zea mays
  VARIANT 293..374: note = Derived polymorphism lacks residues 293 to 374
MSSSGPSPATGTHHTRSTPLQVIHVLGNFMRIWSVYSLYSYLSNSGDSIVGFIFSCLVPTSVIFLVLQKPWKGRPLPNSQVVPTVVNGGILAFYFVLWGKGLLACGPLVMILNTSTEKQHFITINHIIVLYWQSMQVLFLEFSLLLYMEGNLTSGKRQIGGLAAMLAAYYLLSNGWSTRTHSPLYSFGSEPVEKAAQTIGVKAMMVPITAGILSALRRVLARRVSLKNQLKRRLHAITIASATCFLFPFAMWDTILGSASDSIVKLQLPSWAYFSTVLFGMVLIFYVDNVAEEKLHLVFSSPRHLMVSTGCIIVLETVYQMDFSLLGFLVCSVILGFGISEATSLERSKKSPLETHELSNGVFHNQLPISELPS

SEQ ID NO: 18424 - protein, 341 aa, Zea mays
  VARIANT 245..341: note = Derived polymorphism lacks residues 245 to 341
  VARIANT 223..341: note = Derived polymorphism lacks residues 223 to 341
MEAASNQEPGRCGGDDDEAKRREAELASSRLLDPGFKPSKLSQDRLDKFKVPFWLLELHKKRLQITEKPKYKRKPKAKSTSEKLFIGDLNGHVGTTNAGFETVHGGFGYSIRNHEEEEVLDFAVSFDLSIANTFCRKRESHLVTYSSGQYSSQIDFVLTKREDKRACLNCKVEYGQHKEVQGSKEDRKASCKCDIGGENGDTTLKWDDSFDDTNRCFVRSIQESEVNHGSHFADDVVLVDESRIEINRKLELWQETIDSKDFRFSKTKTEYMRCDFDTTTHEEDVSLEGQVVPRKDTFRPLRSILQRDGDVDEDVSHRIEAEGGSGAKHPMLYVIRDYCKS

SEQ ID NO: 18425 - protein, 267 aa, Zea mays
  VARIANT 260: note = Ancestral polymorphism is C, Derived polymorphism is Y
  VARIANT 226: note = Ancestral polymorphism is D, Derived polymorphism is Y
  VARIANT 105: note = Ancestral polymorphism is K, Derived polymorphism is N
MGLALSRLEEIRTQYRMAAEDGEADSPAPAPVSPTGAAAASGGGTEKKKQADDSSSSSKTTEWVPHKFSEIVGQRRPGEDMFRGIYLPRSDQQPKTKKYWVDGRNANCFMLFPKGFSITWGSDARYWSWRKLTQEEKREIDPEEAKMEMEVAYLKDVCWLEIRAKLEMSHLTPGFTYVVDFVAKLEQNGYGWSEPVDLQINCPGDVDRKPRKESLWKTVDGKKWSYVNVGEVEAAGQNGEMEIAMLRLGGDWKRGLVLRCIKITPKP

SEQ ID NO: 18426 - protein, 370 aa, Zea mays
  VARIANT 80: note = Ancestral polymorphism is T, Derived polymorphism is N
  VARIANT 84: note = Ancestral polymorphism is N, Derived polymorphism is K
  VARIANT 87: note = Ancestral polymorphism is V, Derived polymorphism is M
  VARIANT 155: note = Ancestral polymorphism is A, Derived polymorphism is T
  VARIANT 164: note = Ancestral polymorphism is G, Derived polymorphism is C
  VARIANT 253..370: note = Derived polymorphism lacks residues 253 to 370
MGGVTSTIAARFAFFPPTPPSYTVVVADAATGRLAIPEISRAPSRRRRRDGAGAGGSSSASSVVAAAEEEDGAEVVRLRTRRGNEIVGVYVRHARASATVLYSHGNAADLGQMYGLFVELSRRLRVNLFGYDYSGYGRSTGKPTECNTYADIEAAYNCLKEKYGVADEDIILYGQSVGSGPTIDLASRLPDLRAVVLHSPILSGLRVIYPVKRTFWFDIYKNIDKIGLVNCPVLVIHGTSDDVVDCSHGKQLWEHCKVKYSPLWLSGGGHCNLELYPDYIKHLKKFVSSVSKKASSKPDPKETTTKDDTTSKETEEAYPEKPQEAKKCPQISRKSLDSRFGKSKTVDVPDKPRMSSDDIDKFRRSRCLVW

SEQ ID NO: 18427 - protein, 718 aa, Zea mays
  VARIANT 98: note = Ancestral polymorphism is A, Derived polymorphism is V
MPSLSHLDRGLLLLLPLLVLAAAAASHGDDDDDASYAVSACRSRPYLCGGVNISYPFYLASDTEAVPALAGESYCGYPGLAVSCGGEPVLRLGDVSYAVLRIDYANQVVSLAYADAAAGDDGRCPVVDHNVTIPQDAPARLSLLHSVVDYLLFFVGCSFGPGPGPEAAVPRPPKPRSIKPVTCGDGDLGGAGTAAAASMTFVLPRSEVPPGDWSSACRQVFEAPVLRDSVPSDAQDPLWRSGGYGSALRAGFQLGWDRSSGPCGQCEQSSGGMCGYSRGGEFLGCLCADGRVRDGGCSTISADPSSALSLSESKRKARILAGALGGGAAALLVGAAIFLFVIMRKRKQKKKVINSSSKLLKYSGSGGTPRSRVGDMESGSIEDPPTHHFTYEELEEATNRFDESRELGDGGFGTVYKGYLRDGRVVAVKRLYNNGYRRVEQFQNEAAILSGLRHPNLVMFYGCTSSHSRELLLVYEFVANGTVADHLHGQRAPERALSWPLRLSVAVESAAALTYLHAIEPPVVHRDVKTTNILLDADYHVKVADFGLSRLFPLDVTHVSTAPQGTPGYVDPEYHQCYQLTDKSDVYSFGVVLVELISSKPAVDITRHRSEINLASMAISKIQKCQLEELVDLGLGYDTDPATRKMMTMVAELAFRCLQQNGEMRPPIKEVLEVLRNIQGECLTSGKDGDKSKDGPFSPTTVHAPWDSRSTTPNTSRD

SEQ ID NO: 18428 - protein, 313 aa, Zea mays
  VARIANT 106: note = Ancestral polymorphism is T, Derived polymorphism is I
  VARIANT 26: note = Ancestral polymorphism is H, Derived polymorphism is L
  VARIANT 7: note = Ancestral polymorphism is R, Derived polymorphism is H
MAAHLPRLPVLLLVLLAAHVVSTSAHAEPPLPSPYNTSAHGEPPLPSTYNPSMCSESFRCGGVEIRYPFYLANATADYSGNYYSCGYTDLSVSCELEVEGPSTTWTPTIRLGGDNYTVKNIYYDYHTISLADRDVLGGGGCPVVRHNVSFDETWLHNASAFDNLTFFFGCHWGPRDTLPEFAGNNISCAGFSTPTVSGGSFVFKPEDLDEQEEQELASHCDEVFSVPVGSDALRATDTFSLTGYGYGDLLRQGFELEWNRTSEDQCGQCEGSGSGSGSGSGGWCAYSQKREFLGCLCSGGKVGNPFCKPSSKS

SEQ ID NO: 18429 - protein, 650 aa, Zea mays
  VARIANT 91..650: note = Derived polymorphism lacks residues 91 to 650
MAAHLPRLPVLLLVLLAAHVVSTSTRAEPLLPSTYNVSMCSESFWCGGVEIRYPFYLANATADYSGSYYSCGYTDLSVSCELEVEGPPTTWTPTIRLGGDNYTVKNILYDYHTISLADSDVLGGGECPVVRHNVSFDETWLHNASAFNNLTFFFGCHWGPRDTLPEFAGYNISCDGFSTPTISGGGSFVFKTEDLDEQEEQDFASHCDEVFSVPVGSEALRATDTFSLSRYGYGELLRQGFELEWNRTSEDQCGQCEGSSSGGRCAYNQKREFLGCLCSGGKAGNPFCKPSRSKRNEGPIVGAVVAVAFLCLVILTCFLACRHGSLPFKSKNKPGTRIESFLQKNESSIHPKRYTYADVKRMTKSFAVKLGQGGFGAVYKGSLHGRQVAVKMLKDTQGDGEEFMNEVASISRTSHVNVVTLLGFCLQGSKRALIYEYMPNGSLERYAFTGDMNSENLLSWERLFDIAIGTARGLEYLHRGCNTRIVHFDIKPHNILLDQDFCPKISDFGLAKLCLNKESAISIVGARGTIGYIAPEVYSKQFGTISSKSDVYSYGMMVLEMVGARDRNTSADSDHSSQYFPQWLYEHLDDYCVGASEINGETTELVRKMIVVGLWCIQVIPTDRPTMTRVVEMLEGSTSNLELPPRVLLS

SEQ ID NO: 18430 - protein, 221 aa, Zea mays
  VARIANT 26: note = Ancestral polymorphism is P, Derived polymorphism is R
MHPNFPSDHGNGRGVGGGGGHSRRKPIHQLLGGGRAADILLWKDRNLSAGLLAGATLVWYLFEVVEYSIVPLVCQIAILAMLVVFIWSNAAPLLNIAPPRIPEVIISEHAFRQIAQIIHYKLAHTVSALYDIACGKDLKKFLLVVLSLLIVSEVVSSYSFTSLLYLGFLCAHTLPALYQRYETEVDHLAARGSEDIKRFYKRIDSNLLNKIPRGPVKTKVK

SEQ ID NO: 18431 - protein, 383 aa, Zea mays
  VARIANT 264: note = Ancestral polymorphism is R, Derived polymorphism is M
  VARIANT 237: note = Ancestral polymorphism is M, Derived polymorphism is R
  VARIANT 13: note = Ancestral polymorphism is H, Derived polymorphism is Y
MESWVRAVVEAIHSSRSQTVIYLAGGASQALGWLLSVPGASGTVLEVVVPYSRASMAQLLGKMPLQFTSKQAAEDMALAAYNRALKLSGPGLQVMGVGFTGSLASSRPKHGDHRFYVSTWTHNCLRTSHVTLSKGLRSREEEDKVSSYFLLKAIADTCRVSATIQSDIHKSEIPEEIMEQFDEDQELQQVINGQVCMKVYNFAAPAESNLNRKIILPGSFNPLHDGHLRLLEAAVSMCDDGLPFFEISAINADKPPLSIAEIKRRVEQFRKAGKNVIISNQPYFYKKAELFPGSAFIIGADTAARLVNPKYYGGDYNRMLEILLECKSIGTTFLVGGRKIEGDFKVLENLDIPEELREMFISIPEEKFRIDISSTEIRKSQGL

SEQ ID NO: 18432 - protein, 151 aa, Zea mays
  VARIANT 118..151: note = Derived polymorphism lacks residues 118 to 151
  VARIANT 19..151: note = Ancestral polymorphism lacks residues 19 to 151
MDSEPAAAARSKKERSDAKTKKRQGGGGGGPRGPGVSPAAPPEDATGSGAAVAECAAACCVLCACLPVTVLCCVARAPLRVARRCCGTWRPRRRRPRRRLAPGGSSSFSDAEAGEFLQGGARGRAMGREGTRPSPRVGRTASPPASDRGRR

SEQ ID NO: 18433 - protein, 338 aa, Zea mays
  VARIANT 88: note = Ancestral polymorphism is R, Derived polymorphism is G
  VARIANT 86: note = Ancestral polymorphism is R, Derived polymorphism is P
  VARIANT 10: note = Ancestral polymorphism is E, Derived polymorphism is Q
MSGDRSSTAERRRGIRRLLLHPRGEASSPPPPPPAPAPEEGRRKGFASAALRGLGCTSAAASKAYAPGAAAAAALRSSADWHGRRRRRGKDRRKERGGGGAGAGGGLVTGGIGADVWCAPGIPFAAEASSVDCVVARHQTVGRGGRGAEGERSHRERPCMSRRATVQEQISSPFMDSPPPHLDAPFFGADLIPSGRLRRMRGYRYSPGGLEEEIMMFQTRVLLGGMNMYDRYQDWRLDVDNMTYEELVELGDRIGYVNTGLREDEIARSLRKAKHPSFGSLRFAAEVERKCTICQEEFQSNEEMGRLVCGHSYHVLCIKQWLSQKNTCPVCKTAVSKN

SEQ ID NO: 18434 - protein, 339 aa, Zea mays
  VARIANT 222: note = Ancestral polymorphism is G, Derived polymorphism is S
MFTGRLDDLQLAAATLGNSWASLRPCSPPPHPPHPTPPPPSGALDATYRRIKSDSPARATHRCLDNGLEPIYAAAPDSPPSHPPHPSPPSPSGAPDVSCHCLNSDSPPRATHRRLNNGSKHIYAAAPASPPPHPPRSSPPPPPQPVSPGATCSRLNNDSATIRDSVAPTSTPPVAPRADAGDHVMMLFPGATERPAQHGTLQSLLSRGVTSVEGQAQCKRCGARKAIAYDLESKFRELHDYIVMNRHAMYNRAPKAWRLPVLPNCDACGQKGSMWPEIASDKREINWLFLFLGEMLGCCTLEQLKYFCMNNGQHHRTGAKDRVLYYAYIEMSNQLFSFD

SEQ ID NO: 18435 - protein, 255 aa, Zea mays
  VARIANT 200: note = Ancestral polymorphism is K, Derived polymorphism is E
  VARIANT 139: note = Ancestral polymorphism is W, Derived polymorphism is C
MGAAPSSDDSSRAGDGRAVASSAASGTGSNSHQAQSKRAPPPHKFHEIVAQEATTAGGGGGTAAAAELEDQACSTGVYLAGKTKKYWVDEKTRCNCFVLFARALSITWGDDPRYWIWHPVRETNDAEIVEAASLQNVCWLEVHGRLELSHLTPGCSYDVAFQVMLTEPAYGWSVPVNLRLRFPDGTAQARKEKLQGRPTKQWLELRAGEVKAPAQPGGAGRSGELEISLFEYDGGLWKKGLLVKGIKIVPKESDY

SEQ ID NO: 18436 - protein, 403 aa, Zea mays
  VARIANT 46: note = Ancestral polymorphism is N, Derived polymorphism is I
MGQSSGRQNYISGIRIFIPASLTPPVVPSQVPTANSQILNWLMLLNMPLASGVSNEFNNSEGFGTQEAMPAPAPPIRLGPPTPYISSHGSKVARLHMYDWIVLILLAVLDGVLNIIEPFHRFVGSEMMTDLRYPMKGNTVPFWAVPIIGIIGPMVIITVIYFKKRNVYDLHHAILGLLFSVLITAVLTDAIKDGVGRPRPDFFWRCFPDGKPEYNNFTTGAICHGQASVIKEGHKSFPSGHTSSVTVGGLLKDFMFILGSFAGLGFLSWYLAGKIKVFDRRGHVAKVCIVLSPLLLAALVAVSRVDDYWHHWQDVCTGGLLGFTVASICYLQFFPLPSDENGLWPHAYFRHILEPEGDSQAQPTYMSRRSSVQNGSFQYSPDAVEMRSTSQAMDSMEAGQRAQ

SEQ ID NO: 18437 - protein, 405 aa, Zea mays
  VARIANT 100: note = Ancestral polymorphism is E, Derived polymorphism is V
MDSASSLVDDTSGSGGGACTDKLRALAAAAASASGPPPERMGSGASAVVDAAEPGAEADSGSAPASVAAVAAGVGGKLPSSRYKGVVPQPNGRWGAQIYERHLRVWLGTFAGEADAARAYDVAAQRFRGRDAATNFRPLADAGPDAAAELRFLASRSKAEVVDMLRKHTYFDELAQNKRAFAAAAAAASSAAATTSTSLGNDNRSSSPACAREHLFDKAVTPSDVGKLNRLVIPKQHAERHFPLHLAAAAGGGESTGVLLNLEDAAGKVWRFRYSYWNSSQSYVLTKGWSRFVKEKGLQAGDVVGFYRSAAGADSKLFIDCKLRPNSVDTASTTSPVGSSPPPAPVAKAVRLFGVDLLTAPADAMARCKRARDLASPPQAAIKKQLVELALASVDQCYGAGRSFS

SEQ ID NO: 18438 - protein, 77 aa, Zea mays
  VARIANT 71: note = Ancestral polymorphism is T, Derived polymorphism is A
  VARIANT 68: note = Ancestral polymorphism is G, Derived polymorphism is R
  VARIANT 66: note = Ancestral polymorphism is T, Derived polymorphism is A
  VARIANT 53: note = Ancestral polymorphism is P, Derived polymorphism is L
  VARIANT 36: note = Ancestral polymorphism is H, Derived polymorphism is Y
  VARIANT 27: note = Ancestral polymorphism is A, Derived polymorphism is D
  VARIANT 22: note = Ancestral polymorphism is P, Derived polymorphism is L
  VARIANT 19: note = Ancestral polymorphism is L, Derived polymorphism is P
MSSCLILSGFFEKETWMHPIFPALFYACERVIRKFHENDYHSGIVRHPFSITLAPGDNYLTVHIRALGDRASKLSIL

SEQ ID NO: 18439 - protein, 502 aa, Zea mays
  VARIANT 306: note = Ancestral polymorphism is G, Derived polymorphism is R
MDAAAAAAVVSLNGKMGAEERKAQKSYWEEHSKNLTVEAMMLDSRAADLDKEERPEVLSLLPSYEGKSVLELGAGIGRFTGELAKTAGNVLALDFIESAIKKNESINGHYKNASFMCADVTSQDLVLQANSIDLIFSNWLLMYLSDEEVEQLVQRMVKWLKVGGYIFFRESCFHQSGDSKRKVNPTHYREPSFYTKVFKECHTFDQDGNSFELSLVTCKCIGAYVKNKKNQNQICWLWQKVHSTEDKGFQRFLDNVQYKASGILRYERIFGEGYVSTGGVETTKEFVDKLDLKPGHKVLDVGCGIGGGDFYMAEKYDAHVVGIDLSINMVSFALERAIGRSCSVEFEVADCTTKTYPDNTFDVIYSRDTILHIHDKPSLFKSFFKWLKPGGKVLISDYCRSPGKPSEEFAAYIKQRGYDLHAVEAYGQMLKSAGFRDVIAEDRTDQFLGVLDKELAEFEKNKDDFLSDFTQEDYDDIVNGWKAKLQRSSAGEQRWGLFIATK

SEQ ID NO: 18440 - protein, 1099 aa, Zea mays
  VARIANT 6: note = Ancestral polymorphism is R, Derived polymorphism is S
MAFFVRVRMVLILLAVAAARSATALTPPPSSATDLAALLAFKAMLKDPLGILASNWTATASFCSWAGVSCDSRQRVTGLEFSDVPLQGSITPQLGNLSFLSTLVLSNTSVMGPLPDELGSLPWLQTLDLSHNRLSGTIPPSLGNITRLEVLDLAYNDLSGPIPQSLFNSTPDLSEIYLGSNSLTGAIPDSVSSLLKLEVLTIEKNLLSGSMPPSLFNSSQLQALYVGRNNLSGPIPGNGSFHLPLLQMLSLQENHFSGPIPVGLSACKNLDSLYVAANSFTGPVPSWLATLPNLTAIALSMNNLTGMIPVELSNNTMLVVLDLSENNLQGGIPPELGQLTNLQFLGLANNQLTGAIPESIGNLSDLTQIDVSRSRLTGSVPMSFSNLLNLGRIFVDGNRLSGNLDFLAALSNCRSLTTIVISNNEFTGMLPTSIGNHSTLLEILQAGNNNINGSIPGTFANLTSLSVLSLSGNNLSGKIPTPITDMNSLQELDLSNNSLSGTIPEEISGLTNLVRLRLDNNKLTGPIPSNISSLSQLQIMTLSQNSLSSTIPTSLWDLQKLIELDLSQNSLSGFLPADVGKLTAITMMDLSGNKLSGDIPVSFGELHMMIYLNLSRNLFQGSIPGSFSNILNIQELDLSSNALSGAIPKSLTNLTYLANLNLSFNRLDGQIPEGGVFSNITLKSLMGNNALCGLPRLGIAQCYNISNHSRSKNLLIKVLLPSLLAFFALSVSLYMLVRMKVNNRRKILVPSDTGLQNYQLISYYELVRATSNFTDDNLLGKGSFGKVFKGELDNGSLIAVKVLNMQHESASKSFDKECSALRMARHRNLVKIISTCSNLDFKALILEYMPHGSLDDWLYSNSGRQLSFLQRFAIMLDVAMALEYLHHQHFEAVLHCDLKPSNILLDKDMIAHVSDFGISKLLVGDDNSITLTSMPGTVGYMAPEFGSTGKASRATDVYSYGIVLLEVFVGKRPTDSMFVSDISLREWVSQAFPHQLRNVVDSSIQEELNTGIQDANKPPGNFTILDTCLASIIDLALLCSSAAPDERIPMSDVVVKLNKIKSNYISQLGKQRHIYHNTFYSQLLPYSGNDPGPSNLQHF

SEQ ID NO: 18441 - protein, 1285 aa, Zea mays
  VARIANT 937..1285: note = Derived polymorphism lacks residues 937 to 1285
MDATASRAGGGDLNGKENEEDKKGAAPAKKVSLLGMFRYADRLDLLLIAVGTVGALTNGVADPLMTVLFGNAIDSFGDSTSQDIVRSVRKVVMNFVYLGIGTAVVSFLRNSSLVLPEVSCWTTAGERQSARIRSLYLNAVLRQDIAYFDTELTTGQAVSRMSSDTLVIQDALGEKAGKLIQLSSTFFSGFIIAFTRGWLLTLVMLTSLPLIAVAGIVSSHFLTNISSKKLASYGDAGDTVEQTIGAIRTVVSFNGENKAIAAYKSLIKKAYRTDVLEGLINGFGMGSVFCILFSSYGLAFWYGGKLVVDKGYTGGKIITVLFAVLTGAMSLGGATPSVSSIAQGQSAAYRLFETIGRKPEIDSGDTSGVVLEDIKGDVELKDVRFRYPARPEQLILDGLTLRVGSGTTMAMVGESGSGKSTVISLVERFYDPHGGEVLIDGVNIKNLRLSWIREKISLVSQEPLLFMTSIKDNIMYGKGDATVEEVRRAAELANAANFIDKLPDGYDTMVGQRGTQLSGGQKQRIAIARAILKDPKILLLDEATSALDVESERVVQEALNRIMVERTTLVVAHRLSTVRNVDCITVLRQGKIVEQGPHDVLVKDPNGAYSQLIRLQETRADERRKTADSGSGVPDHSRSKSTSLSQSLARRSLLNKDSFGSSSSNRYSFKNPLGLAVDLHEDRSTIGGEKTEELSDVVVVPKKAPIGRLLKLSVPEAPVLLLGSVAASVHGVVFPLFGLLMSGIIKSFFEPPDKLREDSSFWALIAVALGVTCLVVVPAQYFLFAVAGGKLIERIRALSFQSIVRQEISWFDNASNSSGALGTRLSVDALNVRRLAGDNLALIMQSIATLVTGFAIAFAADWRLALIITCVIPLVGAQGYAQVKFLKGFSEDAKEMYEDASQVATDAVGSIRTVASFCAEKRVVAAYSDKCEALRKQGIRSGVVGGLGYGFSFLMLFFTYGLCFYVGAQFVRQGKTTFPDVFKVFFALVLAAIGVSQASALASDATKARDSAISIFSVLDRESKIDSSSGDGMTLEVVSGNIDFSNVSFKYPLRPDVQIFSDFTLRIPSGKTVALVGESGSGKSTIIALLERFYDPDSGRISLDGVEIKSLRVSWLRDQMGLVGQEPVLFNDTIRANITYGKHGGATEEEVVAVAKAANAHEFISGLPQGYDTMVGEKGIQLSGGQKQRVAIARAIVKDPRILLLDEATSALDAESERVVQDALDRVMVSRTTLVVAHRLSTIKGADVIAVLREGKIVERGRHEALMRISGGAYASLVELRSKTE

SEQ ID NO: 18442 - protein, 230 aa, Zea mays
  VARIANT 14: note = Ancestral polymorphism is M, Derived polymorphism is I
MRKPAVQQRGAGAIRTLKRGAWTPEEDELLARAVAKDGEGRWRTLPRRAGLLRCGKSCRLRWMNYLRPDIKRGPIAADEEDLILRLHRLLGNRWSLIAGRLPGRTDNEVKNYWNSHLSKKLVARGIDPRTHTPLPAAAASLHSHSHRADDDSPAGAAGSSADKTPPPLVEVEPSVAPPPAQPNSSFGDGSSGDFAGGMMGLGSEGFDGVARDTEPTAIPVSASVVFFLPL

SEQ ID NO: 18443 - protein, 173 aa, Zea mays
  VARIANT 110..173: note = Derived polymorphism lacks residues 110 to 173
  VARIANT 71: note = Ancestral polymorphism is K, Derived polymorphism is N
  VARIANT 41: note = Ancestral polymorphism is K, Derived polymorphism is N
MQKKKNKHANVKSNHDTADAVVEFLSDSKYDAPLKLKKKSKKKKMESSGPAVVYESSVVTEDAGASKLKKKKRKVKGGKVSAGITDAEEILHENQIEETSANIYAADVNQLAALSEDVDNEEPQKLKRGKKMEVKKSGKAKKKDKHASRKDNNNLERHVDVSTANADENMRFH

SEQ ID NO: 18444 - protein, 480 aa, Zea mays
  VARIANT 13: note = Ancestral polymorphism is Q, Derived polymorphism is E
MEAAAAAETGLAQKPVVLYPSPGMGHLVSMIELGKILGARGLSVIIVVVEPPFNTGATAPFLAGVSAANPSISFHRLPKVERLPPVKTKHQEALTFEVTRVSNPHLREFLAAASPAVLVVDFFCSIALDVAEELRVPAYFFFTSGAEVLAFFLHLPAIHERTAASFQDMGKELVHVPGIPSFPATHCILPTMERDDVAYDGFLKGCTDLCRSQGIMVNTFRSLEQRAVETVAAGHCTPPGLPTPPIYCIGPLIKSEEVLGKGGEECLAWLDAQPRASVVFLCFGSIGRFSVEQIREVAAGLEASGQRFLWVVRAPPSDDPAKKFERPPEPDLDALLPEGFLARTKDRGLVVRSWAPQRDVLAHASVGGFVTHCGWNSVLEAVMAGVPMVAWPLYAEQRLNRVFLEKEMQLAVAVEGYDSDEGIVAAEEVAAKVRWLLESDGGRMLRKRTLAAMRQAKDALREGGESEATLTGLVDEWKRI

SEQ ID NO: 18445 - protein, 114 aa, Zea mays
  VARIANT 85: note = Ancestral polymorphism is P, Derived polymorphism is R
  VARIANT 81: note = Ancestral polymorphism is S, Derived polymorphism is L
  VARIANT 77..114: note = Derived polymorphism lacks residues 77 to 114
  VARIANT 70: note = Ancestral polymorphism is D, Derived polymorphism is N
  VARIANT 68: note = Ancestral polymorphism is T, Derived polymorphism is I
  VARIANT 65: note = Ancestral polymorphism is D, Derived polymorphism is V
  VARIANT 63: note = Ancestral polymorphism is W, Derived polymorphism is L
  VARIANT 62: note = Ancestral polymorphism is L, Derived polymorphism is P
  VARIANT 60: note = Ancestral polymorphism is R, Derived polymorphism is M
  VARIANT 56: note = Ancestral polymorphism is S, Derived polymorphism is F
  VARIANT 52..114: note = Derived polymorphism lacks residues 52 to 114
  VARIANT 51: note = Ancestral polymorphism is G, Derived polymorphism is D
  VARIANT 42: note = Ancestral polymorphism is I, Derived polymorphism is V
  VARIANT 30: note = Ancestral polymorphism is V, Derived polymorphism is I
  VARIANT 27: note = Ancestral polymorphism is E, Derived polymorphism is K
MMTVKRWSRGPATTQIDKLVVHMACVKMPVVMLINRLIFAFIDLSVYGLLGWYYVSRTLRLLWEDFITVDGFVMLPQVMWLTFVPFIHNSLLHGIISGSLDVADVAMVSKQPTY

SEQ ID NO: 18446 - protein, 88 aa, Zea mays
  VARIANT 7: note = Ancestral polymorphism is C, Derived polymorphism is Y
  VARIANT 8: note = Ancestral polymorphism is D, Derived polymorphism is G
  VARIANT 20: note = Ancestral polymorphism is L, Derived polymorphism is S
  VARIANT 24: note = Ancestral polymorphism is L, Derived polymorphism is F
  VARIANT 44: note = Ancestral polymorphism is T, Derived polymorphism is I
  VARIANT 48..88: note = Derived polymorphism lacks residues 48 to 88
MVSLHFCDMNKVVCHHLRPSKDYLPVLLGLAQQGSVLRHKVQFTWSNQEDNAEANTLLLPRSYGNGYAPRVSEESRHATVDVFLKAAG

SEQ ID NO: 18447 - protein, 614 aa, Zea mays
  VARIANT 197: note = Ancestral polymorphism is V, Derived polymorphism is L
MSATIDRLATPSHEGRAHSDEKRECNSDEENSEGERKPKKDSFKKRAVTTGYRFRHSLRRKSKTKNDNHIASIEDIRDVQELEIVERFRQCLLDDGLLPEHHDDYHTMLRFLKARKFNIDKAKHMWSEMLRWRKEFGADNIEEFDYTELDEVVKYYPQFYHGVDKDGRPVYIELIGKVDTNKLVQITTIDRYLKYHVKEFERCLQMRFPACSIAAKRHIDSSTTILDVKGVSLKNFTKDARELIMRLQKINNDNYPETLYQLYIINAGQGFKILWGTIKSFLDPETASKIHVLGNKYQTKLLEIIDGSELPEFLGGKCRCEEYGGCPKSDKGPWKDPEIFKRVINGEANYGRQVLAVSSINQKEVGCTEHTTEQEKGNDASAKSISQVEDVSSSTALVDPIISPNLTHVDEAIAYIKAFLGLKFQGHASSSDAPPIIGDSIPAAGKVMDACSNPRNSSTPSSSGSFSLRNIPATLGGLKTRIVAWSTFVILTLSAFLCSVLSIVTKRLSNQAITCDHYSADFHQGYMGNGTLTSVLTRLGELEEKVQALEAKPPQVPFEKEELLHTAVYRVDVLEAELISMKKALYETLIRQDELLAYIDQQQTAKFCRQKFCF

SEQ ID NO: 18448 - protein, 355 aa, Zea mays
  VARIANT 34: note = Ancestral polymorphism is P, Derived polymorphism is L
  VARIANT 79: note = Ancestral polymorphism is P, Derived polymorphism is A
  VARIANT 83..355: note = Derived polymorphism lacks residues 83 to 355
  VARIANT 171: note = Ancestral polymorphism is L, Derived polymorphism is H
  VARIANT 187: note = Ancestral polymorphism is K, Derived polymorphism is N
  VARIANT 332: note = Ancestral polymorphism is S, Derived polymorphism is L
MHRDLKPENFLFANKIESAILKAIDFGLSVFFIPGERFSEIFGSPYYMAPEVLKRNYGPEVDVWSARVILYILLCGVPPFWAETEQGVAQAIIRSVIDFKRDPWPRVSDNAKDLVRGMLNPDQKRRLTAHQVLGHPWLQNIKKAPNVNLGETVKARLQQFSVMNKFKKHALRVIAEHLWVEEAADIKDMFEKMDLNKDQMLSFEELKLGLHKFGQQMPDADVQTLMEAADADGNGSLNYGEFVTLFVHLRKIGNDEHLHKAFAYFDRNQSDYIEIDELRESLADDLGQNREEIINAIIRDVDTDKDGKISYDEFATMMKAGTDGRKASRQYSRERFTSLSLKLQKDGSLQMTITR

SEQ ID NO: 18449 - protein, 113 aa, Zea mays
  VARIANT 62: note = Ancestral polymorphism is V, Derived polymorphism is L
  VARIANT 61: note = Ancestral polymorphism is P, Derived polymorphism is L
MLLMVEEKKPYEMKLVDLGNKPKWSVSLPLNILQPARGVSPVTTGLAKCHTSFLEVVEALPVEDNSIDVVIGTLVLCSVNNIDMALRDDTLLCLVQGVLDPSQQFVADGSEPG

SEQ ID NO: 18450 - protein, 355 aa, Zea mays
  VARIANT 271..355: note = Derived polymorphism lacks residues 271 to 355
MATVEVVVANGLGGADTKTVFKETYSKLKEEMLDDPAFEFTDESLQWIDRMLDYNVLGGKCNRGLSVIDSYRILKGVDVLSKEETFLACTLGWCIEWLQAYFLVLDDIMDNSQTRRGQPCWFRVPQVGLIAVNDGIILRNHISRILQRHFKGKPYYVDVIDLFNEVEFKTASGQMLDLITTHEGEKDLTKYNLTVRRHIVQYKTAYYSFYLPVACALLLAGENLDNFGDVKNILVEMGTYFQVQDDYLDCFGDPEFIGKIGTDIEDYKCSWLVVQALEHADEKQKNILFESYGKSDPACVAKVKDLYKELKLEEVFQAYERESYNKLIADIEAQPSKAVQSVLKSFLHKIYKRDK

SEQ ID NO: 18451 - protein, 429 aa, Zea mays
  VARIANT 34: note = Ancestral polymorphism is R, Derived polymorphism is S
  VARIANT 322..429: note = Derived polymorphism lacks residues 322 to 429
  VARIANT 363: note = Ancestral polymorphism is E, Derived polymorphism is K
  VARIANT 413: note = Ancestral polymorphism is P, Derived polymorphism is S
MAGAVSALFLLDMKGRVLVWRDYRGDVSALQAERFFTKLLDKEGDSEVHSPVVYDDAGVTYMFIQHNNVFLLTAARQNCNAASILLFLHRVIDVFKHYFEELEEESLRDNFVVVYELLDEMMDFGYPQYTEAKILSEFIKTDAYRMEVTQRPPMAVTNAVSWRSEGIRYKKNEVFLDVVESVNILVNSNGQIVRSDVVGALKMRTYLSGMPECKLGLNDRVLLEAQGRATKGKAIDLDDIKFHQCVRLARFENDRTISFIPPDGSFDLMTYRLSTQVKPLIWVEAQIEKHSRSRIELMVKARSQFKERSTATNVEIEVPVPSDATNPNIRTSMGSAAYAPERDAMVWKIKSFPGGKEYMCRAEFSLPSITAEEGAPEKKAPIRVKFEIPYFTVSGIQVRYLKIIEKSGYQALPWVRYITMAGEYELRLI

SEQ ID NO: 18452 - protein, 205 aa, Zea mays
  VARIANT 91: note = Ancestral polymorphism is R, Derived polymorphism is W
MFQYIIALILVAILVVSMNKSVDARMVHPIVTPEAISPSLASNDGRRLIGTTGHDELVALCQQMHYKTLCTTMTTLPGVMTPEQLLDASLRITAVKAAMTEMKLDQAIKSSSAQGNAMMSSLETCKESYASLVDSINTTRNTLKSGGSNADIMSELSAAATFSTDCEDTFDERPELKSPIPGAQRHVSRLVSNCLDLAATIMDQP

SEQ ID NO: 18453 - protein, 520 aa, Zea mays
  VARIANT 183..520: note = Derived polymorphism lacks residues 183 to 520
MAEGEFKPAAMQVEAPAEAAAAPSKPRFRMPVDSDNKATEFWLFSFARPHMSAFHMSWFSFFCCFLSTFAAPPLLPLIRDTLGLTATDIGNAGIASVSGAVFARVAMGTACDLVGPRLASAAIILLTTPAVYYSAVIDSASSYLLVRFFTGFSLASFVSTQFWMSSMFSPPKVGLANGVAGGWGNLGGGAVQLIMPLVFEAIRKAGATPFTAWRVAFFVPGLLQTLSAVAVLAFGQDMPDGNYRKLHRSGDMHKDSFGNVLRHAVTNYRAWILALTYGYCFGVELAVDNIVAQYFYDRFGVKLSTAGFIAASFGMANIVSRPGGGLLSDWLSSRFGMRGRLWGLWVVQTIGGVLCVVLGAVDYSFAASVAVMILFSMFVQAACGLTFGIVPFVSRRSLGLISGMTGGGGNVGAVLTQLIFFHGSKYKTETGIKYMGFMIIACTLPITLIYFPQWGGMFLGPRPGATAEDYYNREWTAHECDKGFNTASVRFAENSVREGGRSGSQSKHTTVPVESSPADV

SEQ ID NO: 18454 - protein, 209 aa, Zea mays
  VARIANT 51: note = Ancestral polymorphism is V, Derived polymorphism is I
MDEATKKNVEATVLEILRGSDMESVTEYKVRAAASDRLGIDLSIPDRKLFVRGVVEEYLLSLSSKEEAKAEEEGVTGRESKGKEHEEEDEEDDDEEEDEGKGGGKREYDDQGDLILCRLSSKRRVTLSEFKGRSLVSIREFYVKDGKEMPSAKGYASPVFSCIFRSLFSAVIVLPLVSSCISMTLEQWEAFCNAVPAIEDAIKKLEDSD

SEQ ID NO: 18455 - protein, 1211 aa, Zea mays
  VARIANT 182..1211: note = Derived polymorphism lacks residues 182 to 1211
  VARIANT 188..1211: note = Derived polymorphism lacks residues 188 to 1211
MPAGSGPTDNAQAKRRGRPILPLPCIARTDSTPSNQKAIQLLPSAKSLLLLPSPCSVPLGSRRQRQPAPSRVRESPNLSIFQSTAAATKGSPPSPPRWRLAGIWCRARFGFGWIRIRPEDTGPCRAAGAEMHKSKGKFSGVLHKGFKPDKCKTSLRMAVARIKLLRNRKEVQVRQMRREVAQLLEANQDMTARIRVEHVIREEKFMQAYDLIEVYCELIVARLSIIDSQKTCPIDLKEAVASVIFASMRCSDVTELADVRKHFKSKYGKEFEAAALEVRPDSGVNRLIIEKLSAGAPDVQTKIKTLSSIAEEHNIKWEPKAFEEKLQQPTEGHLYGSATYSGGNTSTMGSSTSSISTPQPTYSGVSAAPVDSATIHVPANKTAYGSANSNTFSKESIHNSSSASVPPISQHGPSAYSSAQVPGSNNISHGNPGGPPYPQYSATVPDAVSRNEDSNQNRERKPLVTGANWNVEFKDATSAAQAAAESAEMASIAARAAAELASRGNYSGDKGTGAYDSAAYSSKNTVRKQRAEHVVKDESFHDQSSGVNDPSEMPSNSRNFFGGTETSHVDSENISTAPYQQFHAYNPDSHPYVYEMPTEPPRAHSPDPRFDDLYERESDIGRSEVDPFDFPRENFQDTASVGHNFKDVEIRTPSYDQESTDDYYGNFNSSHDTLAHGSSTTAWDKQNDKAQDNSSPVVFDQYDSDVEQENLLDTFSSKHTEQLPAPGDHMRFSTADWSEQHTSESPSKQRTSALFSRTETQLSDNLGTNKSDIPSPHSYHNMRPAFDSDGGSSDEEIATTTHAVPLRSHSGGSASSVLNKGGGPDASPIFDYSGAHAVRNLNRVQSRDSDLSEEETDLDKFKGSSFARANEQQLLPSAIRTSATSDDKEDDISLNFGKLTPGLRNKPRQPPPYTKVSRESILPKQSLPKVSAGTEESVDSEENTTFKQDRSSPQSSFSARTSSGKDYDSGLYERNRSVGTHWEAKSTIARNSSGLDDAEKLSDLPTNISLPTTKSSERWNSSKVPYHEKPGIGTRREVRSTLARNYFDSDDSEEELEQQQIPQSKQSGVLIQSRRTREVTSDTKRDGRFQTGAQYGDETESVTSKTQVHQGFNSSSTERSERRDPSVYPRVAVQRSSSKAEQIESPMERGKPQGAEMRSTLFRGNEEDTETSSGTPKESTPKTPPAHVHPKLPTDYDSFAAHFRSLRTNRP

SEQ ID NO: 18456 - protein, 663 aa, Zea mays
  VARIANT 144..663: note = Derived polymorphism lacks residues 144 to 663
  VARIANT 114: note = Ancestral polymorphism is R, Derived polymorphism is S
MRTQGEGHVEEATGFEVGIVVPRLSRAAAAGATDNCVARLVRELEGAGLLVERVRGVSAEFIKLAAPMGTLGRAAAEMHMKKLTYIGMELQFQSDQVAAFVRQTDGSLFSWRERYSCFRYLIYGIVNKTNSEVVLKFDDKEFHWKQSESLLTRLEAEGVVKLVFPLHDEIKRKQLLRNWALNWLDFTWQPIDEIYSYFGTKIATYFAFLGMYARWLFFPAVFGLATQLIDFGSLQWLVLPGFFIFVISWAVLFLQFWKRKNSALLARWGIHCSLSEYKNLDNVSFLSDSLTVEEKEFGVVSVVVEKRKFQRNEWFGVLLRIRNNAIIVLAIICLQLPFELAYAHLYEIAETEVMRYLLTAVYLVAIQYYTRIGGKVSVNLIKYENNQGEESSSASLVYKVNTMKPLAFTLCSHILGYFTMLLCIVIYWPSGESSSSVSLCTRHVLENLIENSIPYLKYSYKKYIAVHKKKRGKESTVGRSVRLSTRVEKEYLKPSYTASIGAELEDGLFDDFLELTLQFGMIMMFACAFPLIFCFAALNNVTELRADALKLLVMLKRPVPRAAATIGAWLNIFQFLVVMAICTNCLLLVCLYDVEGKWRIEPGLAAILIMEHALLLIKFGFSHFVPEEPAWVRANRVRYVAQAQNVCSKQLLRSISKFQGKLD

SEQ ID NO: 18457 - protein, 912 aa, Zea mays
  VARIANT 667..912: note = Derived polymorphism lacks residues 667 to 912
MPSSYAAAAAGSSSRKPNRTSSAAAPTLRPPAPSPSPAPAPLAVNPSVISDSDPSSYSSSSADEADFAASDSATASVVSAYLSVAGEGADLSKVGIFLSSAARRRSPPCLICFDPIRPSDPVWSCSSSCFAILHLPCIQSWAHQSASGPAVPCPTWGCPKCRFAYPKSEIPSSYVCFCSKTIDPAPDPWILPHSCGDVCGRRLDANLDSGCEHTCLLLCHPGPCPPCPAVVPKATCFCGVHREPRRCAHQRYSCGGKCNKRLSCGLHHCPVDCHDGPCPPCAVLGSHKCECGEILEEKLCSERIFQCKRECGGMLDCGKHKCERGCHGGKCGECPLRGRRTCPCGKKNYPRLECDAEAATCGSTCEKVLGCGRHRCPERCHRGPCDGTCRLVVTKACRCGGLKKEVPCYQELTCERKCQRLRNCGRHACKRRCCAGDCPPCSETCDKKLRCGNHKCLSPCHRGACSPCPLMKTISCACGKTCFEVPCGTEKNQKPPKCSKKCNIPRLCRHKLECRPHKCHYGACPPCKLICGEEFPCGHTCKERCHGPISPPNSEFTLKPTKKKMGKHIECTPGTPCPPCKEVVLVSCFGQHLGQERTMPCCKWRPFPCENLCGNPLLCGNHYCTKSCHVLEVPLNHPEGDRTTSISKVNALAMPCEQCNLPCQRVRYSLFVFKNSSLVCFTKLNMKKLLWFHMLLSLVQDIDIFISEVCHPGVCPSVDQCMKKYSENLFLLNKKFVDNLNLSFNYVCTYLYLLFDISIKVNTRCACSTLKQEWRCQDVLKEYRKSGRDPKEVPKSQFGVGLLACGEDCKKKLKAPDSELHLRKSQENKIPAVEVVNAPKRRKRRDRGQEVKISKFQEVKTFVLRALLIILLSIIVAAGLYLLWKGIFWLSDWMNEMEEQRASQRYPRGAML

SEQ ID NO: 18458 - protein, 221 aa, Zea mays
  VARIANT 43: note = Ancestral polymorphism is S, Derived polymorphism is F
  VARIANT 71: note = Ancestral polymorphism is L, Derived polymorphism is P
  VARIANT 74: note = Ancestral polymorphism is L, Derived polymorphism is P
MSEVFEGYERQYCEASASLSRKCTAASALDGERKKQKLSEIQSGVEEAESLIRKMDLEARSLQPSIKAGLLAKLREYKSDLNNVKSELKRISAPNARQATREELLESGMADTLAVSTDQRGRLMMTTERLNQSTDRIKESRRTMLETEELGVSILQDLHQQRQSLLHAHTTLHGVDDNIGKSKKILAAMSKRMDRNKWIIGGIITALALAILFILYFKLAH

SEQ ID NO: 18459 - protein, 285 aa, Zea mays
  VARIANT 203..285: note = Derived polymorphism lacks residues 203 to 285
MGAPKQKWTSEEEDALRRGVRKHGAGKWRTIQKDPQFSPILSSRSNIDLKDKWRNLSFSASGLGSSKVRVPKITGSSSSPSSSSQALLLPAANNVTEAMLPADADKKPRDGKTPPKYGAMIMEALSELNQPNGSDIDAIFDFIKQRHVVQSTFRRFLPSKLRRLADSNKIEKVDNFYRLPDSFATRTPAQIKVSDPKQKDPSKASKTIGLFAASSPALEAAMAAAVKVTDAEAKAHDAHDQMMEAERMLKMAEDTESILTIAAEIYDRCSRGEITTLVPVAQREF

SEQ ID NO: 18460 - protein, 443 aa, Zea mays
  VARIANT 263: note = Ancestral polymorphism is T, Derived polymorphism is R
MEPRIGNKFRLGRKIGSGSFGEIYLGTNIQTNEEVAIKLENVKTKHPQLLYESKIYRILQGGRQVGLTTFVLTAGIPNVRWFGVEGDYNVLVMDLLGPSLEDLFNFCSRKLSLKTVLMLADQMILSQIISSWVLADELIRENKNLTGTARYASVNTHLGIEQSRRDDLESLGYVLMYFLRGSLPWQGLKAGTKKQKYEKISEKKVATSIEALCRGYPTEFASYFHYCRSLRFDDKPDCSYLKRLFRDLFIREGFQFDYVFDWTILKYQQSQIATAPPRAVGHGAGPSGLAPVLQNDRQSGPEEARTSGWSSMDRRRAPLPITSVGTLSKQKAPIGNDATVSRDAVISGPNFMGRSSGSSRRPVVSSSRDMVATDSSEPSRARATDASPGAFRRASGPQRSSPVHSAEQKRSSSGRHPSNVKNYDSALKGIEGLHFDGDERVQY

SEQ ID NO: 18461 - protein, 332 aa, Zea mays
  VARIANT 258: note = Ancestral polymorphism is M, Derived polymorphism is T
MGTPSQGSAAVTAARVDLCALDLMPVFAKEMIAGGVAGAFSKTAIAPLERVKILLQTRTNEFGSLGVLKSLKKLRQLDGVMGFYKGNGASVMRIVPYAALHFMAYERYRCWILNNCPSLGTGPLVDLLAGSASGGTAVLCTYPLDLARTKLAFQVNSSDELSRALKRGSPQPAYGGIIDVFRCVYSEGGVRALYRGVGPTLMGILPYAGLKFYIYEGLKVHVPEDYRSSVTLKLSCGAAAGLFGQTLTYPLDVVRRQMQVQNQQQHEQFGAPRITGTFQGLVSIKQTQGWKQLFAGLSLNYIKVVPSVAIGFTAYDTMKHLLKIPPREKNKV

SEQ ID NO: 18462 - protein, 527 aa, Zea mays
  VARIANT 468..527: note = Derived polymorphism lacks residues 468 to 527
  VARIANT 406..527: note = Derived polymorphism lacks residues 406 to 527
  VARIANT 270..527: note = Derived polymorphism lacks residues 270 to 527
  VARIANT 178..527: note = Derived polymorphism lacks residues 178 to 527
  VARIANT 58..527: note = Derived polymorphism lacks residues 58 to 527
  VARIANT 32..527: note = Derived polymorphism lacks residues 32 to 527
MARNNEGHLQLPEMDHIQPKNTPHNEPLPLGQKLMLHHGSDAPLRIGHSSHENMRLRSNDLPPLSHTVQTQGYRVGNPGASHAPFVHCHAGSSSSHLPEPAVNYPHRSEEGFAPVGSHMDNRRAATKRKDPIVHPAGISATGYYVGSSSNTQLSNSVQPNPAPLSEPLLRQIPLSIDRSGWDGLHLIHQEGFQRNVRARQRHSHNISLEPRTASTYPLNSVHVPSFGSTTSASLSMSVERNQASVSVPTRNVPSGAPGITSRSLTRRAYYPVVGSSNSSVDVVPTICGSSGAAIFANGGYALNADAGTVSIYPNPAPATSSGSITMPMPMLHQMVIQSHPPATSAATSTSMWIAQPLPARTAAASRHARRVSAGLANNGRYRRARSSYYSLHPLMMVEAERFMMDQLVFYESRAAAADPHRDMRLDIDNMSYEDLLALGESMGNVNTGLADEKISKCVKEVVCCSSDQMQTDQDDQDDDGSCVICLEGYRDKDMLGILKCRHDFHAGCIKKWLQTKNSCPVCKAAAA

SEQ ID NO: 18463 - protein, 425 aa, Zea mays
  VARIANT 24..425: note = Derived polymorphism lacks residues 24 to 425
  VARIANT 70: note = Ancestral polymorphism is V, Derived polymorphism is M
  VARIANT 81: note = Ancestral polymorphism is A, Derived polymorphism is V
  VARIANT 85: note = Ancestral polymorphism is A, Derived polymorphism is T
  VARIANT 87: note = Ancestral polymorphism is V, Derived polymorphism is I
  VARIANT 89: note = Ancestral polymorphism is A, Derived polymorphism is T
  VARIANT 92: note = Ancestral polymorphism is A, Derived polymorphism is V
  VARIANT 101: note = Ancestral polymorphism is C, Derived polymorphism is Y
MESTSGEDAPKRNPLPSALVSNLQSVLAARRPSAAEVSTAATASEAEAEAQEAEASDAPAGDGTPARPIVLLTCAGGIRSAGLAALVDALVAAGRCDVHVCAPESDKQACGHSITIRETIAASSVDFTGAKAFETSGTPVDCVSLALSGRLFPWSSPALVPNGPLTVHFLFCYQFISELCRFHSSAIAAAREALVYGVPSIAISLNWKKDETKDSDFKDAAQACLPLINAALDDIEKGTFLRGCLLNIGVPSAPSANKGFKLTKQSGYSPAQSWEAVSTSRPLSATHFMGMHQSLGIQLAQLGKDASAAGAARRVSAQRKAVEVESVAAAGKQEIREVVKKLFRAEFVEKRYEGLDEDIDLRALENGFISVTPLNVHGQVELEIGATASDWLSAAVSLDKEKVAASATADQQDVAAEEKEAPSAA

SEQ ID NO: 18464 - protein, 89 aa, Zea mays
  VARIANT 29: note = Ancestral polymorphism is A, Derived polymorphism is V
MEKAAGVSAARLAVAAAAVLLCLLLLLAAGPQGVSGADGRRKTASPYDKLISCRVLGNCDKNKGPEATRPGKPVNKYTRGCSKIDKCRD

SEQ ID NO: 18465 - protein, 238 aa, Zea mays
  VARIANT 32: note = Ancestral polymorphism is P, Derived polymorphism is L
  VARIANT 41: note = Ancestral polymorphism is F, Derived polymorphism is L
  VARIANT 42: note = Ancestral polymorphism is V, Derived polymorphism is I
  VARIANT 65..238: note = Derived polymorphism lacks residues 65 to 238
MLSLKRNIWTIDTLVSRLEGFVSNKDQSYEDPIEELLYAVFVVSSENATVAELATTLQADLYQLQAAASFACRLGWAVKLLDTDSVLRDSSTPALSNNILSDEVESSRTSVASEKSGHELLSSDSDGHKNSGMAYVGFIVDANVTSYLMMGSLSPGLKSHAVTLYEAGKLGDSCKADLCNDLASLEGKRFEGVLQEFANHAFSLRCELECLLSGGTSTETADLTTRNIQFHSDASYSI

SEQ ID NO: 18466 - protein, 520 aa, Zea mays
  VARIANT 121..520: note = Derived polymorphism lacks residues 121 to 520
  VARIANT 276..520: note = Derived polymorphism lacks residues 276 to 520
  VARIANT 408..520: note = Derived polymorphism lacks residues 408 to 520
MKERSGSRAAVDERYAQWKSLIPVLYDWFANHNLVWPSLSCRKMPCSLHHVTLQLMMLISGCLLTGGGHSLRKLPTRIVSACTYLNRQVHLQTDGSVPNTLVIANCEVVKPRVAAAEHISQFNEEARSPFVKKYKTIVHPGEVNRIRELPQNSKIIATHTDSPDVLIWDVEAQPNRHAVLGASESRPDLILTGHKENAEFALAMCPAEPYVLSGGKDKSVVLWSIQDHISALGDSSSSPGASGSKQSIKTANEKESPKVDPRGIFHGHDSTVEDVQFCPSSAQEFCSVGDDACLILWDARTGTAPAVKVEKAHSGDVHCVDWNPLDVNYILTGSADNSVRMWDRRNLGSGGAGSPIHKFEGHKAAVLCVQACQDNIFAVIFSLCGCGCFLCCFFIPLFFAIILSFGFQWSPDRASVFGSSAEDGFLNVWDHEKVGKKKNSNVPAGLFFQHAGHRDKIVDFHWNSSDPWTIVSVSDDGESTGGGGTLQIWRMSDLIYRPEDEVLAELENFKAHLASCAPKN

SEQ ID NO: 18467 - protein, 241 aa, Zea mays
  VARIANT 181..241: note = Derived polymorphism lacks residues 181 to 241
  VARIANT 188: note = Ancestral polymorphism is D, Derived polymorphism is Y
MSPKVLSSMEVEAGFAGDGVGSNNGPQDMWSLGEIDPKRARFPCCIVWTPLPVVSWLAPYIGHVGICQEDGAVLDFAGSNLVSVDNFAYGSVARYLQLDRKKCCLPVNLAEHVCKQSYNHSELGAAISWDDALRSSMRRFQHKYYNLFTCNCHSFVASCLNRLAYNGSLEWNVLNVAALVWFHGRWVDRMSSVRSFLPVLTVTCIGILMAGWSFLLGMAAFSALLIGWFVFTVYCVKGLVC

SEQ ID NO: 18468 - protein, 312 aa, Zea mays
  VARIANT 232: note = Ancestral polymorphism is G, Derived polymorphism is R
  VARIANT 229: note = Ancestral polymorphism is D, Derived polymorphism is V
  VARIANT 226: note = Ancestral polymorphism is A, Derived polymorphism is S
  VARIANT 154..312: note = Derived polymorphism lacks residues 154 to 312
  VARIANT 127..312: note = Derived polymorphism lacks residues 127 to 312
  VARIANT 122: note = Ancestral polymorphism is C, Derived polymorphism is Y
  VARIANT 91: note = Ancestral polymorphism is C, Derived polymorphism is W
  VARIANT 75: note = Ancestral polymorphism is G, Derived polymorphism is D
MGEERAAPKPGPAAATAVELTGFVMGAEEAERAAAAAGVATVQDLLPLLVPSAMERARAPISRFRVGAVGLGASGRVYAGVNLEFRGLPLCHSVHAEQFLVANAAAAGEPALRAVAVSHMPCGHCRQFLQEMRGAAAVQILVTSDAAEGRAPEWRALASLLPRPFGPRDLLPEDVALVLEPHGNDLGGPVANGFARGDLDARLREAAEAAARAAHAPYSKCPSGFAVADGDGRIYAGGCIESAAYNPTLGPVQAAIIGMVAAGGGPAGDVVAAALVEKERAEVAQEATARIFLEAVAPRATFHVYNYRPSDA

SEQ ID NO: 18469 - protein, 72 aa, Zea mays
  VARIANT 18: note = Ancestral polymorphism is R, Derived polymorphism is C
  VARIANT 29..72: note = Derived polymorphism lacks residues 29 to 72
  VARIANT 55: note = Ancestral polymorphism is S, Derived polymorphism is L
MPLLAPSVAADAPRRRRRLIGRNHMDSPEVVASASPAAAASERQERPARLRRKISSAFCACMGHPPASHAQQ

SEQ ID NO: 18470 - protein, 247 aa, Zea mays
  VARIANT 201..247: note = Derived polymorphism lacks residues 201 to 247
  VARIANT 191: note = Ancestral polymorphism is R, Derived polymorphism is C
  VARIANT 181: note = Ancestral polymorphism is A, Derived polymorphism is V
  VARIANT 169..247: note = Derived polymorphism lacks residues 169 to 247
MTFTEKMVLAVFRDLTILWMTKSLMDDIHGWGVLFDGRVGDRTITVYIWNGEEPKPNKGHLAWADAFVITADSISMLSEACSTGLILKNVASLFMSKDSLKVEADTRLGELIKSVSGAAHGGCQVSSKGQKCRPCGRAAWARGEVQAAAVRACKEPGRQQPCEVCYVRRRESTNVEDMFLAHIFGMDTLARGLHNVVKLIEMIFSTKRYQSFDSEIGALIEDGKGDFEMLKKKVLECSALFHPASRN

SEQ ID NO: 18471 - protein, 1148 aa, Zea mays
  VARIANT 397..1148: note = Derived polymorphism lacks residues 397 to 1148
  VARIANT 349..1148: note = Derived polymorphism lacks residues 349 to 1148
  VARIANT 262..1148: note = Derived polymorphism lacks residues 262 to 1148
MSSRFPHVGGGDRRRDDAGDAALARDIVTLHKALSLDPSARRRRSLPLPSPSPAATEQQRHKPRLKPSFSSSSSRKLLPPTASSSASTSSSSSSSSSSFWKKSLTAISHLGRRRVDCAFALHVHSVDGLPAALDGSAVSVHFRRMSVSASTRPVAAALGAAAFEEALTLRSPVYFSRGAKAVVKYEPRAFAVSVAASTLDLGKHEVDLTRLLPLSFDDLEDGGDSGFGKWSTSFRLSGPARGARLNVTFSCSLLAGGGASEQHMGGEVAGLRRGSMARPVSVQAPTPLPARSRDVRVLHEVLPSLRSARPVPSSVADGVPDARKEELAAPDCTEEGSPEAKHCTSVEVKKGDSVHPDGDWGTVEFNVVEHGVEVASDDPQRLKHVETSNAAGQEEDSGFKIDEEGSFKPLQVSGDVAEDQTVGVKTEVVAVSDVAVQRENMEDKQDGIVKAASLPTAALEAEGQFGADAELEDLECILNELSVAEPEEFESPVVEDKHSRRLSCTGVTDSYMSASRKGRSRSMDASTDSVANEFLDMLGIEHSPVGQPSDSDSESPRERLWKQFEKEALASGNAILGLDFDDGIEGPICGNVVEDFDLSAMIHEAELELQNGSQPIDTKFRAKSLEDEETEALMRQFGLNEKSFQSSPPESRSGFGSPISLPPEQPLELPPLAEGLGPFIQTKDGGFLRSMNPALFKNAKNNCSLVMQASSPIVLPAEMGSGIMDVLHGLASVGIEKLSMQANKLMPLEDVNGKMMQQIAWEAAPALESAERYDALDYHGIDALVGGGGNAPSGKKTGRCADLSSLGGENASEYVSLEDLAPLAMEKIEALSIEGLRIQSGMSEEDAPSNISAKPIGEFSSLQGKCAENTWSLGLEGTAGLQLMDVKQSGEVDGLMGLSITLDEWMRLDSGVVDEEEQYSDRTSKILAAHHAKSMGLVAENRNGDRKSRRSGRWGLLGNNFTVALMVQLRDPLRNYEPVGTPMFALIQVERVFVPPKPKIYSTVSDKGNSEQDDEEPKAEEVPDKALVTEEKAEELEDPVPQFKVTEVHVAGFKSEPEKTKPWGNQTQQQSGSRWLLAAGMGKGNKHPLMKSKAVVKPTKEAAGQAGDTLWSISSRVHGAGTRWSELAGNKSHSRNPNIMLQKDKRFR

SEQ ID NO: 18472 - protein, 188 aa, Zea mays
  VARIANT 30: note = Ancestral polymorphism is I, Derived polymorphism is M
MSTSRRRTLLKVIVLGDSGMRIKVKIMQKIYVHKKFSQQYKATIGADFVTKEVLIEDRLVTLQIWDTAGQERFQSLGVAFYRGADCCVLVYDVNSNRSFDTLNTWHDEFLNQASPSDPKTFPFILLGNKIDVDGGKSRVVSDKKAMEWCASKGNIPYFETSAKEDYNVDNAFLTVAKLALEHERDQDM

SEQ ID NO: 18473 - protein, 342 aa, Zea mays
  VARIANT 94..342: note = Ancestral polymorphism lacks residues 94 to 342
MLLRITSTYPITEKGKQRSWVGPSGQYYRELPCPSCRGRGYTPCKECGIDRSSLDCPMCNGKGIQTCLQCSGECVIWQESVDEQPWEKVRSRDELRLRYGFELLNPSALNSPLKVKEDDEVDKLEININNPKRSKRTYASTSPEVAKKISRSLRSLNAQTGLFTKHMKIIHQDPELRAQRVAAIKRTKGTDVARKRASEIQKAFFSDPENRLKRSIAMKGVKFYCSKCGQEGHRSFYCPTLREGSTRVRFRCRLCGREGHNSRTCGKPKSEKEHKQRPHHCSRCGEKGHNRRNCPTSTDLGSDASGYVVNKVNGSNSAVYQCSICLEKGHNRRTCPKRKATL

SEQ ID NO: 18474 - protein, 246 aa, Zea mays
  VARIANT 96..246: note = Derived polymorphism lacks residues 96 to 246
  VARIANT 38..246: note = Derived polymorphism lacks residues 38 to 246
MEMRLFIALQCVQCATMQVKQQKKSSNKWVCVVCNQRQSVLHVHARGYRAADLRRFVQDTNLARGRREFAPLAEPDVDRDLAAVEEGDVFPIEKSQTEWSEYLDDPGETGKGCGGLGADASDGESDEGIEVITELPQKRPKVRPRKAQSDVVGKRTKLSTHPTLCNKRQQIKQGSNPHCATTTAEAQGSKWTKYLDTSRFGGRKCFDTSGLHWTEHDESATTEATTDVVVDDENHRVHPRNVTSSV

SEQ ID NO: 18475 - protein, 535 aa, Zea mays
  VARIANT 152..535: note = Derived polymorphism lacks residues 152 to 535
MATALPASASAACLLQLSRRGLPGTSSVLSPLRTATFRWHGACNVACSCSPGPRPAVPAERRDGVAGHATSPEGTVRIVAVVGEGSISPIKDAPWEEVMRHTADRLKWVDEGFEMLVFTDNLVGHDNLRKELLSHCDMLVNVAITNQDAVQWLINNSKHISNVICFQSSPSLVNKLGGTYVQYTGEQDMFGKLTSIGKPSGIEESTEVMKTISNAWERHNSDDIRFCLLVVVNAYIRPVAMLKNLRAKGLSTLTCMIKNCGPQILNCLFDPNCRKALQCLNSCSPTDQVCNYRCIASYESPYLEAFSLCVLQKNNCLDLNAEIPSKPNVMPLTMFREQKLSHEIAEDLFVGWLDSMEWSWRVAAGQNPAYDQFPCQYQLFYRGKAKGSFWYEPVFQVKTLEGELVWRRRRYRVRRASTPGTFYFSVLDNGVISKEYWTIVDVAEDFSWGLFHYHGAAQAAGLSYTGAVLVTPDGSYPDLEDPRLASALENCAIKKWELYTVDNCSCMGAPLGTPEGSKLHHQISPGKESSVLQRR

SEQ ID NO: 18476 - protein, 593 aa, Zea mays
  VARIANT 256: note = Ancestral polymorphism is C, Derived polymorphism is W
MDTAIGSVPAASDAARHPAPSASAPRDATLGRHLARRLAEVGARDVFTVPGDFNLTLLDELEAEPGGVRLVGCCNELNAAYAADGYARARAGGVGACAVTFTVGGLSAINGVAGAFSENLPVVCIVGGPNSNDYGSNRILHHTIGLPDFTQELRCFQNVTCYQAVVNNLEDAHEQIDTAISTAIKESKPVYISISCNLPSIPHPTFSRHPVPFFLSPRLSNQMNLEAAVEAAAAFLNKAVKPVLVGGPKMRVSKAWEALAELADACGYPVAVMPSAKGLVPVHHSRFIGTYWGAVSTPFCAEIVESADAYLFAGPVFNDYSSVGYSLLLKKEKAIIVQPERVVVGHGPAFGCVLMKDFLHALATRLKKNTVAYENYRRIYVPPGEPLSSEPGEPLRVNVLFKHIQAMLSGDMAVIAETGDSWFNCQKLKLPEGCGYEFQMQYGSIGWSVGATLGYAQAAKDKRVIACIGDGSFQVTAQEVSTMLRWGQNSIIFLINNGGYTIEVEIHDGPYNVIKNWNYTGLVEAFHNGEGACYTAKVRTEEELTEALEAALGPKKDCLCFIEVIVHKDDTSKALLEWGSRVSAANSRPPNPQ

SEQ ID NO: 18477 - protein, 34 aa, Zea mays
  VARIANT 13: note = Ancestral polymorphism is A, Derived polymorphism is T
MPAAGRFAMEGMAVDQGIAHFLVLAAVFAVCLFR

SEQ ID NO: 18478 - protein, 640 aa, Zea mays
  VARIANT 600..640: note = Derived polymorphism lacks residues 600 to 640
  VARIANT 568..640: note = Derived polymorphism lacks residues 568 to 640
  VARIANT 386..640: note = Derived polymorphism lacks residues 386 to 640
  VARIANT 187..640: note = Derived polymorphism lacks residues 187 to 640
MARTPGADQAGSWALPSIGRRGGGVSGDLLPAFGELSPTGGNSNTINPYDCRYRWWQSFLIGPVLYSAWSSPFELALDRAATTPVVVASLVMDAFFAADIAVSFFVAYFDRSANLFVDDRRKIATRYLKRPSFAMDVASTIPFNVIYQLVSGRSTGWFRYLNLLRLWRLQRVSKLFARLEKDIRFDYFYTRLIKLCGVTLLALHSSACIFLWMAFHHGDREHTWLGSQVRDFADGSVWVNYTYAVYWSITTLATVGYGDLHAVNPGEMVFATCYMLFNIGLTSYIIGNTTNLVVHAATNTFKMRDMVRRVSMFGSVNRLPPELREQMMASAQLRFSTAEVIQQQLLSDLPTALRSRVAHHLFRDAVQRCYLFQGVSDDLVVRLVSEMRAEYFPPQADIILQKVTSTACYIIVSGSADVLTTADDGTEKLVMKIGPHGMAGEMGVILGVPQPFSVRSRRLTQALCISHSHLLGILRSNTADANTVCANFVKQLKSLKELQVAEDAPFFEETFSKTSMDELQIGSIFQQLLNDGDAARMIPRQNQKATFGTEQHEETAPCMLPRRQGGLRVVIHDRFPSDGAEKNLGHAAGKLVLLPDSLQELMKVAEVKFGKAPRRVLTVEGAEVDDVAVLRDGDHLVLCC

SEQ ID NO: 18479 - protein, 231 aa, Zea mays
  VARIANT 106..231: note = Derived polymorphism lacks residues 106 to 231
  VARIANT 28..231: note = Derived polymorphism lacks residues 28 to 231
  VARIANT 10: note = Ancestral polymorphism is C, Derived polymorphism is Y
MGFAGNVEPCFISPTVVAVNESFSGSAQPAARGTPARGNWLAQHSAGVMADLEALARSRASSSHNLSYPIRKGQVGAPAVYCRVQLLVFFFATLLTIDLGWGELFQVENWDTMERFWQQCIFNYLSCDLEDHYFLLTESPLTAPETREYTGEIMFKTFNVPSLYIAVQPVLALAAGYTTTKARHVDIPYLPMLVPPKKWKGVLHGKTSGSLAIADVGDGFKAANVLGETLF

SEQ ID NO: 18480 - protein, 148 aa, Zea mays
  VARIANT 26..148: note = Derived polymorphism lacks residues 26 to 148
  VARIANT 85: note = Ancestral polymorphism is K, Derived polymorphism is N
MGRKLGGLDRVLHCFSLSLCSSACACVHSMDEEEEDDERKALLLSSQLVQLRGFVDGAAAKTLAFHLEPKTVELKVSMHCYGCAKKVQKHISKMDGVTSFEVDLENKKVVVVGDVTPYEVLESVSKVKLARLWVAPDPKQQAAQSLQA

SEQ ID NO: 18481 - protein, 200 aa, Zea mays
  VARIANT 68: note = Ancestral polymorphism is P, Derived polymorphism is S
  VARIANT 59: note = Ancestral polymorphism is N, Derived polymorphism is S
MALLPRTARLALLSTPRAYSAAAAAGASPTSPAPYGGAPPPAMSKTAEFVVSKVDDLMNWARKGSIWPMTFGLACCAVEMMHAGASRYDFDRFGVIFRPSPRQSDCMIVAGTLTNKMAPALRKVYDQMPEPRWVISMGSCANGGGYYHYSYSVVRGCDRIVPVDIYVPGCPPTAEALLYGVLQLQKKINRRKDFLHWWTK

SEQ ID NO: 18482 - protein, 310 aa, Zea mays
  VARIANT 104: note = Ancestral polymorphism is L, Derived polymorphism is F
MTAGQLLRTEPSAQPQRVRHSTPPAALQADIVPSYPPPESDGDESWVWSQIKAEARRDADAEPALASFLYATVLSHASLDRSLAFHLANKLCSSTLLSTLLYDLFVASLAEHPSVRAAAVADLIAARSRDPACAGFAHCLLNYKGFLAVQAHRVAHVLWAQGRRALALALQSRVAEVFAVDIHPAATVGRGILLDHATGVVVGETAVVGDNVSILHHVTLGGTGKAVGDRHPKIGDGVLIGAGATVLGNVRIGAGAKVGAGSVVLIDVPPRSTAVGNPARLIGGKKGEEVMPGESMDHTSFIQQWSDYII

SEQ ID NO: 18483 - protein, 514 aa, Zea mays
  VARIANT 66: note = Ancestral polymorphism is R, Derived polymorphism is W
  VARIANT 196: note = Ancestral polymorphism is R, Derived polymorphism is M
  VARIANT 220..514: note = Derived polymorphism lacks residues 220 to 514
METLVTAVLADLVCRAISFTVDRCCHQQRKRCVEDTTQRLHHVLLRVQTVVEEADRRCVTNRAMLRQLQLMREGVYRGYYLLSAFKRQGPVNDTAQDREVSHHGHSSFALSQFNPAKRLCTISAWTTTRANMAPQDTTREGEAELQEVLTVLERMASDMKELVVFLSSYPPTRREPRSGHLWLENRMFGRDAEQERIINFLLEPEPAHAEYLGVLPVIGRARIGKSTLVEHVCLDERVRNHFSLIVFLAESDTKDGEQSPHLGDNAIIKHQDLGSAGKSLVVIELAGDVDESTWWRRTLPALRARRTTPVSKIIVTSRSEKIAGFGTTQALELKPLPREAYWYFFKTIAFGSTDAMDEPELESICMEMADLLNGSFVAANLFGGYLRANLCPQFWQKVLKGYRHYASMHLNLFGEHQSDSLANGRPIYMWRLPKTDAMLIAYGCYQACSAQQHDLPMTTMEEVQIGSTRPRGDFQAVAWRSNIPPYYSYLLNCGVQASSSLIRTPRRNKKLRHR

SEQ ID NO: 18484 - protein, 373 aa, Zea mays
  VARIANT 198..373: note = Derived polymorphism lacks residues 198 to 373
  VARIANT 200: note = Ancestral polymorphism is S, Derived polymorphism is Y
  VARIANT 244: note = Ancestral polymorphism is W, Derived polymorphism is R
MTAAAAAARAARRHFSSRLQTTTSRLLHANRFLIFSSPLCPIGDSQAAARETSGSFIHPAAVVHPDAAIGQAVSIGPFCTVGPSARVGDTCQLHAGSHVMGHTELGEGCIVQTGAIVGADIPGRTIIGENNVIGHYAVVGAKCQDLKYKTNNARFLLFRLEMNAFYILVEIMRSESTALFTALLNLVTARLYPPVLLEGSVWQVIGDNNLIMGSSHIAHDCKIGNNNIFANNTLFAGHVIVEDWTHTAGAVVVHQFCHIGSYSFLGGGSVVAQDVPRYMMVAGDRAELRGLNIEGLRRNGFSDQEVRRLRKAYQRVFMPTITSKSSFEDRLAELEQEVELSESPAVSCMVESIRMSFVQGHRGICKFRSWNSS

SEQ ID NO: 18485 - protein, 290 aa, Zea mays
  VARIANT 125: note = Ancestral polymorphism is T, Derived polymorphism is K
MGRSPCCDKTRVKRGPWSQEEDAVLRSFVQRFGNAGNWIALPQRAGLKRCGKSCRLRWLNYLRPELRHGGFTDEEDRLILSLYGEIGSKWSVMASRLPGRTDNDVKNYWNTKLKKRYLASSSTSTTQGRSPPPPSPPPAPAPPSGDNSSNAAAAADIHHTHQDEKPCLPPTPPALTEFDTTFADDTLLFKSEQLYAELVGLIGKQSSSTGDRDEASTPSSSSSAARPRRLAAQVAALCGPWTVDVRDTAALLSEPTTALLDAYGAADDAFGPALSACSFQDLLASSYVDL

SEQ ID NO: 18486 - protein, 380 aa, Zea mays
  VARIANT 43: note = Ancestral polymorphism is R, Derived polymorphism is L
  VARIANT 71: note = Ancestral polymorphism is P, Derived polymorphism is L
  VARIANT 97: note = Ancestral polymorphism is G, Derived polymorphism is E
MGCCGAAMSARPRGIHEETLLRVPGASVHLLAGSSDGPVELARGDLAVVRLTKDDVAVATAVRVGRDLGWPLARDEPVVRLDPLHYLFTLPAADKDGTFLNYGVSFNAGAGADASALASLDGLLRSNACFSAPSSGAVVPPSKGSSRARPQPGPVVASGDGYWNEFAPRVEGYNGVLAKAIAAGTGQLVKGIFMCSEAYASQVQRGADLFRPQAAGSARSRFGDAAGGANRNTKPGAVNKSLKRVRKLSEMTEKMSQSLLDTVISVTGSMAAPLIRSKQGRAFLATVPGEVILASLDAINKVMDAVENAEKKSLAATSNVVAGAVSRRYGENAGEATQDAFATAGHAVGTAWNLFKIRKAVTPSSSMPGNMVKSAIKNRN

SEQ ID NO: 18487 - protein, 137 aa, Zea mays
  VARIANT 46: note = Ancestral polymorphism is K, Derived polymorphism is E
MADSKATSAVTLRTRKFMTNRLLARKQFVLEVIHPGRANVSKAELKERLAKMYEVKDPNTIFVFKFRTHFGGGKSTGFGLIYDNLESAKKFEPKYRLIRNGLATKVEKSRKQMKERKNRAKKIRGVKKTKAGDAKKK

SEQ ID NO: 18488 - protein, 1189 aa, Zea mays
  VARIANT 627..1189: note = Derived polymorphism lacks residues 627 to 1189
  VARIANT 617..1189: note = Derived polymorphism lacks residues 617 to 1189
MSRYNSLSSISFSFLWEGSQKICTQNYKSLRSPRTLQDNTSAGFWKWTMGFMLHNMDGRTTASNGYGAINEPDFRSGGSYNGRRSVDEGFPRDSYGRGAYCQDTHDRNMYAPPPSVGGIWSQPRRNHDEEYATARDHRRHNTDYHNDGKHHEFDSYRVDRLHDNYHATDSYYESGSRPDFGVDRSKRIGSRESAEFHGEFEDRYHSSNQSRDDSYERDHEYGHYDYDSDHERGRRDSSWKRRDSCESKRERSGLSREREESPYMRHSRSRSHGRDDRSRSWSRSRSPRARSHGRNQRDGLYDDNRFDRRREYDWDDRRHGDSVAPSATVVVKGLSMKTNDDDLYQILVQSQWGPLRSVRVIKERNSGMSRGFAFIDFSTVEAACRMMEATGKSGLQIDGRNVFFQYRPLELCPKSNLPDFDQCNEPRAEDALPADATGPTHVLVVRGLDENADEEMLRYEFAKHAPLKDIRLVRDKFTHVSRGFAFVHFHSVEDATKALEATNGITLEKNGQVLRVAYAKSTHGPASGGSQSNSLAAAAIEAASFAQQEAEKDLHMVFIDLEKAYDKIPLNVVLWALDKHNVPTKYVGIIKNVYNYVTSVRTSDGDTDDFLIKNRTLGLHRGRDRVWNNDICDRLGVAQNDEKLLQHWLSPEASYDAIGWAPKEYNPDDKQNSNFESQKDDGSGTAQSGFVWDEKSGYYYDSASGFYYDGTTGLYYDSNSGVWYSYDQQTQQYVPCTDQSNTKAAGETSSENMISDSICGKKVVISAPAATIKQNKKTSLPDAVQAAANAALAAEKREKEKAKEIKLASKSSLIANKKKMNNVLAMWKQRNQEGQAARIVIDDKEPPNSDDRFNHSHSGTGFSSKSKPNFEFENAMDNSVRQGIASTQMLDSDVKPRPVSNSLGTTVMGVIRGSTRGVIKSDTTFHALSDAGSTDSRTTIITRSNGLMTSPVELVTPAPYKTDVSALVSNTSSGVSGSGKRRFSEAPGQSQYRDRAAERRNLYGSSLRTDAVGLDSTGHYPSRKGPSEIGSMPFPPGVGERSNGEIGNNENYEVITADSAIDESNVGNRILRNMGWQEGLGNIALRTKWWKLKGKTTEAFKERVIKEGTRKKTNNNWEKMATCIRKVALKGLGKDGSGIKEPVQAKSVDVRAGLGSQQRKADPILEAKAGDSYKTIIQKKAMARFKEMS

SEQ ID NO: 18489 - protein, 282 aa, Zea mays
  VARIANT 227..282: note = Derived polymorphism lacks residues 227 to 282
  VARIANT 201..282: note = Derived polymorphism lacks residues 201 to 282
  VARIANT 41: note = Ancestral polymorphism is A, Derived polymorphism is V
MPTQIPHPPHHRRNQRHGRSTITVACVTWYFGQASRRPWKAHFIKDRRCNTAWAVFALESECKWALSGTPLQNRVGELYSLIRFLQIFPYSYYFYKDCSCEILDTSMKKQCDCGHSSVRHFCWWNKYISTPIQYGSTSFKGKRAMTLLKEKVLKGIVLRRTKKGRAADLALPPKIVALRRDSFDKNEMEFYEALYTQSVTQFDAYVDAGTLMNNYAHIFDLLTRLRQAVDHPYLVAYSKTAGHPEGMKNEGNESMESQCGICHNLAEDVVCKTVVILIIPIL

SEQ ID NO: 18490 - protein, 288 aa, Zea mays
  VARIANT 209..288: note = Derived polymorphism lacks residues 209 to 288
  VARIANT 182..288: note = Derived polymorphism lacks residues 182 to 288
  VARIANT 173: note = Ancestral polymorphism is P, Derived polymorphism is R
  VARIANT 131..288: note = Derived polymorphism lacks residues 131 to 288
  VARIANT 105..288: note = Derived polymorphism lacks residues 105 to 288
  VARIANT 82..288: note = Derived polymorphism lacks residues 82 to 288
  VARIANT 61: note = Ancestral polymorphism is G, Derived polymorphism is R
  VARIANT 54..288: note = Derived polymorphism lacks residues 54 to 288
  VARIANT 47..288: note = Derived polymorphism lacks residues 47 to 288
MEIQSSGRSIEGLMDKVLSVNILSSDYFKELFKYKTYHEVIDEIYNQVDHVEPWMTGNCRGPSSAFCLLYKLLFTMKLTVKQMHGLLKHQDSPYIRAKNEVSKEYFLKTVRNIVGDKLLKQAASQYQMQAQRSPQINPSNYSLSGQVSGQQTAPNGSVTGDEQKGYPGAHTIPMRQAIASTRPPQFRPSSSGQMGSNTGYPPLQTNLHKANEMGNMSDGKGVHMLQTRPPNNSIPVQTMQHHVQRPQTSSPVFGANSIHARPFPRPVGGPAAPFRPQMADSNPRAHLI

SEQ ID NO: 18491 - protein, 174 aa, Zea mays
  VARIANT 118: note = Ancestral polymorphism is V, Derived polymorphism is L
  VARIANT 62: note = Ancestral polymorphism is G, Derived polymorphism is S
  VARIANT 38: note = Ancestral polymorphism is P, Derived polymorphism is R
  VARIANT 36: note = Ancestral polymorphism is P, Derived polymorphism is L
  VARIANT 35: note = Ancestral polymorphism is L, Derived polymorphism is V
  VARIANT 28: note = Ancestral polymorphism is S, Derived polymorphism is F
MASSSSLAIRSVLGCLILVALAVCGLPSLGSAMGVPQRQPNPINFTIGVEGVVWCKSCRYRGYVESRDASPLRNASALLRCRHGRRALSVWSATNAHGYFLVQTGAQAAPFTSRNCKVYVPRSPVRGCRVAVSPGRNKGSPLKFRRFVTRTDGLQARYSAGSFTFAPQDRSKCD

SEQ ID NO: 18492 - protein, 230 aa, Zea mays
  VARIANT 37: note = Ancestral polymorphism is F, Derived polymorphism is L
  VARIANT 145: note = Ancestral polymorphism is G, Derived polymorphism is E
  VARIANT 152..230: note = Derived polymorphism lacks residues 152 to 230
  VARIANT 164..230: note = Derived polymorphism lacks residues 164 to 230
  VARIANT 177: note = Ancestral polymorphism is T, Derived polymorphism is I
  VARIANT 180: note = Ancestral polymorphism is G, Derived polymorphism is R
  VARIANT 203: note = Ancestral polymorphism is A, Derived polymorphism is T
  VARIANT 213: note = Ancestral polymorphism is G, Derived polymorphism is E
MSRLRALWQASFNATKRALVWSSDDLIPPSERCIFNFNSKDELKRWHLYSDSEYGGLSSASLEITDGASVGDTPLTGVFSGNLSLDMSEESTWRIRRYGFCGMRSKKFDGFIDLDAYDTIAMKIKGDGRCYISTIYTENWVNSPGQQEDNSWQAFVYIPPQDRWEVLKIPLDRYLPTWRGNVIQAKLEMNPARIVGMSLSVNAEGGVPGAKTGPGDFRLDVAWIKALRAL

SEQ ID NO: 18493 - protein, 141 aa, Zea mays
  VARIANT 16..141: note = Derived polymorphism lacks residues 16 to 141
  VARIANT 13: note = Ancestral polymorphism is L, Derived polymorphism is M
MASAEELCEREVLWPETAHDEGDGDDATPSCSSSPPVAPRSRTPAPAPRPRGGVPGSERPTTTTRAGSRPVDIQRPASSARRRGHEDGDRDRDWSAATMVPPHVLVSRRRQEAPCALLRPGARELSHLRDSVLRVTGFIEG

SEQ ID NO: 18494 - protein, 90 aa, Zea mays
  VARIANT 69: note = Ancestral polymorphism is L, Derived polymorphism is P
MSQNAAWAQAERRPLTDPIEIPAATSAARVADRETDAGGEAAAPPHVLLARRGAAAAAASVCSGQGRTLKGRDLRRVRDSVLRMTGFIET

SEQ ID NO: 18495 - protein, 173 aa, Zea mays
  VARIANT 43..173: note = Derived polymorphism lacks residues 43 to 173
MGVLGTLARNLDALVGPGVMLLYPLYASMRAIESPSSLDDQQWLTYWVLYSLITLFELSSWKVLQWFPLWPYMKLLLCCWLVLPVFNGAAYIYEAHVRRYFKMGTYVSPSYGERQRRVLQMMSLDARKSVERFIDTHGPDALDRIIRAAEEEAKREKPELFRVETEASLPSVG

SEQ ID NO: 18496 - protein, 995 aa, Zea mays
  VARIANT 748..995: note = Derived polymorphism lacks residues 748 to 995
  VARIANT 559..995: note = Derived polymorphism lacks residues 559 to 995
  VARIANT 544..995: note = Derived polymorphism lacks residues 544 to 995
MAKPAPAEPFSIRGYAMRMRAVDAAECYPFVGGCRSDVEGESPPRFRPMDPKPLSRWWKHELAAGQARLLAGAKGGEAAASGGGLRKGTKRKGSRSSSTGERARKRRHVLQFRSFLTKKEITAKPQSTSCLHEHKLHMAFPRKHKSSTVHPSTELQPRKKREEARDHMPTHGNSMNKRNRERAGPSSEMNSDLIGIKEVTSAVNKQSIEVNGSTNNPTNTGYELVKTPTGPKDDIFGDLPLLELESSKTMFRTGVHELPTVIEESLITNQTEADSIPEAVPLKLIDASDITAQTPSPLEDLVKSEATEPPCISHNDVAGSHPSTVEIDGLPNHMNINMVKPGLGDMQLKFTDVSALGSHSVLRSKRGSGNPMQGCFDVNKNCSQEMKKHGTNSISSPPAMRTRPEETKFKDAPVKGKKSTDITGAVVTLPTLANQLSYQASVLPSAVSHTVFSIRVDSNDLSSLRSMPAEECIPTTRPGNFRTNVCHGSREHVDPYAAQSTDNQGSSHSKLHPICSPANIGMAFMKLPGLERMEISNCNARIGENRFSNAESMNTVRCQKQQLLSGMTYVMEGQKQIGLSSSQVGKPGLDGYGGQGDHHLQQPTVRLMGKTVSVCSHGKDHNVWTMDKVSPDNVAIETSRLSNSTSGQNTTFSGLHNQRPEPISSVPIVKDCTWNFGNQFVRQAELNKAAIGSSNSQTRHLELHQPPHLISIPQNQQSHLWTPAAHMSRKDQCFVGPAANQSSLVPKSLLNASMQEKYQKSTLLSYDDPSSMPIRQPYQTPGVKSSSGSVISFFEYGANNSLSRSSSPGLTLSLTTGLANDSISAGRAACAGSLTNADGRKAASFAEPIGNRSVYADNVSQQPARPISNRTAYATDNVSQQPAKRQVVTDRHDFMSMGPNIVNHSPGWSLSDAVGPQVLDFSKRVARDAVQTSRNESNNPRASSGPVLPIETWSRPGVVAGANNMLKPGQNLNDHSKLLYSTKFPVDSAINSVVL

SEQ ID NO: 18497 - protein, 448 aa, Zea mays
  VARIANT 159..448: note = Derived polymorphism lacks residues 159 to 448
  VARIANT 165..448: note = Derived polymorphism lacks residues 165 to 448
MLPALIALLLSLLPAVADAASMDPTERETLFRVMEAVSSDRDWRVESPDPCGGPWPGLECKPAADAGAARMHVTRLDFGVEPNPTCKDSASFPPEVFTLPHVQSLFFVDCFTNPAATTALALPPPANLSATGLQQLSIRANPALSGVMPPALASLRSLQVLTISQNGLVRGEIPPGIGDLTSLLRLDLSYNSLSGPVPSQIGQLKSLVGLDLSYNSLSGAIPSRLGELRQLQKLDLSSNNLTAGIPDAVANLTSLTFLALSNNGLTGRFPPGISGLRSLQYLIMDSNPMGVPLPSELGSLARLQELRLAGSGYSGPIPDAFGQLASLTTLSLQDNNLTGPIPAALSRLGRMYHLNLSNNALGGAVPFDRAFLRRLGGNLDLSGNSGLCLDDRSALRGIGACRGGGDGGTPMSSSARTSSGSRGVRGSLVGAACVAVCCLLALNEHALY

SEQ ID NO: 18498 - protein, 489 aa, Zea mays
  VARIANT 331: note = Ancestral polymorphism is E, Derived polymorphism is G
MEISFEAWEGVQRHGQDLADRLAQGFTGLLQVPPQFPWPPSPHKRMPFDIDLPVVPFGAGGPLGVPGKDFPFPAAAVSSVIDIGGRLGQAGAELGASVGGAVQHAVRRLPVPFRNGQIRRRKLPPPLPQPPADSVGEGAVGLFVERAAVDRCPLEAAAAAAAAATGSAAASSVSGPVSGEDLDEDDDGFGCDIGTLGNFKKANGTVNMSATYNTRSQDIESSVVARGGLWRLEASVGPSTSGNDTSPLYLIQLGPLLFVRDSTLLLPVHLSKQHLLWYGYDRKNGVHSLCPAIWSKHRRWLMMSMMCLNPIACSFMDLQFPNGQLTYVAGEGISASGFLPLFGGLLQAHGKYPGETRVSFSCKNKRGTRFTPMVQWPDKSVSLGVTQALAWKRSGLMVRPSIQVSVCPTFGGSDPGVRAEVVHSLKEELNLMCGLSCSQRPSAYTALSIGRSKWNGQVGSSGVVITLETPLNNIGRPSLSVQLNGGFEL

SEQ ID NO: 18499 - protein, 853 aa, Zea mays
  VARIANT 720..853: note = Derived polymorphism lacks residues 720 to 853
  VARIANT 756..853: note = Derived polymorphism lacks residues 756 to 853
MFSRSYTNLIDLANGNLSALDYGGGGDEGGGRPPRARPPQRTMTTPGTLVELDEEEAGSATSDVQSSHANNRLIIVANTLPVRGERRPDGRGWKFSWDEDSLLFHLRDGLPEDMEVLYVGSLRADVPAAEQDDVAQALLERFRCVPAFLPKDLSDRFYHGFCKQTLWPLFHYMLPFSLDHGGRFDRSHWEAYVLANKLFSQRVIEVLNPEDDYVWIHDYHLLAFPSFLRRRFNRLRIGFFLHSPFPSSELYRSLPVCDEILKSLLNCDLIGFHTFDYARHFLSCCSRMLGLEYQSKRGYIGLDYYGRTVGIKIMHVGVNMVHLHSLLQQPDLERLVTELRNKFNHKTVLLGMDDMDIFKGIDLKIRAYEHMLKSHPKWQGRAVLVQIVNPKGGGGKDLEGLQTEIEDNCKRINEQFGRSGYSPVVLVKRTLSSVERMAYYTIAECVVVTAVRDGMNLTPYEYIVCRQGITSLEGSTDDKPRGKSMLVLSEFIGCSPSLSGAIRINPWNIESTAEAMNESIALSDTEKQLRHEKHYRYICSHDVAYWSKSYIQDFERSCRDHFRRKCWGIGLGFGFRVVALDRNFKKLTVDSIVADYKKSKSRIILLDYDGTLVPQTTIDKTPSETVVNMMNTLCSDKNNVVFIVSGRARDSLEKWFYPCPKLGIAAEHGYFMRWTREEQWQIQHHISDFRWMYMAEPIMKLYTEATDGSYIETKESALVWHHQDAGPRFGPSQAKELLDHLESVLINEPVSVKSGQHIVEVKPQVVSKGFVAEKILSTLMEKGTQSDFVLCIGDDRSDEDMFEQIVDCMRRSMVDPQTSMYACTVGQKPSKAIYYLDDTNEVLNMLKALADAS

SEQ ID NO: 18500 - protein, 319 aa, Zea mays
  VARIANT 263..319: note = Derived polymorphism lacks residues 263 to 319
MPYPPKRGESKAAALCRRLRFERSVLSTLSRRRRRGANMKAIGNGGEWWWNLPSLRRKSDSRRRGRRNTDPRGRRRGPPREPLSSSSSSESIEQGGGWPIEFPFRQAVTAASLTFTGDTIAQVRSRIVDRRRCCPDSNTKELIPDILLNHDWIRALRMASYGFLLYGPGSYEWYQLLDRCMPKQTFVNLSAKVILNQIVLGPCVIAVIFAWNNLWLGKLSELPSKYQNDALPTLLYGFKFWIPVSIVNFGYGCFASHFSYSSQMFLITAMGDSFACSCRLHVLLFHFLELLSVDHNEQMKPPVSCQLPTYLERTISYGP

SEQ ID NO: 18501 - protein, 1081 aa, Zea mays
  VARIANT 598..1081: note = Derived polymorphism lacks residues 598 to 1081
  VARIANT 519..1081: note = Derived polymorphism lacks residues 519 to 1081
MAAPDRAGAGAGGHLRGHAHLTNCIHLRHHHGHAHGGAGAGGASSSGWRRSPASVASATLMRDLLALQRSRSLRDPSTRRSVESSRVAADPDAGSGDDVDLPAKSRRSAGALKALLDQLAENPHPHPKPGRRPPRRFKRRAGRRATAVSKPPDRAAALSVNSSSQEAVCGNKYLFHGGGDDDDGAEELQQHLPQDLRNVCGIPWNWSRLHHRGKSIIDMAGRSLSCGLSDSRSAAGRKSEAGAASGGHVNASRPLFPAKSERLASSTSSDSDALPLLVGAATSGARNHIGAISGSYSGELGIFSNQTSQMDSDLLSESQSGQKSQASQHGRGRHRSLTQKFAPKTFKDVVGQSLVVQALSNAILRRKIGLVYVFYGPHGTGKTSCARVFAKALNCLSSEHPRPCDSCTVCIAHNLGKSRSLMEIGPVGNIDIDGIVDVLDNVMLSPAPSHYRVFIFDDCDTLPADTWSAISKVVDRAPRRVVFILVSPNLELPHIILSRCQKFFFPKHRESDIVNTLQWICTSESLDVDKDALKLIASRSDGSLRDAEMTLDQLSLLGQRISLTLVQELVGLVSDDKLVDLLDLALSADTVKTVKTLRDITETGVEPLALMSQLATIITDILAGSYAFNRERPKRKFFKRPTLSKEDMGKLRQALKILSETEKQLRVSSDKTTWLTAALLQLAPDKQYLLPSSSTSTSLNHGLLVGSFPDRGIGRSSAVEHKCNLAGTSYGEGTVEHTENGHVLSTSSVKGNEGTKNRKADNEMIWQAVLESIQSDTLRKMMAKEARLNSVSLGTAPTVQLIFSSRINKFKAENYRAQILQAFESVLHSAIILEIRYESKNDTKAGHVPSMFPYPENDSSNVTLRSFTKHSPLSSRGENLITRLKKDSAVKGANSSKTTWMQSDPHILTEGEIIEVGPSHMHWHAQTNSGVLDINGRKKENVWEEEASSSPNQESVTNQKGRNGNRQRQQNSIVKGKVSLAHVIGRAEACSQQGGWSRRKAISIAQKLEQENLRLEPKSSLLCWRTSRTRRKSNFVIIILLGFLGRCSSLQLRSGIESHAPYQGSYCVEDAFRPNLQDRRI

SEQ ID NO: 18502 - protein, 265 aa, Zea mays
  VARIANT 189: note = Ancestral polymorphism is W, Derived polymorphism is R
  VARIANT 186: note = Ancestral polymorphism is L, Derived polymorphism is Q
  VARIANT 131: note = Ancestral polymorphism is R, Derived polymorphism is T
MAVPMSAIESAWQLLIANFTEFQLATVITFLLHETVFFLSGLPSLLFERFGLFAKYKIQKRSNTSAYQNRCVLRLILYHVSVNLPVMILSYPAFKFMGLRSSLPLPHWTVVVSQVLFYFVLEDFIFYWGHRALHTKWLYKHVHSVHHEYATPFGLTSEYAHPAEILFLGFATVVGPALTGPHLFTLWLWMVLRVLETVEAHSGYHFPWSPSNFLPLYGGSDFHDYHHRVLYTKSGNYASTFVYMDWLFRTDNGYRKAKRPLRSKK

SEQ ID NO: 18503 - protein, 472 aa, Zea mays
  VARIANT 119..472: note = Derived polymorphism lacks residues 119 to 472
MVRAWGRRTALPPLLILGLLRLHYSSLVVAQEGQEKDPATLFAQASGMMDLRKYDGALGLLNAVLEIDPNHSEAYRQRASVLRHKCRYEEAERDYNKHLELSPGSASVVKELSQLLQAQNSLQSAYGQFDSGDFSKVVEYINKIVLVFSPGCLKAKLLKAKALLALKDYSSVISETGFILKEDEDNLDALLLRGRAYYYLADHDVASRHYQKGLRLDPEHSELKKAYFGLKNLLKKTKSAEDNAAKGKLRVSVEDYKAALAMDPDHTAYNVHLYLGLCKTLVRLGRSKEAISTCTEALIIDSELVDALTQRGEAKLLSEDWEGAVQDLKEAAQKSPQDMGIREALMRAEKQLKLSKRKDWYKILGVSKTASAAEIKRAYKKLALQWHPDKNVDNREKAENMFREIAAAYEVLGDEDKRVRYDRGEDVEEMNMGGGGGFNPFGGGGQQYTFQYDGGFPGGGFPGGGGFQFNFG

SEQ ID NO: 18504 - protein, 217 aa, Zea mays
  VARIANT 134: note = Ancestral polymorphism is P, Derived polymorphism is L
MAAAAADFRSRRSCGRHVHLYPLHLCPLNGVHSLCPAVWSKYRRWSMLVNDSLLAWVCHNSTLQLEMAEECLLQAKDLSGLLLLYSSLGDAEGIEKLASLAKEHGKNNVAFLCLFMLGKVEDCIQLLVDSNRIPEAALLARSYLPSKVLEIVAIWRDDLSKINPKATESLADPSEYPNLFEDWQVALTVEKSVASQRNFLLNPRSNVLIFHCICSEN

SEQ ID NO: 18505 - protein, 308 aa, Zea mays
  VARIANT 21: note = Ancestral polymorphism is P, Derived polymorphism is L
  VARIANT 164..308: note = Derived polymorphism lacks residues 164 to 308
  VARIANT 166..308: note = Derived polymorphism lacks residues 166 to 308
  VARIANT 279: note = Ancestral polymorphism is A, Derived polymorphism is T
  VARIANT 286: note = Ancestral polymorphism is G, Derived polymorphism is R
MAMQATRRLASLSLQRRLLLLSQTEAPSIPTAAAAAFLHSHATSFGYKQIREEDKSKLVGNVFSSVASSYDLMNDLMSVGLHRLWKDRLISKLNPFPAMKHLDVAGGTGDVAFRVLERIKSVSHRAMQGTLTETEEDTHIYVCDINPNMLNVGKKRAAERVEFLFSGYSEEHCLSWIQGDAEALSFEDGSMDGYTIAFGIRNVTHIEKALSEAYRVLKRGGRFLCLELSHVDVPVFKEIYDVYSFSVIPTIGELVAGDRQSYQYLVESIRRFPNQEKFAQMIQEAGFQRVEYENLVGGVVAIHSGLKL

SEQ ID NO: 18506 - protein, 190 aa, Zea mays
  VARIANT 177: note = Ancestral polymorphism is P, Derived polymorphism is L
  VARIANT 90..190: note = Derived polymorphism lacks residues 90 to 190
MLCGLLKSKHNFIRLGFLYVLDKFLMRCKLLLDDSDMQDHTTSDHSKNCLDKAFAVIDIMNSSLLLVVQDNETDHINILKMCDMLFPQLCLRIPSTNAMHVRGLQSLGQLFGCTSKNIDNHLDALASHQSVGNKNLCQSETLQDMGMDQSGQPTLFCEASMATLLRGLAIAPIQLSPCTNFFIFLAIDTA

SEQ ID NO: 18507 - protein, 490 aa, Zea mays
  VARIANT 98..490: note = Derived polymorphism lacks residues 98 to 490
  VARIANT 119: note = Ancestral polymorphism is G, Derived polymorphism is R
  VARIANT 124: note = Ancestral polymorphism is Q, Derived polymorphism is L
MSISGELPGEGSDGEEEVFIDEEDIIHEITIDEEDLPDRDEEDDDVGDGIGRGGFCLELQLSVYAKFSLSAPPFFCQLASQIVLEEIEKPADDDVLSCSITFHDLHLSHQQCFIMQSNGYFRFQLIQKTSLMILRTHFLATKASCYTRNPTDASLVASGGKDDRGFLWRIGSDEGALELTGHKDTVGTVAFSSDGNLLACGSFDGQINVWNTAARALKGTLEGSGSGFEWLKWHPRGHLIIAGSEDCNVWMWNADHNAIINTFVGHSNTVTCGDFTPDGKLICTGSDDASLRIWDPRSAQSRHVIRDFIEFSMECVFVEHIFELVDGHGYHTDGLTCLSMTLDSQTVVSGSKDSSVHAVNVNSGQIVGSLVGHTTSIECVGISSSYGWVATGSMDQKLIIWDLTHQSSRCTCEHDEGVTSLAWLGSSRYVASGCIDGKVRIWDSLSGDCAREFSGHADVVQSMAITADGNAMVSVSSDGSARVFDISMFK

SEQ ID NO: 18508 - protein, 428 aa, Zea mays
  VARIANT 351: note = Ancestral polymorphism is V, Derived polymorphism is M
  VARIANT 367: note = Ancestral polymorphism is P, Derived polymorphism is H
MAAPQHVRAAPLARALRATATATATATASVPVPVPVPAGIKSQGTSRRALLGLSEPQLRQLAIDLGQQSYRGKQLHDLLYKSRAKQIQEFNHVPKAFREALLGAGWSVGRSPVHHAVTASDGTTKILLKLEDNRLIETVGIPVDDDNKGSSRLTACVSSQVLSVDPLLLGTVIQTVVGCPLRCSFCATGKGGFARNLQPHEIVEQVLAIEETFKHRVTNVVFMGMGEPMMNLKSVLEAHQCFNKELKIGQRMMTISTVGVPNTIKMLASHKLQSTLAVSLHAPNQKLRETIVPSAKSYPLGALMDDCKSYFLETGRRVSFEYTLLAGINDEKEHAEELAELLRMCGGGYHVNLIPYNPIEGSEYKRPYRKVVQAFVDALEARKITVSVRRTRGLDANAACGQLRNEFQKNPLLEIEPSPSTERTLVAA

SEQ ID NO: 18509 - protein, 234 aa, Zea mays
  VARIANT 57: note = Ancestral polymorphism is R, Derived polymorphism is C
  VARIANT 201..234: note = Derived polymorphism lacks residues 201 to 234
MPAKLSEQKQHLRKLESDLAQALSVQTSRRSKHNLMTESILKTTATNEQLTHLVTGRRATRDECMNAISIQLKDIESLESESDTNEDKNLEKALIWYNKFLGFQVVGGEGVKFMFNKIDVQSPDKECYFCVKLVEGRYTLVQCVPSVDGAEELVKDLNCNNDLYKFVRVVRDRLQAAIISGNMLSSSFCADLSSITSSSFSASSLDSTSENNINRSQSKNQECPVKGLAKSLAM

SEQ ID NO: 18510 - protein, 135 aa, Zea mays
  VARIANT 75..135: note = Derived polymorphism lacks residues 75 to 135
MSGSKVYTLEEVAKHNTKDDCWLVIGGKVYNVTKFLEDHPGGDDVLLSSTAKDATDDFEDVGHSSTARAMMDEYLVGEIDAATIPTKVKYTPPKQPHYNQDKTQEFVIKILQFLVPLAILGLAVAVRMYTKSESA

SEQ ID NO: 18511 - protein, 598 aa, Zea mays
  VARIANT 215..598: note = Derived polymorphism lacks residues 215 to 598
  VARIANT 300: note = Ancestral polymorphism is P, Derived polymorphism is L
MNKKNSFIPQPSSLPRRKAPKPPPPTAALPPLRRLLALRGHRRLLSTPAASSNNRLSPEAVLYNIHSLSKDPSQALAVFRRSVAAGQPVGSAAYNLMLRTLASHPSAQRHFWPFLREMQEAGHSVDQGTYLAALASFKKASLTADYASLTAHYDKFRKGAKSATAAAEAVRDHDAAGLDSRLSAIGLLPLTETSVTTVLRELREHPIKALAFFRWAGRQQGYTHSSVAYNAMARVLGREESVPEFWDLIRETKAAGMHVDIDTYLKLSRNFQRRHMVREAVELYELMMDGPFKPAQQDGPIIIRRISMGPSPDLELVNRVVNKFEAVWGVKTKELLDGVHRALTRNGMFDEAAEIVQTMKAQGHQPDNVTYSQLVYGLCKADKLEDARKVLDEMEAEGCVPDLKTWTLLIHGCCLAGDVDRAVQYLTEMIEKGLDADANLLDVILKGLCSHEKVEEAYSFFIEMVDKTELRPWQGTCQHLINDLLRVNKLEEALSLLKTMKTCKFPPFADPFPPYIAKYGTVEDARNFFKAMTVNTSPEPVAYLHVLKLFFAEGRYSEAQDLLYGCPNHIRKHPDVIKLFGSIKVESASASRLGSSKQ

SEQ ID NO: 18512 - protein, 174 aa, Zea mays
  VARIANT 24: note = Ancestral polymorphism is T, Derived polymorphism is I
  VARIANT 3: note = Ancestral polymorphism is P, Derived polymorphism is S
MLPNGAELFPNIYYLFLLPSHIITLCVLAGYICHHCWSLITLMEFVPPMSLYRIIYEFSPPSSSGLFSNFSGVHLGDLSDPETFDYLQHAQARQGGQQAATSRFLLVHSSHTSLFLFLISVFDYLIPPMGMDKCNANSVDNDNVHKAGMVMNGLPISVYASETLGCAAAMSTDG

SEQ ID NO: 18513 - protein, 332 aa, Zea mays
  VARIANT 165: note = Ancestral polymorphism is G, Derived polymorphism is S
  VARIANT 150..332: note = Derived polymorphism lacks residues 150 to 332
  VARIANT 124: note = Ancestral polymorphism is T, Derived polymorphism is I
  VARIANT 121: note = Ancestral polymorphism is C, Derived polymorphism is Y
MAPARLLLQLLAAMCAAAAATQKADPAARGLRPLPSNYRVLTQGRYKRNQELTCPDPRTKQPGCMVKCESRCPDQCIVVCPGCKTYCICDFYPGMSCGDPRFTGGDGNTFYFHGSRDRDFCVFTDAGLHINAHFIGNHNPATSRDFTWIQALGIRFLADHRLYVGAQKTTARWDSDVDRLELAFDGEAVAIPAHTGAAWRPAAAPALTVTRTAAANGVRVRLEGVLDVVANVVPVSEEDSRIHAYGVTEDDRLAHLDLGFRFFGLTDDVHGVLGQTYRSDYVSRLSVSSKIPVMGGAAEYLSSDIFATDCTVAKFGDDRRAGISMLASAGAY

SEQ ID NO: 18514 - protein, 518 aa, Zea mays
  VARIANT 299: note = Ancestral polymorphism is D, Derived polymorphism is Y
MTTLSRMLPRLRSSATRALRKVFGLEPAAPPRRLPAPEAFVASERSLLRPLPGLDLPPCLPDNLSRSPTRVTTLPNGLRVATEDIPVMHSTTAAVPRSKNASPLFLLSILNLCGARRRQGPSACIGFFVNSGSVYESGETTGVSYLLERMGFKDTKHRSHLSIVSELELAGASVSVSASREQMVYSYDTLKGYMPEALEILIDCMRNPLFLQEEVQRQLVLAREGFQELQRSPERFLHEQLNIVGFSGALANPLIAPEHVLARINDRIIQKFYHENFTADRVVLAAAGVDHEHMLGYADFLLKDWHRGAPMEKPKSTYVGGYSKHRAYSDMTDVALAFEVPGGWFQERDAAIMTVIQTLMGGGGSFSTGGPGKGMHSRLSLRVLNKYHFVESLSAFSNVYDNTGLFGIYLTTSPYHVAKAVDIAISELIAVATPGEVTEVELRRAKNSTISSVLMNLESRVIMNPWKPMDNFLQRMEGITLDDVATFARKMLASRPTMVSWGDVDKVPPYESICKRLR

SEQ ID NO: 18515 - protein, 218 aa, Zea mays
  VARIANT 67: note = Ancestral polymorphism is R, Derived polymorphism is C
  VARIANT 176: note = Ancestral polymorphism is T, Derived polymorphism is M
MEASLLVAPKPSMPRTIFSARRAGRSWRCLVVAATIKQQLGTRSESVDVDAPVEHLAPPSKATTGARGGLLAAVATTTSSCTAVLPCHALSGAGAVESGPWWWTSPLDTLYRAAAVLGDLDPATARAVAGVAGPVLSAFGFLFILRIVMSWYPRLPVTEFPYVVAYAPTEPFLAVTRRVIPPLGGVDVTPVVWFGLVSFASEILVGPQGLLVLLSQQR

SEQ ID NO: 18516 - protein, 174 aa, Zea mays
  VARIANT 7: note = Ancestral polymorphism is G, Derived polymorphism is V
  VARIANT 16: note = Ancestral polymorphism is P, Derived polymorphism is L
MTTATAVGSVADRIMPHLLNIYGSSATARDFEIYAPNATFEDPLMRAHGVKQIKSAFYTLPKVFGESKITEYTVQENPMGPGKTEVVIQNKQHYKVLGKPVDLTSLIRLQLQDGKVVKHEDWWHGKPLKNRDTVGVPLVGRLAEASRRGAMLLTHALMGFGKDPTQPPPPPPTH

SEQ ID NO: 18517 - protein, 209 aa, Zea mays
  VARIANT 21: note = Ancestral polymorphism is L, Derived polymorphism is V
  VARIANT 62: note = Ancestral polymorphism is R, Derived polymorphism is S
  VARIANT 163: note = Ancestral polymorphism is P, Derived polymorphism is Q
MRRLEVAALALLVAGAAAAALVLLLAVCRQGGSIGKRPAAPELPVSTHRAPTAATKKGWRRRHHHLALLLLLLCSGRRRRRARVEVDPGCRTPSPYAGDAPSSSTAVLEEEEVVAAWRERWIGGPALRALYTIYEEADEEAAGDGEGMDGDARETETPFYTPPASPPRAGGDGGSNGAVPTQPTDGAAAPIVPAHADTEDVADATLDGR

SEQ ID NO: 18518 - protein, 912 aa, Zea mays
  VARIANT 428..912: note = Derived polymorphism lacks residues 428 to 912
  VARIANT 319..912: note = Derived polymorphism lacks residues 319 to 912
  VARIANT 153..912: note = Derived polymorphism lacks residues 153 to 912
MHTKGASSDAIRVSTSSAPSTSSHGSAQDDYDSSGDVYVWGEVICDNTVRVGPDTVIRSTAKADFLLPKPLESKLVLDVYHVDCGVKHAALVTKNGEVFTWGEESGGRLGHGSREDSVHPRLVESLAICNVDIVACGEFHTCAVTTSGELYTWGDGTHNIGLLGNGTDVSHWIPKRISGVLEGHQVAYVSCGTWHTALVTSRGQLFTFGDGTFGVLGHGNRESFSCPREVESLSGLKTIAVACGVWHTAAVVEVIVTQSSSSMSSGKLFTWGDGDKHRLGHGDKEPKLKPTCVASLIDYDFCRIACGHSLTVGLTTSGQVLSMGNTVYGQLGNPRSDGKLPCLIEDIMGEHVVQVACGSYHVAVLTNKSEVFTWGKGANGRLGHGDVEDRKIPTLVESLRDRAVRHIACGSNFTSAICQHKWVSGAEQSQCASCRQPFGFTRKRHNCHNCGLVHCNACTSHKVLRAALAPNPAKPYRVCDSCFMKLNSAAYSSTINKKKEVVPRHSGESNHDAKLARAIVPSNLDMIRSLDSKAAKQGKKTDALSFLRTPQMSSLLQLRDITLSGGIDLNKSVPRAVRTSVRSLNSSRAVSPFSRKPSPPRSTTPVPTTHGLSIAKTAADSLAKTNEMLSQEVERLRAQVDNLRRRCELQELELQKSAKKVQEAMSMVSEESAKSKAAKEVIKSLTSQLKDMAERLPPDQGAYDGSEAKQAHVPNGIEMYASIYTSMNGIHQPRNESVSALSTPGLHIGRSSHPNGISNHHQSPGSITENSEVSAHTHRVSGPPDVENPNRRGHSSSDEMLSASSRADDSSSRDARSLLNGEDGYKSRSAVSLPSNQVQAEWIEQYEPGVYITLTTLRDGTRDLKRVRFSRRRFGEHQAESWWNENRDKVYEKYNVRSSERVSSASSIRSGR

SEQ ID NO: 18519 - protein, 101 aa, Zea mays
  VARIANT 15: note = Ancestral polymorphism is P, Derived polymorphism is T
  VARIANT 22: note = Ancestral polymorphism is R, Derived polymorphism is Q
MAMPSSPPAMSSSPPLRTSGKRRRRRSRTASMPRRAMSAAACRSHSPPTNAIIRHNQPEVWAFCLGNGYAGLKDALGSNDSRLQSSKLYFTCMSLAGMLLQ

SEQ ID NO: 18520 - protein, 100 aa, Zea mays
  VARIANT 78: note = Ancestral polymorphism is E, Derived polymorphism is K
  VARIANT 49: note = Ancestral polymorphism is R, Derived polymorphism is H
  VARIANT 13: note = Ancestral polymorphism is S, Derived polymorphism is F
MLDSLATVTASSSSYEGGGEEARRGGVASCARRRGETRPAGLAGTGGLHCTDGVGLAARRGSDNARRFAAGEGERRTERSRGTCLGGGDADARALRERTP

SEQ ID NO: 18521 - protein, 71 aa, Zea mays
  VARIANT 26: note = Ancestral polymorphism is T, Derived polymorphism is M
  VARIANT 23: note = Ancestral polymorphism is S, Derived polymorphism is L
  VARIANT 19: note = Ancestral polymorphism is V, Derived polymorphism is A
MAAQSTRMVALALVVLLVAATALVPTATAYGCYDDCYERCANGKKDDPACTKMCNQACGSTDKGAAAGAPA

SEQ ID NO: 18522 - protein, 188 aa, Zea mays
  VARIANT 71: note = Ancestral polymorphism is P, Derived polymorphism is R
MEKRHGGGGCTLLHLLGTAAAMAFLLPRSAGAANDAKWHAHAHPVAGAVGHGAPAPHEHAAGLSPLSAPPPTAGADDDLLPPPSRAPVQKAAPHFGFPLQPGDASAAAPSGSEGYPFIGSNPTVPLPTGMTDTSTVLPLPDTGTGDATTKAVGLAASVRAPVSSMIGLGVFLATLFLCATSNHIIHLY

SEQ ID NO: 18523 - protein, 542 aa, Zea mays
  VARIANT 440..542: note = Derived polymorphism lacks residues 440 to 542
  VARIANT 471: note = Ancestral polymorphism is L, Derived polymorphism is H
MNTVALLSLAPQLLIKPSLTCFSRKGVGRYGGIKVYAVLRDDGAEFAKNNNLEALFHVDDPGPRVPIKKGKFLDVNEALEVVRFDIQYCDWRARHDLLTIMVLHNKVVEVLNPLAREFKSIGTLRKELAELQQELAKAHNQVHLSETRVSSALDKLAHMETLVNDRLLPPDGASSTSTAQPTSLVPSTSSTARVRAKKPPRRGLNVSGPVKPYNPSLKNFWYPVAFSSDLKDDTMVPIACFEEQWVIFRGKDGRPGCVQNTCAHRACPLHLGSVNEGRIQCPYHGWEYSTDGKCEKMPSTKMLNVRIQSLPCFEQEGMVWIWPGDDPPKATIPSLLPPSGFTVHAEIVMELPVEHGLLLDNLLDLAHAPFTHTSTFAKGWSVPSLVKFLTPASGLQGYWDPYPIDMEFRPPCMVLSTIGISKPGKLEGKSTQQCSTHLHQLHVCLPSSRNKTRLLYRMSLDFAPWLKHVPLMHLLWSHFAEKVLNEDLRLVLGQQERMINGANVWNWPVSYDKLGVRYRLWRDTVERGSERLPFSNQAESGS

SEQ ID NO: 18524 - protein, 429 aa, Zea mays
  VARIANT 385: note = Ancestral polymorphism is C, Derived polymorphism is Y
MWGERTHHKHWHQGHGTSGNSNNKKHDKRQPKFIPDNYSSVDEVTTALREAGLESSNLILGIDFTKSNEWSGRHSFRRKSLHAINGTPNPYEQAISIIGRTLSPFDDDNLIPCFGFGDASTHDHSVFSFYPENRPCRGFEEVLVSEILVASSITGSTGLWLCVAYSLVQLCAGPTSFAPLIYAAISVVENSNWQYHVLVIIADGQVTAANINDGRLSPQEQATIQAIVDASYYPLSIVMVGVGDGPWDAMQHFDDCIPERAFDNFQYPVLAIVLVPVIVLHKVVNILIIPFVNFTGIMSTSKDMSKKEAAFALAALMEIPSQYKATQGLRPPEKQAQRIGSPRILPPPNKVLENDNAAAAASHPPQTASSKSTGIGKSAADEQVCPICLTNPKDMAFQCGHLTCKECGPTLSTCPLCRALITMRVRLYS

SEQ ID NO: 18525 - protein, 644 aa, Zea mays
  VARIANT 202..644: note = Derived polymorphism lacks residues 202 to 644
  VARIANT 245..644: note = Derived polymorphism lacks residues 245 to 644
MGHSASRPTACAGAGEALPSRFARFRRRLRNRLRRGAGDDSVSSKALAADEFAGIARVRIAKADMQFKDKFFACLSLGDRTYRTETSDNTHRPVWDSEKKVIVETNGPHIARISVFETNRFSKNTLVGYCEVNLFEMLTKDLEEHSEDLRLLDPSSPNTTVGSISISCHIEDPVETEQSFARRVLAIVDYDEDGTLSLSEFSDLMKAFGNKLAVAKIEELFRQADTNSDGIVDIDELAALLAAQQEEEPLISNCPVCGEDLGKYDNINDMIHMTLCFDEGTGNQIMTGGFLTDKQASYGWMFKLSEWAHFSTYDVGLHSGSTASHILVFDRRTKRIVEEVIDGKIVLSMRALYQSKVGLTLINTGVKDLLKNLSEKQGKKMNSLESAKDIPKFLELFKDQINMDEIKDPVESFKTFNEFFIRGLKPGARPIAHGDQNSIATCAADSRLMAFSSVDESTRLWIKGRKFSIEGLLGTSAHSNALSNGSLVIFRLAPQDYHRFHVPVSGTVEKFVEIPGCLYTVNPIAVNSKYCNVFTENKRVVSMISTSEFGKVAFVAIGATMVGSITFLKKEGDYVRKGDEFGYFSFGGSTVICVFEKDAIQFDADLVANSERSLETLVSVGMTLGISTRNKEMQVPDLQKVSLG

SEQ ID NO: 18526 - protein, 724 aa, Zea mays
  VARIANT 560: note = Ancestral polymorphism is N, Derived polymorphism is I
MDVDDPSPRAGGGSGVDPPRIRRLEESVVNRIAAGEVIQRPSSAVKELVENSLDAGASTVSVTVKDGGLKLIQVSDDGYGIRFEDLPILCERHTTSKLSAYEDLQTIKSMGFRGEALASMTYVGHVTVTTITEGQLHGYRVCYKDGVMENEPKPCAAVKGTQIMVENLFYNMVARRKTLQNSNDDYPKIVDFISRFAVHHINVNFSCRKHGANRADVHSSSTSSRLDTIRNVYGASVVRDLIEIEVSDEDAGDAVFKMDGYISNANYVAKKIMMILFINDRLVECTALKRAIEFVYSATLPQASKPFIYMSINLPSEHVDVNIHPTKKEVSLLNQERVIETIKNTIEEKLRNCNTTRIFQTQAVNSALTQVYTQKDKGTEVKMAPGVKSQKAPVSQMVRTDPRNPSGSLHAYWHGQSSKLENKYDLVSVRNVVRSRRNPKDAGDLSSRHELLMEIDSHCHPGLLEVIKNCTYVGLADEVSALIQYNTHLYLVNVVNVSKELMYQQALCRFGNFNAIQLSEPAPLQELLLMALKDDESIGDENDEEKLEIAEANSKILKENAEMINEYFSIHVDHDGNLTRLPVVLDQYTPDMDRLPEFVLTMGNDVTWDDEKECFRTAAAAIGNFYALHPPILPNPSGSGVQVYKKNKACMASGEHVDSTDEDDIDHELLAEAETAWSQREWTIQHVLFPSMRLFLKPPKSMATDGTFVQIASLEKLYRIFERC

SEQ ID NO: 18527 - protein, 339 aa, Zea mays
  VARIANT 86: note = Ancestral polymorphism is A, Derived polymorphism is V
  VARIANT 153: note = Ancestral polymorphism is L, Derived polymorphism is S
  VARIANT 264: note = Ancestral polymorphism is T, Derived polymorphism is I
MVSLRCAVGLCSSAQIGKRGIHGDSQAHAEGAGHDQDMSGVEVLAAIPCSFATELLEIRSKEPSLHVLLIAGNPGIAAFYKDCVEALYENLGGQASITAIGHISHSQKDCEHGRLFSLYEQIDHKVDFIEQELQHSEQPIVLVGHSIGAYIGLEVFKRLQNKIKFIVGLYPFLKMNKSSVTQSAIGYIARSSLLSKWASLFASFIGSLRPSITRGIVRRFLGPSWSVTAVDAACSHLLRYNTMRNVLFMAMTEFQKLTEEPDWTFIRAQEDKMAFLFGVDDHWGPLSHLEEISKHAPRVTLSVETEGHTHGYCCTEAGSVWVADYIANLIKNQMLLWNN

SEQ ID NO: 18528 - protein, 582 aa, Zea mays
  VARIANT 240: note = Ancestral polymorphism is P, Derived polymorphism is L
  VARIANT 222: note = Ancestral polymorphism is D, Derived polymorphism is Y
  VARIANT 81: note = Ancestral polymorphism is M, Derived polymorphism is T
MARRATPQEAAVAAAEAAIRSVGLGFDVVSDVRLKFCKQRGAPDPWLIELDHGEVQDIVLPGGVTVAGVTASVKCDKGERMRFRSDVLSFQQMSEQFNQELSLSGKIPSGFFNTMFEFSGSWQKDAANTKALAFDGWYVTLYSVALSKGQIVLRDHVKQSVPSTWDPAALARFIKKFGTHIVVGLKMGGKDVIYLKQQHSSTLQAVDVQKRLKEMSDSRFLDANVQYDMSRNNQDLVMMLKRRGGRDKESISHSEWLNTVQAEPDVTSMSFIPITSLLNGVPGSGFLIHAINLYLRHKPPIEELHQFLEFQLPRQWAPVYSDLALGPQRKRQGSTSLPVNLIGPKLYVCTNMVDVGKRPVTGLRLFLEGRKSNKLAVHLQHLCSLPQIIQLEDDPYNHQTPEYDRKYYEPIGPWKHFSHVCTAPVESDDLCIVTGAQLDVVHQGLKKILFLRLHFSKACNAVVRNSEWENSPNIAQKSGLISTLISTHFSSVAQTPPPRPADVNINSAVYPGGPPVPVQTPKLLKFVDPTEMMRGPQDSPGYWVVSGAKLNLERSKISLRVKYSLLTAMMPDDEFPLDDDEF

SEQ ID NO: 18529 - protein, 467 aa, Zea mays
  VARIANT 81: note = Ancestral polymorphism is P, Derived polymorphism is L
  VARIANT 16: note = Ancestral polymorphism is V, Derived polymorphism is G
MLQLALALCVLTAGGVVRAQPFDYPTAKPSTTWANTDASLPHHVTYADGSVARAALLRLNPAGYGPSYAFGFFCTNHLAPLCAEFLLGVAVVYCNSGGLMTSVVAGIPQVVWSANRGSPVGEGAAAELTAAGDLVLRSAQGAVVWSAAGTAGRSVAAMAVARDGNLLLLDARNNTVWQSFDHPTDALLVGQSLRPGARLVANSSAANWSPSRLYLTVAADDDSLSAYVDAEPPQRYYRLGFSGGGGGGGAYATYTNGSLAVFAAAAPAPTPLATIQLPAVGAGTVQYMRLEHDGHLRVYEWSSAGWAPVFDVLRLFPDDCAFPTVCGAYGVCTDMQCSCPDAANFRAVDFRRPNRGCVTVAPVAGCGGSHPPARLVSLPGLAYFNDPATSLRALERVSDAACRKACLDDCACAAAQFVYGTDAGDGFCYLQSEVLSLETSRPEVVHYNSTMHLKVRATRRPSPSARF

SEQ ID NO: 18530 - protein, 529 aa, Zea mays
  VARIANT 300: note = Ancestral polymorphism is I, Derived polymorphism is T
MEASAKLPVVVPKGVGGMDNDDVAPAGGKKQAAAGRWGFVQFFFVLAVVFCVLLYAPRVLVLSPYGYSIDVGLFAPTPTTATASSVPQRVAGGNAVALDLDNQVRSPCSSMRDHTICCDRSSVHTDVCFMAGDVRTDAASLSLLLFPPHQQAQNGTSSEEDKEERVRPYPRKWERFIMDKVPEVRLRVAAPRRPDGEREEEEHRCDVRHDAPLLVMSAGGYTGNLFHAFNDGFLPSWLTVQHLRRRVVLGVVSYNPWWAGMFGEVISGLSDHPVVDLLHGTRTHCFPGAIVGTRYHGILIVDPARLRDNKTIVDFHQMLADAYEKPPRETARPAQQQDLRDAEQRRRRRPRLGIVSRKGTRVIENQAAVARLASSVGFDVDILETANGLPLSAWYASLRACDALVGVHGADLTKFLFLRPGRASLTQIAPLGVSPIAREDFGEPAARMGLAYEQYEVRAGESSLARRYAPGDVVLTDPEAAKRDKGGWNLVARVYLGGQNVTLDLARFRQTLARMHAHAMRQRRRQERL

SEQ ID NO: 18531 - protein, 191 aa, Zea mays
  VARIANT 18: note = Ancestral polymorphism is T, Derived polymorphism is R
MERGEDIIEEKQAGGAATSDERSSSQKVADGKGAEPPAAGVSNRLKPSDDAEKLVAFMEDHYDDVVARVQSFDEFYHAIFELIEMFCEERGQLQYRLAEKKALEEAYNKHHRSDGKVTKEEFEAMSREVVKAGSFRVGKASLELGALLFGAPACALLAKRILPGLGWLSDDVVVPLATSGSVAYLIKSKRL

SEQ ID NO: 18532 - protein, 151 aa, Zea mays
  VARIANT 139: note = Ancestral polymorphism is V, Derived polymorphism is A
  VARIANT 102: note = Ancestral polymorphism is G, Derived polymorphism is S
  VARIANT 70: note = Ancestral polymorphism is A, Derived polymorphism is T
  VARIANT 29: note = Ancestral polymorphism is A, Derived polymorphism is P
MAPAARAPSEFSRVFSALDRDGDGKLSAAELRACMRAALGEDVSAEEADRLVASADGDGDGLLSQEELLALAGTTAAEEEEEEERRRGLREAFRMYAVEGQGCITPLSLKRMLARLGSHQDVAECTAMICRFDLDGDGVLSFEEFRVMMDA

SEQ ID NO: 18533 - protein, 451 aa, Zea mays
  VARIANT 1: note = Ancestral polymorphism is M, Derived polymorphism is V
  VARIANT 164..451: note = Derived polymorphism lacks residues 164 to 451
  VARIANT 165: note = Ancestral polymorphism is C, Derived polymorphism is R
  VARIANT 173: note = Ancestral polymorphism is C, Derived polymorphism is R
  VARIANT 186: note = Ancestral polymorphism is S, Derived polymorphism is W
  VARIANT 275: note = Ancestral polymorphism is G, Derived polymorphism is R
  VARIANT 296: note = Ancestral polymorphism is Y, Derived polymorphism is N
  VARIANT 301: note = Ancestral polymorphism is G, Derived polymorphism is E
  VARIANT 310: note = Ancestral polymorphism is P, Derived polymorphism is L
  VARIANT 335: note = Ancestral polymorphism is T, Derived polymorphism is M
  VARIANT 354..451: note = Derived polymorphism lacks residues 354 to 451
MSPLRLSVLLVLLSSLLAPSTALRSSTLLLARSPQSVSLSAVPGTPVTAWAATLAAQTASDAARAATLATGPRDPPPASAVDAAKKGPRRSFVPIAPGRQLLSIPSYVARARLGTPAQALLVAIDPSNDAAWVPCAACAGCARAPSFDPTRSSTYRPVRCGAPQCSQAPAPSCPGGLGSSCAFNLSYAASTFQALLGQDALALHDDVDAVAAYTFGCLHVVTGGSVPPQGLVGFGRGPLSFPSQTKDVYGSVFSYCLPSYKSSNFSGTLRLGPAGQPKRIKTTPLLSNPHRPSLYYVNMVGIRVGGRPVPVPASALAFDPTSGRGTIVDAGTMFTRLSAPVYAAVRDVFRSRVRAPVAGPLGGFDTCYNVTISVPTVTFSFDGRVSVTLPEENVVIRSSSGGIACLAMAAGPPDGVDAALNVLASMQQQNHRVLFDVANGRVGFSRELCTA

SEQ ID NO: 18534 - protein, 101 aa, Zea mays
  VARIANT 72..101: note = Derived polymorphism lacks residues 72 to 101
MSRHRRQPSRALPLDFNLDDDDDTAAAKCGATSLVDVDGSQNPRPGGSGDGKGQDDDEEEAAAGHWQPDSAGWDRRQQAAGRRRQPRTSLSQDRQRRRRRS

SEQ ID NO: 18535 - protein, 210 aa, Zea mays
  VARIANT 178: note = Ancestral polymorphism is P, Derived polymorphism is S
  VARIANT 133: note = Ancestral polymorphism is G, Derived polymorphism is R
  VARIANT 118..210: note = Derived polymorphism lacks residues 118 to 210
MEGSAAQAPGKTVLRVVAISGSLRRASANTGLIRAAAEICRESIPGLEVEHVDISELPLLNTDLEGPGPGAFPAAVEAFRGKVRAADCFLFASPEYNYSISGPLKNALDWGSRPPNCWGDRAAAILSASGGSGGSRSQYHVRQVGVFLDLHFVNKPEVFTRAHQPPSKFDDDGNLVDPDTKDQVTKVLLALQALALRLHLGKLAVAAHSS

SEQ ID NO: 18536 - protein, 361 aa, Zea mays
  VARIANT 50: note = Ancestral polymorphism is C, Derived polymorphism is R
MELPVSFLRDQGGGGGAEEQSGTQLEHEEDVPCVLDIFVHEARGTHKTIRVYGDHQDVYARLALTSAPEAGASARLGERLPPLRVARGRLAVDVLKCELWMRSGGVPDDQLLGFALVPLAAVAAADGARVIAADFELSSTDLLHSPAGAVRLSLALRPGHADACEPSEAAVLGLGPAPMAVDLDHSRIEFTDLRVRVEQEKSASSDGDGSTSRNAAASTASTVSEEDRAFSSSAEAAQQPPDVEEATTASAPVSRRSPDTPTSRGGKAKAKADVDVLPSPAGDIVDVEAEQSAMQRQIMEMYVKSMQQFSESLAKMQLPVALGGGGGVVEKEETPDDKKVIERQQGKKDGARVFYGSRAFF

SEQ ID NO: 18537 - protein, 86 aa, Zea mays
  VARIANT 22: note = Ancestral polymorphism is R, Derived polymorphism is G
  VARIANT 23..86: note = Derived polymorphism lacks residues 23 to 86
  VARIANT 25: note = Ancestral polymorphism is G, Derived polymorphism is D
  VARIANT 46: note = Ancestral polymorphism is R, Derived polymorphism is K
  VARIANT 53: note = Ancestral polymorphism is S, Derived polymorphism is C
MAKAKRYLDDIIAHRQSIVFRRYCGLVVDNLYVSLIQVNLAQKQHRHIDTYMSSPCHSELFLLEKEDPMKKEVRKRVKRSESRWGR

SEQ ID NO: 18538 - protein, 233 aa, Zea mays
  VARIANT 115: note = Ancestral polymorphism is I, Derived polymorphism is T
  VARIANT 40: note = Ancestral polymorphism is D, Derived polymorphism is E
MTVLDAESRFHVLAVDDSIIDRKLIEMLLKSSSYQVTTVDSGNKALELLGLRDNGAEDASPPSSSSSSSSSSSPDHQEIDVSLIITDYCMPGMTGYDLLKRVKGSSSLKDIPVVIMSSENVPARISRCLQDGAEEFFLKPVKPADMKKLKSHLLKRKQPNQKNKPQAQAVESPEQQLDPHPQPVHEPEEAAADRNGVNKRKAAAMEEGLTVVVTAPESTKPRRLSTSSLTVET

SEQ ID NO: 18539 - protein, 300 aa, Zea mays
  VARIANT 248: note = Ancestral polymorphism is F, Derived polymorphism is S
MERARRASHAGSWYTNDARKLEEELNGWLGAAGLTKSPDVRAVIAPHAGYSYSGRCAAYAFGNIDPTNISRVFLLGPSHHYYTPKCALTRASVYCTPIGDLPVDQEVIEELSATGKFEFMDLNVDEAEHSMEMHLPYLAKVFQGHNVKVVPILVGALSSQNEALYGQLLSKYVDDPKNFFSVSSDFCHWGSRFSYTYYEKKHGAIHKSIEALDRMGMEIIETGDPVAFKEYLQEYENTICGRHPISVFLHMLKHCSTKIKIGFVRYEQSSQCKNMRDSSVSYASAAAKVAGASGEEDKQD

SEQ ID NO: 18540 - protein, 226 aa, Zea mays
  VARIANT 144: note = Ancestral polymorphism is L, Derived polymorphism is Q
  VARIANT 45: note = Ancestral polymorphism is G, Derived polymorphism is C
MANKLATSSLLAAAVLLMALAAPSLAGDPDMLQDICVADYKSLKGPLRLNGFPCKRPENVTACDFFSGALASAGNTANALGSAVTAASADTLPGLNTLGVSLSRIDYAPWGVNPPHVHPRATEVIFVLQGSLDVGFVAAASNRLYARTVSAGDVFVFPRGLVHYQRNRGGDPAVALSAFDSQLPGTQPVAEALFGSSPPVPTDVLARSFHVDGGLVEAIRSKFPPK

SEQ ID NO: 18541 - protein, 1051 aa, Zea mays
  VARIANT 576: note = Ancestral polymorphism is A, Derived polymorphism is P
MEGRNPVQRFVDSPKPYNRRKARGMQTRMDSSDHGDRQGPRACEELPGKMDNDRADRQRLKACEFPAKMDNNHADRQVSKACESKGNACELPGKMDNDHPVRQGLKARGLLQPKSDASEDGVCEGLKACGLTANKMDATDQCDHKGSKVCRVVTTKTDTSDQGDCQTFKVCGIAAKMDVNDHADHQGSKASGMPTKTDANDQCSNQGFVTCTAHIPILLPLVNCPFKTAERLDHLLNQPANRYCADCGAPDPKWVSMTFGVFICIKCSGAHRSLGVHISKARHVVSVKLDEWADEQVDILADSGGNAAVNMIYEAFVPENYAKPRQDCSAEERNDFIRRKYEAQQFLTNPQLSCPPRRNEKHNHQQHSTSSSRHGLGHSFRNSWRRKEHEAKSTKKTIEVGMVEFVGLIKIDIIRGTNLAIRDVMSSDPYVIINLGHQTMKTKVVKSSLNPVWNERLMLSIPDPVPLLKLQVYDKDTFTTDDRMGEAEINIQPLVAAAKAHETSAIADTAQLNKWLAKDGIWIPRDSAISIVNGKVKQVVNARLQNVERGQLEMELDHLNRCKYLLGMTILCCILAMDAAALESLILDLHAIEVVKLGSFTLKSGIKSPIYLDLRALVSHPRLLSAVASLLHALPATRPYGLVCGVPYTALPIAAVLSVDRSIPMLMRRKEVKAHGTAKSIEGSFSPGDTVLIIEDLVTSGASVLETAAPLRAEGLVVADAVVVVDREQGGRENLAANGITLHSLMTLTEVLAVLLKHGKVTEEKAQEVRQFLDANRKVAVPGAAPVTPRVLRKTFSERANLATNPMGKKLFELMETKQTNLFSYRKLFTSGCAAGCLQVGPQICMLKTHVDILSDFTPDFGSKLRSIAEKHNFLIFEDRKFADIGNTVTMQYEGGIFRILDWADIVNAHIVPGPGIVDGLKLKGLPKGRGLLLLAEMSSAGNLAHGDYTAAAVKIAEQHSDFVMGFISVNPESWSVKPSSPAFIHATPGVQMVAGGDDLGQQYNTPESVINYRGSDIIIVGRGIIKASDPMKKAWEYRLQGWQAYKNSLL

SEQ ID NO: 18542 - protein, 154 aa, Zea mays
  VARIANT 45: note = Ancestral polymorphism is S, Derived polymorphism is P
  VARIANT 33: note = Ancestral polymorphism is R, Derived polymorphism is Q
  VARIANT 32: note = Ancestral polymorphism is P, Derived polymorphism is L
MNKPPEMISGNMKVAMCVYSELFVRFAWMVHPRNNCSRRKQNYRSANSFERKRPGKGTLGQAFGVLVHSSRALAEPEAITPGVIRMIGETTEAVGAGVGGGSSGNKMPTLEEYGTNLTKLAKEGKLDPVVGRQPQIERVIPHIHKSLINKSSKE

SEQ ID NO: 18543 - protein, 230 aa, Zea mays
  VARIANT 20..230: note = Derived polymorphism lacks residues 20 to 230
  VARIANT 68: note = Ancestral polymorphism is N, Derived polymorphism is I
  VARIANT 97: note = Ancestral polymorphism is L, Derived polymorphism is M
  VARIANT 126: note = Ancestral polymorphism is P, Derived polymorphism is S
  VARIANT 132: note = Ancestral polymorphism is C, Derived polymorphism is Y
  VARIANT 147: note = Ancestral polymorphism is V, Derived polymorphism is D
  VARIANT 155: note = Ancestral polymorphism is T, Derived polymorphism is N
MSSPTSHLSLPSPQSRNGAYGFIGGDARPDMVLLVQGRGDSYAVYTSNHPKQQYTNTSPDYNDGALWIKIVSVPSYYGDAGAAAMSTSLRPMAPRVLYDRNGHAVWGNKHGFSGGVIPDKVKLDFPHEVLTCVYYYYSTSREGDPRVLRSLMFVTNRGKYGSFGDEFDIYFSSATRRARWWGSTAAAASTCMPSTCTCSIGSRIGGLPPITEQLLGLHVSCFGWVDFDYL

SEQ ID NO: 18544 - protein, 123 aa, Zea mays
  VARIANT 10: note = Ancestral polymorphism is Q, Derived polymorphism is H
  VARIANT 18: note = Ancestral polymorphism is P, Derived polymorphism is L
  VARIANT 59: note = Ancestral polymorphism is D, Derived polymorphism is Y
  VARIANT 73: note = Ancestral polymorphism is Q, Derived polymorphism is L
  VARIANT 75: note = Ancestral polymorphism is A, Derived polymorphism is G
  VARIANT 76: note = Ancestral polymorphism is G, Derived polymorphism is E
  VARIANT 88: note = Ancestral polymorphism is S, Derived polymorphism is R
  VARIANT 90: note = Ancestral polymorphism is A, Derived polymorphism is T
  VARIANT 93: note = Ancestral polymorphism is Y, Derived polymorphism is H
MDDYEDFADHKVQEGGLPEDEKEKFKLLHLLLKKPEGKLLMIWILRGKGKPKSKSNPKDTCSWFDGSRKAMIQLAGELFWKMGEDLDSIAKDYTTSLDAFITQLPMQQHVDLRFLLFRRDFTE

SEQ ID NO: 18545 - protein, 366 aa, Zea mays
  VARIANT 32..366: note = Derived polymorphism lacks residues 32 to 366
  VARIANT 42: note = Ancestral polymorphism is T, Derived polymorphism is I
  VARIANT 73: note = Ancestral polymorphism is R, Derived polymorphism is L
  VARIANT 89: note = Ancestral polymorphism is A, Derived polymorphism is V
MAVEEEAEEDALSGIVLRKYVKQRLLGGFTAQRTTAMGRRKTAITRFVLQEGTDKVFINFHDAKVPINPRIARTYYTNVAPLCCLGRIAIGNSMFHVYFRKYGLSDDTVDFVGHALALHRDDRYLDEPALDTVNRIKLYADSLARFQGGSPYIYPLYGLGELPQGFARLSAVYGGTYMLNKPDCKVEFDMEGKVCGVTSEGENAKCKKVVCDPSYLQNKVRKIGRVVRAIAIMSHPIPNTNESHSITMLDTVMIFLSLSRYVFCCSYTHNVAPRGKLNIFVSAEAETDNPQSELKPGIDLLGSVDEIFYDIYDRYEPVNEPSLDNCFVSTSYDATTHFETTVTDVLNMYTMITGKVTWTSSFYLLE

SEQ ID NO: 18546 - protein, 192 aa, Zea mays
  VARIANT 36..192: note = Derived polymorphism lacks residues 36 to 192
  VARIANT 56: note = Ancestral polymorphism is R, Derived polymorphism is H
  VARIANT 61..192: note = Derived polymorphism lacks residues 61 to 192
  VARIANT 107..192: note = Derived polymorphism lacks residues 107 to 192
MVVFNSEAADELGENRLQKSVITKRISPSIGAFTVQCAKCFKLRLIPTKEKYEEIRERIIQEPFVCKRAREWRPDVTCNDPEDISQDGSRLWAIDKPNIAQPPHGWERQIRIRDTIPLLLEGNLGLWLKSIVNPIAWAVPTKHEGDASEEASLADETLASEVVLTRKRKIGSSLSVEPNHLFDEFEPKFEDA

SEQ ID NO: 18547 - protein, 359 aa, Zea mays
  VARIANT 298..359: note = Derived polymorphism lacks residues 298 to 359
  VARIANT 240: note = Ancestral polymorphism is G, Derived polymorphism is D
  VARIANT 173: note = Ancestral polymorphism is H, Derived polymorphism is Y
  VARIANT 168..359: note = Derived polymorphism lacks residues 168 to 359
  VARIANT 162: note = Ancestral polymorphism is G, Derived polymorphism is S
  VARIANT 115: note = Ancestral polymorphism is Q, Derived polymorphism is P
  VARIANT 94: note = Ancestral polymorphism is G, Derived polymorphism is D
  VARIANT 65: note = Ancestral polymorphism is G, Derived polymorphism is S
  VARIANT 35: note = Ancestral polymorphism is P, Derived polymorphism is S
  VARIANT 13: note = Ancestral polymorphism is S, Derived polymorphism is F
MTEPIAIAAHQNSILFRVSVPFDDPCFWSDILFFPDDYFVYSCSSSPPSLTRLPPCFTRVPPCFGGKRTDPVLDKWFQPHRSQQQRTMMEEDMGILCHGDKGEFTVADLTYRFNQEVQLCLLHHPPSASDAEMKWSVEKLQIPADMKISFYSFKTDVVVTISERCLCWVDYYYVMLLIDVLADSNSRLRYIPLPSKALKTGRVYKDGEPDPFRRLSVCDEHPSPYPFTIETWTLVDIHQDRWEKDVNLTMGANKFFNLYDDTAKSRLPRVMPSFPVVSLVDPDVICFRLEDKFRDPFWMVQVNMRNKLLLSSSIYINEEEEEGYPPKRDCRNYFIFHDFIASKFSSYLSEDAIKSSLKV

SEQ ID NO: 18548 - protein, 703 aa, Zea mays
  VARIANT 29..703: note = Derived polymorphism lacks residues 29 to 703
MDAEGLLASAAINLGLALVALSLFSLLKKQPGNAPVYRPRRMATGDLRADGGFLPLGHGRLTPSFRWIGAAFRLSEDDVLRRHGLDALVIVRLFKFGINCFSVCSIVGLLVLAPTNYTSEGRAEIRRSNSMELFTVTNVTRGSNRLWVHYSCLCFISLYVVYLLHKEYREITMRRIEHLKHHYKRYDQYTVLVRGIPTCPDHGAYGCYVDHFFSKHYRTYRSYQIVHDIGNIEALQKLASSIEKRIQRKRETSKCSLLGRIWSKFTSDATGIHNHEEKLKNVQDTIRLLQCENMLKQKEVPVAFVSFKSRLEAAQAAETQQLANPLSLVTTYAPEPTDTIWKNLSIPFWRMATYRLGVFAAAVLLTVFFTIPVTAVQGIAQFEKMKRWFPPARAVQLIPGLNSVVTGYLPGMILNGFIYLVPSAMLGMASFEGCVASSQREIRACDMVFYFLLGNVFFLSVLSGSLLDQIGESFTHPKNIPNRLASAVSAQSDFFITYILTNGMSGFSLEVLQFGLLIWQFLKARSIGHSEEPYLYGFPYFRVVPVVSIAILIGVVYAVVAPLLLPILLVYFLLGYAVYINQMEDVYEITYDTCGQYWPKIHHYIFLSIALMQVTMIGLFGLKSKPGASLATVPLLVLNILFNEYCKARFLPTFRHRPVQAANELDEAEGTTEGDVDDAICAYRPPWMRPTNLESSSVEPLNV

SEQ ID NO: 18549 - protein, 328 aa, Zea mays
  VARIANT 99: note = Ancestral polymorphism is T, Derived polymorphism is R
  VARIANT 200: note = Ancestral polymorphism is A, Derived polymorphism is V
MQTERSPRTCGFFPPCLSALPKLHPLALTTEMSGGGGLGSGCSYQKFVHFALEQTRHRSTLVPHPSQEKFRFIKANEDNTVLNALSFSTSKIRLLRSLTIEQKNSVQVLDFAAFSRPEYDLPIFCANAFSSPARSIVVLDLNPLYDTTEHKDYREKYYRALMPLVHKYSELLPWGGKITSESLRFFSPIVIWTVFEPSEANHQALYSAFVDYYMVWLEFMDGAVRESSKEKIDRNREAQHKYLTWRAEKDPGYPLLKKLIGESGAKDLVREFLFEGVGSLGTKSFLEYFAEYAQEDGTVNKKRSMAGKSFGTRPWDAHGLFVGDAVDG

SEQ ID NO: 18550 - protein, 490 aa, Zea mays
  VARIANT 56: note = Ancestral polymorphism is D, Derived polymorphism is E
MEDTLKSLSMDYLNLLINGQAFSDVTFNVEGRLVHAHRCILAARSLFFRKFFCGAEQAAAGPGALLLDHLSPRSPSGTSSPRGASAAAPGAAVIPVNSVSYEVFLLLLQFLYSGQVSLVPQKGEPRPGCGERACWHTHCAAAVDLALDTLAAARSFGVEELALLTQKQLAGMVEKASIEDVMKVLMASRKQDLHQLWTTCSHLVAKSGLPPEVLAKHLPMDVVSKIDELRLKSSLSRRSPFLAHHHHPAPGGGMEASSAADIDDHHKIRRMRRALDSSDVELVKLMVMGEGLNLDEALALHYAVENCSREVVKALLELGAADVNHTAGPAGKTPLHVAAEMVCPDMVAVLLDHHADPNVRTVEGVTPLDILRTLTSDLLFKGAVPGLAHIEPNKLRLCLELVQSAAMVMSREDAHTAVNAAPMYGEPSGGGGCGVYSASGTSSTSLVNLNLDNRMVYLNLGMDAQFGKMGDGDDGGGRGPSSLFSPHGYH

SEQ ID NO: 18551 - protein, 251 aa, Zea mays
  VARIANT 170..251: note = Derived polymorphism lacks residues 170 to 251
  VARIANT 63: note = Ancestral polymorphism is D, Derived polymorphism is Y
  VARIANT 20: note = Ancestral polymorphism is S, Derived polymorphism is Y
MASGSRGGGGSDFSVVVVGSDAGAGAALLVPSDRHSWHDCLAEADACFSDLEERQVVRVQGTDRARRTIVRVVGKFFPAPAIDGERLKKYVFYKLRTELPVGPFCILYMHSTVQSDDNNPGVSILRTIYEELSPEYKERLQVFYFLHPGLRSRLAIATLGRLFLSGGLYWKIKYISRLEYLWGDIRKGEVEIPDFVIEHDKVLEHRPLTDYGIEPDPLHLADVPAEEVGYSLGRYEDKWTPEDRWYSGNYM

SEQ ID NO: 18552 - protein, 449 aa, Zea mays
  VARIANT 403: note = Ancestral polymorphism is A, Derived polymorphism is S
  VARIANT 302..449: note = Derived polymorphism lacks residues 302 to 449
  VARIANT 212: note = Ancestral polymorphism is T, Derived polymorphism is I
  VARIANT 139: note = Ancestral polymorphism is P, Derived polymorphism is A
  VARIANT 137: note = Ancestral polymorphism is L, Derived polymorphism is P
MVQDEGSSSSVTSSPLHTFSSMPLHGSPAAAGAPTPPWLPRDLRSDERGLCLIHLLLNCAAAAAAGRLDAANAALEHIASLASPDGDAMQRVAAAFAEALARRALRAWPGLCRALLLPRAGPTPAELAAARRHFLDLCPFLRLAGAAANQSVLEAMESEKMVHVVDLGGADAVQWLELLHLLAARPEGPPHLRLTAVHEHREVLAQTAMVLTKEAERLDVPFQFNPIVSRLETLDVESLRVKTGEALAITCSLQLHCLLASDDDSAKDSCHQQSSGDKRQRSPESGVSPSTSRADAFLSALWGLSPKVVVVTEQEASHNAAALTERFVEVLNYYAALFDCLESAAPRGSVERARVERWHLAEEVKNIVACDGAERRERHERLDRWAARMEGNGFARVPLSYYSLLHARRAAQGLGCDGFKVREDKGAFFLCWQERAIFSVSAWRGRRFD

SEQ ID NO: 18553 - protein, 304 aa, Zea mays
  VARIANT 270: note = Ancestral polymorphism is P, Derived polymorphism is L
MLHDVCLVLLIFVVLANLETTISIHHSHSSMRVLSQNMSSSFTIADPIRIEASTESNLVEHYARYRADSPPAGGYTGGMATIDVYSHQHIKSGQVTAAIIWVSNGKLDQSDDLNDIQAGWVVDPSSYGDSKTHFFVYWTADGYKSTGCFNLDCNGFVPVDDAPITPGDTLEPENGQSKISFKIFKNKDDGDWWLHFGYDINNLKPVGFWKKSIFTNLQDHAGFITWGGYTSCPNGNASPPMGNGQWPGKNSASVRNVQFVDSSGQGYAVPVWALRVFASNTKCYQASTFFDSMFYYGGPGGCTD

SEQ ID NO: 18554 - protein, 252 aa, Zea mays
  VARIANT 7..252: note = Derived polymorphism lacks residues 7 to 252
MWLRREYEQLEASLMTYTGEHLPSVDELEQPALSKVRARKDERLTTLFLTAQRQLKQTGNIPPEALPPSPSLFGCLVKNNVGMAKTILAIVAINSLLVPLAAATDHDSYNAVPAPAPVPSKFATAAAAPTRYAIDEDKNKEKKSILTIVLVVAIAGLGLTAPLVAIVLYERSRGRQQDRHQHRGQAARKITVVRFHSDDEPAGDDCSICLDPYADRDRVGLLPCRHRFHAVCIRKWIVDGVSSTCPTCREVV

SEQ ID NO: 18555 - protein, 360 aa, Zea mays
  VARIANT 38: note = Ancestral polymorphism is R, Derived polymorphism is W
  VARIANT 53: note = Ancestral polymorphism is S, Derived polymorphism is L
  VARIANT 176: note = Ancestral polymorphism is P, Derived polymorphism is L
MATKLVVLGIPWDVDTEGLREYMAKFGPLDDCVVMKERSSGRSRGFGYVTFASADDAKNVLDCEHVLGSRTLEVKVATPKEEMKSQGSKKATRIFVARIPQSVDESMFRRHFEAFGEILDLYMPKEHGSKGHRGIGFITFQSAESVDNIMQESHELDGTTVVVDRATPKDEDVRYPPSRPSQGGYGAYNAYISAATRYATLGAPTLYDHPGSAYGRGYYGPSQAVGKKIFVGRLPQEANTDDLRQYFGRFGRIVDAYIPKDPKRSGHRGFGFVTFADDGVAERVARRSHEILGHEVAIDTAAPLENDSAAGGYIDPMDLYGAYGSMRSFGRFCGGLDYNYGYGPSSGSSRSRSDWRYRPY

SEQ ID NO: 18556 - protein, 282 aa, Zea mays
  VARIANT 248: note = Ancestral polymorphism is A, Derived polymorphism is S
MRFYFADQDLLTALRGSGVALALDVGNGKVGELAADPASAASWVRDNVQAYYPDVDIRYVVVGNEVVPGAASVLQAMRNVHAALASAGLAGSVKVSTAVKMDAVDDSSPPSRGVFRDPAAMSPIAQFLAANGAPLLANVYPYFAYQYSDGGIDLDYALFQPSSTTVTDPANGLVYTNLFDAMVDAVRAALDKAGAGGVDVVVSETGWPSADGNGATLDNARTYNQNLIDHASKGTPRKPGPMEVYVFAMFNEDQKDGDPTEKKFGLFNPDKTPVYPINFAGN

SEQ ID NO: 18557 - protein, 146 aa, Zea mays
  VARIANT 8: note = Ancestral polymorphism is V, Derived polymorphism is I
MARGAHVVRALSQPPRFVRASSCARPVPGASRRRRRGRLMVVRAGGPPSTNALILAFVLPLSLFVGTLVTAARVADDLDDRFLREMEINRAILEENEASDEDGAGEEDDDGEEEEGVDLPVVVEEEPAVVGPRTRNRPRRRVFSSQ

SEQ ID NO: 18558 - protein, 497 aa, Zea mays
  VARIANT 32: note = Ancestral polymorphism is A, Derived polymorphism is E
  VARIANT 103: note = Ancestral polymorphism is G, Derived polymorphism is R
  VARIANT 217: note = Ancestral polymorphism is V, Derived polymorphism is G
MGRVGLGVAAGCAAATCAIAAALVARRASARARWRRAVALLREFEDGCATPPPRLRQVVDAMVVEMHAGLASDGGSKLKMLLTFVDALPAGNEEGTYYSIDLGGTNFRVLRVEVGAGSVVTRRKVELPIPEELTKGTIEELFNFVAMTLKEFVETEDGNDEQRALGFTFSFPVRQTSVSSGSLIRWNKGFLIEDAVGKDVAQCLNEALARNGLNVRVTALVNDTVGTLALGHYHDEDTVAAVIIGAGTNACYIERTDAIIKCQGLLTNSGGMVVNMEWGSFWSSHLPRTPYDISLDDETQNRNDQGFEKMVSGIYLGEIARLVLHRMALESDFFGDAADNLCTPFTLSTPLLAAIRKDDSPDLSEVRKILQEHLKIPDTPLKTRRLVVKVCDIVTRRAARLAAAGIVGILKKLGRDGSGVASSGRTGGQMRRTVVAIEGGLYEGYPVFREYLDEALVEILGEEVARTVALRVTVDGSGAGAALLAAVHSSNRQQGSI

SEQ ID NO: 18559 - protein, 525 aa, Zea mays
  VARIANT 443: note = Ancestral polymorphism is P, Derived polymorphism is L
  VARIANT 388: note = Ancestral polymorphism is S, Derived polymorphism is F
  VARIANT 223: note = Ancestral polymorphism is G, Derived polymorphism is D
  VARIANT 205: note = Ancestral polymorphism is V, Derived polymorphism is A
MKPPSSLVHYFKLLVLLALARLTMHVPDEDVLLSLGALRLDGHFSFHDVSAMARDFGNQCSFLPAAVLHPGSVSDIAATVRHVFSLGEGSPLTVAARGHGHSLMGQSQAAQGIVVRMESLRGPRLQVNDAGVSPPSVDAPGGELWINVLRETLKHGLAPKSWTDYLHLTVGGTLSNAGVSGQAFRHGPQVSNVNQLEIVTGRGDVVTCSPDDNADLFYAALGGLGQFGIITRARIALEPAPKMVRWIRVLYSDFESFTEDQEMLIMAENSFDYVEGFVIINRTGVLNNWRASFKPQDPVEASHFQSDGRVLYCLELTKNFNSDDTDTMEQEVTVLLSRLRFIQSTLFHTDVTYLEFLDRVHTSELKLRAQGLWEVPHPWLNLLIPRSSIRRFAKEVFGKILKDSNNGPILLYPVNKSKWDNRTSVVIPDEEIFYLVGFLSSAPSLSGYGSIAHSMNLNKQIVEFCEEAGIGMKQYLAPYTTQQQWKAHFGARWETFERRKHRYDPLAILAPGQRIFPKASLPLPL

SEQ ID NO: 18560 - protein, 290 aa, Zea mays
  VARIANT 65: note = Ancestral polymorphism is D, Derived polymorphism is E
  VARIANT 64: note = Ancestral polymorphism is T, Derived polymorphism is I
  VARIANT 53: note = Ancestral polymorphism is P, Derived polymorphism is S
  VARIANT 49: note = Ancestral polymorphism is A, Derived polymorphism is V
  VARIANT 30..290: note = Derived polymorphism lacks residues 30 to 290
  VARIANT 29: note = Ancestral polymorphism is H, Derived polymorphism is R
  VARIANT 9: note = Ancestral polymorphism is A, Derived polymorphism is V
MAVAPPTAAALEQLSSSKMFDGFNLRFRHQSATLGCAMTFSIYLPPSPASNLPVLYWLSGLTCTDENFIIKSGAQRAAAAHGIALVAPDTSPRGLNIEGESDSYDFGVGAGFYLNATNEKWKNWRMYDYIVKELPKVLSDNFEQLNTSQASIFGHSMGGHGALTIYLKNTDKYKSVSAFAPIANPINCPWGQKAFSNYLGSTKSDWEEYDATCLIKKNSKVPTTILIDQGEADKFLAEQQLLPHKFEEACKAAGAALTLRMQPGYDHSYYFIATFVDDHIAHHAQFLKSA

SEQ ID NO: 18561 - protein, 125 aa, Zea mays
  VARIANT 41: note = Ancestral polymorphism is F, Derived polymorphism is S
  VARIANT 69..125: note = Derived polymorphism lacks residues 69 to 125
  VARIANT 79: note = Ancestral polymorphism is S, Derived polymorphism is N
MWRMRGVPDSRVETGDCIEFDRDDELFATAGVSKCIKVFEFSTVVNEPSDVHCPVVEMATRSKLSCLSWNKYSKNIIASSDYEGIVTVWDIQTRQSVMEYEEHEKRAWSVDFSRTDSSMHLMVRS

SEQ ID NO: 18562 - protein, 616 aa, Zea mays
  VARIANT 28: note = Ancestral polymorphism is D, Derived polymorphism is G
  VARIANT 341..616: note = Derived polymorphism lacks residues 341 to 616
  VARIANT 343..616: note = Derived polymorphism lacks residues 343 to 616
MSTARVQGRLDYLNSQEPGDASQATAIDIVERLLAEDETETSQKISAEPMSGTKSASIIGTKVAQCLAKRGDCSSSLQKAGIFDWVDASSDDECTAIMTSRKKQRIQANTQAKNLTSQRYGGRGSIATVGSISDCTGGKSGLNSSKKPEPVGSTDDLYDIGPYTQMAAEAMEALSNASTVNYVVRENAHPESSVLRTNMGKESKANKICFELSLQKRIGGSSSSVKKHPSKLKDKKSRKQMTRKAKGSIDSTTIEGDTNHEVSEGVKGSGASDSNVVGSNAVMCPKRKRTYMFISRSSKVQFNKAGSSTTPRSKSKEVVDVSTTKPVSVSGPDLNQLARVEKQFTSAQEDHNSSLTNRGPLGELNSKCSHFRTQVSKKPLKRGLVKSPGSRELVSLLRNEASLVLQTSRQRRNMSKVHVLLSHSMDKETIKMQTKILIYFGLQVAATISEATHFVAEKFARTRNMLQAIAMGIPIVTPSWLECCREARCFVDEKAYIMRDMKKEKELGFSMPVSLSRARKKPLLQGRRVLITPNAKPSKELLKSLVVAAHGQPLERITASTMKKKIFEGAFVLSCEQDHSVCMPLIESGLEVFDSELLLNGIVTQKLEFARYRLFP

SEQ ID NO: 18563 - protein, 412 aa, Zea mays
  VARIANT 269: note = Ancestral polymorphism is Y, Derived polymorphism is C
  VARIANT 345: note = Ancestral polymorphism is I, Derived polymorphism is M
MGPDGIPIEVWRCLGDIAIVWLTKLFNTIFRTNRMPDEWRRSTLVPIFKNKGDVQSCTNYRGIKLMSHTMKLWERVIEHRLRKTTSVTQNQFGFMPGRSTMEAIFLLRQLMERFREQKKDLHMVFIDLEKAYDKVPRSVMWWSAEFGTSRNGSSELHVMLAEYIYSESPETDMTKVSSHFVRGNDPKKFASMLVNFMGKCYPGEDDTAIARGVLMYLSQGNLRDANLLMDEMNEQLKSANSEFPKTDLIQFIKYLLPTTLAFVTCDAVYRLERDAYPLFRTLRQKYKTSTDRDAVFQELLDEIAAKFYNIQRQNPLEGLFSEMFKATVNLVKTSNSLVCGGHRMIMPDLRYNAREKNFMSMLSSKPLAGIIQLVNKGVCSTMNLQGHTFSIMLHEDIYLALQQNRRLVSDCY

SEQ ID NO: 18564 - protein, 528 aa, Zea mays
  VARIANT 46: note = Ancestral polymorphism is R, Derived polymorphism is Q
  VARIANT 48: note = Ancestral polymorphism is Q, Derived polymorphism is L
  VARIANT 190: note = Ancestral polymorphism is E, Derived polymorphism is A
  VARIANT 206: note = Ancestral polymorphism is A, Derived polymorphism is V
MGKDAGEAQQPPDGAGGGAGGGAGGSRGGRFCCWCGRGGGAARVIRLQCVAALVLGVAVLLSALFWLPPFAGRGGGKEGPDPGDEFGAAIAASFRLHKTVPELSGNKSQLVLDIYEEVGIPNSTVVVNKLHPLDGSNWTNIIFSIVPFPENATISSTWLSILRSKFMSLVVRQSTIHLTKPLFGNSSYFEVIKFPGGITIIPPQTAFLLQKPHATFNFTLNYPIYKLQDRTNELKDQMEAGLLLNPYENLYIKLTNSEGSTILPPTIVETSIVLEVGNHQPSVPRMKQLARTITNSSSSSGNLGLNHTVFGRVKQISLSSYLRHSLHTGGGSDAPSPAPMHHHGHHGNHHHHHSHDDNRHLAPAPAPVHFAMPQPRYGAPPPSGCPYSKNKPNKRGPVTITPAAEPAANDHRSTSIALPPHPSSTSSASRSRHGPSMQGGAPVSHPPALPEPPLPTVSFAHPHLPSEHGTGISPAPSEEAATLADPAGMSQVAPAPHASYAARMQGDAPCRWILFLLALCTITSLLVR

SEQ ID NO: 18565 - protein, 214 aa, Zea mays
  VARIANT 145..214: note = Derived polymorphism lacks residues 145 to 214
  VARIANT 139..214: note = Derived polymorphism lacks residues 139 to 214
  VARIANT 104: note = Ancestral polymorphism is K, Derived polymorphism is R
  VARIANT 91: note = Ancestral polymorphism is E, Derived polymorphism is D
  VARIANT 80: note = Ancestral polymorphism is M, Derived polymorphism is K
  VARIANT 70: note = Ancestral polymorphism is S, Derived polymorphism is F
  VARIANT 66: note = Ancestral polymorphism is R, Derived polymorphism is W
MLIVSSVIIWTTIADSCGGTAKELLELAGKGFVLEDYTGLSLDLNVHPLINSARPGTLAQQQHSPWRVVSVSPHPQAQAKIEYISPRPRVELDQAATTLQKAYKFLKLLTCATATATTCTSTTTSGARAPAASPSSTGWMSAKAETCITRNAHEASSTHSSSCTSDQREGGIRSRRGGRPGAVQAERRSGEHERGVQVDLRAVHQQVAVCQVAE

SEQ ID NO: 18566 - protein, 117 aa, Zea mays
  VARIANT 40: note = Ancestral polymorphism is P, Derived polymorphism is S
  VARIANT 34..117: note = Derived polymorphism lacks residues 34 to 117
  VARIANT 28: note = Ancestral polymorphism is E, Derived polymorphism is D
  VARIANT 23..117: note = Derived polymorphism lacks residues 23 to 117
  VARIANT 11: note = Ancestral polymorphism is C, Derived polymorphism is R
  VARIANT 8..117: note = Derived polymorphism lacks residues 8 to 117
MWSSSTPRVYRSWVRIQNKFRGWKGRKEFMLIRQKIVKIPAHVRGHQVRKNYRKVVWSVGIVEKVILSCEVSNLRNNLKVMQDRMLADSAGTDGGDFMTELEELCRDDGDAPMSTIS

SEQ ID NO: 18567 - protein, 671 aa, Zea mays
  VARIANT 461: note = Ancestral polymorphism is I, Derived polymorphism is T
MHIIVAILHVFHDFQKMGAGRKIETFFTATPSAQTQNQTNERYGTYPVAARNLREDELGGVIFGCKHNTIGECLSKQLFGLPSSHFSYVKNVKPGMPLFLFNYSDRKMHGIYEAASAGKLNIDQFAWSDGGRIKTQFPAQVLISMKTACLPVPESQFQSVISGNYYKPRHFFFELDHEQTRALIFLFKPAPVHDVSNKCHPSKSIQSPIVEAYVNPDGEYASESRTSTSHLDKEASNWDDVTTKEGTEFVNNDHPHINPPHVEQYGEVAVTQKQQDMFVLRQHEAESSKDTVDSASNKSMPQEAQFDATLPTDPSNSTSVGDVCIKDLTSLGQSRGNAELLHIVKELSKRNQAMEKKLSESDKEILFLRESMKDTGRRIQELEYQYEKLQSNYNSLVPLLGSRHDNMEGPSIILMGGYRGSTCLSSLDSFCPTTDRVVPLCSMSSARAYAAAVALKDHLYIFGGGNGSSWYHTVECYRMGSNKWIACPRLKHAKGSLAGTTLNDKIFAIGGGDGSAVFSERFAAAAAVLSGTLYVTGGYDGNTYLQSAERYDPREGFWTLLPSMSARRGSHSVAVMGESLFAVGGYDGNSNISTVEIFDPRANSWRIGRSCSIARGYGCAVTMDGNLYFIGGVNDAGETLGTVEVYNERQGWSISGCKSVGKRAFACAITV

SEQ ID NO: 18568 - protein, 71 aa, Zea mays
  VARIANT 51..71: note = Derived polymorphism lacks residues 51 to 71
  VARIANT 47: note = Ancestral polymorphism is R, Derived polymorphism is H
  VARIANT 33..71: note = Derived polymorphism lacks residues 33 to 71
  VARIANT 22: note = Ancestral polymorphism is S, Derived polymorphism is F
  VARIANT 20: note = Ancestral polymorphism is P, Derived polymorphism is L
  VARIANT 18: note = Ancestral polymorphism is D, Derived polymorphism is N
MFTTLESLKKKGNKNRADGPSSSKNHGAGPALQQSRNCLKGGLLGSRAAHYCLASFTADDWLDNRIWGPSS

SEQ ID NO: 18569 - protein, 169 aa, Zea mays
  VARIANT 34: note = Ancestral polymorphism is S, Derived polymorphism is F
MQVKQKVYEFYKGTVERVTAPRTVSAFLEKGVLSVPEFILAGDNLVAKCPTWSWEAGDPSKRKSYLPANKQFLVTRNVPCLRRAISVEEEYDAAGAEVVLDEDGEGWLATHGVQASKPEEEEDIPSMDTLDIGRSDGIKSIPSYFSGGKDEEEEDIPDMDTYEDTGDIW

SEQ ID NO: 18570 - protein, 286 aa, Zea mays
  VARIANT 35..286: note = Derived polymorphism lacks residues 35 to 286
  VARIANT 196: note = Ancestral polymorphism is S, Derived polymorphism is Y
MSSGTTTTEEESGKGPPPQHQHHFVLVHGACHGAWCWYKVATLLASAGHRVTALDMAGCGASPVRGEDVASFEDYSRPLLDAVGALPPGERAVLVGHSFGGQSLALAMERYPERVAVAVFVSAAMPAAGKPMALVLQEFSREIGPDFYMDCIYSTGSEPEHPVETLLLGPEYLAKRLYQLSPPEDLTLAMAMVRPSRWFEDDATLRRDDGLTAGRYGAVRRVCVVAEDDASWSAEFQRRMASWSPGAEVRGLRGADHMPMLSKPADLSDMLVEVANKYSSDLEDPA

SEQ ID NO: 18571 - protein, 354 aa, Zea mays
  VARIANT 124..354: note = Derived polymorphism lacks residues 124 to 354
  VARIANT 290..354: note = Derived polymorphism lacks residues 290 to 354
  VARIANT 297..354: note = Derived polymorphism lacks residues 297 to 354
MATRSLELTLISGKDLKDVNLMSRMEVYAVVSLSGDPRSRQRVQADRTGGRNPTWNATLRFAVPATGAGSLHVLLRAERALGDRDVGEVHIPLSELLSGAPDGPVPAKFVAYQVRKISSGKPQGVLNLSYKLGEVANGYAPASAAQSAYAHPPPTAAYPPPSGKADAYAPPAAYPPPSGKADAYAPPATAYPPAAKADAYPPPYGAYPPAGGKADAAYPPSSGYPPAAGKPAKGGEPVTAYPSAGPSTAAPYAAPPPQYGGYGYPPQQAAGYGYPPPQQAGYGYGYPPPQAAGYGYQQQAVRPQKKKNNFGMGLGAGLLGGAVGGLLIGDMISDSSAYDAGYDAGFDDGGGFDF

SEQ ID NO: 18572 - protein, 124 aa, Zea mays
  VARIANT 47: note = Ancestral polymorphism is P, Derived polymorphism is L
  VARIANT 53: note = Ancestral polymorphism is R, Derived polymorphism is P
MAHVDRPRSRAVLAVAVAVAAAALLLFAAAGVPRAAGQTTTTAVVDLDSWADRGAACTGAVEACGGIGATARRELGSGGYISYDAMSRGRVPCSYRGASYYNCRPGAPANPYSRGCSAITRCRG

SEQ ID NO: 18573 - protein, 827 aa, Zea mays
  VARIANT 108: note = Ancestral polymorphism is L, Derived polymorphism is I
MAAPPQPHPQAAEERAAPAVPLPTAPAGPRPYDVAVAAAELRPVDCNLAALCDHVQAEGFGLGAFSDLVVEAAGATYRLHRLILSRSAYFSSLLPRRIFMYIKISKIINNLCIMMTGRNMLHGPWREAGAPTVVLHIDDANVDSEAIAIALAYLYGQAPKLNDNNAFRVLAAASFLDLQDLCTICTDFIISELWTSNFLQYQLFAESQDYGSHGERVRNACWGYLCQSATLELREVLPKLSSQTLHALLTSDELWVPNEEKRFELALFTLLAKVTTCEIQVSGNETSLPSADRSMRKGKAPMNESGEELLMDSKLQNLKLHDNSGNEIPHNIIAISDMNGEAPKRMENDCSTGGPSGESTSYQFNENNWLSSEQTANNYFSRTFSSGVVPTEWGRPNAPLWGGRVIGRRQVRCIRGSSCLSTDEYNTFMNIFERGSLLYCNMSFDALLSVRKQLEEFGFPCKAVNDGLWLQVFKMLLCHRVQAIVADTCRNCCLTNNSCACKQAYVSSHTHHYRQEHDRSSVSGTIGNVYLADAQGDGNGVLGPVRVNVRGAVDGLAGIGRGNSNVPGAAWAPTRYVFSRVPYGLGSRNAQQFANDESEPRIDRNGDISADGLTALVNLSQENSAAHPQAESLFETGMQTRYHSVASVSTPGGSSVQMQESKEHDWETAEDATISLDMKTPLSHFPPFRFGVEFDDVHRLADGHVKHSTEVFYAGSLWKVSVQAFNDEDPHGRRTLGLFLHRRKAELLDPLRKAHLYVDPREKVTARYQLICPSKREVMVFGCLKQAGTLLPKAPKGWGWRTAILFDELADLLQGGALRIAAVVQLV

SEQ ID NO: 18574 - protein, 237 aa, Zea mays
  VARIANT 188: note = Ancestral polymorphism is E, Derived polymorphism is V
  VARIANT 175: note = Ancestral polymorphism is E, Derived polymorphism is D
  VARIANT 159: note = Ancestral polymorphism is V, Derived polymorphism is G
  VARIANT 147: note = Ancestral polymorphism is G, Derived polymorphism is D
  VARIANT 71: note = Ancestral polymorphism is R, Derived polymorphism is H
  VARIANT 69: note = Ancestral polymorphism is R, Derived polymorphism is H
  VARIANT 63: note = Ancestral polymorphism is D, Derived polymorphism is E
  VARIANT 62: note = Ancestral polymorphism is V, Derived polymorphism is I
  VARIANT 57: note = Ancestral polymorphism is R, Derived polymorphism is P
MAVSRIQPLSGHLHPRAATDPAAAAGKQQQQQQVYTVWMKSLVLSGHGCTVYGEDGRVAYRVDNYACSRSREVYVMDSDGRTLLKLLKKSFAAVETWTGYSYGSAGTAPAAGLGQEGSARPWFSVRKAPHRILKKKMKKGGQQEQNGGAGGAVATACVVGGDVVYRIDGAPRKSEFRISGPDGEVVAETKRKQTEAGVALGEDVLSLTVTVGGASAHADRLLLVGLVVVCGLLARCI

SEQ ID NO: 18575 - protein, 204 aa, Zea mays
  VARIANT 38: note = Ancestral polymorphism is N, Derived polymorphism is S
  VARIANT 43: note = Ancestral polymorphism is Y, Derived polymorphism is F
  VARIANT 112: note = Ancestral polymorphism is V, Derived polymorphism is A
MAKIQPLPAVSSPAPASNADEPSQVYTVWMKSLVFNGNGCTVYGADGGVAFRVDNYGCRGGREAFLMDRAGRTLVGIQRRSCFGMFRRWEAYRYSESESDGREETRTPWFAVRKARRGGRAAVTVHGSGGRSGAYAIVGGYSRKPDYRIIGSTDGAAVAAIARKQTPAGVVLGDDVLMLTVAPGTDRLLVLGLVVICGLMTRRL

SEQ ID NO: 18576 - protein, 202 aa, Zea mays
  VARIANT 57: note = Ancestral polymorphism is N, Derived polymorphism is S
  VARIANT 65: note = Ancestral polymorphism is E, Derived polymorphism is V
  VARIANT 70: note = Ancestral polymorphism is D, Derived polymorphism is G
  VARIANT 111: note = Ancestral polymorphism is K, Derived polymorphism is R
  VARIANT 124: note = Ancestral polymorphism is A, Derived polymorphism is D
MAKIKPWPAGLSPDDDSERERGQAAASYTVWMKSLVFNGNGCTVYGADGRVAYRVDNYGCRGGREVFFMDRAGSSLVRIQRKSFCMFRRWEACRCLDDDGEDARPWFRVHKTWKHGCGAGAAADVVTMHGGGRTYEIEGSSRKSDYRIRGADGAIMAAVGRKRTASGVVLGDDVLTLTVGSGTDHLLALSLVVVCGIMNRRL

SEQ ID NO: 18577 - protein, 354 aa, Zea mays
  VARIANT 250..354: note = Derived polymorphism lacks residues 250 to 354
MALRALDNTKPAAVEERPKKVAKVGVPAAAAKAAASPGSGGKKKKGNDENSAPRATAAAAEQAVEYISSEELEAAASPKAKAAGLVADLDSKDWVRTCEALNDARRLAIHHPALLNPILEKVVLAVVKTMKSPRSAVLKTSIMACADIFSSFGNLLASVSDDAFDKLLLQLLLKASQDKRFVCEEAEKATRAMAASMPPLPLLKKLKAYVHHANLRVRAKAAVAISHCAARMVRHATPRHAQEGRNSCSSVCPFQRLRFSFVAGAQDIGAMKEFGMSALLQLAVELLNDRLPEAREAARGVVASTHAAFVKEAAASGQEDDAAASWESLCALSLPPISAQAVAKIAAAAAASSQ

SEQ ID NO: 18578 - protein, 280 aa, Zea mays
  VARIANT 111: note = Ancestral polymorphism is M, Derived polymorphism is T
  VARIANT 41: note = Ancestral polymorphism is F, Derived polymorphism is L
MAAAAGIRSREERWSLAGKTALVTGGSKGIGRAIVEELAGFGVRVHTCARTAADLDERLRAWAADARLPGRVTASVCDVSARGDREALVAAARAELGPRLDILVNNAGQSTFRAATETAAGDYARLMATNLESCFHLAQLAHPLLLAAGAGAGAGAAVVNVSSIAGLVAYPALAAYSATKGGLNQLTRSLAAEWAGDGVRVNCVAPGGVQTDMFSSVALEMDPDPETSLRMMEAELARVPLRRFGETEEIASLVAFLCMPASSYITGQVICADGGRTIAA

SEQ ID NO: 18579 - protein, 292 aa, Zea mays
  VARIANT 34: note = Ancestral polymorphism is N, Derived polymorphism is I
  VARIANT 180: note = Ancestral polymorphism is R, Derived polymorphism is C
MRYANVTYLINICKKEIEDDNKPMGVFTRTGWKNLVTKYEEKTGLKLTKKQLKNKLDNMKKEYTWFMEFKNATTGLGWNEAKQTVDCSKDWWDEHLARCNNPDKGIKCNHVRFRKQGPKHLDDLHMLFDKIHVSGTSASCPGDISSDDSSDDVLEIERTPENDEVKVVVSKRSKPVKRKRKASCTAAEEKEEKSPFFRLYKNTCLKIETTAEKISTSVEASSTHPTSQVPSIAETMKMVKDCGVKEKIALMHTTTFLIVKPEFREVFCMLETNEGRFDLLEREHAKEMMRHM

SEQ ID NO: 18580 - protein, 523 aa, Zea mays
  VARIANT 285: note = Ancestral polymorphism is S, Derived polymorphism is F
MEDWLFYSLTTLLCLLCSLILRARTPGKKARNADSSSPLPPLPPGPTPLPVLGPLLFLARRDFDIEPVLRRIARDHGKVFTFAPLGRARPGIFVADRGAAHRALVQRGAAFASRPPSTASSAVLTSGGRNVSSSPYGATWRALRRNLASGVLNPARLRAFSPARRWVLGVLARRVRADGRHGEAPVAVMEPFQYAMFCLLVHMCFGGDRLGDDARVRDIEATQRELLGSFLSFQVFSFLPWVTKLVFRRRWEKLVSLRRRQEELFVPLIQARREAGGDGDSYVDSLVKLTIPEDGGRPLTDGEIVSLCSEFLSAGTDTTATALQWILANLVKNPAMQDRLRDEVSSAGAGADGEVLEEELQAMPYLKAVVLEALRRHPPGHYVLPHAVHEDTTLDGYRVPAGAPVNFAVGDIGMDEEVWRAPAEFRPERFLPGGEGDDVDLTGSKEIKMMPFGAGRRVCPGMALALLHLEYFVANLVREFDWRQADGEEVDLTEKLEFTVVMKRPLRARAVPLRPPPPAVAAA

SEQ ID NO: 18581 - protein, 212 aa, Zea mays
  VARIANT 101: note = Ancestral polymorphism is P, Derived polymorphism is S
  VARIANT 118: note = Ancestral polymorphism is G, Derived polymorphism is C
  VARIANT 122..212: note = Derived polymorphism lacks residues 122 to 212
MAPPSKRQRHKEGARSTSRPFIGAHTRSGHGDDGHSCQGRVGYAPVGAGDCSAHSSALRGGCCIRPMPCCYTRYSLLCSSSQMPLELRMSAREVHHQLAVSLLALHWLLGWLRNLVPGLTHWFYPVVFDPLGLKGKKLDCLPYVATGVDGEKVAVTGRASEQLIRLKIWKIHFGNPLPTTTIFHCRHDLASLYGGMSQSHDAKPDGTTRRRS

SEQ ID NO: 18582 - protein, 183 aa, Zea mays
  VARIANT 64: note = Ancestral polymorphism is S, Derived polymorphism is G
MPSRSMSRLSVESASGSGGGGCREAEPVLCAPRPRRAQQQLVHVHPRGADLILGPPPFLLNESSEEGRCSWAAFGGGSPPARAGNPLVHDPSFLLSQRHPAADPPLELGFFDHLIRTSSYVHRPTPTTSYTSTSSSGSSSKSSFGPSSFAPAVRIQGFDVAACRSSHSGGGGAGGRVLSAARA

SEQ ID NO: 18583 - protein, 113 aa, Zea mays
  VARIANT 20: note = Ancestral polymorphism is A, Derived polymorphism is V
  VARIANT 33: note = Ancestral polymorphism is R, Derived polymorphism is Q
MKAVVAATMLLLVLVAAATVASADHRDDGHHHQRHRGQSWHRHSGGGRDGRRSTPLAGLTQCVTSCGSGVTSCMLDCYQPLVDLDPVELPVCLLKCTNDAMVCATGCPVTGNV

SEQ ID NO: 18584 - protein, 521 aa, Zea mays
  VARIANT 30: note = Ancestral polymorphism is I, Derived polymorphism is T
MAEANAGKEKKEVVRLERESVIPIMKPKLTMKLAYLIGKSSNLALFIHLVHDADLDTKPWNSINAAVFFSEEHQSDREEFLKLCRRVEYTIRAWYHLQFDDMMELFALFDPVHGAKKLEQQNFLPEEIDTLEQNFLSYFFRVMEKSNFNIVNDDEVELAHSGQYLLNLPIKVDESKLDDKLLSKYFKEHRHENLPDFSDKYVIFRRGIGLDRTSNFFFMEKVDMIIARAWRRFLEKTRLQKLFSRKKNSKPKIDSKKNDDLASEIEDKELYVERIRLETMDLSFGNLFGKVTIQEPTFEEVIVLYRRKSPKGQDDRAIHVKHFKNIPMADMELVLPEKKNPSLTPMDWVQFIVSVVIGLVTLISSLEMPKADFWVVIAILSALAGYCAKIYFSFQQNMATYQNLITQSMYDKQLDSGKGTLLHLCDDVIQQEVKEVIIAYYILMENGKATSDDLDLQCEELIQEEFGLQCNFEVMDAVQKLERLGVITRDSIGRICCVPLKRANEIIGATTEELVMKARQS

SEQ ID NO: 18585 - protein, 509 aa, Zea mays
  VARIANT 275: note = Ancestral polymorphism is F, Derived polymorphism is L
  VARIANT 353..509: note = Derived polymorphism lacks residues 353 to 509
MVRLPYVTALTTLFSYGLLFAFGQLRDFFRRILDARKPSNLKGYAPICLGLEDFYTRRLYLRIQDCFGRPIASAPDAWFDVVERYSNDCNKTLHRTTATTKCLNLGSYNYLGFAAADEYCTPRVIESLKKYSASTCSVRVDGGNTKLHTELEELVARFVGKPAAILFGMGYVTNSAIIPALVGKGSLIISDSLNHNSIVNGARGSGATVRVFQHNNPAHLEEVLREQIAGGQPRTHRPWKKIIVIVEGIYSMEGELCKLPEVISVCKKYKGLIYLTYEQAYTYLDEAHSIGAVGKTGRGVCELLGVDPADVDIMMGTFTKSFGSCGGYIAASNEIIHHLKHTCPAHIYATSMSPPAVQQVISAIKVILGEDGTNRGAKKLAQIRENSNFFRSELQKMGFEVLGDNDSPVMPIMLYNPAKIPAFSRECLRQAVAVVTVAFPATPLLLARARICISASHSREDLIKGLEVIELNLMPTLQVISKVGDLVGIKYFPVEQEKTTAVENLKKIQ

SEQ ID NO: 18586 - protein, 337 aa, Zea mays
  VARIANT 203: note = Ancestral polymorphism is P, Derived polymorphism is L
  VARIANT 239: note = Ancestral polymorphism is I, Derived polymorphism is T
  VARIANT 245: note = Ancestral polymorphism is T, Derived polymorphism is A
  VARIANT 248: note = Ancestral polymorphism is V, Derived polymorphism is A
MTMVPTTRNLLHHDGVKSSRGRSCYHPGQYYVGIAAQLEDQSSNPSTRFPRPLATMVVDDDEAAAAGTRSSSSPGAAAAAGNDDEEGDCWLQLGLAAASSSASSSSSGDNNITAPDPGPAPPPPVEEGLYLLAYDNKRNASARPPPLFPLPLRSYHVDQSYGGDRGRYRPAAEASGSAMSAPLAPPPPFIRCSGGAAIRVVSPPRRTEAPGGLWLTLRAAPNQIREPVLPQIAKSYLRIKDSNVTVAVVMKYLADKLGITPSHQVELTCRGQVLRPLLPLKYVRETIWCSTAPPREREETPPAAALLTSRRSSAATDHVMTLCYSTSRNSKLAPLNL

SEQ ID NO: 18587 - protein, 421 aa, Zea mays
  VARIANT 9: note = Ancestral polymorphism is A, Derived polymorphism is V
MAAPRKGTATPLGTVFSPEETKRAVARVAESVAGRRAELARLQGFAADNAALVSLVNRLPDELSHDIMVPFGGAAFFPGRLIHTNELLVLLGEGYYAERSAKQTTNILHRRGQELEAQVEAMKATIADLEAEAKFFEFTATEASVGLLSYWFCIYDLDYCECSSVFAHVLNRTAAKYYTAYRYLRQAMISSDYKQCVREGLVEIREEYDEDLETNSSRSEASVATVVMSDKDREHARIMARLDELEREEKDAGSACEDDNDGDDDDGDAGTSDDGEENKESGNALSDVNEDYSSGFGASFSGSGGNDRSHGNIKATNSDVRVHTKAVTFEDDKYVVSSSKSPPLLLDSIQSDPVLKNSSDPALSRDRKIISSGRKAFTGSIIEHDDNVSTIEPSVASSLAKPGTCASSRPVSRFKMQKGGR

SEQ ID NO: 18588 - protein, 118 aa, Zea mays
  VARIANT 53: note = Ancestral polymorphism is P, Derived polymorphism is R
  VARIANT 31: note = Ancestral polymorphism is R, Derived polymorphism is K
  VARIANT 27: note = Ancestral polymorphism is N, Derived polymorphism is I
  VARIANT 11: note = Ancestral polymorphism is R, Derived polymorphism is K
MRGPKRASKIRKLFNLAKDDDVRKYVNTYRKTFTTKNGKKVSKAPKIQRLVTPLTLQRKRARIADKKKRIAKKKSEAAEYQKLLAQRLKEQRDRRSESLAKRRSKLSAAAKASAATSA

SEQ ID NO: 18589 - protein, 279 aa, Zea mays
  VARIANT 187..279: note = Derived polymorphism lacks residues 187 to 279
  VARIANT 142: note = Ancestral polymorphism is A, Derived polymorphism is T
MEILESTLLGEFIGFIKGNWSAHSRVDQRRRRLRQLVSKVRMVVDAAEGNAGAAVRDESFSAWLQVLRSEALRGQEVLDAAGRAAAVASSARRFLAGFRALFVCSDEVDRLTEAVEELERLAGPGGDLDMFVRVLSLDAARTAATQEDMDVDGRPAPGARHRREGSGCAGSVAALLPSPGAKRKRACGGGSTSRGEDDAVQPPKRRPLVWMRSHRWPPSGFGRVSSAPREPPPAAFPRSRRAQTVALAMSRIRRRIGKPTTTRHRREPSLGQHFSRITL

SEQ ID NO: 18590 - protein, 178 aa, Zea mays
  VARIANT 133: note = Ancestral polymorphism is G, Derived polymorphism is S
  VARIANT 74..178: note = Derived polymorphism lacks residues 74 to 178
  VARIANT 52: note = Ancestral polymorphism is A, Derived polymorphism is V
MGLMVHIEDSHLTRIQPHAVGDAVYWETTTSSALEDYRAVEGVMIAHSGRSAVTLFRFGEAAMSHTKTRMEEAWSIEEPRRFSSDDAKEVVHYQTISPKSLAKSVLEEGGWSNFMCSREDTQNNVDVAIVFIGSKLQSSDISKDKQVDPALADTLKSGAKKGGGCILKEHETTELWSE

SEQ ID NO: 18591 - protein, 277 aa, Zea mays
  VARIANT 23: note = Ancestral polymorphism is T, Derived polymorphism is I
  VARIANT 57..277: note = Derived polymorphism lacks residues 57 to 277
  VARIANT 210: note = Ancestral polymorphism is C, Derived polymorphism is Y
MCSICETYFKKSPAHIGFVRVDTLSLLLPMVNISAYSDVLVVDMVGGLVVGAVAEHLGGTGYVCSTCLGSAPSTIDIIRMYNLSSDMVSRYFSFGTRSVALKGRETIEPAGDEDAHASLAHQVGTAVSDDKAQLSTDQPTDMEASEPSLDEHHVQDENSSLGGKDSDGTTSNASKSPKPGKAPSPEKMKYWKEHGFSSLIVAAPGHEVECLVADLLPLLSYSAPFAIYHQYPEFLISMSIYICTQPLAKCMYSLQLSKRAIGLQLSEPCLREYQVST

SEQ ID NO: 18592 - protein, 151 aa, Zea mays
  VARIANT 67: note = Ancestral polymorphism is G, Derived polymorphism is R
  VARIANT 92: note = Ancestral polymorphism is F, Derived polymorphism is L
  VARIANT 116: note = Ancestral polymorphism is A, Derived polymorphism is T
MEVELEHGGDEGGDRGSESSSSSSKRSFGASSDATVSSTPSKLQALRFAEDLSLPSVQVVVMSANMGCSHCRQRVANVVSKMNGLLDYMVDFGKKEVTVRGKVVHTKKKKKRHMRALLGAAGAGWDDARSAASLPGGHARTLSWFWGCYSS

SEQ ID NO: 18593 - protein, 728 aa, Zea mays
  VARIANT 223..728: note = Derived polymorphism lacks residues 223 to 728
  VARIANT 157..728: note = Derived polymorphism lacks residues 157 to 728
MRGAYPVLPTLLCSRRFALLPSPPAHPDLVLPPFPLSRSAGAPRLLRRHREGELLVSLAELDAAVRCSLRSWWMANMDSVVVMEVAPVPIPTFMDATPLNPPLPLVVEELVLRRSARYLNRPTRPNYADQEPPKNPGGRGRGKRKRDEEKPELAAQQGTKTPGRNDSNVEAGERKPMPVTAAVPACCAGVAAEDDATPTGKSAKLRVKETLRAFNSHYLHFVQEEQKRAQAAIQEIEAKGGLKRQTKGGKKKSSKQEAEAEEKEKRPSKRPDLKAITKVPWLDVGDQFYSRAEMVVLGIHSHWLNGIDYMGMKYQGKKEYANLTFPLATCIVMSGIYEDDLDKADEIIYTGQGGNDLLGNHRQIGSQQLKRGNLALKNSRKNGNPVRVIRGHLSKNSYTGKVYTYDGLYKVVDDWVQNGVQGHVVFKFKLKRLEGQPSLTTSEFCICWKYYVFVSSHIYVSRCDLLVQKLRQLFLNYLGFTYLKSLKIPKDIKIPSSIIGCDCEGDCASNKNCSCAQRNGSDLPYVSYKNIGRLVEPKAVVFECGANCSCNHDCVFKTASKGWGVRTWDTILPGAPICEYTGVLRRTEDLDGSQNNYCFDIDCLQTMKGLDGREKRAGSEMHLPNLYPENDSDAPPAPEYCIDGSSIGNFARFINHSCQPNLFVQCVMSSHNDVKLAKVMLFAADTILPLQELSYDYGYRLDSVVGPDGKIVKLPCHCGAPDCRKRLY

SEQ ID NO: 18594 - protein, 369 aa, Zea mays
  VARIANT 183: note = Ancestral polymorphism is T, Derived polymorphism is M
  VARIANT 180..369: note = Derived polymorphism lacks residues 180 to 369
  VARIANT 113: note = Ancestral polymorphism is G, Derived polymorphism is C
MITTRTPTLSTAASLLLTHRHRILAARTLSVSVSAAAGSSSIPVKMTARSALDEVTDTGAFDRSPSTFRSSVSRDGRFPAVAGRYHLYVSYACPWASRCLAFLKLKGLDHAIGVTAVKPIFERTKESDEHLGWVFPAAADEEPGAEPDPLNGARSVRELYEIASSNYAGKPTVPVLWDKQLKTVVNNESSEIIRMLNAEFNGIARNPGLDLYPAHLRASIDEANELVYDAINNGVYKCGFAKKQGPYDEAVTRLYEALDRCEEILGKRRYICGDQLTEADIRLFVTLIRFDEVYAVHFKCNKKLLREYPNLFNYTKDIYQIPGISSTVNMEHIRKHYYGSHPSINPYGIIPAGPNIDYNAPHDRERFSA

SEQ ID NO: 18595 - protein, 421 aa, Zea mays
  VARIANT 90: note = Ancestral polymorphism is R, Derived polymorphism is W
  VARIANT 111: note = Ancestral polymorphism is P, Derived polymorphism is L
  VARIANT 146..421: note = Derived polymorphism lacks residues 146 to 421
  VARIANT 147..421: note = Derived polymorphism lacks residues 147 to 421
  VARIANT 203: note = Ancestral polymorphism is G, Derived polymorphism is E
  VARIANT 311: note = Ancestral polymorphism is V, Derived polymorphism is L
  VARIANT 326: note = Ancestral polymorphism is P, Derived polymorphism is L
MRRWVLAIAIPILAAASAAALFLGAEAQAVQQGHQTERISGSAGDVLEDNPVGRLKVYVYDLPSKYNKKLVKKDPRCLNHMFAAEIFMHRFLLSSAVRTFNPEEADWFYTPVYATCDLTPSGLPLPFKSPRMMRSAIELIATNWPYWNRSEGADHFFVTPHDFGACFHYQEEKAIGRGILPLLQRATLVQTFGQKNHVCLKGGSITIPPFAPPQKMQAHLIPLDTPRSIFVYFRGLFYDTSNDPEGGYYARGARASVWENFKNNPLFDISTDHPPTYYEDMQRSVFCLCPLGWAPWSPRLVEAVVFGCIPVIIADDIVLPFADAIPWEEIGVFVAEEDVPKLDSILTSIPTDVILRKQRLLANPAMKQAMLFPQPAQAGDAFHQILNGLARKLPHGDNVFLKPGERVLNWTAGPPGDLKPW

SEQ ID NO: 18596 - protein, 721 aa, Zea mays
  VARIANT 36: note = Ancestral polymorphism is P, Derived polymorphism is S
MPSFSAGASSQKQQFARGRQLIRQQRKSLPIASGLPAELLYVFDTFWDLSSGSRILLFVVGSVEKRLVEEVRNNDTLIIVGETGSGKTTQLPQFLYDGGLCQDGKVIGITQPRRVAAVTVAKRVAEECNDHIGKKVGYSIRFDDSTSNATRIKYMTDGLLLREALLDPLLSKYSVIVVDEAHERTVHTDVLLGLLKKVQHSRANTNKNGKTLLGHSQNVTIKECQGIRCAPLKLIIMSASLDAKCFSDYFGGAKAVHIQGRQYPVDILYTYQPESDYMDATLVTIFQIHLEEGPGDILAFLTGQEEIESLERLIHERARLFPPESSKICVTPIYSSLPSEQQMNAFKPAPAGTRKVVLATNIAETSVTIPGIKYVIDPGMVKARAYNPVTGMESLIIIPVSKAQALQRSGRAGREGPGKCFRLFQESEFDKLVDSTVPEIKRCNLSNVVLQLKALGIDDIIGFDFMEKPSRTAILKSLEQLILLGALTDDYKLSDPVGHQMARLPLDPMYSKSLIVSSKFKCLEEMLIVVSMLSVESIFFSVREKLEEARAARKRFESSEGDHITLVNVYRGAAECLEKSRNANAKEKTMEKALNRWCRENFINYRSLRHARDVHRQIQGHVQQMGLSMSSCGDDMVLFRRCLTSAFFLNAAMRQPDGSYRALATGQSVQIHPSSVLFRTKVDCVIFNELVRTTQNYIKNLTRIDPLWLAELAPQYYATEE

SEQ ID NO: 18597 - protein, 425 aa, Zea mays
  VARIANT 198: note = Ancestral polymorphism is V, Derived polymorphism is A
  VARIANT 221: note = Ancestral polymorphism is F, Derived polymorphism is S
MRPLVAAVLLVTICVVAAAPLQRHHKPGRTSGNAVGVLDDDPVGKLKVFVYEMPRKYNKMLVDKDSRCLQHMFAAEIFMHQFLLSSAVRTLDPEAADWFYTPVYTTCDLTPQGFPLPFRAPRMMRSAIRYVAATWPFWNRTDGADHFFLTPHDFGACFHYQEERAVERGILPLLRRATLVQTFGQRNHVCLQDGSITVPPYASPHRLQAHLVGPGTPRSIFVYFRGLFYDMGNDPEGGYYARQGGYYATWAIAWWGARASVWENFKDNPLFDISTEHPATYYEDMQRAIFCLCPLGWAPWSPRLVEAVVFGCIPVIIADDIVLPFADAIPWEDMSVFVAERDVPRLDSILTSIPLPDILRRQRLLARDSVKRALLFHQPARPGDAFHQVLNGLARKLPHREGVFLQPGEKALDWDAGLESDLKPW

SEQ ID NO: 18598 - protein, 209 aa, Zea mays
  VARIANT 16: note = Ancestral polymorphism is R, Derived polymorphism is H
  VARIANT 33: note = Ancestral polymorphism is I, Derived polymorphism is N
  VARIANT 41: note = Ancestral polymorphism is A, Derived polymorphism is V
  VARIANT 43: note = Ancestral polymorphism is P, Derived polymorphism is L
  VARIANT 44: note = Ancestral polymorphism is A, Derived polymorphism is V
  VARIANT 145: note = Ancestral polymorphism is R, Derived polymorphism is C
  VARIANT 153: note = Ancestral polymorphism is T, Derived polymorphism is M
  VARIANT 174..209: note = Derived polymorphism lacks residues 174 to 209
MVDVSRVQKELTECNRDREVSGVSIALHDGANISHLTGTIAGPADSPYEGGTFVIDIRLPGGYPFEPPKMQFITKVWHPNISSQNGAICLDILKDQWSPALTLKTALLSLQALLSSPAPDDPQDAVVAQQMLDGKIGYKYNHYLRDYPTFAATARYWTEAFAKSASTGMEEKVQKLVEMGFPEDQVRSALKSVDGDENMALEKLCSGSG

SEQ ID NO: 18599 - protein, 559 aa, Zea mays
  VARIANT 89: note = Ancestral polymorphism is S, Derived polymorphism is N
MGCIIGKLATTAPGSSLFFPAAATSVGGGDDREVQLQAPRPEHIAAVKKDASGWPLWLSEAAGDALRGWAPRGADAFQKLEKIGSGTYSNVYKAIEVASGRVVALKKVRVDGVGEAESARFMAREIALLRRLGDHPNVVRLDGLVTSRLNTAPSLYLVFEYMEHDLTGLTACAAASARRLSLPQVKCYMKQLLSGIEHCHNNGVLHRDIKTSNLLVSSDGILKIADFGLATSYDPEDARPMTSQVITLWYRPPELLLGSTHYGVGVDLWSVGCVLAELLLGEPVFPGRTEVEQLHKVFKLCGTPSEDYWEKMKLAHPTFGPYERCLAEKFKDVAPSTLSLLETLLSIDPDMRGTATDALNSEFFRTEPYACEPSSLPRYPPCKERDVKLKYEKHKRKSRVNGSVERHRNRQHASQNPGRRVFTPDANNKPQANPKVPRLVTSTSTTKLERFPPPHLDASIGYSLDASVDDGATEEFFSSSAAELKKMPSLIFGHVKSYLASSPRKGVHKAKPSLNMAMAPPTLLIGAFRPYSFGRSMEVRRKNREQFRSKGRNAVGAVK

SEQ ID NO: 18600 - protein, 259 aa, Zea mays
  VARIANT 87: note = Ancestral polymorphism is R, Derived polymorphism is H
MEARPGAWRLQQRGPGAPVAGLPIGFRFRPTDEELLLHYLRRKALACPLPAGVIPDADLARLDPSDLLLPAAAPPAGGAADDASGEHFFFHRPATRCWRRGGGAARAAGAGVWRPSGKETVVVSPRCKRPVGTKRTLVFCPRRRGGGGARTDWVMHEYRLLPAGLHLHGCAANAPPPTNVSSHGGGAAAADWVVCRIFRRARPAHRARLGDAQEEEEEHAAVESASSTSSCVTDASGTIGQDDDGDEGISGSCSVASSN

SEQ ID NO: 18601 - protein, 406 aa, Zea mays
  VARIANT 130..406: note = Derived polymorphism lacks residues 130 to 406
MNGASAGAGGEAPLVYKAWKGNNVFLLKGRFIFGPDARSLFITMFLIVAPVSIFCAFVAKELMDKFSYGLGLPVMIAAVLFTAYDLSLLLLTSGRDPGIIPRNAHPPEPEGFDGNAEVGANQTPPVRLPRVKDVVVNGITVKTKYCDTCMLYRPPRCSHCSICNNCVERFDHHCPWVGQCIGLRNYRFFYMFVFSTTLLCLYVFGFCWVFIIKIRNAEQITIWKAMTKTPASIALIIYTFIAVWFVGGLSVFHLYLMSTNQTTYENFRYRYDQRDNPYNKGVMENIKEIFFTTIPPSKNNFCGRVEQEHGLRPRPTNGFMSPNMGRAVGDIEMGRKPVAWDEPRMAAEIGDLGAGLSNLLEDKDGRFRTTSPDLSRDALAVGGGLEEHGSSAMNPGRSSWGVEAGR

SEQ ID NO: 18602 - protein, 288 aa, Zea mays
  VARIANT 177: note = Ancestral polymorphism is P, Derived polymorphism is L
  VARIANT 129: note = Ancestral polymorphism is A, Derived polymorphism is V
  VARIANT 117: note = Ancestral polymorphism is L, Derived polymorphism is V
  VARIANT 115: note = Ancestral polymorphism is A, Derived polymorphism is V
MAGGGDRDASDAELRAGFETLAVTRPDPSAGVYEVRLNRPAQRNALSPAAFAEIPRAMSLLDRAPSARAVVLSAAGPHFCAGIELGGPGDPLSAASADPVAAAEGLRRAVLDMQAALTAIERCRKPVVAAVHGACVGGGVDLVAACDIRCCSRDASFVLKEVDMAIVADLGALQRLPRIVGYGNAADLALTGRKINAMEAKDMGLVTRVFDSKQDLDAGVAKIAKEIADKSAWAVIGTKAVLLRSRDATIEQGLEHVATWNAGMMRSNDLKEAIRAFLEKRKPVFSKL

SEQ ID NO: 18603 - protein, 179 aa, Zea mays
  VARIANT 83..179: note = Derived polymorphism lacks residues 83 to 179
  VARIANT 87..179: note = Derived polymorphism lacks residues 87 to 179
  VARIANT 92: note = Ancestral polymorphism is E, Derived polymorphism is K
  VARIANT 104: note = Ancestral polymorphism is P, Derived polymorphism is S
  VARIANT 112: note = Ancestral polymorphism is G, Derived polymorphism is D
  VARIANT 113: note = Ancestral polymorphism is W, Derived polymorphism is R
  VARIANT 117: note = Ancestral polymorphism is G, Derived polymorphism is D
  VARIANT 124: note = Ancestral polymorphism is T, Derived polymorphism is I
  VARIANT 129: note = Ancestral polymorphism is P, Derived polymorphism is L
  VARIANT 133: note = Ancestral polymorphism is P, Derived polymorphism is L
MPSFYKEQPPKVELKKQQPLPQPRSSMREALEKEDKEKAAAAKEKAVVPKNGNGNGGKNGGGAGSGNGGAPPQSGEETAREIQVVREAYCRETAASAYVIPEEPPVVVDLVGWYIYGFCSYFITHLLLPVLFPAIITQVAFPNSDFTPDPKYTLKGVTCSVHEMSMKPFDKDMLQPSRS

SEQ ID NO: 18604 - protein, 183 aa, Zea mays
  VARIANT 25: note = Ancestral polymorphism is L, Derived polymorphism is Q
  VARIANT 91: note = Ancestral polymorphism is P, Derived polymorphism is L
  VARIANT 109: note = Ancestral polymorphism is D, Derived polymorphism is G
  VARIANT 116: note = Ancestral polymorphism is V, Derived polymorphism is F
  VARIANT 129: note = Ancestral polymorphism is K, Derived polymorphism is N
  VARIANT 139: note = Ancestral polymorphism is S, Derived polymorphism is L
  VARIANT 141: note = Ancestral polymorphism is P, Derived polymorphism is L
  VARIANT 158: note = Ancestral polymorphism is T, Derived polymorphism is I
  VARIANT 167: note = Ancestral polymorphism is D, Derived polymorphism is H
MAATVVTTTTSKAARTKSGLISRILQRCKSGLSVGSGRSPSPSGCFPVYVGPGRERFVVRAECANHPLFRRLLDDAEREYGYAAQGPIALPDCGVAAFLDVLCQMERAGADGEVAVASTPICGMNSGSKGRAAGYRMLLSPVNGWWKEISEAGILLVTVMAFDDELDVADGIGEADVILASSF

SEQ ID NO: 18605 - protein, 461 aa, Zea mays
  VARIANT 123..461: note = Derived polymorphism lacks residues 123 to 461
MDCHGRGKGNEKAILDSGESSSAAGGLSKTYVVTKEGKRIELKGTIKDPWSHGTKRGKLGWKCGYCNASHASGGATRLREHLCGLQGNVKPCFNVPRDVKNILLEEVALSKKKKRDTTENRLYIQKALVEHDYRTIIARLNEEEQLEMAMRESLRDVGLTYDGSSRGSGIVIGAASGSRVSNSVAGNYGQTSGSRSGSSTKQSPLRSFYPGPSSSKAPFDIDLARSRAPSQPRVDIMLCRDSKLKLWKALSKWFHANDIPGRKADCPYFRAAMKLAQQLGEVPLPKGKDIDGQLLDMNYNDLEAQMESFKEDWSRYGQKNATVSGFLPKMIQAYNDISAKLKKSERGKGGLLKRTTEVISKRIRYLLNETLMLAGAALDPQELYRSNLAKKSSCQLAVTLAIKKLATSTKEVAAAIDQFSRFIEKKGLFEDPEAKWFETWGTNSFASKINKKKEANSQEHY

SEQ ID NO: 18606 - protein, 479 aa, Zea mays
  VARIANT 15: note = Ancestral polymorphism is A, Derived polymorphism is G
  VARIANT 163: note = Ancestral polymorphism is P, Derived polymorphism is L
  VARIANT 180: note = Ancestral polymorphism is C, Derived polymorphism is R
  VARIANT 262: note = Ancestral polymorphism is I, Derived polymorphism is V
MECARELRVRSTFTAAAMASKKQVGPGGAVPAQEQMNGGDAARLVRKPMDTFPQPAAARGRRALVDVGNLMNGRPSLVNHQKQAVAAAATSHKPLNVGNKKPLVPQAAARGLRPLADVTNLMIKDRAAPANRQKPVDAVFNRNGKAVKLKECKVKPEVIVIIPDSEKEKKGKFPGGQRVCRRVPTLFDNLTKCSRASDGITTPKKKDPYDIDAPDSCNELAVVEYVEDIYRFYKSTEGTCLPLSSYMSSQAEISERMRAILIDWIIEVQYRLTLMPETLYLTVYIIDQYLSMESVPRKELQLVGISAMLIASKYEEIWAPLVKDLMCLCDNAFTRDQILTKEKAILDMLHWNLTVPTMYMFIVRYLKAAMCDTELENMTFFYSELALVQYAMLVYPPSVTAAAAVYAARSTLGMNPQWTDILEHHTGLAEPQLLDCARRLISFHALAPESKQKAVYRKYSKPKLGSVALQSPDKKLLSG

SEQ ID NO: 18607 - protein, 1547 aa, Zea mays
  VARIANT 522..1547: note = Derived polymorphism lacks residues 522 to 1547
MAERKLDRPSALGKGGLSLGIEEDRVAAAMGFVDHSKDQHHLDNSIPLSPQWLYAKPADGKISLPHGSSLELAEKEVRMLEGTVDRKERRRNAFDADSGLRWLEEERETSLLGRRERKKDVDRDVDNRKIDRRSDNVSARDITDPRAAPASERWHDGSTRGLGNEGRRDGKWSSRWGPDDKEKDSRSDKKVDAEKDETHADKLTFTGRLLSESDSRDKWRPRHRQESHSVGTATHRAAPGFGSEKGRVKDSTNVGFAAGRGRGNPNSVASFNRPSSAGSIGAPAVHGKFAKTAVSFCYPRGKLLDIYRQKNMMSSFDDVHMKLDEIPSVTLSTAAKPLAFVAPDTVEEALLEDIRKGKVISSEGINGIGNKKERAKELEEPASGIDDDMGKASFAIAGLGQEGSSGLISVNDASYVEGTLPSGVSTSLLKISLEENAISNQHGITDTQEGLKTAEIKENADHALGTKLPDDSNTLFEVPSFEHLQEPTRPYQSNNMDIKVGGHANYPEELTLYYLDPQGGVQGPFLGADIISWYEDGYFGLELPVRLSQFPDDVPFRPLVEVMPHLAQKTQSRIPLPCDGNSESLESSQSKFESSVPSTSSGRTDQFSIWDSESNAVDPKRGDHEASIPSRSGWLSSPETGKDISNTSNRQQHIPESVNQDAEEVLYTGRPNSSMGQSLRDLENDRADFQSTPHDPHSVAGEANLLQHNVPRDSDLSPLGLLWSELEGRPKQPLSSNVLSVNERRNPKPTTPKDIPPVNMRQGPLSRMNEVSSVRDEWPANFGRLDNMNDANISGRIHQVEAEHHLNFDGHLLLQQIRREQQQQRQEQLMAHNNLEFSGAFPGQVFDPLNQHRQPMNQQIPDVEHLLRIQFELEQQQQRQLQQEQHQRQLQQQRQAQLLQRQQQQQQQQQQQMILEQLLQQQLQGSNFGPTSMVDQVLLREHVLNELHQQPHHLQRQHDAAIEQLIQAKFGHGLHREHHNDMLDVLSRSNQRQMLPLEQQLLLGLQHEQQLKSQQLANALRQHSGQEEERHLSGVWPMDAAAQFIRSGTSPNQIHSRFDLLENLQRSSSFDHHEHLDRSLSLHEQLHMGGQGIRSLERTGSLPGGGPGPNPDVINALTRHHGLSQLETHGDVYPLVQMPMLPSGVHPQQLRHQDQLPGSHIGRLERHWSDANGQLQNSLMESSHINQLQIEAEKERRNVEMNLSVDNPHAWGALMNKDRNTEQDLTDMIHKKLVLQSQQSRGFPDVSVPASFRRKDHFVQPVVESPLRSVDMSFEESLSERSLYAKSGQLAQEGSSNLGTLPNSIENTGKFNLRSGSGSMLEQKHFLGIDDVQSDFLETTGGRTSANQLVGSVNELTRGKRQGSSASLAGDDPNLADEGVSKWYSSKLVDMSMCRSDSGMSKGSSHSLLKRSTNQHTTTSQSVPTDLSAIRLKKAGLASSDENKMEAGFASVAQGMEGCVPSNKETGAYGMPSATNNPDASGQSFSEALKSSRKPPLQYDASESADCGPGGKGAKKKTKKGKQIDPSLLGFKVHSNRIMMGEIVRDD

SEQ ID NO: 18608 - protein, 304 aa, Zea mays
  VARIANT 292: note = Ancestral polymorphism is Y, Derived polymorphism is N
  VARIANT 174: note = Ancestral polymorphism is R, Derived polymorphism is C
  VARIANT 164: note = Ancestral polymorphism is S, Derived polymorphism is L
  VARIANT 144: note = Ancestral polymorphism is Q, Derived polymorphism is L
  VARIANT 135: note = Ancestral polymorphism is S, Derived polymorphism is F
  VARIANT 92: note = Ancestral polymorphism is R, Derived polymorphism is C
  VARIANT 71: note = Ancestral polymorphism is G, Derived polymorphism is S
  VARIANT 64: note = Ancestral polymorphism is G, Derived polymorphism is S
  VARIANT 61: note = Ancestral polymorphism is P, Derived polymorphism is L
  VARIANT 20: note = Ancestral polymorphism is G, Derived polymorphism is R
MRMVSRWGVVQLLLMSALPRPCGWCSCRPSPRLMHNSEHVFYDISSTFMWFPIQNIKADIPSSGVIYFNVSIIKKHLPLVVFDVSLSCTRRRLFSPPKKPTKPTADAGLDRHGRPNSNVAASASGTGWVGEEDISIETLARHIQEHMTISSNPAAISSWRCSSSASYATSLTHRYRTAPMSHPRYSLRCTSIPTCCSSPSSAHPGDHLLRPSGEHLAGCIHHEVLFIMNSCIFVAAVGKDIADETDTEIDHSKQISHVPIHLSIFSPHVVVNLTLIDLPGLTKVAVGLYKLYLSECNSQLLSDE

SEQ ID NO: 18609 - protein, 579 aa, Zea mays
  VARIANT 489: note = Ancestral polymorphism is T, Derived polymorphism is A
  VARIANT 360: note = Ancestral polymorphism is S, Derived polymorphism is Y
  VARIANT 65..579: note = Derived polymorphism lacks residues 65 to 579
  VARIANT 27..579: note = Derived polymorphism lacks residues 27 to 579
MRAAATSKYSPCAAFRCCSAGDWRAACLRGYSVSSTSSPPPRSRLPHLSPADDDDDPPAAARAPQISRSVPWSRQDEGSMKPTAGASGKGGAVYPSLPRLKCQECRRALVVVGVESYADRLPAHAAPGNHASSVQDSVMGASKMDNSYVVLSRQNKVQGPRIPPRPGSAVAAHTDPNQSTRAIEGSYIVLPPPSASIYKKSASEGGGAQLTPPGGNSSSPLSGNNSGFHSSVTVLKRAFEVASSQTQVEQPLCLECMRVLSDKMDKEIEDCNADIKSYEACLQRLQQEPYNILSETDFQKEKQKIEEEEKKLKCAIEEAEKQYSEVSSEMKDLEIKSKQFEELEERYWHEFNSFQFQLTSHQEERDAVFAKIGVSQVHLEMLKHTNVLNDAFYISCDEVIARINNFRLGRLPNVEVEWDEINVAWGQAALLLHTMAHYFTPKFRYRIKIHPMGSYPRVTDIHNHTYELFGPVNLFWSTRFDKAMTWFLTCLQEFAEFAISLDKENNVPPEKTLKLPHKIDGDKVGNHTIVLSFNQDETWTKALKYMLYDLKFVLSWFIGNTSFAPPSRSLHTQFLKNKS

SEQ ID NO: 18610 - protein, 315 aa, Zea mays
  VARIANT 177: note = Ancestral polymorphism is H, Derived polymorphism is P
  VARIANT 114: note = Ancestral polymorphism is A, Derived polymorphism is S
  VARIANT 107: note = Ancestral polymorphism is R, Derived polymorphism is W
  VARIANT 104: note = Ancestral polymorphism is R, Derived polymorphism is W
  VARIANT 76..315: note = Derived polymorphism lacks residues 76 to 315
MDPKFPPPPPLNKTEPTTATTTTTSTAQQQQQQLDPKDYQQQQQQPAQHLQIQIHQSQQDGGGGGKEQQQLQVVAQPGERRQQALAPKRSSNKDRHTKVDGRGRRIRMPALCAARIFQLTRELGHKSDGETVQWLLQQAEPAIVAATGTGTIPASALASVAPSLPSPTSGLARPHHHMWAPSAGFSSPSFLNSAAAGTGDAAGIMQRMGIPAGFELPGASAAGATLGAGGHIGFAPMFAGHAAAMPGLELGLSQDGHIGVLAAQSISQFYHQVGAAAGGGGQMHHAHGHHHHHHQQQEDGEDDREDGESDDESGQ

SEQ ID NO: 18611 - protein, 495 aa, Zea mays
  VARIANT 387..495: note = Derived polymorphism lacks residues 387 to 495
  VARIANT 390..495: note = Derived polymorphism lacks residues 390 to 495
MPESRSYVPPQEDTIDAVGLGARSSERSPIVEGNMSVASVLASDGCDVPLQGSITEPFFQQDKHDHTVVVGPKSCKRKSPILSYCADGDGADGGGSSNQSSKVSIREGPSTHATVTPGFDRISDVLPTDAYESEHLPECITAQDTTISQPDSRKAHLSALQQERGEKVTQDLEDISANIGSVEKDHIHGDLTLPSASVLVSISCNGANQGSKYETNPASINKHSVLQNNNKTPVKDPEKKQQAVNEEARKEGGNDNSSHETGASSPRRCDPPLNQDVEADQDDSLTTSNQSGGSDEIEATSSNDSAKQSSPPWRDMRHNKKGLHEKEPAVSRSTYAYFTKEKKYAHLQKRYKMVNRYSFARFTKHDLRVTVLELLMGRYPLLPAGQQPNWAALMCAICFGEPPVLPDGAVSPELRSFIVACLQKDYRRRASVAELLARPFVAERDVLASRCSLQQLVAEVKQEGGGQEATWEEASEARNVASRKRRRLPSPDAVT

SEQ ID NO: 18612 - protein, 274 aa, Zea mays
  VARIANT 253: note = Ancestral polymorphism is A, Derived polymorphism is T
  VARIANT 177..274: note = Derived polymorphism lacks residues 177 to 274
  VARIANT 173: note = Ancestral polymorphism is S, Derived polymorphism is P
  VARIANT 166: note = Ancestral polymorphism is M, Derived polymorphism is I
  VARIANT 144: note = Ancestral polymorphism is E, Derived polymorphism is K
  VARIANT 134: note = Ancestral polymorphism is N, Derived polymorphism is Y
  VARIANT 119: note = Ancestral polymorphism is A, Derived polymorphism is V
  VARIANT 95: note = Ancestral polymorphism is G, Derived polymorphism is R
  VARIANT 44: note = Ancestral polymorphism is L, Derived polymorphism is F
  VARIANT 15: note = Ancestral polymorphism is P, Derived polymorphism is R
MEGGGHPTHADEEPPKEKAPPPKEKAAQGNLFISGCLDLLELNLVRLETVRHMLMITVTLSKKPLDTSSPGFPAYPYYSISTLTGNLSLGALMLGESRKYGTTIVPGLYAPVHLHFFVARMDMAVDCKLNEVHNQVVEVNVKVESAGTHNMHNNDFYAKEKLLKSMRDCDPSSLRHWILWQRKFQAPLQHYTALMDLQDYSENGTVTVVYRVILKGTDGEAYRDATGTTQFHEGRREDAVAAAEEAAFSKACAWFGFGLYLYHQDESHYDDHFH

SEQ ID NO: 18613 - protein, 192 aa, Zea mays
  VARIANT 45: note = Ancestral polymorphism is D, Derived polymorphism is N
  VARIANT 50: note = Ancestral polymorphism is G, Derived polymorphism is E
  VARIANT 58: note = Ancestral polymorphism is T, Derived polymorphism is M
  VARIANT 159..192: note = Derived polymorphism lacks residues 159 to 192
  VARIANT 168: note = Ancestral polymorphism is P, Derived polymorphism is L
  VARIANT 182..192: note = Derived polymorphism lacks residues 182 to 192
MQKRMSSPGRWVDGSEYAIITAVQGTFGYLDPEYYHTGQLTDKSDVYSFEVILAELLTRNKPIIEKGNGEKENLSNYLWEAKEKPLEEIVDGQVWEEASKEAVVCFARLALECLDLRREARPTMKDVELRLQLLKAKARAAASGPRADGEFHPPGETGRRTRRYGVVPVTAQDGTRQYSLEQEIASSLWIPR

SEQ ID NO: 18614 - protein, 208 aa, Zea mays
  VARIANT 36: note = Ancestral polymorphism is I, Derived polymorphism is V
MVKHNNVIPNGHFKKHWQNYVKTWFNQPARKQRRRIARQKKAVKIFPRPTAGPLRPIVQCQTLKYNMKSRAGRGFTLEELKAAGIPKKLAPTIGISVDHRRKNKSLEGLQANVQRLKTYKAKLVIFPRRAHKVKAGDSTPEELATATQVQGDYMPFTRGEKRSVEVVKVTDEMKSFAAYGKLRLERMNKKHLGARQKKAAEAEKEDKK

SEQ ID NO: 18615 - protein, 205 aa, Zea mays
  VARIANT 170: note = Ancestral polymorphism is Y, Derived polymorphism is N
  VARIANT 111: note = Ancestral polymorphism is P, Derived polymorphism is L
  VARIANT 68: note = Ancestral polymorphism is R, Derived polymorphism is S
MASMAFALAGAFKGLSLAPTTTTSSFPRCDRASLSVGGAAGVPVPVPARRLTIQMAHKKGAGSTKNGRDSKGQRLGVKIYGDQLAKPGAIIIRQRGTRVLPPSCSLRFPYLLLVYPGNNVGMGKDHTLFSLIDGLVKFEKYGPDKKKVSVYPYEKEPENPNSYRARKREYFRMRRERKKARAEGAAEPQLVLAAVDENSEVSADC

SEQ ID NO: 18616 - protein, 443 aa, Zea mays
  VARIANT 196: note = Ancestral polymorphism is D, Derived polymorphism is E
  VARIANT 246: note = Ancestral polymorphism is F, Derived polymorphism is S
MGEVAALRQLVGQVQELWDLYGANAHPLPRWYLLDFEHGSIMDDYCGGRSGYNSELLKIMEANQSPPRKRPRRDRNREKAPSSNKTEVMQQEIWRDFPEDLFETVIARLPVAAIFRFRTVCRKWSSLLGSDSFSHQYSEAPRGLPWFYTITHENANNNVAMYDPSLKKWHHPSVPLTPTKIVIPVASVGGLVCLLDLSHKNFYICNPLMQSLKEIPPRSVQGWSRVAVGMVLNGRSSSDGYKVMWFGNDGTFEVYDSTKNMWSCPGTFPPSIKLPLALNFRSQPVAVGSTVYFMCAEPDGVLSYDVSTGIWRQFAIPLPPHLTDHTLAEFQGRVMLVGLLCKNAATCVCIWELQKMTLLWKEVDRMPNIWCLEFYGKHMKMTCLGNSGLLMLSLKAKRMNRLVTYNLLKREWQKVPDCVLPYSRKKQWIACGTAFDPVPCALA

SEQ ID NO: 18617 - protein, 309 aa, Zea mays
  VARIANT 276..309: note = Derived polymorphism lacks residues 276 to 309
  VARIANT 197..309: note = Ancestral polymorphism lacks residues 197 to 309
  VARIANT 187: note = Ancestral polymorphism is P, Derived polymorphism is L
  VARIANT 135: note = Ancestral polymorphism is S, Derived polymorphism is F
  VARIANT 116: note = Ancestral polymorphism is S, Derived polymorphism is F
  VARIANT 101: note = Ancestral polymorphism is V, Derived polymorphism is M
  VARIANT 96..309: note = Derived polymorphism lacks residues 96 to 309
  VARIANT 82..309: note = Derived polymorphism lacks residues 82 to 309
  VARIANT 77: note = Ancestral polymorphism is R, Derived polymorphism is C
  VARIANT 58: note = Ancestral polymorphism is A, Derived polymorphism is V
  VARIANT 41: note = Ancestral polymorphism is F, Derived polymorphism is S
  VARIANT 13..309: note = Derived polymorphism lacks residues 13 to 309
MELMRGLRNQLTELITGFGAQDLGPMSLGLSHSLSRYKLKFSPEKACLISVDTMIIQAIGLLDDLDKDLNTFAMRVREWYGWHFPELTKIVSDNIQYAKVVKMMGNRANAVNLDFSEILSDEELETQLKEAAVISMGTEVSELDLLNIRELCDQVLALSEYRAQLYDYLRSRMNTIAPNLQHWWLSPLRTKGCVSLYALFKALKTKHSTPNYGLIYHASLIGKASQKHKGKISRSLAAKTTLAIRYDALGDGEDNSIGTESLLKLETRLQVLEGRELGKSAGSTKGKPKIEVYEKDRKNGARALTTPAK

SEQ ID NO: 18618 - protein, 822 aa, Zea mays
  VARIANT 557..822: note = Derived polymorphism lacks residues 557 to 822
  VARIANT 83..822: note = Derived polymorphism lacks residues 83 to 822
  VARIANT 26..822: note = Derived polymorphism lacks residues 26 to 822
MLGVLRTADSSPSRFDMECNRDDAVRSKDIAETKFRENDITGAKKFALKAKALFETLEGIDQMIVALDVHVRAQTKIAGENDWYGILEVPPMADEEAIKKKYKKLAFQTHPDKNSSVCAKAAFNLISDAWNVLSNTAKRTVYDHRRRVHALGVHQNNFKATARKNSNSSMSSVDRFCARRREVAPHLAHEGIETFWTLCWSCLMNFQYSREYFNHHLKCHNCHAVFVAAEVRPPSVQIYPTEPMPMSTNNNIGGNTVPGMVAPGVQAGVSQGNQNCDPTVFKSATCAKSTKHTVQQTHDSIRKDDAAGASIPANEEANCTKVLQHAARKHAHAVSSARRANAATREHEAAKRKHANAGKQGTWQSAASYPDGDGCKPVFPVKRKPRSTSETSGAKKHKVSSGDFNCESSSDVGRTSFGRVLMKLDVRSILIEKGKLQAQKLQELSSKKANVKKKQKMQNGKKSSRKGVCNIENEVNKIEMKQSSSSVDPKKDVLELVSRRVDSEEKERQKSSKQVGLKEKLKSWPVPEVRIVYTRRNRKQHKKELGDEVTGATPGTEHHMPARYGCLNQVCPDAGSDKIPVPDADFYSVPDADFSSFGDHSESSFQNDQVWAMYDEEDGMPRYYALIRKVISTRPFKVRLVHLKANDSNEFGASSWLSCGYSKTCGEFKFDVSKHTDQVNIFSHKVKYDKGPGGIIRIFPKKGDIWALYQNWSPDWDQFTADDMIYKYELVEILDSYSPSRGISVMPIVKVPGFVSVFKPVHNATRSWRIPREEMMCFSHQVPFHVLTGEEAHNAPKGCYELDPGSTPQELLHVVPPSGDAK

SEQ ID NO: 18619 - protein, 311 aa, Zea mays
  VARIANT 254: note = Ancestral polymorphism is F, Derived polymorphism is V
  VARIANT 233..311: note = Derived polymorphism lacks residues 233 to 311
  VARIANT 85..311: note = Derived polymorphism lacks residues 85 to 311
  VARIANT 52: note = Ancestral polymorphism is L, Derived polymorphism is H
  VARIANT 37..311: note = Derived polymorphism lacks residues 37 to 311
MAATPSPSVPACPTFPSSSSLPPRSKTPTTFLPSPSRLVAIGDLHGDLPKSLSALRLVGLVPPSCTPDSPSASSSWTAGPTLTVQLGDILDRGGDELRLLYLLRLSLSAETRGGAFLPILGNHEVKNVSSDFRFATPQGFHDRAVNRGGRGGGLDPSRRLCACAGFAAGAAEAGAVYILLLIVSRDFNLHQAFKFECAKICCLSKGPKALRPRKRNGCISCKTALYAYTEENQYVDTKPGKYITKPRTNNSLIVISWKCDQVLSNNLFGLGYAIQAVLRKATSSEKLDKETKGEKNQSERRVERASVCVTT

SEQ ID NO: 18620 - protein, 249 aa, Zea mays
  VARIANT 149: note = Ancestral polymorphism is G, Derived polymorphism is S
  VARIANT 131: note = Ancestral polymorphism is A, Derived polymorphism is V
  VARIANT 67: note = Ancestral polymorphism is S, Derived polymorphism is F
  VARIANT 32: note = Ancestral polymorphism is A, Derived polymorphism is V
MITAEKSPEREEEEEANPRAEAFLEIICRVLVGEVEAALSACGIGPTAEVEELVLKSRECYKRPKSSVRFFRWAGQSVSHTAYAWNLLVDILGKAAMFEPMWDAIRSMKQEGGGGLVSVATFASVFASYCAAGNIKDAIAALDVMDRYGLKHDAVALNSLLSAICRVEGRMQDAQDVFERTKATIPPDGDTFAILLEAWEKEGNAVRAKSVFGEMVVRIGWDAANVSAYDSFLSTLVRGGLLDEAFKFL

SEQ ID NO: 18621 - protein, 281 aa, Zea mays
  VARIANT 35: note = Ancestral polymorphism is G, Derived polymorphism is S
MSDDVVWHCIRHNHCSFMSKITTGIFCRNPYNATGICNRSSCPLANSRYATIRDHEGIFYLYMKTAERAHLPNKLWERVKLPKNYEKAMEVINKHLEFWPKLLVHKIKQRLTKMTQYRIRMRKLQLKVREKVMTMPRKQTQRDLRRMEKAERAAQLERNIENELKERLNKGVYADIYNVPFKAFDEVLDMERDEVVLEEEEEEEGEVYVEGDDMEEMDDMEDFEGLSDGGTDEDDVLDDPVSKKPKGSSSYSKQNVGKRSRKVMTEVEEDEEINTRQRQRA

SEQ ID NO: 18622 - protein, 296 aa, Zea mays
  VARIANT 199..296: note = Derived polymorphism lacks residues 199 to 296
  VARIANT 198..296: note = Derived polymorphism lacks residues 198 to 296
MPPGRMAGARTRTDIGEEPITEYEKERALKVMRNNKMLSSLGITGFTSLIRSSNTRKNSIAQEDFDPLYEPDHSEDNGHHVSDKAMQDVPYNCERRNTNMSTGSGGTKGSKRVIAPNAEDQVGRVTRQKTKEQSSVEKDVRGSTTNTEEQALISANCPAQHDDEIQICDEGKKMGQFAVDTKNKDVRFACADVMRCVQRQMRYKLKKAYFNGVAADKVRTTSPLSTMTDDQWMQLVNMWSTPKHKDTMESLVGGHGVEGKESKTPLEAVAYVLASSKFLQNIGLVPATKKSGNAWW

SEQ ID NO: 18623 - protein, 545 aa, Zea mays
  VARIANT 445..545: note = Derived polymorphism lacks residues 445 to 545
MDGGAGAGRRSVPSSSGFRRRVPPAENGHGHDAPPPSRRSSASLSRGHSTPLTGERTVKRLRLSKALTIPDHTTVHEACRRMASRRVDAVLLTDSNALLCGILTDKDITTRVIARELKMEETLVSKVMTRNPVFVLADTLAVEALQKMVQGKFRHLPVVENGEVIAILDIAKCLYDAIARMERAAEKGKAIAAAVEGVEKHWGTAVSGPNNFIETLRERMFRPSLSTIISENSKVVTVVPSDTVLTASKKMLELKMSSAVVAIESKPGGILTSRDILMRVIAQNLPPESTTVEKVMTQCPECASVDTPILDALHTMHDGKFLHLPVLDRDGNVVTVVDVLHITHAAIATVGNSGAAGSESTSAMMQRFWDSAMSIGPLDDDDDSTRSEGSTKVASEAADIGRSALFPASALSNTFGFKIQDKQGRMHRFNCETSSLTDLITSILQRVGDDIDRKHLPQILYEDEDHDKVILSSDSDLIAAVDHARQIGWKSLRLHLDYARRKRGDGSSDFEYAGKDAWASAYSAVAAGAALVAGLGVMAYLKRSG

SEQ ID NO: 18624 - protein, 271 aa, Zea mays
  VARIANT 75..271: note = Derived polymorphism lacks residues 75 to 271
  VARIANT 67..271: note = Derived polymorphism lacks residues 67 to 271
MIVAAAAPAPPVPAPPGKPPFPLSSFSLRRRLWFSNGNAHGRDSATAATSSRATRRWWWSDPGGSREDYGSSSLEEEEDENGCFGKLPKYHQDPTTEELAKTLDCWPSMNYYITSCRYVLMPWKFNGCHALFVIDHVKKHVTFIDFTPTQDWCKHMSYKRFAEAIIMTSKKYKIAYSKKCSRWAEDIFKWEHTIQTSVPIDLRGFNTSYLVLQAMTMWGNDRQMKFVGMNVVRSFYVQIIHSSYLALQDNTFCSLMSLSVECKDSLKELCD

SEQ ID NO: 18625 - protein, 67 aa, Zea mays
  VARIANT 29: note = Ancestral polymorphism is D, Derived polymorphism is V
  VARIANT 59: note = Ancestral polymorphism is S, Derived polymorphism is Y
MVAGTVNRGSEVVSAGMAVNDWTAFCGADTTATEVSVIESVFRLRDPRPVALGSDVKDYTVQDFFTS

SEQ ID NO: 18626 - protein, 382 aa, Zea mays
  VARIANT 60: note = Ancestral polymorphism is S, Derived polymorphism is Y
  VARIANT 87: note = Ancestral polymorphism is E, Derived polymorphism is G
  VARIANT 121: note = Ancestral polymorphism is C, Derived polymorphism is S
  VARIANT 138: note = Ancestral polymorphism is F, Derived polymorphism is L
MRTRSGSRYSNGGGEDALVGQKRKRAASAVAGECACCERRKRPADGPDYLDALPDDLVLSILTKVAADSSAPADLLSVHLTCKRLNELGSHDMVFAKASPASLSVKAAAWSEAAQRFLKRSADAGNLEACYILGMIRFYCLGSRSGGAALLAKAAVGGHAAALYSLAVIQFNGSGGAKSDRDLRAGAALCARAAALGHVDALRELGHCLQDGYGVRRDPAEGRRLLVSANARELTLALSAAASRHAAGVVVGGGGGGGCPLLSDFGWSLPEAEPHAANQFMVDWWWASDRCAAQAGGKITGESGVDGDGAELRLCSHVRCGRRETRRHEFRRCSVCGAANYCSRACQALDWKRAHKVQCVPVDRWLLGAVGDAQDQQQQQPQ

SEQ ID NO: 18627 - protein, 672 aa, Zea mays
  VARIANT 495..672: note = Derived polymorphism lacks residues 495 to 672
  VARIANT 278: note = Ancestral polymorphism is C, Derived polymorphism is R
  VARIANT 276: note = Ancestral polymorphism is M, Derived polymorphism is K
  VARIANT 219..672: note = Derived polymorphism lacks residues 219 to 672
MAAAAPPDGQEKVIAAAQHIVKLLASSKNAADDMIRILSGFDNRLSLMSDLFTPPPAAAAVGSILEADEGTQREGDEADYDEDDAAARAEAEWDVAAEVVERRVSPAAGAAEVVERRVSPAAGEALVFDSREGAEEYLAAVACLVGAPGPRAEAALQAAMTRLEDEFRHLLVRGAPPLAPEDLQTSLLRRLSLTVPSFNSSAVDLDCHSFAHHPAAVGGDEQQCGRSSASDDETLPYLMAPDTVSALRDIADVMLRAGYAPELCQVYGEVRRDTLMERLAVLGIDKMSLEEVQQVEWGVLDGKTKKWIQAFKVVVRGLLAEERRICSQILAADPNAEEECFTEAAKGCVLQMLNFADAIAIGKRSTEKLFRILGMYEALAEVLPELEGLFSGDAKDFIKDEAEGILVRLGDAARGTIEEFANAIQGETSRSRRPLPGGEIHPLTRYVMNYVCLLADYNASLNRLLEYWDTELTGVDNPNTTPLGHCVFMLITHLQCKIDEKSRLYEDEALQNIFFMNNLLYIVQKVKDSELKTLLGDNWIRKHRGQIRQYSTGYLRSSWTRVLACLRDDGLPHTMGSSGALKAALKDRFKNFNLAFEELYRTQTSWKVVDPQLREELKISISEKVLPAYRSFVGRFHGQLEGGRGSARYIKYNPDDLENQVSEFFEGRKPNA

SEQ ID NO: 18628 - protein, 372 aa, Zea mays
  VARIANT 157: note = Ancestral polymorphism is G, Derived polymorphism is S
MGAGLFGGSSKQSGHAVSFLLGAALPTALLFFLASDRLGEGLSTISSSWRGNGSISTAQQPAAAKPATTDAHALSAAAADASDARAAPTQDHEVEFAGLAELLARVATEDRTVIMTSVNEIWTRPNSLLDIFLGGLRGGEDTAHLVDHVLIVTVDAGSFSGCKAVHPHCYLLEVKSMDMNRAKTFGTPEYVEMIWLKLSIQQRDADILWLRNPFQRISVYADMSCSVDNSKMAPALLDCENNVGFYYMKSTNRSVEMVRYWRAARARFDGNLIEQVVFNKIKYELISRLGARIQPLETEYISGFCDFQDHFDKVCTVHANCCMGLENKVHDLKSVAADWRNYTSLTPEQRKLQEGSFKVTPPRMCQKSMGWV

SEQ ID NO: 18629 - protein, 227 aa, Zea mays
  VARIANT 197: note = Ancestral polymorphism is W, Derived polymorphism is S
MATSKNSSPSLSPLVVFLLGAASATVLLLFFLTATASPAWNALEAGPRSGSGSVRCSTSTPRANGTVVVDALEQHAGGVGAPPANEAGASGSDDDDAGFARMLRRAAMEDRTVIMTSVNEAWAAPGSLLDSFLESFQVGENVSHFAKHVVVVAMDDGAFRRCQAVHPHCHLLRPEKAGLDLSGAKSYMTKDYLDLVWSKLKLQQRVLELGYNLLFTARASLASRCSR

SEQ ID NO: 18630 - protein, 83 aa, Zea mays
  VARIANT 14: note = Ancestral polymorphism is T, Derived polymorphism is I
  VARIANT 36: note = Ancestral polymorphism is H, Derived polymorphism is Q
  VARIANT 37: note = Ancestral polymorphism is M, Derived polymorphism is I
  VARIANT 43: note = Ancestral polymorphism is D, Derived polymorphism is G
  VARIANT 49: note = Ancestral polymorphism is L, Derived polymorphism is V
MIQLSLDGKRIYVTTHFLAVWDERFSGDDLVKKGSQILQIDVDTEEGGLAINTSFFIDFGTEPDGPSLAHEMRWDIQARGLHL

SEQ ID NO: 18631 - protein, 465 aa, Zea mays
  VARIANT 394: note = Ancestral polymorphism is S, Derived polymorphism is Y
MPPPAGLPPWPTPSTTRLATPTPTRPPPRTTHVRPPPPPYTRVRLPPPPPATTPLPPRLEPAAPKPAAVATLLPPSTASAASSSSTCLDCVHFGKCSGCTHEVDLDKPPVLQEVANFFKGHGVGDFTFSRGRLSQWRCRAKLAVRGTPENPLIGLYQEGTHAVIDIPECRAHHPSINAAVKLLRQGITELSIQPFDEDAGAGELRYVQMAVTTYNTSIPVDKRYEQGKVQVSLVWNSRDERSQNAEKLTSIIEIIFGHKWRHLKGERDMWERYGGVDISLDPCSFGQANTLSFNSLLHKLNKYVPRSSTVVDLYSGAGVIGLSVAASRKCRSVKCIEINKQSKMSFETSASRLPANLGCTITWHNTDASVEPSHWLEGSSVVIVDPPRKGLHPSVISALQKVALSERKAYKAKRLRMRRDHGSYGQGRLQFMLIIQQLKRAMKRGLKLSYTLAVDGKVLRGTAKA

SEQ ID NO: 18632 - protein, 119 aa, Zea mays
  VARIANT 25: note = Ancestral polymorphism is D, Derived polymorphism is E
  VARIANT 82: note = Ancestral polymorphism is V, Derived polymorphism is L
  VARIANT 87: note = Ancestral polymorphism is H, Derived polymorphism is L
MRWGDGFRRASINRPPTPSAEEDRDKQPSLGEIINIKLVETGEKEKLMELLRERLAECGWRDEMKALCRAYARKKGRNNVTVDDLIHVITPKGRASVPDSVKAELLQRIRSFLMSTTLR

SEQ ID NO: 18633 - protein, 265 aa, Zea mays
  VARIANT 14: note = Ancestral polymorphism is S, Derived polymorphism is I
  VARIANT 101..265: note = Derived polymorphism lacks residues 101 to 265
  VARIANT 105..265: note = Derived polymorphism lacks residues 105 to 265
  VARIANT 117: note = Ancestral polymorphism is P, Derived polymorphism is T
  VARIANT 130..265: note = Derived polymorphism lacks residues 130 to 265
  VARIANT 160..265: note = Derived polymorphism lacks residues 160 to 265
  VARIANT 236..265: note = Derived polymorphism lacks residues 236 to 265
MTLLLVAEHLRALSAAKEPSLSLMASQPLVISPPRPWALQPSIQSLLFDLRPIVGDDDPASLSTSLLPNSYRNSQEQYGTPMPHIGQTTVEVDLLNYGVIEGDESCKHFSELKVLHPWMIKDGMNLTKEQRLEKIESQKLEKYEAKGDKRHDLKDDQSVQEEYINAYYEALRKSWKRKKQKAECSMKARFLSLMLKGNAKLTINTSRMMMKKALNKYSSFLIWTVGTQGLLCNPLSTVALTLALWRFFSKQDDLNPYVVPMAMGI

SEQ ID NO: 18634 - protein, 392 aa, Zea mays
  VARIANT 361..392: note = Derived polymorphism lacks residues 361 to 392
MALRLHDVALCLSPPLAARRRSGGSFVAVASMTSAAVSTRVENKKPFAPPREVHVQVTHSMPSHKIEIFKSLDDWARDNILTHLKPVEKCWQPQDFLPDPASEGFHDEVKELRERAKEIPDDYFVCLVGDMITEEALPTYQTMLNTLDGVRDETGASPTAWAVWTRAWTAEENRHGDLLNKYMYLTGRVDMRQIEKTIQYLIGSGMDPRTENNPYLGFIYTSFQERATFISHGNTARHAKDFGDLKLAQICGIIASDEKRHETAYTKIVEKLFEIDPDGTVVALADMMKKKISMPAHLMFDGQDDKLFEHFSMVAQRLGVYTARDYADILEFLVDRWKVADLTGLSGEGNKAQDYLCTLASRIRRLDERAQSRAKKAGTLPFSWVYGREVQL

SEQ ID NO: 18635 - protein, 1003 aa, Zea mays
  VARIANT 242: note = Ancestral polymorphism is L, Derived polymorphism is P
  VARIANT 432..1003: note = Derived polymorphism lacks residues 432 to 1003
MEMETVACRFLWRASLVSGVGRSLNAVGRRAAWWEEERRQDPIPKPQDTAVMDIERCRIWWPRQELQFKQKPFSPRLILFGWFFSSAGSIDIVISAAVPQVHILHSFATLDTLQTIILSSNKRMPVSLQESAAFTILGDCVRHPPKELEGYCFNKLEQLPLDANFVQKEHFGTRRNNVMIGSVGNGDQGPSYDHRRWGCDCCVLDGFLEVCRKSAVKEGSWVHLYWKFGENFKSNLNQVPVLHHLYLDGQQIENNRCHVILYEVPTIGRNHFSLGLDAPRTLNVSFKKPNWINDLQKQPSFLDLDSIVLALNCSNAARLPDTQECSTTCSGAYFIFASVYDVLVQVTWHCVGIFLASSSTILYIMILMSRKCLSHMPQYLMLNKVFRHSWNNIHLRSCQILYWPIVFQDASLSSTVNVEYAHKAAIRKHALWSSIIVDLLMGFVLGAAFLLNTETICIWTIALVHHMTEAILRSGCVWLMGVPAGFKLNTELAELLGMISLNAVQIYSTLWFFVGGYLRHIIQGIAVSGIILGLTAPVSFFIDIIQLATLHVTILHWLISSLYSRQIQTVASLWRLFRKQEAKPMQVEGEATSRTLEFNEVDKDSEEGLCYDCTVAVVSYNEETWLSMKEKIDEVVPSVNVGELEEVNDNTSQDTKTEVDLIDDVTTQSNFTAKNMVEVNSAAREVDETEVKDLVFIDKANVAPLNLQRDYESVAETIEHEKVEVPSGCQSHEIENSSALELKKEFEMEVDGVVPLQGAAASVASVVHHEPRGRKWNPLRQRLDSYDYTVEQHVVGSLLFTPILLLIPTTSVFYVFFSILTTTVIWVCVMLEIVIALIQSTPYAELTLWVMRRHRFPAGLFFFHLPSNGHTFEDDDLSSHSVGCCNETRKEDLIDKLSESLVSELHCSYATFVQVIRSNYERVFNRTGYSFCKQLAYGILSGERVPSSLHLQTSPSFPWMNIGITEYWMHCYVCVLQCAPKSFDLQFGFTNKNSPAADIFRDT

SEQ ID NO: 18636 - protein, 407 aa, Zea mays
  VARIANT 190: note = Ancestral polymorphism is K, Derived polymorphism is M
  VARIANT 171..407: note = Derived polymorphism lacks residues 171 to 407
MDPVSKGAWQKRFFSVAPPAALVFFFVLIFVAGAAVTLDHKESRVSVLQLQPKLVTAAAEMRPPATTSELRAGPAEEPDICESKCRPPGSEALPRGIVQDKSNLEMESMGGNPEREENGSGRRSKSLLAIPVGIKQKAVVDKLVSKFPDTKFTVMLFHYDGEVDGWRDLEWSGRAVHVAARDQTKWWFAKRFLHPDLVAEYDYVFLWDEDVEVDSFDPLRYLRVVRKEGLEVSQPALDRRSQIHHGLTARARRGGGVHRRYYKTKGHGRCYGNSTGPPCTGWVEMMVPVFSRAAWRCAWRMVQNDLVYAWGMDYKLGYCAQGDRRRNVGIVDSQYVLHRGIPTLGGGGGNGNGKPSFSASASALGADRLAVRQRSYTELQVFNRRWKKAVSEDGCWTDPYPNTATTG

SEQ ID NO: 18637 - protein, 1068 aa, Zea mays
  VARIANT 229..1068: note = Derived polymorphism lacks residues 229 to 1068
  VARIANT 972: note = Ancestral polymorphism is L, Derived polymorphism is P
MAGNEWINGYLEAILDSHTSSRGAGGGGGGGDPRSPTKAASPRGAHMNFNPSHYFVEEVVKGVDESDLHRTWIKVVATRNARERSTRLENMCWRIWHLARKKKQLELEGIQRISARRKEQEQVRREATEDLAEDLSEGEKGDTIGELAPVETTKKKFQRNFSDLTVWSDDNKEKKLYIVLISVHGLVRGENMELGRDSDTGGQVKYVVELARAMSMMPGVYRVDLFTRQVSSPDVDWSYGEPTEMLCAGSNDGEGMGESGGAYIVRIPCGPRDKYLKKEALWPYLQEFVDGALAHILNMSKALGEQVGNGRPVLPYVIHGHYADAGDVAALLSGALNVPMVLTGHSLGRNKLEQLLKQGRMSKEEIDSTYKIMRRIEGEELALDASELVITSTRQEIDEQWGLYDGFDVKLEKVLRARARRGVSCHGRYMPRMVVIPPGMDFSNVVVHEDIDGDGDVKDDIVGLEGASPKSMPPIWAEVMRFLTNPHKPMILALSRPDPKKNITTLVKAFGECRPLRELANLTLIMGNRDDIDDMSAGNASVLTTVLKLIDKYDLYGSVAFPKHHNQADVPEIYRLAAKMKGVFINPALVEPFGLTLIEAAAHGLPIVATKNGGPVDITNALNNGLLVDPHDQNAIADALLKLVADKNLWQECRRNGLRNIHLYSWPEHCRTYLTRVAGCRLRNPRWLKDTPADAGADEEEFLEDSMDAQDLSLRLSIDGEKSSLNTNDPLWFDPQDQVQKIMNNIKQSSALPPSMSSVAAEGTGSTMNKYPLLRRRRRLFVIAVDCYQDDGRASKKMLQVIQEVFRAVRSDSQMFKISGFTLSTAMPLSETLQLLQLGKIPATDFDALICGSGSEVYYPGTANCMDAEGKLRPDQDYLMHISHRWSHDGARQTIAKLMGAQDGSGDAVEQDVASSNAHCVAFLIKDPQKVKTVDEMRERLRMRGLRCHIMYCRNSTRLQVVPLLASRSQALRYLSVRWGVSVGNMYLITGEHGDTDLEEMLSGLHKTVIVRGVTEKGSEALVRSPGSYKRDDVVPSETPLAAYTTGELKADEIMRALKQVSKTSSGM

SEQ ID NO: 18638 - protein, 140 aa, Zea mays
  VARIANT 107: note = Ancestral polymorphism is H, Derived polymorphism is Y
  VARIANT 109: note = Ancestral polymorphism is I, Derived polymorphism is N
  VARIANT 110: note = Ancestral polymorphism is G, Derived polymorphism is D
  VARIANT 114: note = Ancestral polymorphism is P, Derived polymorphism is L
  VARIANT 126: note = Ancestral polymorphism is L, Derived polymorphism is P
  VARIANT 127: note = Ancestral polymorphism is G, Derived polymorphism is C
MASKSVELRMTLLGVALLGLLLLSQHAAPVDAAESDGPRKEKTSFSMNVVGGRTLSSFSMNSAYSEKKPSSKGASATDPAHGTFYFHGSRDWDFCVFTDAGLHINAHFIGNHNPATSRDFTWIQALGIRFLADHRLYVGA

SEQ ID NO: 18639 - protein, 129 aa, Zea mays
  VARIANT 55: note = Ancestral polymorphism is M, Derived polymorphism is I
MSGAGEEDKKPAEGGAHINLKVKGQDGNEVFFRIKRSTQLKKLMNAYCDRQSVDMNAIAFLFDGRRLRGEQTPDECSWRWRTATRSTPCFTRPEAAFLAPPKSSSCGASFCSPPCVVLNKREKVFLRNL

SEQ ID NO: 18640 - protein, 299 aa, Zea mays
  VARIANT 71: note = Ancestral polymorphism is G, Derived polymorphism is S
  VARIANT 195..299: note = Derived polymorphism lacks residues 195 to 299
MDGRRPEMRRTMTLSEQLSTPDPLIRDFLKIPHDADAGEGDSPSAVDAQGGGRTTGWKQLRDRLRLRRAAGAWQRRKTGAAAAHAPANGGGLSNISSANNRSNKYNYNPGEAEAAFSRTFSRAPSLRATPTFSRVASTRVGPASCRSSSRRLSTYDFRDVEERRHEDEDEDGDGEEEEDGEDEGDEEKTAAPAAQMSLMALLGQTDNQWDDDEDEEEESGGGAFKKGGAGAVGDEDEDDCDSREDEMVHVCCVCMVRHKGAAFIPCGHTFCRLCSRELWVSRGNCPLCNGFIQEILDIF

SEQ ID NO: 18641 - protein, 178 aa, Zea mays
  VARIANT 10: note = Ancestral polymorphism is R, Derived polymorphism is W
MSREQQMPRRRFIAIPFSSGCRSHSSVDVVDTGRLAGDGKKPHPQGAEAGAAAAAARGKGESLVARLLRGFKNLSQIFAVYDEEEEEEREMVIGLPTDVKHVAHIGWDGATSTSSNLRSWNRPAPPPPASSFSAPQQRPQEQYPLPLPALSMRQLELAMGAQAQAAGGATTAAHRRHS

SEQ ID NO: 18642 - protein, 884 aa, Zea mays
  VARIANT 256..884: note = Derived polymorphism lacks residues 256 to 884
  VARIANT 1: note = Ancestral polymorphism is M, Derived polymorphism is T
MGSLFFVFILLICFTPSSALAGHNDINILSKLREAVTEGKGFLRDWFDSEKSPCSWSGITCVENTVVRIDLSSVPIYAPFPLCVGSFQSLAHLNFSGCGFFGELPDALGNLHSLEYLDLSHNQLTGALPVSLYGLKTLKEMVLDNNFFSGQLSPAIAQLKYLKKLSVSSNSISGAIPPELGSLQNLELLDLHMNALNGSIPAALGNLSRLLHLDASQNNIHGSIFPGITAMANLIIVDLSSNALAGPLPREIVQLQNAQSLILGYNGFNGSIPEEIGELKLLEELELPGCKLTGIPWTVGSLRSLRKLDISGNDFNTELPASIGKLGNLTLLYARSAGLTANIPRELETNMLSGSIPSEICQANSLQSLMLHNNNLTGNIMEAFKECMNLTELNLQGNHLHGEIPHYLSELPLVIVELSQNNFTGKLPEKLWESSTILEITLSYNQLTGPIPESVGRLSSLQRLRIDSNYLEGPISRSIGALRNLTNLSLWGNRLSGNIPLELFNCRNLVTLDLSSNNLSGHIPSAISQLTFLNNLNLSSNQLSSAIPAEICVGFGSAAHPDSEFIQHHGLLDLSYNRLTGNIPTAIKNCVMVTVLNLQGNMLSGTIPPELAELPNVTAIYLSYNTLVGPMLPCYLNYLDLSSNDFHGPAPCGICNVVGLTFANFSGNHIGMSGLADCAAEGFCTRKGFHRKALHSSDRVRRAAIVCVSILAVTVVLVLLVLYLRRKLLRSRPLALLPVSKAKATIEPTSSDELLGKKFQEPLSINLATFEHSLLRVTADDIQKATENFSMVHIIGDGGFGTVYRAALPEGRRVAVKRLHGGHQFQGDREFLAEMETIGKLLDGMPKRVYPLLFISELPSSVVRTYNILSHNDGGLWCHASVMG

SEQ ID NO: 18643 - protein, 485 aa, Zea mays
  VARIANT 108: note = Ancestral polymorphism is F, Derived polymorphism is S
  VARIANT 126..485: note = Derived polymorphism lacks residues 126 to 485
  VARIANT 142: note = Ancestral polymorphism is W, Derived polymorphism is S
  VARIANT 257: note = Ancestral polymorphism is P, Derived polymorphism is L
MDDAGRAPPPAPAAVTVSATAAPAPTPPSATAAADKSSLDPDALYEEGMWQQMAMNSGATMQPGSYPERPDVLPLSDILVVMYISSIVMDHVWLEGILSLNQRPLEFFPFCCVSVASRNKMHSKKQCLKSKAVVMCLCNHSWYLILFSWENMQKIPVPAIASARMKGEYPERVGQPECQYYLKTGTCKFGPTCKFHHPREKAGIAGRVQLNTLGYPLLPNEKECAYYLKTGQCKYANTCKFHHPELFNVVPSSRGSPIYTSVHSSASAGPQSYTGTMSSWTFPRASFIPSPRWQSPSNYAPMVVPHGLVQVPSWNSYPGQLQSPGAQQTYGSSQQGEASAGNQGMLSPYRSSSFPVPQYALQRDNVFPERPDEPECQYYMKTGDCKFGAVCKFHHPRVRSQPPPDCVLSPMGLPIRPGEELCKFYSRYGICKFGANCKFDHPTMAAPMGVYAYGFSGSASVAPASTNAPMTRHLLGSPSGSGYMS

SEQ ID NO: 18644 - protein, 136 aa, Zea mays
  VARIANT 135: note = Ancestral polymorphism is Q, Derived polymorphism is L
  VARIANT 118: note = Ancestral polymorphism is P, Derived polymorphism is R
  VARIANT 115..136: note = Derived polymorphism lacks residues 115 to 136
  VARIANT 99: note = Ancestral polymorphism is T, Derived polymorphism is I
  VARIANT 81: note = Ancestral polymorphism is P, Derived polymorphism is L
  VARIANT 79: note = Ancestral polymorphism is P, Derived polymorphism is L
  VARIANT 72: note = Ancestral polymorphism is D, Derived polymorphism is N
  VARIANT 71: note = Ancestral polymorphism is G, Derived polymorphism is D
  VARIANT 70: note = Ancestral polymorphism is V, Derived polymorphism is I
  VARIANT 13: note = Ancestral polymorphism is R, Derived polymorphism is W
MTELVRAGSGGSRFIGAPSLSDTSIDWAGGGGGTDSASEAPAMGAVQDQQQIELPLSPEDVPFAQVYRFVGDMFDADVPVPVEAHLQKLKEMDDITAKTVLLVLRNLENNLSVPQFERVTRLLSTYDPTRALSGQL

SEQ ID NO: 18645 - protein, 71 aa, Zea mays
  VARIANT 56: note = Ancestral polymorphism is S, Derived polymorphism is F
MPYKINPIDFENSDGNLDQVNSILSGISMKLPISRLQLDLTDLTVLRNLGMGLGHSLLAYKGTMRGISKVQ

SEQ ID NO: 18646 - protein, 233 aa, Zea mays
  VARIANT 219..233: note = Derived polymorphism lacks residues 219 to 233
  VARIANT 216..233: note = Derived polymorphism lacks residues 216 to 233
  VARIANT 197..233: note = Derived polymorphism lacks residues 197 to 233
  VARIANT 169: note = Ancestral polymorphism is L, Derived polymorphism is H
  VARIANT 166: note = Ancestral polymorphism is D, Derived polymorphism is Y
  VARIANT 164: note = Ancestral polymorphism is L, Derived polymorphism is I
  VARIANT 162: note = Ancestral polymorphism is I, Derived polymorphism is T
  VARIANT 158: note = Ancestral polymorphism is T, Derived polymorphism is I
  VARIANT 142: note = Ancestral polymorphism is P, Derived polymorphism is L
  VARIANT 107: note = Ancestral polymorphism is F, Derived polymorphism is L
  VARIANT 92: note = Ancestral polymorphism is G, Derived polymorphism is R
  VARIANT 86: note = Ancestral polymorphism is S, Derived polymorphism is L
MARAAVDAPPANGGTCCHATKGLGYATSLEAMEKGPREKLVYITCVYNGTGINKLDYLATMDLDPDSPTYSQEGNTTGNGFLLLDSEFNVKGRWEKPGHSPLFGYDFWYQPHHKTMISSSWGAPAAFRTCFNPQHVAISIKPLKVRNWFLPEMPGLITDFVISLDDRYHYLVHWLHGDIRQYNIEDPAKPFLAGQVWVGGLLPKGGDVVYVTDDSQEEQYNVPQVKVTSLQTF

SEQ ID NO: 18647 - protein, 530 aa, Zea mays
  VARIANT 8: note = Ancestral polymorphism is Q, Derived polymorphism is E
  VARIANT 48: note = Ancestral polymorphism is T, Derived polymorphism is I
  VARIANT 63: note = Ancestral polymorphism is G, Derived polymorphism is A
  VARIANT 77: note = Ancestral polymorphism is E, Derived polymorphism is K
  VARIANT 323..530: note = Derived polymorphism lacks residues 323 to 530
MSHLSTVQAHDGHWPGDNDGPLFLLPGLNEDGGWGLHIEGHNTMFGTTLNYVTLRLLGEGPNAGDGAIEKGRNWILKHEGATYTTSWGKFWLTPKLWLMYLPLMEHLREITLNGMIVNLERLGLDGRLWCHSRAVYLPMSYIYGKRFVGHMTPLVLELRNEIYEDPYSLIDWNKARNQCAKVAIEYTLCTQYHKTLEYEEDLYYPHTFLQDVLWATLHKFVEPIMQWPGIKIREIALRTAMRHIHYEDECTQYINLGPVNKGNNGTQLWDAGLIVQAIVSTNLTEEFGPTLKLAHAFIKNSQILDNCPGDLTQWYRHISKGGWPFSTVDHGWPVSDCTATGLKAALLLSMVSPQIVGEPMEVDRLYDGVNCLISFMHINPSETFGGIMIDYPYVECTSSSIQALALFRKLYPGHRRKEVDNIINKGASFIESMQRNDGSWYGSWGVCFTYATWFAVKGLACAGRTFNNSPVIKKACLHTSRRHATSCSEHKLGQLALIGAGQAERDPTPLHRAAKVLINLQLVDGEFPQQ

SEQ ID NO: 18648 - protein, 186 aa, Zea mays
  VARIANT 101: note = Ancestral polymorphism is D, Derived polymorphism is Y
MGKKRQLICLAAAVAAAAILLTGTACMWSAGGNIPRQGVVKDHSDVGPSNKHMHPVEFQLPHARARVLYLYKPESCTLQAHKGDKIKVHYRGALTDGSVFDSGYDRGDPFEFTLGNGQVIKGWDQGLLGMCVGEKRKLKIPAKMGYGERGSPPKIPGGATLVFDTELIAVNGKTSGGANPETESEL

SEQ ID NO: 18649 - protein, 480 aa, Zea mays
  VARIANT 148..480: note = Derived polymorphism lacks residues 148 to 480
  VARIANT 198: note = Ancestral polymorphism is R, Derived polymorphism is W
  VARIANT 275..480: note = Derived polymorphism lacks residues 275 to 480
  VARIANT 284: note = Ancestral polymorphism is R, Derived polymorphism is C
MNCGPPDQLPPGSAPSCFLNLNWDQSMAADQLDPALSSMVSSPASNSTAAAAVTDGRALHGISPQQQYGGTPLSSPPKLNLFHQTRPQFHHFPPPQVGGLPILENLMPMGHLDQFLADPGFAERAARLSGFDGRPGGSGYGGVGVPGQFGIPDAGPIGALKELELGNGRDESSVSDPASGSAEMALNKGPSDGNAKKRKASGKGKGKDGPGSAAAGAAKEESSGKRCRSADESSGAEDNNPTTKGKAAQSSSENGGGRKQQGKESATKPPAEAPKDYIHVRARRGEATDSHSLAERVRREKISQRMKLLQDLVPGCNKVVGKAVMLDEIINYVQSLQRQVEFLSMKLATVNPQLDFNSLPNLLLPKDIHQPCGPPHFPLETSGAPLPYLSQPHHGSPLGCCMDTQGGSMHPLDAAFCRPMNPQHPFLNGASDAASQVGTFWQDDLQSVVHMDIGQSQEIAPTSSNSYNGSLQTVHMKMEL

SEQ ID NO: 18650 - protein, 155 aa, Zea mays
  VARIANT 37: note = Ancestral polymorphism is G, Derived polymorphism is E
MARALGACVLLAVLLGALAPAPAPAAAARAHDDQGSGAGIRQPSGEYRGRKVGARTEVRDVEGDGEVQELGRFSVAEYNRQLREGGGGGGRLEFGRVVAAQRQVVSGLKYYLRVVAVEEGGGAGNGGERVFDAVVVVKPWLDSRTLLTFAPAAAK

SEQ ID NO: 18651 - protein, 288 aa, Zea mays
  VARIANT 167: note = Ancestral polymorphism is A, Derived polymorphism is S
  VARIANT 245: note = Ancestral polymorphism is P, Derived polymorphism is L
MAAYIRLDDAVRARLRGGAHAAGCTTSSSSGSDHDASACLSELVQAFLETGAGGTAEEGPRAAPKEYGSDDEDGAAASAAATVRALLDPPAEEDAFRIRLAAAVAAAAEAEAALRAHGAAFRRALARRLRGAGYDAGVCRSRWEASGGAAAGTYEYVDVVAVAPAAARYIVDADFRAALEVARATPEYAAVVAAVPAPAVVAREEAVGRAVRVASDAARRSLRAHGLHVPPWRKTRYMLAKWLGPYKRSTSSAAGGVMSMPGGAGLDVKCRAVGFFAPPAAAPAARIK

SEQ ID NO: 18652 - protein, 123 aa, Zea mays
  VARIANT 87: note = Ancestral polymorphism is P, Derived polymorphism is L
  VARIANT 107: note = Ancestral polymorphism is I, Derived polymorphism is L
  VARIANT 113: note = Ancestral polymorphism is R, Derived polymorphism is G
  VARIANT 114: note = Ancestral polymorphism is A, Derived polymorphism is D
MVGNKNVKNKAAQKDLKSYFSQGSSGSSPSAHGSVVAIVEEVEDVHLEENVRPTAEEGVGIEGDVLPSVEEDEEDEQVQEGITDFNPDYIISNPGLHIPIKIFSPNLRDEVRRAFIAKGPTQL

SEQ ID NO: 18653 - protein, 102 aa, Zea mays
  VARIANT 53: note = Ancestral polymorphism is Q, Derived polymorphism is R
  VARIANT 8: note = Ancestral polymorphism is A, Derived polymorphism is P
MKASNAAPLVALLVVAVAAGAAGAIKLCGVDRSAVDACTPYCVVGSAQAAPGQLCCDKVKAARWSCLCDYRSALPSGIDAARVMDLATKCKCDYPPASCDAN

SEQ ID NO: 18654 - protein, 401 aa, Zea mays
  VARIANT 226..401: note = Derived polymorphism lacks residues 226 to 401
  VARIANT 203..401: note = Derived polymorphism lacks residues 203 to 401
  VARIANT 154..401: note = Derived polymorphism lacks residues 154 to 401
  VARIANT 101..401: note = Derived polymorphism lacks residues 101 to 401
MAKRCQLLEQENENLNRDKHELQEKFAEKSRQKRKLDEMYDQLRNEYESVKCSALQPANNYLARPQPDLFAGMPNVMDGGDHLRQGSVDLPKTPGQRDEGWGPPPRQRHCTSGPFDLSTGSLAHAVAPPVDIRPRQQTRSVFRATLNNPSSTLRNLIISPVKCPRRPDVDLEEKVDVIISEWMGYMLLYESMLPSVLFARDKWLKPRLFIAPITNSERYEGSVDFWHDVYGIKMSALVPLAKKFTSEEPSIETIGGENVISWPAVDLNVAEPMESTRTLPQWKKGNASNKLLCYQSHNAFILEQVRLFLDRQDYVRAQILSRKISTRVFDADPSKEKKNPKEGDNIVQDAPADIPSLLELKRIYYELMIRELLRIWLFQKIEASEVNDPMQSSLLNATLED

SEQ ID NO: 18655 - protein, 333 aa, Zea mays
  VARIANT 153..333: note = Derived polymorphism lacks residues 153 to 333
MATPTATALTCSCRPSSPSSSSAAFRRLNIFAPVSGAHSPPRRRLRLAPLHVVDDSKNPPEERSETDKMVDGMDFGELCSDFECISSPYVESTARQVARDILELREDNRAFNCYAVSVKYKDPLRTFVGREKYRRPLWITKALENPVVIMILQKRNPNLIAAQAQHRSSSNQRLLLSRQTVQEMSMQSTSNLTIRWALRGKPKNPLFASVGGDVIVRVESRFVLNQISGQVLEQAESWDLSASSLPAQAYFWLSRRVYSAVESGKDAIEAAKSAASSGLTTKGDQNLEAYPDPSADPTKFFQRPDDGFSQDVYQIGLLLAVIYFIVQFLKATL

SEQ ID NO: 18656 - protein, 691 aa, Zea mays
  VARIANT 68: note = Ancestral polymorphism is N, Derived polymorphism is K
MAGRRPAPAALLLLAVAFAPISSAVRPVSDAHRSAAEELFAPSADGSFGDLESTYEAVKTFQILGLEKYNSLSGKACKFAAENLASTDSTAKDLFHAVRISGALGCGVDAGVYDGVVARLKAVIKDTNSLLEFYYSVGGLLSIKEQGHNVVLPDAESTFHAIKALSQSDGRWRYGTNSAESSTFAAGIALEALAGVVSLADAEVDPSMMVVVRNDIVKLFDTIKSYDDGTFYFDEKHVDATEYKGPIMTSASVVRGVTSFAAVASGKLDIPGDKILGLAKFFLGIGLPGSSKDCFNQIDSLSVLEDNRVFVPLILSLPTKVFSLSLKDQLKVEVTTVFGSAAPLLKVNLVQVLGTDSKVITNGNRELQYDLDKNVHYLDIAPLEIDVGKYSVVFEISLQEQERETVYATGGRNTESVFVTGLIKVDKAEIGISDNDAGTVESVQKLDLLKDTKVSLSANHLQKLRLSFQLTTPLGLTFKPHQVFLKLKHESKVEHLFVVPGSARQFKIVLDFLGLVEKFYYLSGRYDLELAVGDAAMENSFLRPLGHLELDLPEAPEKAPRPPAQAVDPFSKFGPKAEILHIFRAPEKRPPKELSLAFTGLTLLPFIGFLIGLVRLGVNVKNFPSLPGPAAFASVFHAGIGAVLLLYVLFWLKLDLFTTLKYLGFLGIFLVFVGHRTLSYLSSASAKQKTA

SEQ ID NO: 18657 - protein, 332 aa, Zea mays
  VARIANT 197: note = Ancestral polymorphism is R, Derived polymorphism is C
  VARIANT 200: note = Ancestral polymorphism is K, Derived polymorphism is N
MAAASAAAEASGESKNEFLIRDDAPGLLAALKEMKDGLDLVRGKVEAITRKVKANQLPAANGIGYLEAKNHLLLGYCQDIVYYLLRKAKGLSVDGHPVVRSLVEIRLFLEKIRPIDKKAEYQIQKLTDAADNATVREKPGNAQAKGKDGHSDEEDLLKYRPNPDMMDTKPGPDGQDTDGVYRPPKFMPTSMDDEEKRRKNDSRRDKAIARVAIENPYIKEIIDDAADRPEEWKETVGDESREFGRYMRQREEQEKQEEELFTRAPVTKRDKQIEKRIRRQLHGLGGLTDGFDLGMNMLLGGDKEDDGGSSKSHGKSGNRKKHLKSSKKRKRH

SEQ ID NO: 18658 - protein, 135 aa, Zea mays
  VARIANT 122: note = Ancestral polymorphism is G, Derived polymorphism is R
  VARIANT 119: note = Ancestral polymorphism is S, Derived polymorphism is L
  VARIANT 115: note = Ancestral polymorphism is G, Derived polymorphism is D
  VARIANT 114: note = Ancestral polymorphism is G, Derived polymorphism is R
  VARIANT 104: note = Ancestral polymorphism is T, Derived polymorphism is M
  VARIANT 42: note = Ancestral polymorphism is R, Derived polymorphism is S
  VARIANT 1: note = Ancestral polymorphism is M, Derived polymorphism is I
MRVPPPSTSPPHRSPLPLWVVLGGSREQIRTGHPCAASCRTRPRPWPRSWLLMNVLGTVGDLIKSGAFRQVYLGMDLDSSEILAIKQAVLFDQRYIGTTWEENTLNILLEFVPGGSIQSLLRRLGSFPEAVLSLE

SEQ ID NO: 18659 - protein, 138 aa, Zea mays
  VARIANT 14..138: note = Derived polymorphism lacks residues 14 to 138
  VARIANT 70: note = Ancestral polymorphism is A, Derived polymorphism is V
  VARIANT 72: note = Ancestral polymorphism is G, Derived polymorphism is D
MALTKPPTATDDDQAERKYLTSCLIMLSCGLRDGDMANATREAGATPTSANMADDYKCSLCDKVFASYQALGGHKTSHRKPAAAPSDEASSSGTAYEKEEKLHQCSLCPRTFSWWQALGSHIQGSQFRKEKLFGTYRN

SEQ ID NO: 18660 - protein, 465 aa, Zea mays
  VARIANT 364: note = Ancestral polymorphism is F, Derived polymorphism is Y
  VARIANT 385: note = Ancestral polymorphism is S, Derived polymorphism is W
MMTTPAGGEDGEPSSGARGAGAPPPSQPVGTGRYARLQSAGTGTSAADGDRPRRRVTYMEGRFEAAEQPPTDDGYGAGDTAPPQTRTQRPRPTYTPVSQRRREPAIDEQPRLYGDYPRRGSPAEPPARTPTRPRGSRAGLGGAAGGALPPGSSSLPSPETAVSTTGGIPGSSGGAPPVQPRRGGLKTNKTIERVSTLGDEPVGLGGSGSSEPPPPPTQTQPKPEPRFSLPQQPEEGPYVDQPPKQPSSSGSGTKRPAGASPTLIRRKEKATKLMTVCLTCCCILFWLLVVCVGLAILVVYLLYHPRAPRIHVSTATLNAGYIDELPPPHLGKALNSDLYVLAAIYNPNTKVDVVLRYMQLDLYFQGRLIGTQAVWPPLYEKPGDSALRSVHLVVSEVVMTQEDAEVWKNVTTGGGLVEMHLQGKFHVQLNFGRWLPFRYTVRPTCALWLDPPPAGALRRARCLNS

SEQ ID NO: 18661 - protein, 488 aa, Zea mays
  VARIANT 361..488: note = Derived polymorphism lacks residues 361 to 488
  VARIANT 179: note = Ancestral polymorphism is A, Derived polymorphism is T
  VARIANT 154: note = Ancestral polymorphism is P, Derived polymorphism is L
  VARIANT 143: note = Ancestral polymorphism is C, Derived polymorphism is Y
  VARIANT 132..488: note = Derived polymorphism lacks residues 132 to 488
  VARIANT 126: note = Ancestral polymorphism is R, Derived polymorphism is C
  VARIANT 115: note = Ancestral polymorphism is T, Derived polymorphism is M
  VARIANT 109..488: note = Derived polymorphism lacks residues 109 to 488
  VARIANT 107: note = Ancestral polymorphism is A, Derived polymorphism is T
  VARIANT 98: note = Ancestral polymorphism is L, Derived polymorphism is Q
  VARIANT 82: note = Ancestral polymorphism is R, Derived polymorphism is C
  VARIANT 68: note = Ancestral polymorphism is S, Derived polymorphism is F
  VARIANT 64: note = Ancestral polymorphism is P, Derived polymorphism is L
MAASRRLARKLPSLISRYERLISPETDAPELTEAPTTSASIPFDPSLPVLPLAVSHLSPPNPLPVLPSAHASSPASLFRLLRRARHHPRLVALDLHILLAAADASSAFRPDHSLTSLVAARLAASRRLPSLQRLLELVLTRPCPCADDSIFACPELLPTFRKAIVAFAASGDIPSASHALASLRRVADSPLPAEFYNIILQALSRLRRHDDAIRFYGEMTSVYRVAPDVHTFNILISSSCRVEGVDAAMRWFGEMQRRSCAPTVVSFNTLMRGFIREGRYKEGTKVAREMLELGVGLSVASMEILIGGLCRGSKALEAAELFVEFLGDGVVPEGFDCFEVVEALCRGGKVDRAVEAVDMVLERNTKCCMSAPAGATVLECLMEAGKLDEVYRLMWRMIDQGIVPDSISCNCIFEALCEAGRTADANQLRVFAKEKGFEADGETYRMLVQGFGRQGKRKEGKAVLDEMLDLGFIPNIASYNRLLGGLHK

SEQ ID NO: 18662 - protein, 432 aa, Zea mays
  VARIANT 323..432: note = Derived polymorphism lacks residues 323 to 432
  VARIANT 288: note = Ancestral polymorphism is R, Derived polymorphism is W
  VARIANT 284..432: note = Derived polymorphism lacks residues 284 to 432
  VARIANT 282: note = Ancestral polymorphism is N, Derived polymorphism is I
  VARIANT 225: note = Ancestral polymorphism is G, Derived polymorphism is V
  VARIANT 159..432: note = Derived polymorphism lacks residues 159 to 432
  VARIANT 150: note = Ancestral polymorphism is R, Derived polymorphism is W
  VARIANT 145: note = Ancestral polymorphism is R, Derived polymorphism is I
  VARIANT 98..432: note = Derived polymorphism lacks residues 98 to 432
  VARIANT 74..432: note = Derived polymorphism lacks residues 74 to 432
MISNPEPHRNRAGGARPPHTPPRAPSSIPRAPSPELNPPRAAPRLNIRSPVDSASDPLPPSVAETPASAAEAKQESVLETEETKQAVAAAAAAAGGVQAMAVTVVRDVETGLDTSTNDRDGDKPSWFTPKSSNWSYWDSILLGLRNWVIRLLGINLSFWRCSSAVGSEQTSEVFSTNSSRIFEQGPPYFGAMGSNTGGASGGFYQPFNSNLAGAGASTGIQNFPGVRLRGLPFDCNDIDICKFFVGLDIVDCLLVNKNGRFTGEAFVVFPTAMQTESGLHHNRQNMGRRYVEVFRCKKLEYYRAIANEVSQGGYFESEYRRSSPPLRPPKKPAEDKGSMEYTEVLKLHGLPYSATTEDIIKFFLEYELTEENVHIAISSDGKATSEAFVEFPTAEVAKTAMCKDKMTIGTRYVELFPSTPEEASRARTRGKH

SEQ ID NO: 18663 - protein, 280 aa, Zea mays
  VARIANT 249: note = Ancestral polymorphism is S, Derived polymorphism is F
  VARIANT 248..280: note = Derived polymorphism lacks residues 248 to 280
  VARIANT 202: note = Ancestral polymorphism is S, Derived polymorphism is L
  VARIANT 197: note = Ancestral polymorphism is V, Derived polymorphism is M
  VARIANT 162: note = Ancestral polymorphism is G, Derived polymorphism is R
  VARIANT 161: note = Ancestral polymorphism is P, Derived polymorphism is S
  VARIANT 154: note = Ancestral polymorphism is G, Derived polymorphism is R
  VARIANT 147: note = Ancestral polymorphism is P, Derived polymorphism is L
  VARIANT 144: note = Ancestral polymorphism is G, Derived polymorphism is R
  VARIANT 129: note = Ancestral polymorphism is R, Derived polymorphism is I
  VARIANT 128..280: note = Derived polymorphism lacks residues 128 to 280
  VARIANT 122: note = Ancestral polymorphism is E, Derived polymorphism is K
  VARIANT 118: note = Ancestral polymorphism is A, Derived polymorphism is T
  VARIANT 90: note = Ancestral polymorphism is E, Derived polymorphism is K
  VARIANT 85: note = Ancestral polymorphism is A, Derived polymorphism is T
  VARIANT 73: note = Ancestral polymorphism is D, Derived polymorphism is Y
  VARIANT 67: note = Ancestral polymorphism is S, Derived polymorphism is L
  VARIANT 52..280: note = Derived polymorphism lacks residues 52 to 280
  VARIANT 29..280: note = Derived polymorphism lacks residues 29 to 280
MPRRALRAQSPARETPSSIRPPTSSSSTRKSLHTCYLPSSDDDRKDYLEIPWAELRSMVEPSFAERSLIYHKDYLSDATIVTSSAVNITEHVVLTVDGHSLPYDYLIIATGHALASPASRAERINEFQRDNGKIESSESVLIIGGGPTGVELAGEIVVDYPGKRVTLIHRGPRLLEFIGDKASKKCLDWLTSKKVDVLLQQSVDLGSLSDTEKVYKTSDGETVTADCHFVCIGKPLSSSWLHDTILKESLDSKGRVMVEKDLRVKGFNNIFAIGDITDIP

SEQ ID NO: 18664 - protein, 508 aa, Zea mays
  VARIANT 282: note = Ancestral polymorphism is H, Derived polymorphism is R
  VARIANT 393: note = Ancestral polymorphism is G, Derived polymorphism is R
MGQRQSHSKRDGSSHGRRSRSFQQQPSAQWGAGGGGYYQQDPSTGYYGAPVPQQGGGYYQQDPGTGYYGAPVPQQGGGYAAPYRDKPAAAAAVAAPAPQAAKPRQLDRRYSRIADEYHSVDQVTDALAQAGLESSNLIVGIDFTKSNEWTGKFSFHGRSLHHISNTPNPYEQAISIIGRTLSKFDEDNLIPCFGFGDASTHDQDVFCFSPDEKPCNGFEEALDRYRELVPHLRLAGKLLCLVHPFNWIVHMCLHQFLTGPTSFAPIIEMAMTIVEQSGGQYHVLLIIADGQVTRSVDTASGQLSSQEQKTVDAIVKASELPLSIVLVGVGDGPWDMMKEFDDNIPARAFDNFQFVNFSEIMSKNMAQSRKEAAFALSALMEIPPQYKATVELGILGRRSFKSPDRVPLPPPSGSHGAYSYYSSKGFSKPSTYPQSSSSSSPYPHYETPHTATPAAPSATYDNQVCPICLVNPKDMAFGCGHQTCCDCGQILESCPICRTPITTRIKLY

SEQ ID NO: 18665 - protein, 355 aa, Zea mays
  VARIANT 199: note = Ancestral polymorphism is Y, Derived polymorphism is D
  VARIANT 83: note = Ancestral polymorphism is T, Derived polymorphism is A
MSAYCGKYADELIKNAAYIGTPGKGILAADESTGTIGKRLSSINVENVEENRRALRELLFCCPGALQYISGVILFEETLYQKTKDGKPFVDVLKEGGVLPGIKVDKGTIEVVGTDKETTTQGHDDLGKRCAKYYEAGARFAKWRAVLKIGPNEPSQLAIDLNAQGLARYAIICQENGLVPIVEPEILVDGPHDIDRCAYVTETVLAACYKALNEHHVLLEGTLLKPNMVTPGSDSKKVTPEVIAQYTVRTLQRTVPAAVPAVVFLSGGQSEEEATLNLNAMNKLSTKKPWALSFSFGRALQASTLKAWAGKVENVEKARAAFLARCKANSEATLGTYKGDAAADTESLHVKDYKY

SEQ ID NO: 18666 - protein, 529 aa, Zea mays
  VARIANT 341..529: note = Derived polymorphism lacks residues 341 to 529
  VARIANT 159..529: note = Derived polymorphism lacks residues 159 to 529
  VARIANT 82..529: note = Derived polymorphism lacks residues 82 to 529
MTAMEAAVDAMLAAASRAFTSTFAIAIQIQGCMICLVLALGWAAASIVRKGVIKNMRRNIVDGNSFAFLCDNIDELEHSVQENLPRVSVVMPLKGFGEHNLQNWRTQITSLYGGPLEFLFIVESKDDPAYHAVSRLITEYKDNLEAKVVVAGLSTTCSQKIHNQLVYVPSVWNGDIGVEKMHKDTKYVLFLDDDVRLHPGTIGALTKEMEKNPEIFIQTGYPLDLPSGSLGSYCIYEYHMPCSMGFATGGKTFFLWGGCMMMHADDFRQDRYGIVSGLRDGGYSDDMTLAAIAGQHKRLIFSPPVAVFPHPLASDLSFSRYWNYLRKQTFVLESYVSNVNWMMNRALFTSHCYLSWGFVWPYIMALVHVLAALRAPYSKVVKEASDSSWGLFLVGLLFTCTLIELVSMWNLTKVEIQLCNMLSPEGPKVSLDSYNWGLVSVFIAVLVDNFLYPVSAIRSHFSQSINWSGIRYYLRDGKISKIERENSSKYTDLGGKHLYGKRTYPPNKSLLGYLSRTLVQWHQPKKYDV

SEQ ID NO: 18667 - protein, 166 aa, Zea mays
  VARIANT 1: note = Ancestral polymorphism is M, Derived polymorphism is T
  VARIANT 55: note = Ancestral polymorphism is P, Derived polymorphism is S
  VARIANT 93: note = Ancestral polymorphism is L, Derived polymorphism is Q
  VARIANT 160..166: note = Derived polymorphism lacks residues 160 to 166
MVKIPSPSRLFRSRSRSSTTIGGAGADICAMVAEHEKIEWEVRPGGMLVQRRRPSPEDDAAAAVDVEYILVKVSTGWQWHDVSIDAIATFGDLKVTLSLVTGLWPREQRLLYRGKERDDREHLHMVGVQDRDKVLLLEDPAVKERKLRSTTLAQLMGVPCHSFIQV

SEQ ID NO: 18668 - protein, 247 aa, Zea mays
  VARIANT 17: note = Ancestral polymorphism is N, Derived polymorphism is I
  VARIANT 20: note = Ancestral polymorphism is V, Derived polymorphism is M
  VARIANT 29..247: note = Derived polymorphism lacks residues 29 to 247
  VARIANT 45..247: note = Derived polymorphism lacks residues 45 to 247
  VARIANT 76: note = Ancestral polymorphism is S, Derived polymorphism is P
  VARIANT 161..247: note = Derived polymorphism lacks residues 161 to 247
MASLTPGILLKVLKNINSDVKFIYVEKVQSSIPVPILVRVRPVPGRNPCIGNPKDLMQMSTPSGITEAPDHQRRTSKSADMSESEKENLQRKVVIKEQKIVVASRYMLGVSSNNGKITSLNSSIDSDKSNGGSTISEPNKKSVAPKVRQEAKPQLVSTKQEISKDTRKNGGASPSPNGCAVVKKQMPKESKKESATERRSPPKLYKSSPTPARTSPTKLGPAAKQNGNSSPVPSISTVKRRVTETIY

SEQ ID NO: 18669 - protein, 124 aa, Zea mays
  VARIANT 32: note = Ancestral polymorphism is A, Derived polymorphism is V
  VARIANT 25: note = Ancestral polymorphism is A, Derived polymorphism is T
  VARIANT 24: note = Ancestral polymorphism is S, Derived polymorphism is L
  VARIANT 13..124: note = Derived polymorphism lacks residues 13 to 124
  VARIANT 8: note = Ancestral polymorphism is L, Derived polymorphism is F
  VARIANT 3: note = Ancestral polymorphism is A, Derived polymorphism is T
MYAYGRNLGLSFQVVDDMLDFTQSAEQLGKPAASDLAKGNLTAPVIFALQSEPELREIIDSEFSDTDSLAATIELVHRSGGIRRAHELAREKGDLAIQNLQCLPRSDFRSALEKMVEYSLEGIE

SEQ ID NO: 18670 - protein, 71 aa, Zea mays
  VARIANT 62: note = Ancestral polymorphism is L, Derived polymorphism is V
MQKTKDCCAEMLVQMDSAFLAIYLRWSLLKQLKPNTHSKNYYIHDIRILLCIWSVHLKTYCLLPQHRWMRK

SEQ ID NO: 18671 - protein, 146 aa, Zea mays
  VARIANT 140: note = Ancestral polymorphism is T, Derived polymorphism is A
  VARIANT 130: note = Ancestral polymorphism is W, Derived polymorphism is L
  VARIANT 122: note = Ancestral polymorphism is V, Derived polymorphism is A
  VARIANT 30: note = Ancestral polymorphism is A, Derived polymorphism is D
  VARIANT 25: note = Ancestral polymorphism is T, Derived polymorphism is I
  VARIANT 19: note = Ancestral polymorphism is R, Derived polymorphism is C
  VARIANT 5..146: note = Derived polymorphism lacks residues 5 to 146
MKKIQGLLELRTVTNEMVRLIETATARVLAVDIAGNINGWNKKAAELTGLPVMEAIGRPLIDLVVADSVEVVKQILDSALQGIEEQNLEIKLKTFHEQECCGPVILMINSNVLSFNRTNGLAISHLLVLWYIMARICRLTFSKSTL

SEQ ID NO: 18672 - protein, 616 aa, Zea mays
  VARIANT 151: note = Ancestral polymorphism is G, Derived polymorphism is R
  VARIANT 224..616: note = Derived polymorphism lacks residues 224 to 616
  VARIANT 245: note = Ancestral polymorphism is Y, Derived polymorphism is C
MAEIAGDEAPTPPTISGEVSGDPHTSAATPAGSSNKPPLRATKPGVKRLILTASVLLSFLVGLPFLLKSTEIHRSPLPSDAITALAHRLHSTPPSFPCALHAVFLRSVPGRSDDASLYRRLERSISAQLQLLAATSTAGNVSVSVTVESAGGCSSSSGSVGSGWQCGTVSSADLVVGDEVFDELLHSALGSVGGDGSRVYTVVVVEIDDADGMRVVVGKHRHAWVVGKADEVKAVSVIGKVFAKYFMNGGIEEGEAGIGKGEFMPVGSDGNVVLSFSLLNADPSDWVYDWDFEKIGEKMLNPVVEALRPIAEINIESQVLYHTPKSSYSYFDDKLGGNFLSMGDIPFFVNSNEWHLDTSISATGRSKVLQFVVYIPSARECPLYLQLPDGGLSKTNAFISPMWGGVLIWNSPDCSLGSKKTHGTQKKMSSQELMEALEIFVGQLRQLFGLKPSYFSQDMDVPTKFLVSEKGFTEWELDLLYRHHARSNLLSCLTTLESLSSLVHSLPRMIVMDEIGRQVELSLEAANLAQGNATLGISDSSAVSATRARALAEDAFFHPSIMSISYASVEHYFAIYMPFFAPVSLHVLLAAIKELKRYKAERAKYSAFLASQATSS

SEQ ID NO: 18673 - protein, 1353 aa, Zea mays
  VARIANT 88..1353: note = Derived polymorphism lacks residues 88 to 1353
MASSQGESVPPWLKSLPLAPEFRPTVAEFADPIAYLLKIEPAAAPFGICKIVPPLPPPPKRTTLGNLSRSFAALHPDDPTPTFPTRHQQLGICPRRPRPALKPVWLSPHRYTLPKFEAKAGASRKALLARLNVPASKQLSPLDVEALFWRSSADRPVVVEYASDMPGSGFAPCAARLTQLPPANVGETAWNMRRVARSPASLLRFVREEVPGVTSPMLYVGMMFSWFAWHVEDHDLHSLNYMHYGAPKTWYGVPRDAALAFVEVVRVHGYGGEVNSLETFAMLGDKTTVMSPEVLVDSGIPCCRLVQSAGEFVVTFPGAYHSGFSHGFNCGEASNIATPEWLIVAKEAAVRRASINRPPMVSHCQLLYELALSLCLRDPSNDVMEPRSCRLKEKKKSEGDQLIKKIFVQNVIEDNKLLGHFLSDGSPCIILPVNYNDGSPLSTLLSKFQSTTDSRISHGQCSKAEAPKDSRRLPMDGADKNRELSSSNKNSLSAFSGKTVPLPPRICIHECANVTGASHAHNAENDKVDMNSAAGLLDQGLLSCVTCGILSFSCVAVIKPRECAAKWLMAADSSLINDRLASSGEHDIDALQGGRTTGGILRSDSEMNGNSIVSDADAAPLNGHSALDLLALAYGDPSDSDEDVMNIKNQVPNVSNELINHTIESQPYTSCNGDYDGTKVSSSSKEREQGPTSHSSKCIGNSNTLNGPKGVRTRNKDLLKMVLSEGFQPKGICSETHKKVQCEPSSSKKTSMEIPCGTDYHVSHNSGTICMDSSRGSTTTTMVNNLVTSVVKPDKDSSRMHVFCLEHAIEVEKQLQAIGGADIFLLCRPEYPRIEVEAKLLAGEMDFEYDWKDILFKEVTIKDREKIQEVVRDEEAIPTNSDWAVKLGINLYYSANLAKSPLYSKQVPYNRVIYEAFGCGSPNDSPVKLKTYSRRQCRAKKIVLAGRWCGKVWMSNQVHPYLADRIKNHEPKEIDETFPSDQKSHAEPVENSSREAASTRKSSSRTIEGKTSKREKEQLEKANAKKPKFTEEDNSKSLEGTAEASTQKIKGRSVLEKTSKKEKAYTKKLKHTEKVSEALKGPSEASFPAPAGMVVRSSSRIANRKIMLKSKMEEEDNGSADRPKSKVEDDKDNPAGRSRAKPLRQKTKVDAKKKTKETRVEKRKAPSPASQKDEEEQSDDVEGRSTTKQRLSLRKKGAKTEGKQRMEKPRFGGSAPPPSSPKRKEEYVCDIEGCSMSFGTEQALSLHKNDICPEKGCCRKFFSHKYLQQHRKVHADDRPLKCPWEGCGMAFKWPWARTEHVRVHTGDRPYVCLEPGCGQTFRFVSDFSRHKRRTGHGASKKAKAKKQGKAAVT

SEQ ID NO: 18674 - protein, 410 aa, Zea mays
  VARIANT 220: note = Ancestral polymorphism is R, Derived polymorphism is W
  VARIANT 240: note = Ancestral polymorphism is L, Derived polymorphism is Q
  VARIANT 270: note = Ancestral polymorphism is I, Derived polymorphism is F
  VARIANT 271: note = Ancestral polymorphism is I, Derived polymorphism is T
MDPVNPNSHKKRNYNNACYAPSTLSHAEARRIRKRVLDQRKLALAGSSMPSQHTPTLQCGHFDPDFVKTIKASYHDRSYYGRPSYQCIHCSALFWHGERIRSSVGTRSVIYNSCCKGGKVRIPAYRPRPEPLLSLARFDGDVVSKTFMQNIRQYNCLFAFTSMGAHIDRSLNDGRGPPVFKVCGQIHHRIGSLLPMTDQPPKFLQLYVYDTSHEVNNRIRSLSSDDAPDSPIQPQIVNELLQMLDTHNPFAKKFRIAKERLTEHADEEFIIRIIGAKEGDPVQYDMPTTDDLAMLVIGDFSLETFKRDIIIETRNSELKRISSLHPAYMALQYPLLFPYGERGFQVGVMYSGIQNKQPNSRIHMTMQDYYCYQFHYKPGNPIHFSLMGYYQIKLRSMLVPALMKIGLLTF

SEQ ID NO: 18675 - protein, 394 aa, Zea mays
  VARIANT 379: note = Ancestral polymorphism is P, Derived polymorphism is L
  VARIANT 314: note = Ancestral polymorphism is F, Derived polymorphism is S
MHIWPTCTFLKRQPHVHTDGCIPTPKSMASSPRSPPPAPTPEFEISRQSRLFAALSKKVIDLDELRMLAAQGVPDAAGVRATVWKLLLGYLPNDRSLWEQELAKKRGQYAAFKDEFLTNPVERAQQVPTEGHHNVSAEHVDNGFLHRSEVTREEHPLSLGKTSAWNQFFEYSEIMEQIDRDVKRTHPDMQFFCGDSSFAKSNQESLKNVLLIFAKLNAGIRYVQGMNEVLAPLFFVFRSDPDDKNAEFAEADSFFCFVELLSGFRDNFCQKLDNSAVGIRGTLAKLSQLVAKYDGELQQHLEITTEVNPQFYAFRWITLLLTQEFNFADTIHIWDTLLSDPGGPQETLLRICCAMLILVRKRLLAGDFTSNLKLLQNYPPTNISHLLYVANKLH

SEQ ID NO: 18676 - protein, 61 aa, Zea mays
  VARIANT 50: note = Ancestral polymorphism is A, Derived polymorphism is T
  VARIANT 46: note = Ancestral polymorphism is K, Derived polymorphism is E
MVRVATYFAMTFGAFLFWQSMDRVHVWIALHQDEKKERMERELEIKRMQAELLAQAKENES

SEQ ID NO: 18677 - protein, 603 aa, Zea mays
  VARIANT 49: note = Ancestral polymorphism is R, Derived polymorphism is W
  VARIANT 69: note = Ancestral polymorphism is I, Derived polymorphism is N
  VARIANT 71..603: note = Derived polymorphism lacks residues 71 to 603
  VARIANT 133: note = Ancestral polymorphism is P, Derived polymorphism is H
  VARIANT 395..603: note = Derived polymorphism lacks residues 395 to 603
  VARIANT 406..603: note = Derived polymorphism lacks residues 406 to 603
MALADATAFPYGLRVLVVDDDPTWLKILEKMLRKCSYEDAMSDRTVIARTGGISSCVTTCGLASVALQILRERRNKFDIVISDVNMPDMDGFKLLELIGLEMDLPVIMMSIDGETSRVMKGVHHGACDYLLKPVRMKELRNIWQHVYRKKMHEVKEIEGNDSCDDLPIFRNGLDGLDERGLFMRADTDTMRKRKEVDKDHADQDSSDGATAKKARVVWSVDLHQKFVNAVNQIGFDKVGPKKILDLMNVHGLTRENVASHLQKYRLYLSRLQKQNEERIMGAARQDFNQKGPSDNLNLRSSFQEQPGNLTNGFQHSSQKVQSQTNILDPHLDDTKTSVPLKVPDKNGTSASDAADHQNITGVSPLGGGGVFSFERMPVNQDTKLSEAMILECQSWSGGVPPKQFMQYPKHNHERCDLLGDYSCLPKPDLEHPIAPSHLYAPPPVISMSCSVEGDVRDFSDVKPDLLGCMKSLSPALTCTVESVSAQLSDSVVSSTNNDKKISSVEGLSSVKDCDFDQERNQAILLTSEEASILCSTDLTCLPDELSGYQLQGVSFGDIGLNSIDLFQCNDTMVLPGLQNNWYDDPDFSNETMEFPLLDGGLFA

SEQ ID NO: 18678 - protein, 120 aa, Zea mays
  VARIANT 91: note = Ancestral polymorphism is G, Derived polymorphism is R
MPQCSSPHVKRVNPGEGLLAAGVESEGASLYVGIEEIESKGTNIDEEGGALHEEHPVVARVGEEEAVIVRRGEKKRCSAESPKILDALVSGGVPAAAEASKLTFMVGGLEEAYLAAKSFK

SEQ ID NO: 18679 - protein, 263 aa, Zea mays
  VARIANT 94..263: note = Derived polymorphism lacks residues 94 to 263
  VARIANT 81..263: note = Derived polymorphism lacks residues 81 to 263
MPTSVRNQLQRPAECPPAPRKPVWAPPLPSTPANKRSRPSPPSSAAPARRDFFPVARPHHRVPRPAAQEADPRGHGASIPQLSSQSSAPQYSSYGGYQGTSKKIEIPNGRVGVIIGKAGETIRYIQLQSGAKIQVTRDHEAEPGALTRQVELSGKPEQLSKAEQLIKEVLAEVLLIMLTAFCFVLVILQLISEVTSEVTIRAGDTSTERTVHIDDTQEQIEAAKQLISEVTSCFWFILFIVSFYDFPRFFLKILFLLLIAALH

SEQ ID NO: 18680 - protein, 121 aa, Zea mays
  VARIANT 19..121: note = Derived polymorphism lacks residues 19 to 121
  VARIANT 21: note = Ancestral polymorphism is K, Derived polymorphism is R
  VARIANT 29: note = Ancestral polymorphism is L, Derived polymorphism is V
  VARIANT 47: note = Ancestral polymorphism is I, Derived polymorphism is T
  VARIANT 59: note = Ancestral polymorphism is R, Derived polymorphism is K
  VARIANT 100: note = Ancestral polymorphism is A, Derived polymorphism is T
MAKRLLPSLNRVLVEKLVQPKKTAGGILVPETSKQSLVIFFFRVMQIRLMSFLRLLPQRLPQLIRQVEQDVETVIHVLQPGPIGIVEHKFTDAEILEARATVKRAVDNWRRNWTLERNVSR

SEQ ID NO: 18681 - protein, 478 aa, Zea mays
  VARIANT 185: note = Ancestral polymorphism is A, Derived polymorphism is T
  VARIANT 399: note = Ancestral polymorphism is S, Derived polymorphism is L
  VARIANT 421: note = Ancestral polymorphism is S, Derived polymorphism is L
MPLALAQLQDLRDRISDRLRPWSRSAQFWVRAADIYTSYKVCQLRAGFVKDEDELETMWERQHELGAEKMYSLCSELGGLFLKAAQILGKPDLAPMAWVKRLVTLCDQAPSTPFDVVRDVVEKQLGKNFDDMFEFFDVEPVGSASIAQVHRARLKLSKTDVAVKVQHPGAEQLMMVDIRNMQAMALFLQKHDLNFDLFSATKEMEKQICYEFDFVREARAMERIREFLRVTNKKPPVMVPRVIPGMVSREVLIMEFIKGTPIMNLGNEMAKRGIDPGGKIAAMAKQKILSDLTLAYGQMILKDGFFHADPHPGNILICKDTEVALLDYGQVKEMPEDLRLAYANLVVAMADDDFSRAEESFRELGIRTWAITDNKLEELFQLSLRMFDTRLPPGVTVMSPFADDSSLNKIGVESFPEELFSVLRTIQLLRGLTVGMGLTFSCAQHWRPIAEEALLKAGRQSASKSRKQKRSFLRRLFW

SEQ ID NO: 18682 - protein, 577 aa, Zea mays
  VARIANT 356..577: note = Derived polymorphism lacks residues 356 to 577
MEMSTQLNSLWPAYALLYARDDVVNNGDGWARTCIYIPHTSSANNCFQFIAYFGVSTNLVNYLKDRLHEGSKAAANGVTNWMGTCAITPLVAAFLADAFLGRYWTVALFLAISVVAYVVLAVSAAAAAQGSAGFYAGLYLLALGSALQPVLSSFGADQFDFDDDDDDHDDERGRRQSSFFNWFYLSINVGSLVGGTVLVWVQSSVGWGLGYAIPVLFSVLAVAAFLAGTATYRRHQPPAGSPFTRVAQVVVAAVRKCGVEVPEDASALHECEDADGMSAIQGSRRLAHTDQFRFLDKAAVETADDKSRRRPASAWRLCTVTQVEELKRMLRLLPVWASGIVFAAAYTQMTTTFVLQGDTLDPHVGGGFRVPAAALSVFDTLSVMLWVPLYDRLVVPLARRATGHRRGFTQLARMGAGLLVLAAAMLAAGALEVARRRVVARHGVYYDTHTGAGGDARYLPLSIFWQVPQYVVVGASEVFTLIGQIEFFYDQAPDAVRSLCSGLSITSFALGNYVSSALVAVVARATARAGRDDGWIPDDINRAHLDYFFWLLAMLCVGNFGVYLLIARWYTYKKTVD

SEQ ID NO: 18683 - protein, 518 aa, Zea mays
  VARIANT 339: note = Ancestral polymorphism is I, Derived polymorphism is N
  VARIANT 430: note = Ancestral polymorphism is Y, Derived polymorphism is H
  VARIANT 463..518: note = Derived polymorphism lacks residues 463 to 518
  VARIANT 476..518: note = Derived polymorphism lacks residues 476 to 518
MWKLKVAAEGGGGPLLRSTNRFVGRTVWEFEPDLGTPEQRAEVEKARRDFSDHRFQRRHSADVLMRMQMQQYSKGTPLKLDLPAVKKLGEDEDVTEEAVSTSLKRAINRVSALQAHDGHWPGDCSGPLFLLPGLPSLIMELFKVLGVYDWSGNNPLPPEMWLLPYHLPFHPGRMWCHCRAVYLPMSYVYGKRFVGRITPLVLELRNELYGDPYSLIDWNKARNQCAKGYNGSQLWDAGLTVLAIVNTDLIEEFGPTLKLAHAFVKNSQIIDNCLEDLNQWYRHMSKGGWPFSTADHGWCVSDCTATGLEATLLLSTISPQIVGEAMEVGRVYDGVNCLISLMVSIFQVSAFHYAKVHINPSETFGGIMIDYPYVECTSSSIQALALFKKLYPRHRTEEIDSCISKGANFIESMQRNDGSWYGSWGVCFTYATWFAVFGLACAGRTFEDSPAIKKACEFLLSKELPSGGWGESYLSCQDKEIIGVFNQNCMIGYSQYRNIFPIWALGEYRTKVHVPRKK

SEQ ID NO: 18684 - protein, 410 aa, Zea mays
  VARIANT 402..410: note = Derived polymorphism lacks residues 402 to 410
  VARIANT 400..410: note = Derived polymorphism lacks residues 400 to 410
  VARIANT 260: note = Ancestral polymorphism is L, Derived polymorphism is P
  VARIANT 170: note = Ancestral polymorphism is S, Derived polymorphism is I
  VARIANT 135: note = Ancestral polymorphism is M, Derived polymorphism is T
  VARIANT 129: note = Ancestral polymorphism is A, Derived polymorphism is T
  VARIANT 96: note = Ancestral polymorphism is A, Derived polymorphism is V
  VARIANT 71: note = Ancestral polymorphism is P, Derived polymorphism is S
MAAPRPSGGMDPRSGFCAATRTFHSLRPSAALPPDSLPATAAAYAFSILSSPLPDRPALVDAATSISVSYPSFLAAVRSLAGGLWSVLGLRPGDVVLVVSPSRIDVPVIDFALMSIGAVVSPANPASTAEEYTHMVALSRPVVALAAPEVAAKLPRNLRCVVIGSNEYKSLSSAGGVAPSPPVAVKQSDTAAVLYSSGTTGRVKAAAVSHRNLIAVISAHRNNRVIAEKEAAEAGEEPLPPTVTLFPLPLFHVFGFMMLLRSVAMGETAVLMDRFDFIAALRAIERYRVTLLPAAPPVLVAMIKSEEARRCDLSSLLFIGIGGAPLGREVAERFAAIFPNIELIQGYGLTETSGSVASTVGPDECKAYGSVGKLASHLEAKIVDPSTGEVLGPGQRGELWVRGPVVMKGK

SEQ ID NO: 18685 - protein, 803 aa, Zea mays
  VARIANT 206..803: note = Derived polymorphism lacks residues 206 to 803
  VARIANT 341..803: note = Derived polymorphism lacks residues 341 to 803
  VARIANT 342..803: note = Derived polymorphism lacks residues 342 to 803
  VARIANT 348: note = Ancestral polymorphism is S, Derived polymorphism is L
  VARIANT 365..803: note = Ancestral polymorphism lacks residues 365 to 803
  VARIANT 603..803: note = Derived polymorphism lacks residues 603 to 803
  VARIANT 623: note = Ancestral polymorphism is C, Derived polymorphism is R
MEAMEAEEGPFLANDAKLHAGICRAFHPSVSKLSTIFPFIEASRPRSKSGIQALCSLHVALDKAKGLLQHCADCSRLYLAITSETVLLKFEKSRSQLQESLRRIESIVTEDIGCKIVEIVGELEQIVFTLDRSEKEAGDELINLLQRNNKTNGSSDNGELEVFHISALKLGITSSRAALTERRALKKLIEKARSDEDKRKELVVSYLYNLMRKYSKFFRSETGDDTDSQGSSPCSPTVLGVDDMCSPYINGRAFGRQILSSQSFNSRFGSFNSRLGSFNCRRAAGGGPRSGNISVPPEELRCPISLQLMYDPVIISSGQTYERICIEKWFNDGHSTCPKTQQQLAHLSLTPNYCVKALIASWCESNDFPLPDGPPGTFDVNWRLASSDTEATGCVSVESFDCTSAKSVKIVLMEDARKEEPANSVSGTLDDGSCNDFDLNEGYGSLLLLLHERSNMDKQCRLVEQIRYLLKDDEEARIQLGSNGFAEALVEFLRNAVDDGNEKAQEVGAMALFNLAVNNNRNKGLLLSAGVAGLLEQMISNPRLSGPATALYLNLSCLPDAKAAIGSSQAVPFLVDCLYIQDASDTNGSSSKHDALYTLYNLSSHQASVSALLAAGIVDALHRLLAESAAPPEEGLGWTEKALAVLISLAATEAGRKEIVSTPGLVSTLATVLDTGEPTEQEQAVSCLLVMCSADDECVAAVLREGVVPSLVSVSAAGTGRGREKAQKLLKLFREQRQRDTAPAPQPQQQLLQSQLAEGGNGGGAIIACHHRESKPLFNVKSRKLGRTLSSLWKNRGFSLYQC

SEQ ID NO: 18686 - protein, 634 aa, Zea mays
  VARIANT 345..634: note = Derived polymorphism lacks residues 345 to 634
  VARIANT 342: note = Ancestral polymorphism is P, Derived polymorphism is S
  VARIANT 336..634: note = Derived polymorphism lacks residues 336 to 634
  VARIANT 308..634: note = Derived polymorphism lacks residues 308 to 634
  VARIANT 291: note = Ancestral polymorphism is P, Derived polymorphism is S
  VARIANT 277: note = Ancestral polymorphism is L, Derived polymorphism is P
  VARIANT 271..634: note = Derived polymorphism lacks residues 271 to 634
  VARIANT 264..634: note = Derived polymorphism lacks residues 264 to 634
  VARIANT 111..634: note = Derived polymorphism lacks residues 111 to 634
  VARIANT 99..634: note = Derived polymorphism lacks residues 99 to 634
  VARIANT 97..634: note = Derived polymorphism lacks residues 97 to 634
  VARIANT 89: note = Ancestral polymorphism is C, Derived polymorphism is Y
  VARIANT 81..634: note = Derived polymorphism lacks residues 81 to 634
  VARIANT 46: note = Ancestral polymorphism is R, Derived polymorphism is C
MADAPYARVAHSYETRRRRRLASARGDISIMDFPSSFAASNRHRLRSRLHYRRSAQHTHITIPLEKTYIDALRDAYPNRSYYGGPEHTCRYCGAVFWFQERVKSDSSIAQRRLAYNLCCKGGKINLEPYKRPPSVLADLLSFDGDARSKRFLRLIRAYNSLFAFTSFGAAIDKAINNGTAPYVFKINGIVHHRIGTLLPRRGVMPKFAQLYIHDTNHETQNRLNMFEVDDGVAEQPEREITMALLAMLNDNNKLVKAFRYARERLEQAGNQRITLRLLGCDARQDVQYNLPSRGEVVAIIVGDYTADEYTYDVLVHDRNCGLRRVSCLHPSYMALQYPLLFPYGENGYHLGIRTYTGLIYFPATVSLMFMPFLVSTLQMGDVLIPSLQCGNLSVTICVRISRFWDFSDPQDDARLLHCDMVLLDEERCFGQCRVVGCPSHPIPRRAHIRRWAEFPTDCAICWHTCQKICSARGDHKPVKWNATVTSSQLISPIAEEQKVSYIKYLHPFENKGKEFLVTVTIRKIDSKWWYNSCRKCACIAVTHGDSYKCTNRDCANIAMPVQSMCGLFSTLMQETVDVGDADRVTTQSSTTRKRSCSSPGKSIAKKLFVADDEEGSISQSSGGGVGGSSDDKDN

SEQ ID NO: 18687 - protein, 249 aa, Zea mays
  VARIANT 59..249: note = Derived polymorphism lacks residues 59 to 249
MAAPAITSKDKEEAAAAPQPKQGESKVFSRLFTRESSAAAPSLRVYYGVASAGSVPFLWESQPGTPKHDDDAVATATLQPPLTPPPSSYYTARQQRQTSSATVATGKNKKLSKHYYTSVFSAILPKMILHRRSSRPASSRSASSRSSSSSWSAALASSAASSLSFRSARSPAACSSSSRRSRVFAFSAADVDGSEEEEEEQAAAPMCFSVRHESFRALRGCRVAMTVKSALASVGGHGHAAGPTAAQKV

SEQ ID NO: 18688 - protein, 172 aa, Zea mays
  VARIANT 45: note = Ancestral polymorphism is P, Derived polymorphism is R
MQTKPSREMAAVSSTATASSQPELPTSTAHPTANAAANSRLARRPRRNNSFVMVEEASYASGGGDGGVARTKSLTEDDLEELKGCVDLGFGFAYSEIPELCGTLPALELCYSMTRRFLDEQRAPGQDEEEEEPASPPLPNWRIFAPGDDPEEVKARLKYWAQAVACTVKLCS

SEQ ID NO: 18689 - protein, 481 aa, Zea mays
  VARIANT 373: note = Ancestral polymorphism is N, Derived polymorphism is D
  VARIANT 354: note = Ancestral polymorphism is V, Derived polymorphism is A
  VARIANT 126..481: note = Derived polymorphism lacks residues 126 to 481
  VARIANT 125: note = Ancestral polymorphism is P, Derived polymorphism is S
MGSTGREPEVTRANFPDGFVFGVATSAYQIEGARREGGKGDNIWDVFTDDKERVLDRSNAEIAVDHYHRYKEDIELMASLGFSAYRFSISWARIFPDGLGEKVNEQGVAFYNDLINFMISKGIEPYATLYHWDLPNNLQKTLGGWISDKIVEYFALYAEACFANFGDRVKRWITINEPLQTAINGYGIGIFAPGGCQGETARCYLAAHHQILAHAAAVDVYRRKFKAAQSGEVGLVVDCEWAEPFSEKLEDQIAAQRRIDFQLGWYLDPIYFGDYPESMRQRLGSDLPTFSEKDKKFIKNKIDFIGLNHYTSRLIAHHQNPDDVYFYKVQQMERVEKWSSGESIGERAASEWLVIVPWGLHKLLNYIVKKYNNPVIYVTENGMDDEDDQSATIDQVLNDTKRVGYFKGYLNSVAQAIKDGADVRGYFAWSFLDNFEWAMGYTKRFGIVYVDYKDGLSRHPKASALWFSRLLKGEAAENSYS

SEQ ID NO: 18690 - protein, 207 aa, Zea mays
  VARIANT 108: note = Ancestral polymorphism is E, Derived polymorphism is A
MCSFEAARQPHPHAVACGAWAKALAGLRRINLDGLRWRVFDAKGQVLGRLASQIAVVLQGKDKPTYAPHVENGDMCIVLNAQDISVTGRKMTDKIYYWHTGYVGHLKERRLKDQMEKDPTEVIRKAVLRMLPRNKLRDDRDRKLRIFSGIEHPFHDRPLEAFVMPPRQVREMRPRARRAMLRAQKKEHSNRAKEEEDAKNATAEVTA

SEQ ID NO: 18691 - protein, 177 aa, Zea mays
  VARIANT 45: note = Ancestral polymorphism is C, Derived polymorphism is Y
  VARIANT 51: note = Ancestral polymorphism is K, Derived polymorphism is Q
  VARIANT 85..177: note = Derived polymorphism lacks residues 85 to 177
  VARIANT 142: note = Ancestral polymorphism is D, Derived polymorphism is G
  VARIANT 144: note = Ancestral polymorphism is A, Derived polymorphism is D
  VARIANT 145: note = Ancestral polymorphism is I, Derived polymorphism is T
  VARIANT 159: note = Ancestral polymorphism is E, Derived polymorphism is K
  VARIANT 161: note = Ancestral polymorphism is G, Derived polymorphism is A
MFKSLRRQGGEKSLPALHRSQKLARNLYCVVSGAPRLAYEQFVFCDIFHQKESGWRDCSFCGKRLHCGCVASKNSYDLLDSGGIQCVTCMKNSAAQSASGQVVPKLFPCPNNLLFFGKSDELLSSRKFEQPPSLMLDSRNDDIAIVNKSNHLFMVISIEAGQSSNILRQKEIENGRK

SEQ ID NO: 18692 - protein, 30 aa, Zea mays
  VARIANT 19: note = Ancestral polymorphism is T, Derived polymorphism is K
  VARIANT 20: note = Ancestral polymorphism is V, Derived polymorphism is I
  VARIANT 26: note = Ancestral polymorphism is E, Derived polymorphism is D
  VARIANT 29: note = Ancestral polymorphism is W, Derived polymorphism is C
MTCPTDIENHIRHDCIILTVYVHLVESACQ

SEQ ID NO: 18693 - protein, 97 aa, Zea mays
  VARIANT 5: note = Ancestral polymorphism is A, Derived polymorphism is V
  VARIANT 8: note = Ancestral polymorphism is A, Derived polymorphism is V
  VARIANT 25: note = Ancestral polymorphism is P, Derived polymorphism is L
MDSVAENAEYKDRDIESLSLCCYVPGPRGVDVQIFILIELLFDCRTRWRRWTSMKGNMASLVGSILKRCLLCYTLKKLNLLLCYLLNLKRELCIYID

SEQ ID NO: 18694 - protein, 161 aa, Zea mays
  VARIANT 3: note = Ancestral polymorphism is G, Derived polymorphism is S
  VARIANT 41: note = Ancestral polymorphism is L, Derived polymorphism is I
  VARIANT 58: note = Ancestral polymorphism is C, Derived polymorphism is W
MAGKSHTRKAFLLCNYVLMGAASSCIFLTLSLRLLPSPCGLLLLFLHALTAVFSAAGCSGSFTAPATPAQWHNAHTAGAALTAIFQGAVALLAFTRTSDFLAELQSYVRDEDGAVILKMVGGLGTAIFVLEWAALALAFSLRLDDDDDDDLQAKNRQPYHV

SEQ ID NO: 18695 - protein, 325 aa, Zea mays
  VARIANT 208: note = Ancestral polymorphism is L, Derived polymorphism is S
MEIRAPPTSLSLAPPPASASFRRTPLRTFFLNGSVSLKVVQVRQSNVNRFKCNSIQSNLFDRLTRVARSYANAVLSSFEDPEKILEQAVLEMNDDLTKMRQATAQVLASQKRLENKYKAAEQASADWYRRAQLALQKGDEDLAREALKRRKSYADNASSLRSQLDQQKGVVENLISNTRVLESKIAEAKQKKDTLKARAQSAKQMWILFHFRTATKVSEMLGNVNTSSALSAFEKMEEKVMAMESQAEALGQLATDDLEGKFALLENSSVDDDLSQLKKELSGSSLKGELPSGRRAASNSGAGRPFPDLEIESELNELRRKAKEY

SEQ ID NO: 18696 - protein, 415 aa, Zea mays
  VARIANT 173: note = Ancestral polymorphism is C, Derived polymorphism is R
MGTGRRGGGGGGVFHRLLALSSLLLLASGEVVFEERFEDGWETRWVESDWKRSEGKAGRFKHTAGRYSADPDDKGIQTTIDARHFAISAKFPEFSNKNRTLVVQYSIKFEQDIECGGGYIKLMSGYVNQKKFSGDTPYSLMFGPDICGTQTKKLHLILSYQGQNYPIKKDLECETDKLTHVYTFILRPDASYSLLVDNRERESGSMYTDWDILPPRKIKDVHAKRPKDWDDREYIEDPDEVKPEGYDSIPKQIPDPKDKKPDTWDEDEDGIWKPRMVSNPAYKGPWKRKRIKNPNYKGKWKTPWIDNPEFEDDPDLYVLKPLKYIGIEVWQVKAGSVFDNILICDDPEYARKVVEETWGANREAEKEAFEEAEKERKAREDREGQKAKDDGGRHRIHRRHKKHYRDHWDDYHDEL

SEQ ID NO: 18697 - protein, 99 aa, Zea mays
  VARIANT 73..99: note = Derived polymorphism lacks residues 73 to 99
MVRAEKLAGDGCSGGEGQVEVEVGMGMDGKGVTECRICQEEGKEAAMDSPCACTGAMDYHVVVPAETEMATLQFTGFFLPCYVIARSCYALQHRKRRQV

SEQ ID NO: 18698 - protein, 234 aa, Zea mays
  VARIANT 221..234: note = Derived polymorphism lacks residues 221 to 234
  VARIANT 194: note = Ancestral polymorphism is P, Derived polymorphism is L
  VARIANT 193..234: note = Derived polymorphism lacks residues 193 to 234
  VARIANT 107: note = Ancestral polymorphism is R, Derived polymorphism is C
  VARIANT 99: note = Ancestral polymorphism is G, Derived polymorphism is R
  VARIANT 74: note = Ancestral polymorphism is A, Derived polymorphism is T
MVRCSVTGAKRLTSYAAASPRKPPGAAISAATAAIQFEEIKLTEAMVSGYDYSGYGQSSGKPSEANTFADIEATYKCLVDVYGTREEDIVLYGQSVGSGPTLNLAVRLDRNIDKITHVKCPVLVIHGIKDDVVDCSHWKWLYKLCQHKYEPPWIEGGDHGNLKKFPVYIRHLKKFLLTIKKLPSKKDVVTDHEPWVTENITHPSGGAIFEAPTSWRLESSKKSMIHEVQAKHGP

SEQ ID NO: 18699 - protein, 419 aa, Zea mays
  VARIANT 32: note = Ancestral polymorphism is L, Derived polymorphism is M
  VARIANT 108: note = Ancestral polymorphism is K, Derived polymorphism is I
MATELLSPLIPHQQRRRALAVVVAAPLHALLLAAVAFSRSPVAAPASSSRLVDLTLLAGARGKGAVCLDGTPPGYHLRRGFGSGAHNWLVFLEGGGWCNTTQSCSERKMTNFGSSKYMGAVNFTGILSNDHTENPDFYNWNTVVIRYCDGASFAGDAEGGDLDGTKLFFRGLRIWKAVVDELMGKGMDAAKQALLTGCSAGSLAALLHCDNFHGRFPHEVSVKCLSDAGFFIDEKDLSGERSMRSLISGVVHLQNVKEVLPNDCLQKKDPTECFFPAELIKGITTPTFILNSDYDSWQIRNILAPNGSYPGQEWSSCKADIRNCSCAQLDVLHGFKKKLVSELKVAEDNKDWGLFIDSCFTHCQTPFDITWNSPISPRLGNKSISEAVGDWYFDRRQNAKQIDCEYPCNPTCSSLLPTA

SEQ ID NO: 18700 - protein, 526 aa, Zea mays
  VARIANT 190: note = Ancestral polymorphism is I, Derived polymorphism is T
MAPAAALALSLLLAFLAIGPCAAADSIDLWPMPQSVSHGTQKLYVKKDITMSMVGSTYSDEKSILKDAFQRMLDLITLNHVIDGIDPGSSVLTCVNVVVRTPEDELSFGADESYNLTVPTTGDPLYAQIQAQTVFGALQALQTFGQLCYFDFTSRLIELNSAPWIITDRPRFPYRGLLIDTARHYLPVKTIKGVIDAMAYSKLNVLHWHIVDEQSFPIEIPSYPKLWNGSYSYSERYTMSDAIDIVRYAEKRGVNVLAEIDVPGHARSWGIGYPALWPSESCREPLDVSKNFTFEVIDGILSGDFSKIFKFKFVHLGGDEVNTSCWTRTPHIEGWLNNNHMNVSDAYRDFVLRSQKIAISHGYDVINWEETFNSFGDKLDPKTVVHNWLGEDVAPKVVAAGHRCIVSNQDKWYLDHLDASWEGFYMNEPLKGINDTKQQQLVIGGEVCMWGEEIDASDIQQTIWPRAAAAAERLWTPIEKLANDTRFVTSRLARFRCLLNQRGVAAAPLAGYGRASPSEPGPCVRQ

SEQ ID NO: 18701 - protein, 862 aa, Zea mays
  VARIANT 31..862: note = Derived polymorphism lacks residues 31 to 862
  VARIANT 66: note = Ancestral polymorphism is P, Derived polymorphism is L
MCVAEGVFIHSLSLSPAPVRYPVSRLEAALQRPAAMATRAGRLPTTPAPALLLLLAFPFLLQGVLPSRAGDTVAAGRPLSGGQSLVSKRGKFRLGFFRPGATDNSSQRWYLGIWYNQLSVHTTVWVANRGTPISDPESSQLSISKDGNMVVLDHSRSSTAVWSTNVTTGVSSTSTVGVIRDNGNLVLADASNTSAVLWQSFDHSGDTWLPGGKLGRNKRTGEVTRLVAWKGRDDPTPSLFALELDPRGSSQYLLNWNDSERYWTSGNWTGTAFAAVPEMTSTGASPVSDYTFGYVDGANESYFTYDVADESVVTRFQVDVTGQIQFLTWVAAAAQWVLFWSEPKRQCDVYAVCGPFGLCTENALPSCTCPRGFRERDLAEWMQDDHTAGCARNTALQPCGAGAAARDGQKRRRDDDRFYTMPDVRLPSDARSAAAASAHDCELACLRNCSCTAYSYSGGCSLWYGDLINLQDTTSAGSGTGGGSISIRLAASEFSSNGNTKKLVIGLVVAGSSFVAAVTAIVLATVLVLRNRRIKSLRTVQGSLVAFTYRDLQLVTNNFSEKLGGGAFGSVFKGVLPDATLVAVKKLEGVRQGEKQFRAEVSTIGTIQHVNLIRLLGFCSEGSRRLLVYEHMPSGSLDRHLFDRDQQPGVLSWDARYQIALGVARGLDYLHEKCRDCIIHCDIKPENILLDDAFVPRVADFGLAKLMGRDFSRVLTTMRGTVGYLAPEWIAGTAVTTKADVFSYGMMLFEIISGRRNVGQRADGTVDFFPSTAVNRLLDGDVRSAVDSQLGGNADVAEVERACKVACWCVQDAESLRPSMGMVVQVLEGLVDVNAPPVPRSLMVLADPSKYAVEFFSGLPST

SEQ ID NO: 18702 - protein, 93 aa, Zea mays
  VARIANT 19: note = Ancestral polymorphism is R, Derived polymorphism is H
  VARIANT 23: note = Ancestral polymorphism is T, Derived polymorphism is I
  VARIANT 50..93: note = Derived polymorphism lacks residues 50 to 93
MSASGFVEPFSATAAADLHVLWTAFVATLVCFTALFCASVLLFGSFFMLQPPLATAVMAAQWKGVRAFAAVAIGFAACLVGASGPTYGSGGMH

SEQ ID NO: 18703 - protein, 297 aa, Zea mays
  VARIANT 84: note = Ancestral polymorphism is R, Derived polymorphism is W
  VARIANT 180: note = Ancestral polymorphism is R, Derived polymorphism is H
  VARIANT 207: note = Ancestral polymorphism is A, Derived polymorphism is V
  VARIANT 244: note = Ancestral polymorphism is T, Derived polymorphism is R
METTRVAPQALLSGLQRVSWPERRKGTVAPLRPARHQVHVQQVFNTYLGEARAALAAAAQDTDDVDAAAATLGLVTAALEMSPRAEAALELRARAPHAQTLPRQIRAAAENVLPGWGRGGERLSLLLRLRRRLLLSVTSQCGGRRAASTEPGTPPRGSRVVRLLRSAWARLPRATSIWRRKKQAPARVVPRDRRGQSPTPARPGFWAVAWTPTSAATLRFVAVVVAIAAVLAVALAIDAAFRVTDDLGNRRGGWDSKPIARWATFLELMEHPPLPWNYNYKWLPGAPKRGLEWIFSK

SEQ ID NO: 18704 - protein, 125 aa, Zea mays
  VARIANT 26: note = Ancestral polymorphism is R, Derived polymorphism is T
MSFAAGSSEDQLNSSPLAMDRRPARTRSDPPHSSRGAVHDAVAVEQKQHRRPQGTGAPPVYFTAELVLACLFVAVSLALLPLVLPPLSPPPSLLLLVPVGLLAVLLALAFVPLDAHSHLAVGSSR

SEQ ID NO: 18705 - protein, 528 aa, Zea mays
  VARIANT 434: note = Ancestral polymorphism is S, Derived polymorphism is L
MAPAVRLKRSSTQTITLPPPDARLAVRDVMRSTIPSRPAEAPASTERPAPAAALQGFLCLEEVDGRRWSYVVDGGSAKGRGSGGVAVPAGASVRAVPLQSPLPPAEVSSWVELWLPGRFGVKIRLNVSAAEIMSFIRSYVVPEGFPDSVTPSYVPYMNWRALKHFFGGAMGVFTTRTLLSSVGVSQSKVIPGAIAINWILKDGAGRVGKMLFARQGKKFDNDLKQLRFSSDLLLEIGAGIELTTAAFPQFFLPMACVANVVKNVAAVTSTSTRTPIYKAYARGENIGDVTAKGESVGNIADLLGTGLSIFISKRNPSLVTSFAFLSCGYLLSSYQEVRSVVLNTLNRARFTVAVDSFIKTGHIPSLKEGNSQETIFNPPWRHETVAIGSRFGEAFQEPASFLAIRPLFEDERYMVTYNPTKDKVYALLKDQAKSDDIIKAAFHAHVLLHFINASHARRLKLKQKQANPDQSEHLYSRNVDFLAHIAESCKIVSSSYGTFKKKAREQGWIMSESLLNPGKARLCAAKPQ

SEQ ID NO: 18706 - protein, 907 aa, Zea mays
  VARIANT 835..907: note = Derived polymorphism lacks residues 835 to 907
MFRTFTRLRDAAAPLAASAVRRCSGVSGRIRAEANCPRCDAHMSVQFSLQQLPAPPPASAGAIDGAQHHNHDGAGVCPACRGAFLFRAQRIDPLRGAFLEIPAGVAAGDEDAESGGFADRIKRMLSERPPDEFPPLPQSPPMQMPHYPIRRKPRRRPREEGGGGGGGGGGGNGNGNGGDSSSGGDGTSASPKREWWGGASLGDDLPTPRELCRRLDEFVIGQAKAKKVLSVAVYNHYKRIYNANVQKEFAGNSGFPDAGHDDQNIVEIDKSNVLLMGPTGSGKTLLAKTLARIVNVPFVIADATSLTQANFSFHAILLHHMLPAGYVGEDVESILQKLLVAAEYNVQAAQQGIVYIDEIDKITKKAESANVSRDVSGEGVQQALLKILEGTVVSIPEKGSRKNSRNDSIQIDTTDILFICGGAFVDLEKTISERRQDSSIGFGAPIRTNMRSSGASCPMVTSSLLESVESGDLVRYGLIPEFIGRLPILVSLAALNEGQLVQVLTEPKNSLSKQYRKMFNLNKVKLHFTDGALRLLAKKAIAKSTGARGLRAILETVLLEAMYEVPDEKTGNERVDAVVVDEEAIGSVDRPGCGAKILRGDGALDQYITRTNVMNLQVWYLMSRNTNTMISLGLGDQDHIYFLLIFIFVISLVELGLKWSFPFALITSAMECRKLTMVWPGSSRKRTCCLELLACNLKGWGGSALGRRAGRWMTMAGGGGLNRSSSRGQLPPQELLDDLCSRFLLNVPKEELESFERILFLLEQAHWFYEDNSVEHNPNLKSLSFKDFTSLMFKSCTALRPYIAHLDDIYKDFNNYKFRVPVSGAIILDDTYERCLLVKGWKAGASRSFPRGKRNKDEEDHTCAVREVNFCLYHVHACSLFSFLSAPYNFFEAYYTCSNEIYYEYIL

SEQ ID NO: 18707 - protein, 347 aa, Zea mays
  VARIANT 94: note = Ancestral polymorphism is P, Derived polymorphism is H
  VARIANT 148: note = Ancestral polymorphism is H, Derived polymorphism is Y
  VARIANT 177: note = Ancestral polymorphism is L, Derived polymorphism is P
MAACGGVNGWARARRMSRTDWGVNGGARARAGKSDASTPSGDASNETNQNQGEPKSSDTMYIPSNLSYWRDVRASFVIPKLCNKIFSALFLIDHNVLGYLQQIHYPQGRCRVHVPWCTGNREQTLDANSPVQTGQDGAAYRLPRKWAHSIPMPESGCVLVATEELDGNGTFERTVILLLRLGSRDAYDGPFGIILNRPLYTKMRHVNPSLGDQATPFVDCSLLFGGPVDMSIFLMSAGDGRPIKGFEEVVPGICFGFRTDLEKAGALIKKGAVKPEDLKFYVGYSAWDHDQLLSEIDAGYWVVTSCSTGLIADALTTTDPSCLWTEVLQLMGGQYSELSQKPKQDGM

SEQ ID NO: 18708 - protein, 402 aa, Zea mays
  VARIANT 168..402: note = Ancestral polymorphism lacks residues 168 to 402
MPLTRVAADAFGVLTIGLLALLAALGLFCIFQSVYFRCQIRRGPSFLPLGYFNGPWVTRVALVLITIWWGVGEVARLSFLKQKLFSSLTWQRNICDAYILSNLGFAEPGIFFAFAFLLHGSLQKKELGTLNQRWNWKSMAYTLVFCVPVFSVQAVLVFVVGPRLVRDSNHDLGRRKIAKYFVRTHTPVGDTSVCTYPLLGTIFLGLVDAFLMSYVSYVGSRALSLVINKSLRRRVYLLMLSVLCFLPTRVLLLGFSVLPRPGDAAFEGIVFLSFLTMLSCTAVGILLLVYYPVADSLALRDMGQRDTAAEMVPYDDYYCYEGASLVANRSFRELERNSDTSTKPGSISFRTMIREDQLQQDGAADEIGFSSRSGAHIGSPSPAGSSPSAAMPMLPVKEIPRY

SEQ ID NO: 18709 - protein, 242 aa, Zea mays
  VARIANT 51: note = Ancestral polymorphism is A, Derived polymorphism is G
  VARIANT 150: note = Ancestral polymorphism is R, Derived polymorphism is L
MDEDWELLLASPKAAPAEPYAGGGGDGEVDAGAIKHDYFDLGSDAKYPRRASPSKGSEEECAEEGPFAASDNAGWVEPDPDDLLFPGRDRAALWSHSSSDGERPEVEVEVEAADQVERAGVTAAADAGEGAVAKGGGPAQWWRLPLDVLRVWALRAARSVWSVPLAVALLGFAVLGRRLYRMRRQSKAVARVRLVLDEKKVSQFKGQGSRLNESMTVARRTPIIKPMLPANGVTPWPVLGHL

SEQ ID NO: 18710 - protein, 463 aa, Zea mays
  VARIANT 278: note = Ancestral polymorphism is S, Derived polymorphism is L
MRPRLPPNVPSLPSSLSLLANSLSSPVTNTPTRPDSFPAYLQLAHLMVSQERQEPAVPSSSSSSAKRAATSMDASPAPPLLLRAPTPSPSIDLPAGKDKADAAASKAGAAVFDLRREPKIPAPFLWPQEEARPSSAAELEVPMVDVGVLRNGDRAGLRRAAAQVAAACATHGFFQVCGHGVDAALGRAALDGASDFFRLPLAEKQRARRVPGTVSGYTSAHADRFAAKLPWKETLSFGYHDGAASPVVVDYFVGTLGQDFEPMGWVYQRYCEEMKELSLTIMELLELSLGVELRGYYREFFEDSRSIMRCNYYPPCPEPERTLGTGPHCDPTALTILLQDDVGGLEVLVDGEWRPVRPVPGAMVINIGDTFMALSNGRYKSCLHRAVVNQRRARRSLAFFLCPREDRVVRPPASAAPRRYPDFTWADLMRFTQRHYRADTRTLDAFTRWLSHGPAQAAAPPCT

SEQ ID NO: 18711 - protein, 647 aa, Zea mays
  VARIANT 6: note = Ancestral polymorphism is K, Derived polymorphism is E
MAAVWKWKHAVFLVLVTMMRPQAAEAGGAANATAACPLDLGYVATLPWDRAPCEPPVTNGTACCMTLLSVFAVGLASRLRATGRFRLPSARASAACLRAFSAALAAPPLSLPASLVPGCFPVQSQFAISPDYCAGVTTAAEYVAVAGNASAAGLNASCGADVTSMSLCNRCLAAGVDASARLTAAAGNESKSLNCFYLTVLYAAGISSSAGPESPVTARCALGLALSTPPPTSSPTSSSATHTTNIAVAATVPIASLLLVSLVALLVWRYRHELSKDRRSIQISEERRSRPRPNTGSVMFDICELAKATGGFAERNLIGRGGFGVVYRGVLVDGTVVAVKKMLEPDVEGGDEEFTNEVEIISHLRHRNLVPLRGCCIVDADADPDPDEGKQMFLVYDYMPKGSLDQYIFDDAQGRRRPALSWAQRRTVLLDVARGLEYLHYGVKPGIYHRDIKATNILLDADMRARVADFGLARRSREGQSHLTTRVAGTHGYLSPEYALYGQLTEKSDVYSFGVLVLEVMSGRRALDLSDPSGVVLITDWAWAHAKAGRPGDVLAQALRKEPSTSVAAMERYVLVGILCAHVTVAFRPTMPEALRMLEGDMDVPDLPDRPQPFGQRIAFDEGETNFSASSILSGGGPFVDFGDMLR

SEQ ID NO: 18712 - protein, 256 aa, Zea mays
  VARIANT 40..256: note = Derived polymorphism lacks residues 40 to 256
MAENEECKVLIDQQGSNDVADPHPPCEEEEDDDGDEDDSWSFIVVLNLVLGGTARLNVLLPTATILAFAIFAPLLTDDGKCSTRLNRILTAAFVALCAASCVFFTLTDSFRSASGRLRYGVATPAGIRTFCGGHRRRRKGPREPELYRLRWSDLFHSALALVAFVTFAASHHDMVLCYYPGVPRKVVNTVPLVVGFVVSLLFVLFPSRRRGIGYPFLLRTDLVYLRRAKLQRMAGRDKCVPEAVWSVAVVAPRHVA

SEQ ID NO: 18713 - protein, 346 aa, Zea mays
  VARIANT 227: note = Ancestral polymorphism is S, Derived polymorphism is N
  VARIANT 226: note = Ancestral polymorphism is G, Derived polymorphism is A
  VARIANT 209: note = Ancestral polymorphism is H, Derived polymorphism is Y
  VARIANT 43: note = Ancestral polymorphism is R, Derived polymorphism is L
  VARIANT 32: note = Ancestral polymorphism is L, Derived polymorphism is V
  VARIANT 22: note = Ancestral polymorphism is I, Derived polymorphism is T
MASADAGTCPWDALPLHLQERILSLLPITELLPVAAVSRAFHRLLRSPTFHALLSPHRLDAFFLLSPRLAVHPLSRRVRTMPAFAALSPPSYPLVSSPSPSLLITCASLQFLPPIPDGAYLLSAIVPSRGSSTSCTLVAVITGAAARSYTLDTGDPSPQWASRGDLPLSLTLLENAAVSGDRSKLFVLGRGPEALLVFHLVTGTWEVLHVVMPQGLTTAHLFLFDGSLFLVGGIESFGVVDRVVVWRLDDDKVEEVWWREVSVMPTEVFDELLAGRFGRFWHFQAADRLGIVCLYNAVDRRLVMFDAADGMWTVLPRLSALDACESFRWFGHVLEPGVEILMGLRW

SEQ ID NO: 18714 - protein, 380 aa, Zea mays
  VARIANT 294: note = Ancestral polymorphism is E, Derived polymorphism is D
  VARIANT 227: note = Ancestral polymorphism is H, Derived polymorphism is Y
  VARIANT 146: note = Ancestral polymorphism is W, Derived polymorphism is R
  VARIANT 138: note = Ancestral polymorphism is E, Derived polymorphism is A
  VARIANT 74: note = Ancestral polymorphism is E, Derived polymorphism is K
MQAHGIAIRARGPVAATQAPARRRQCRVSAAAVGAPAARARVTHSMPPEKAEVFRSLEGWAARSLLPLLKPVEECWQPADFLPDSSSEMFGHEVRELRARAAGLPDEYFVVLVGDMVTEEALPTYQTMINTLDGVRDETGASNCPWAVWTRAWTAEENRHGDILGKYMYLSGRVDMRMVEKTVQYLIGSGMDPGTENNPYLGFVYTSFQERATAVSHGNTARLARAHGDDVLARACGTIAADEKRHETAYGRIVEQLLQLDPEGAVLAVADMMRKRITMPAHLMHDGRDMDLFEHFAAVAQRLGVYTARDYADIVEFLVKRWKLETLESGLSGEGRRARDFVCGLAPRMRRAAERAEDRAKKDEPRMVKFSWIFDREAVV

SEQ ID NO: 18715 - protein, 428 aa, Zea mays
  VARIANT 373: note = Ancestral polymorphism is T, Derived polymorphism is I
MVSGSFSRSTSARLTSRGGVGSPRVSTPGAVHRNWWPPAPSGPSFDRVVLAFFLASVALVLSCALYLYVFRYLGRSRVVAEFAGENLESCDVFDGVWVPDQRHPLYNSSQCPFAERGFNCLANGRKDTEYLKWRWKPRGCDLPRFSARALLQWLRGKRVVFVGDSMSRTQWESFICMLMTGVDDPETVYEVNGNQISKTIQFLGVRFESFNLSVEFFRSVFLVQQIPALRHGRRRVRAILKLDKLDGLSQEWVNSDVLIFNSGHWWTASKLFDMGCYFEAGGVLKLGTSINAAFKMALETWASWVKERIDLRRTHVFFRTYEPSHWSGLNQKVCEVTQQPTAEANGNDRREFGDILAGVVANMSVPVTVLNVTLMGAFRSDAHIGLWSHPNTILDCSHWCLPGVPDAWNELVFSHLLTNGEFLIYILI

SEQ ID NO: 18716 - protein, 641 aa, Zea mays
  VARIANT 173..641: note = Derived polymorphism lacks residues 173 to 641
MGSLEARYRPAGAAEDTAKRRTQKSKSFKEVEKFDVFVLEKSSGCKFRSMQLLLFAIMSAAFLTILYTPSVYEHQLQSSSRLVNGWIWDKRSSDPRYVSSASIQWEDVYKSIQNLNVGEQKLSVGLLNFNRTEFDAWTHMLPESDFSIIRLEHANESITWQTLYPEWIDEEEETEIPSCPSLPDPSVPRATHFDVIAVKLPCSRVAGWSRDVARLHLQLSAAKLAATTARGNSGIHVLFVTDCFPIPNLFSCKDLVKREGNAWMYKPDVKALKEKLRLPVGSCELAVPLNAKARLYTVDRRREAYATILHSASEYVCGAITAAQSIRQAGSTRDLVILVDDTISDHHRKGLESAGWKVRIIQRIRNPKAERDAYNEWNYSKFRLWQLTDYDKVIFIDADLLILRNIDFLFALPEITATGNNATLFNSGVMVIEPSNCTFRLLMEHIDEITSYNGGDQGYLNEIFTWWHRIPKHMNFLKHFWEGDEEEVKAKKTRLFGANPPVLYVLHYLGRKPWLCFRDYDCNWNVEILREFASDVAHARWWKVHNRMPRKLQSYCLLRSSLKAGLEWERRQAEKANFTDGHWKRNVTDPRLKTCFEKFCFWESMLWHWGEKSKSNSTTTRNSAVPATTTTTPAAASLSSS

SEQ ID NO: 18717 - protein, 495 aa, Zea mays
  VARIANT 18..495: note = Derived polymorphism lacks residues 18 to 495
  VARIANT 46: note = Ancestral polymorphism is T, Derived polymorphism is M
  VARIANT 91..495: note = Derived polymorphism lacks residues 91 to 495
MADAAAAAARRLRAFKRWMRAHGVVCSDALSLDVSDPLGVHVRAATPLRDGDLVATIPRGACLTPRTTGAAAAIEAAELGGCLALTVAVMYERAQGADSPWDAYLQLLPDCESVPLVWPAGEAECLLAGTELDKIVKQDKEFLCEDWKECIEPLMLSGELDVDPDDFSLEKYLSAKTLVSSRSFQIDSYHGSGMVPLADLFNHKTDCEHVHFTSASDASDSDGEEEEDDRSDASADDKPTTKNPTSSPPGSRANDEDLEIIIVRDVNEGEEVYNTYGTMGNAALLHRYGFTELDNQYDIVNIDLALVTKWCTSIFSGRHTRARVSLWRNLGYSGCTSQDTEYFEIAYDGEPQLELSILLYIINMKPDVYDKLICVAHGFVSDEEHETICNVFKFVKATSSNQNSEVNGLEKLPDVKKLLHSESVCSALLSLADMRESLYGSNTLEDDEEELHACCVVNERKLYHSLVLRVSERRILRRLREFASSGSKGRKRKHP

SEQ ID NO: 18718 - protein, 130 aa, Zea mays
  VARIANT 39: note = Ancestral polymorphism is E, Derived polymorphism is D
  VARIANT 17: note = Ancestral polymorphism is V, Derived polymorphism is L
  VARIANT 13: note = Ancestral polymorphism is I, Derived polymorphism is V
  VARIANT 3: note = Ancestral polymorphism is T, Derived polymorphism is I
MGTSTKTLLVCLIPWLVYQLQPHRFSPVSAATTMAGKIDIFTVYQHDRLNETGYVVVTGDEGAPSSDTTRPFGSIYVFRDDLTLHNDSDSPVAGAGPVLRAGNRSGCTGPQNSRGPTPGKLQEYNLTADV

SEQ ID NO: 18719 - protein, 168 aa, Zea mays
  VARIANT 1: note = Ancestral polymorphism is V, Derived polymorphism is M
  VARIANT 37..168: note = Derived polymorphism lacks residues 37 to 168
  VARIANT 50: note = Ancestral polymorphism is V, Derived polymorphism is G
  VARIANT 136: note = Ancestral polymorphism is G, Derived polymorphism is D
MPITICMHHSVQQVGGVIQMQVCTLFNLLPIHIEIAQSTPGDGSAFRVRVCCIFGASQGYLANPSFREIFYVLPMNIVIETLLNSHLILQMQASTPHPNTDLYEALILHSDWVIQIITGINGTARWHKVGHVLTFGIIDIERTSMFHFPHSLLCEKVYNFLSEMCLSP

SEQ ID NO: 18720 - protein, 423 aa, Zea mays
  VARIANT 230: note = Ancestral polymorphism is T, Derived polymorphism is I
  VARIANT 204: note = Ancestral polymorphism is A, Derived polymorphism is T
MLQLLRAMMALTERQPQLEKKPTRGRAPLSGKAVAALCVTSFVVGLLLSGNVSLMSASASPSSSSTDSEKSIRVSGCDNERKLGENHPKDLLNEVSRTHQAIQSLDKAVSTLEMEMAVERARGGGGGGGAASMASSRTPQKAFVVVGINTAFTSKKRRDSLRDTWVPRGDKLRKLEREKGIVVRFVIGHSGTPGGGALDRALDAEEAETRDFMRLDHAEGYHELSSKTRTYFTTAVATWDADFYVKVDDDIHLNLGMLASRLAKHRTRPRVYVGCMKSGPVLSQKGVKYHEPEYWKFGDEGNKYFRHATGQIYAISKDLAAYISINQLCFRTHIHNATPILHRFANEDVSLGAWLIGLEVEHVDDRSMCCATPPDCEWKKRAGNVCVASFDWSCSGVCKSVDRMRHIHKACGEGEGAVWNAAT

SEQ ID NO: 18721 - protein, 106 aa, Zea mays
  VARIANT 32: note = Ancestral polymorphism is G, Derived polymorphism is D
MYNSNIIKAQDVICMLTSQKNLLSTRKREKVGPDVAWKFFGHTQWLVNYCLLQNGLSIGNGDTIVDVSTMENIKDIISGAKNVVKELTKKAHEKKVDAEPGRTVME

SEQ ID NO: 18722 - protein, 183 aa, Zea mays
  VARIANT 62..183: note = Derived polymorphism lacks residues 62 to 183
  VARIANT 111: note = Ancestral polymorphism is R, Derived polymorphism is L
MALGALARLLRLAPTPRLARPFAAKVRASRPQEPELPSEDDNDFAGGELTAPTEGIGKPLAEVLKELGKRVPDSLVKTRVENNGFAIKYIPWHIVNKILNIHAPEWSGEVRSIVYSFDGKTVSVVYRVTLHGIDAEIYREATGTASVDDTSYGDPIQKAEAMAFRRACARLGLGLHLYHEDMS

SEQ ID NO: 18723 - protein, 340 aa, Zea mays
  VARIANT 176: note = Ancestral polymorphism is P, Derived polymorphism is T
  VARIANT 143: note = Ancestral polymorphism is P, Derived polymorphism is S
MSPPSVMGQFGDTTYTKVFVGGLAWETQKETMRKYFEQFGEILEAVVITDKNTGRSKGYGFVTFRDSDAAMRACVDPAPVIDGRRANCNLASLGVQRSRPPTPQHGGARNFKVMKSFSQQAGIQGGLGAAFPSHATFPHYAIPQGLPYHIYGYSPYTLDYGYPTNFYNIYGGPQYTFYGGGAGMVTGTSPFYPYFQFGQSGNTTTNYTSGQGYNLQYPQMFHFSTVSSTAAAVNGFAQQYGGPLSLAASPQAQAGMTMALAAPTMVSLLVIAVLSRFQLVESMHPSLTPKGTIVDHVYQPKCSHPYPTWSCGNWILALAPGWAQSFMPRGWGVLTDKYKP

SEQ ID NO: 18724 - protein, 466 aa, Zea mays
  VARIANT 221..466: note = Derived polymorphism lacks residues 221 to 466
  VARIANT 157..466: note = Derived polymorphism lacks residues 157 to 466
  VARIANT 51: note = Ancestral polymorphism is A, Derived polymorphism is S
MARDPARTVFIGNLDEKVSERILYEILIQAGHVVDLHVPSDKESNSLKGYAFVEYETEEIAQYAVKLFSGLVRISGKTLKFMIAGYDKPSSNVNTSVMLNPVPSSNGNNPVTPKLNPIPLPKQTQIMCCSDMPVSRTLAYQVVNGRIGGYVFSLTPYPYGFQALSGGQVHGHGQVSNRTYDYNRQEFGSVLSIVHGATHARTRAPARLSVHDLAPIRAKNSPPSCVPMEVEADGIQEATAGAGDGGGVDDVFFCVAATSRGNKNSISYFHTNAVGEDAESALALAALCLDHAPDHHRWHHHTVAGAKTFAFLSADDGRTYFAAADPSPGAAEVVRFLERVRDACDAAPRKRLRDEAVAPVARQFARTLRAAAAGPSSGAELPEASLQAKEPSTPLAPVCEKDEEERQRAGERRRAFLQPEESASALPGWRPWWRHASVVIVVDVVLCLVLFAVWMGVCKGFGCLTR

SEQ ID NO: 18725 - protein, 347 aa, Zea mays
  VARIANT 47: note = Ancestral polymorphism is L, Derived polymorphism is R
  VARIANT 48: note = Ancestral polymorphism is I, Derived polymorphism is S
MDGEMDEDVLTEILARLPCRSLARFQCVSTSWRRIISSDYLRRRLPLITSGVLYHDGGRRQQSYTYACASGGGGGGGAMAEAADMRFFPRHETSTIIDGCNGLLLYYASRPAAFHVVSPTTRRWAELPAPRAMTLLSVLAFDPRASPRYRVVCFTGWLPRGATVEVFDSERGAWRGHELDFGLGTDAMSASMHYAAGALHVLAYSGHVVRVDLDTMACAVTPLPAPVSCRARAGHCRGRLRFASSDGQRLRIWELQDAAAGEWALKHEIGVSDVVPGDAASQPITFLFMAFHPDRELVYLWSPWKLLAFDLVERRVQEWVFGSEKEGTHLIQVWLFPFSRHLANALA

SEQ ID NO: 18726 - protein, 316 aa, Zea mays
  VARIANT 293: note = Ancestral polymorphism is E, Derived polymorphism is V
  VARIANT 152: note = Ancestral polymorphism is C, Derived polymorphism is W
  VARIANT 53: note = Ancestral polymorphism is A, Derived polymorphism is T
MGNPPELYHKILNIPKDTSPQELRAAYKSLVKKWHPDKHPPSSRPEAEARFKAISEAYEALLDQQENRAVFGPCNGDRAGGGAGARVERTRSDGFCARSAPGTPARELKKVYSAGNPGGRRAFAEFSSSIVRKAPPLERRLECTLEELCRGCSKEVTFTRDVVTRNGSIVKKEVTQTVQVKPGWRKGKQVVLEGMGDERPGCLPGDAVLTVSERRHPAFKRVGDDLVLRAEVPLAGALTGWSLSFRLLGGRKVTCSFEDEVIRPGHERVIRGEGMPVPGRKDGARGDLRVKLEVVFPTELSDEQRAGLAEILRGSC

SEQ ID NO: 18727 - protein, 348 aa, Zea mays
  VARIANT 283: note = Ancestral polymorphism is N, Derived polymorphism is K
MAASSSAGPSAVDAASLAAVAEAAPPEEMTLVVKWRGQEQTVRMVGDDTLGELKLRICEVTGVLPKRQTLLYPKLILKDMDDSTLLSSIPFKPNGKISMIGTIEEEIFVGQEDDPELLDDFDFEQNEATPIKDKDVYKQKLKRRASRYKIKLLNPCRKGKKLLVLDIDYTLFDHKSTAENPMELMRPYLHQFLTAAYAKYDIMIWSATSMKWVELKMEQLGVLSNPDFKITALMDHLAMITVQSENQSRKKTFDCKPLGVIWAQFPEYYNEKNTIMFDDLRRNFVMNPQNGLVIKPFRKAHSNRHDDHELVKLTHYLLSIGDLEDLSKLDHGKWESFVDESVKRRKRS

SEQ ID NO: 18728 - protein, 238 aa, Zea mays
  VARIANT 205: note = Ancestral polymorphism is D, Derived polymorphism is E
  VARIANT 181: note = Ancestral polymorphism is P, Derived polymorphism is L
  VARIANT 160: note = Ancestral polymorphism is G, Derived polymorphism is D
  VARIANT 100: note = Ancestral polymorphism is V, Derived polymorphism is I
  VARIANT 92: note = Ancestral polymorphism is A, Derived polymorphism is T
  VARIANT 88: note = Ancestral polymorphism is G, Derived polymorphism is S
  VARIANT 71: note = Ancestral polymorphism is A, Derived polymorphism is T
  VARIANT 27: note = Ancestral polymorphism is Q, Derived polymorphism is K
  VARIANT 23: note = Ancestral polymorphism is V, Derived polymorphism is L
  VARIANT 21: note = Ancestral polymorphism is E, Derived polymorphism is A
  VARIANT 16: note = Ancestral polymorphism is S, Derived polymorphism is N
  VARIANT 15: note = Ancestral polymorphism is A, Derived polymorphism is V
  VARIANT 14: note = Ancestral polymorphism is S, Derived polymorphism is R
MASSAEERFLRQLSASNGGDEGVCGGQQLGHKEYCAERRGSRRWSRKRAAAARGYCGGYDDYDVKQQAEAASAAARKRVIVVVDDTSGSKHAMMWALTHVASKGDFLTLLHVLLPHSASGGGCSRGEEASSLANSLGTLCKASRPEVEVEALVIQGPKLGTVLSQVKKLEASVLVLGQGRPSPCYRWLSCFLRSSSEEFVEQCIDQAECLTLAVRKQSKAVGGYLVSTRWQKNFWLLA

SEQ ID NO: 18729 - protein, 321 aa, Zea mays
  VARIANT 32: note = Ancestral polymorphism is A, Derived polymorphism is S
  VARIANT 192: note = Ancestral polymorphism is G, Derived polymorphism is C
  VARIANT 205: note = Ancestral polymorphism is V, Derived polymorphism is E
MNAFFTSLARGLDELGRAGGLSSLPALLRAASLLRGLHSQLTLMVGQLHLPPGGRWLDEYMDETARLWDACLAVKLGLASVERYCAAASCAAAALDDWLQDPSPLSSSQVMRAISVSRREAMAAEEENRALADARIAPLSLQLDERLLLRATDARLTGFNGFRGLLHALHNASSLLLLILASGAVSCAAAAGGPCGADDAGAGFVASIVMLQQRMAEEAADAESDGPGAPGIGMCEFRCARAAVEAAREEVERAAAAAAAAAAAAAGRKCEGGGVVKDKVEELKAWLDVLRTGTHSLVCQLDDFLDDIVEGRKELSDLCSH

SEQ ID NO: 18730 - protein, 204 aa, Zea mays
  VARIANT 14: note = Ancestral polymorphism is T, Derived polymorphism is A
  VARIANT 27: note = Ancestral polymorphism is T, Derived polymorphism is I
  VARIANT 28: note = Ancestral polymorphism is R, Derived polymorphism is C
  VARIANT 40: note = Ancestral polymorphism is R, Derived polymorphism is H
  VARIANT 63: note = Ancestral polymorphism is V, Derived polymorphism is A
  VARIANT 66: note = Ancestral polymorphism is D, Derived polymorphism is H
  VARIANT 74: note = Ancestral polymorphism is V, Derived polymorphism is L
  VARIANT 89: note = Ancestral polymorphism is V, Derived polymorphism is F
  VARIANT 144: note = Ancestral polymorphism is S, Derived polymorphism is C
  VARIANT 145: note = Ancestral polymorphism is L, Derived polymorphism is S
  VARIANT 160: note = Ancestral polymorphism is F, Derived polymorphism is L
  VARIANT 165: note = Ancestral polymorphism is I, Derived polymorphism is T
  VARIANT 177..204: note = Derived polymorphism lacks residues 177 to 204
  VARIANT 184: note = Ancestral polymorphism is S, Derived polymorphism is N
  VARIANT 185: note = Ancestral polymorphism is T, Derived polymorphism is A
  VARIANT 186: note = Ancestral polymorphism is W, Derived polymorphism is R
  VARIANT 189: note = Ancestral polymorphism is D, Derived polymorphism is Y
  VARIANT 191: note = Ancestral polymorphism is V, Derived polymorphism is A
MERTSTGGGCCLSTRRIGLAALALALTRASSTFSANAMSRAATQLFSAQIIECQFWKRQIQVVRVHGYEADDVVATLTEQVLQKGYRVVIASPDKEFKQLISDDVQLVMPIPKIGRWSFYTLRHYVAQYKCDPTADLSLSEYISSVLIHGFCNHWDSVIFEQLAIYAAQGASWVMKQMVFQESSTWFWDLAERLHLNYCKNMVH

SEQ ID NO: 18731 - protein, 345 aa, Zea mays
  VARIANT 115: note = Ancestral polymorphism is G, Derived polymorphism is V
  VARIANT 69: note = Ancestral polymorphism is G, Derived polymorphism is C
  VARIANT 26: note = Ancestral polymorphism is S, Derived polymorphism is C
  VARIANT 25: note = Ancestral polymorphism is A, Derived polymorphism is V
  VARIANT 4: note = Ancestral polymorphism is R, Derived polymorphism is W
  VARIANT 2: note = Ancestral polymorphism is G, Derived polymorphism is W
MGRRFNLTMSLLAVVVLVLLAAPCASAAQVKTTDTRWSFQLPLPSGVSGAESLAFDGKGEGPYAGVSDGRVLKWGGSAVGWTTFAHSANYRKIPLCTAGVVPSAETESMCGRPLGLQFHAKTGDLYIADAYLGLTRVGPGGGEAEVLATGADDGVPFNFVNGLDVDEATGDVYFTDSSATYPRRFNTEIMMNADTTGRLLRYDARTRSVSVLKAGLPYPNGVAVSPDGEQVVVAHTVPCQAFRYFLRGARKGQYELLADLPGYPDNVRRDGRGGYWVALNQEKQRLDATPATGPVKHLVGVRLDAHGVVVEELTAAKGVTLSDVAETKGKLWLGSIELEYVGLVA

SEQ ID NO: 18732 - protein, 145 aa, Zea mays
  VARIANT 59..145: note = Derived polymorphism lacks residues 59 to 145
  VARIANT 61: note = Ancestral polymorphism is L, Derived polymorphism is S
  VARIANT 64: note = Ancestral polymorphism is G, Derived polymorphism is V
MSDDVQYVFDIAIPYFWVVLRHCFYTLRQYVAQYKCDPTADLSLRCFMGDEADGVPGIQHLVLGFGRKTALKLLQKHGSLENLLNTAAIRTVGKGYAQDALTKHADYLRDVNVQFDDSWLSTRNTSNDTYVLADFILKLNGEGRS

SEQ ID NO: 18733 - protein, 345 aa, Zea mays
  VARIANT 94: note = Ancestral polymorphism is P, Derived polymorphism is A
  VARIANT 25: note = Ancestral polymorphism is A, Derived polymorphism is V
  VARIANT 4: note = Ancestral polymorphism is R, Derived polymorphism is W
MGRRFNLTMSLLAVVVLALLAAPCACAAQVKTTDTRWSFQLPLPSGVSGAESLAFDGKGEGPYAGVSDGRVLKWGGSAVGWTTFAHSANYRKIPLCTAGVVPSAETESMCGRPLGLQFHAKTGDLYIADAYLGLTRVGPGGGEAEVLATGADDGVPFNFVNGLDVDEATGDVYFTDSSATYPRRFNTEIMMNADATGRLLRYDARTRSVSVLKAGLPYPNGVAVSPDGEQVVVAHTVPCQAFRYFLRGARKGQYELLADLPGYPDNVRRDGRGGYWVALNQEKQRLDATPATGPVKHLVGVRLDAHGVEVEELSAAKGVTLSDVAETKGKLWLGSIELEYVGLVA

SEQ ID NO: 18734 - protein, 160 aa, Zea mays
  VARIANT 3: note = Ancestral polymorphism is H, Derived polymorphism is R
  VARIANT 45..160: note = Derived polymorphism lacks residues 45 to 160
MNHVGKGNVDRWLHMLMDNQQEDHAAYHSSDEHDNDEENASDEQRTQSRVDEESCRNGITEYFDEIVEVEDEIVSDQGAERGRNSFGIKDREEKKIWFHRTDSTWGFRSLPSSPSMILGMRKGVERMAVDDDRKYGYEDSVSRSSTKFPRPAACAAAPRR

SEQ ID NO: 18735 - protein, 556 aa, Zea mays
  VARIANT 429: note = Ancestral polymorphism is P, Derived polymorphism is Q
MAEETQPEAAAEAEVVVTEPAPAPAEAEVPAAADAEAVTETEKKADEPAVTADDAGKGTGSFKEESNLVEDLPDPEKKVLDEFKHLIAAALAAGEFNLPPPPPPPKAKEEPKAEETKTEESKTEDPAEEEPKAESAAEEPKAEVAANAPDEEVKTEVPPVEEAKAETVAVEAKPAEPEPQEKTVVVAEEEPATKTVEAIEESVVSADEAAAPEPVLVWGVPLVGDDERTDTVLLKFLRAREFKVKEAMAMLKSAVLWRKRFGITSLLDADLGLPELENVVFYRGADREGHPVCYNVYGEFQDKDLYEKAFGDDEKRERFLKWRIQLLERGILSKLDFSPNGICSMVQVTDLKNSPPMLGKHRAVTRQAVTLLQDNYPEFIAKKVFINVPWWYLAANKMMSPFFTQRTKSKFVFASPAKSAETLFRYIAPEQVPVQFGGLFKEDDPEFTTLDTVTELTIKPSSKETIEIPVTENSAIVWELRVLGWEVSYSAEFTPDTEGGYTVIIQKTRKVPANEEPIMKGSFKVGEPGKLVLTVNNPASKKKKLLYRSKVKSISE

SEQ ID NO: 18736 - protein, 251 aa, Zea mays
  VARIANT 120: note = Ancestral polymorphism is G, Derived polymorphism is S
  VARIANT 27: note = Ancestral polymorphism is A, Derived polymorphism is T
MGRSPCCEKAHTNKGAWTKEEDQRLIAYIKAHGEGCWRSLPKAAGLLRCGKSCRLRWMNYLRPDLKRGNFTDDDDEVIIKLHALLGNKWSLIAGQLPGRTDNEIKNYWNTHIKRKLLTRGIDPQTHRPLSAAAALTAGLPSPARPPTVLFARPAPSEDGGHSSGGGSADHAPRCPDLNLDLSVGPPCSPPKTPAAAASTPTSQQQQQQRTTTICLCYHLGVRSGEACSCKSPSPAAAGFRFLRPLEEGQYI

SEQ ID NO: 18737 - protein, 667 aa, Zea mays
  VARIANT 392..667: note = Derived polymorphism lacks residues 392 to 667
MGGFCSKESAVDKSPSDTTLGPGRVVDHHDRLVVKEEKKAVVGEAAAKRIQEEQHQQQRQPAPPPLHVSVSRTAVPGASADTTAAPWDGVPPLARLPSLKSGMGVANKASFQYLLCCIIAESIVSEVSSILGRASTAGLGKAVEVLDTLGSSMTDLNISSFGSGTATKGNKISILAFEVANTIVKGCNLMHALSKDSIKYLKETVLHSEGVQNLISKDMDELLKIVAADKRLASELTPQHQLKEEAESVMQEFVTSVQFTAELYHEMHALDRFQQDYQRKQHEEDGSSVVQRGDNMHILKQEVKSQHKHVKSLRKKSLWSKNLEEVGVQLFLTDQGSSYLLASYKRGDSSNKGSRNYEVMGKLVDIVHFLHLEIHNAFGLSDSEESQEPTKRRNRLGSAGLALHYANIISQIDTLVSRASSVPSNTRDTLYQSLPPTIKSSLRSKLHSFGVKEELTVSQIKAEMEKTLRWLAPIASNTTKAHHGFGWVGEWASTGLDVNCKPTGQLDLTRIETLYHADKDKTEAYILELVIRLHHLISQTKTANGERSPIKSPVQSPTQRGASITLSPNIKNSNSSPLLTQDDQDMLSDVKYRTFIPGISKSQEFDTKERHNNQSRLSKSNSHSPSSGNRKEALSISIRRLLPVIDFEIDRTKALDVIDRVDDLRVQ

SEQ ID NO: 18738 - protein, 674 aa, Zea mays
  VARIANT 36: note = Ancestral polymorphism is A, Derived polymorphism is G
MDPDQVADAGVQHDDLGGSATSANGCFDGGSDDGWGRALLRLGWDLSRKAVIAGVAATAAPVVAPPLLVLSLAGLALSLPFAAYLASLAATDRLMGALLPAPRTTQPYCGCDLEDDEFLDPSEAPGAEATALDHWRDTEDDAIMEENESFVPLPLSRQPRFSEEPITSSSTDVEDKMAEGESLSRGLGHESLVLDNKEGTIMEDTEYITMEAPPRGSDVFGSAVPVLRGEDDMVQRAVEAPLTAKESVQELSVSDSEDRTQDDKCKDAESSKEILSLSVDITESSDFPVPGNEGIVVQRGNGETISVRKSGQDSHSTEIGDEMEGHKTEEEIPLHDANVSESSVLDDTVLEERKIEGDVTVGMAVKEVTIYTDPCTGEVAGDQVDSIAIALPAESELMQASNVDDVINAALTEGIVLDIGDTSTEGTEHYGEGGVSTAVSVVTVDDVAETVSSRSPAVSVIGDDMTSVKSRPDADSSDQTTGYDALRSKEFREKEVIEDKCVKTEESKTVPTESTSPPRIIQVSRSPAPDGQSRVEDEAAVGSVLEGAANNTDDLATPRAVVVALQSSISAGESEPPSASDRVEYKPANEGFRRNAIAEDTDNYTEEQMREQLDALRTITGYRPTPSLTLEAELVGLYVFVGVEPPVGSGSREDSDLSDLSAKLRLLKSIIGVE

SEQ ID NO: 18739 - protein, 536 aa, Zea mays
  VARIANT 461..536: note = Derived polymorphism lacks residues 461 to 536
MCHRTSKGPLPRAVQCQQAMVDTVAGATDYRGQPASRAATGGWKPSVFVMAMEIAERFAYKGVAANLITYLTGPLGQPMARAAASIDAWKGVSQMLPLPLACVADAWLGRYRAIVLASLIFAVSMGALSLSSALPALRGGHVAIFYVALYLVALGEGAHKPCAQAFAADQFDEKDPRESVARSSFFNWWYFGMCAGTAVTTMVSSYVQDNVGWGLGFGIPCIVIVASLALFLLGTRSYRFYTTAAASPFSRVGKALLALVQSWAPKHRTRKLGDSDGDAVAVEEVKSVLRLLPIWASCIIYAIIFSQTSTFFTKQAATLDRRIGARFKVPAAALQTFISVSIVVFIPVYDRLFVPLARRYTGRPTGITMLQRVGAGLALALVAVALSALVEMKRLRVAAEAGLVNTPKAQLPMALWWMVPQYVLIGVADVFAMIGLQEFFYDQVPNAVRSLGLALFLSIFGIGHLLSSFLISVIDKTTAKSGTSWFSNNLNRAHLDYFYWLLTGLCAVELVAFVIFSRVYVYKRKVGNDGGNGDFV

SEQ ID NO: 18740 - protein, 519 aa, Zea mays
  VARIANT 141: note = Ancestral polymorphism is S, Derived polymorphism is C
MEGRMTSLEATMKVSSSMASSISRNADPDQQTLRPNSVEQFYFPRPGQSLPGIPPFFGPPSSSLYLPNDNEAKFGNQFESNPSQNTDWDPQAIVSNLTFLEQKIKQVKDIVQSMSNRENQLAGGSSELAAKQHLVTADLTSIIIQLISTAGSLLPSMKNPLLSSNPAVRQLGNTLGSPMGLGMNANQRPSVDSKTDIPDTGKTSDYDELMNSLNPAQDERDEMIKCPNPCGGEGSEPTPMEDHDVKESDDGGEGENLPPGSYVVLQLEKEEILAPHTHFCLICGKGFKRDANLRMHMRGHGDEYKTPAALAKPTKDSGADHAPVTRYSCPFVGCKRNKEHKKFQPLKTILCVKNHYKRSHCDKSYTCSRCNTKKFSVIADLKTHEKHCGRDKWLCSCGTTFSRKDKLFGHVALFQGHTPALPMEDVKVSEASEQPQDSEPMNEMARSNMYSFPCSSSDGISNLDMKMADDVRGYFSPLNFDPCFGALDDFTRPGFDISENPFSFLPSGSCSYGQQNGDS

SEQ ID NO: 18741 - protein, 88 aa, Zea mays
  VARIANT 73: note = Ancestral polymorphism is A, Derived polymorphism is T
MSFRKTVSPMWAMALLSLYVRVHVTMLGSHLYLDFAQCTNGAHLQAESDAFDGNGHKTLVAMDDYLVTDKITAFIVQMQHAATEVLKE

SEQ ID NO: 18742 - protein, 376 aa, Zea mays
  VARIANT 192: note = Ancestral polymorphism is M, Derived polymorphism is I
MDKYEAVRDIGSGNFGVARLMRNSETRELVAVKCIERGYRIDENVYREIINHRSLRHPNIIRFKEVILTPTHLMIVMEFAAGGELFDQICDRGRFSEDEARYFFQQLICGVSYCHYMQICHRDLKLENVLLDGSPAPRLKICDFGYSKSSVLHSRPKSAVGTPAYIAPEVLSRHEYDGKVSLSPIDSFMNYMFFFVSGYSLADVWSCGVTLYVMLVGAYPFEDPDDPKNIRKTIQQIMQVQYKIPDYVHISTECQQLIARIFVANPVRRITMKEIKSHPWFLKNLPRELTETAQGMYYRRDNKVPSYSDQTSEEIMKIVRDARTMPKSSRSGYGWSAEYSDEEEKEEEHRLEEDEYDRRVKEVHASGELRMDTLHI

SEQ ID NO: 18743 - protein, 332 aa, Zea mays
  VARIANT 216..332: note = Derived polymorphism lacks residues 216 to 332
  VARIANT 41: note = Ancestral polymorphism is T, Derived polymorphism is I
MRAAAPASFSSFSAMRAAAPFPATWLQRDAIERAIRAPLGTVLRDHALVHLPPAAAARLRLVHPSWARALASPLFTVAHAATPCRASGFFSASASFLPLDAADIVSSPALAFLPASSPPAVLSSSHGLACCFSPADDAYFVCNPATGAWHGVPCPPCQITWPRPAVVVLFDAGVYTFHGDYTLVCAFESAPGEEEDHDDETETVRESSTNVKPDVEESEMLLEAYFVQIDGTLNKLFNFQEYVDDTEDYINIMLDEKQNQLLQMGRPANDGDRGGHCRHRCRELVRHEHPETDEEARIRNLNFWETTFGTVFGCLAMYLLAIYAGKRSQILH

SEQ ID NO: 18744 - protein, 417 aa, Zea mays
  VARIANT 40: note = Ancestral polymorphism is P, Derived polymorphism is L
  VARIANT 68: note = Ancestral polymorphism is P, Derived polymorphism is L
  VARIANT 124..417: note = Derived polymorphism lacks residues 124 to 417
  VARIANT 129: note = Ancestral polymorphism is C, Derived polymorphism is Y
  VARIANT 130: note = Ancestral polymorphism is A, Derived polymorphism is V
  VARIANT 132: note = Ancestral polymorphism is A, Derived polymorphism is V
  VARIANT 138: note = Ancestral polymorphism is A, Derived polymorphism is S
  VARIANT 170: note = Ancestral polymorphism is D, Derived polymorphism is Y
  VARIANT 179: note = Ancestral polymorphism is P, Derived polymorphism is L
  VARIANT 182..417: note = Derived polymorphism lacks residues 182 to 417
  VARIANT 189: note = Ancestral polymorphism is H, Derived polymorphism is Y
  VARIANT 218..417: note = Derived polymorphism lacks residues 218 to 417
  VARIANT 248: note = Ancestral polymorphism is G, Derived polymorphism is E
  VARIANT 254: note = Ancestral polymorphism is T, Derived polymorphism is I
  VARIANT 255: note = Ancestral polymorphism is A, Derived polymorphism is V
  VARIANT 275: note = Ancestral polymorphism is Q, Derived polymorphism is H
  VARIANT 277: note = Ancestral polymorphism is S, Derived polymorphism is C
  VARIANT 294..417: note = Derived polymorphism lacks residues 294 to 417
  VARIANT 326: note = Ancestral polymorphism is P, Derived polymorphism is R
MILRIRSRDGTDRITVPDSASVTVADLQRLIESHLTVPVPLQRLSLDPALLLPNPSAVVPLLTDSAAPLASLRLANGAFVYLAYPPDARSARPPPPKALSAAGSFGKKMTMDDLIARQIRVTRQENALCAAASFDRDAANAFQLYVAEFLGFGVKRAGFLYGRVDAETKDVFVDFIYEPPQQGSEDVVHLLRDPDEEARVDTIAEGLGMRRVGLVFTQAVGRKASETGEYTMSNREVVQAAQLQAEGGIPEWVTAIVKLEVGDDGTGDVHFEAFQMSEICVKLFKDGVLETEVQDADDPRLSKMRKEVVAGGKDTMEVDNDFFLVPVKISDHQGPLSVGFPIENRGNPVSISALRSHLERMKHLAFVKRISDFHLLLKLATFLDVKADMPTIAACVKTQSRVPEGYQLLIESFASQG

SEQ ID NO: 18745 - protein, 359 aa, Zea mays
  VARIANT 190..359: note = Derived polymorphism lacks residues 190 to 359
MSHNHGDTIPLHPSSAQSDMDEIESLIHAAPSPATVLPARPPSPTRASIPVSSSPALAPAPVPTKPPLPAASIPISVSVSPVLTSVSVPIGADGFGPPPNTLTEPVWDTVKRDLARIVSNLKLVVFPNPYREDPGKALRDWDLWGPFFFIVFLGLTLSWSASVKKGVIGGKKVTQTTRGGRCQLAFRRWRELDDSFDDTNRRFVCRIQEPEVKEALKKMKEVSHTRRDLVCNDDIHDRLRVAPIEEKLSEVFAVAFAVLAAGAIILTLNVLLLGGHIIFFQSLSLLGYCLFPLDVGALLCMLKDNVILKIVVVTITLAWSSWAAYPFMSAAVNPRRKALALYPVFLMYISVGFLIIAID

SEQ ID NO: 18746 - protein, 453 aa, Zea mays
  VARIANT 306..453: note = Derived polymorphism lacks residues 306 to 453
MVVEMKENGGAALAAGEKAPQLGVKRGEPTLVPPAEATPTGGQYYLSNLDQNIAVIVQTVYCYKPSSPGGGEGKEDVDVAGALRDALARVLVHYHPLAGRLGVSPEMKLTVELTGEGAVFVEADAACDLDAVGDLTKPDPAALGQLVYSVPGAKHILEMPPMTAQVTRFKCGGFALGLAMNHCMFDGIGAMEFVNSWAETARGVAELTVPPFLDRSVLKARDPPVPTFPHHEFAEIPDVSDTAALYGAQELLYRSFCFDPDRLERVRGLALADGALGRCTTFEALSGLVWRARTRALGLAPEQRTKLLFAVDGRRRFAPPLPRGYFGNGIVLTNALATAGELLSAPVSRAAGLVQDAVRMVTDDYMRSAVDYFEATRARPSLASTLLITTWSRLEFHGADFGWGEPVMSGPVTLPEKEVILFLAHGKERKSINVLLGLPATAMDAFQELMDEI

SEQ ID NO: 18747 - protein, 156 aa, Zea mays
  VARIANT 2: note = Ancestral polymorphism is R, Derived polymorphism is C
  VARIANT 13: note = Ancestral polymorphism is S, Derived polymorphism is F
  VARIANT 30: note = Ancestral polymorphism is S, Derived polymorphism is L
  VARIANT 31: note = Ancestral polymorphism is I, Derived polymorphism is N
  VARIANT 34: note = Ancestral polymorphism is R, Derived polymorphism is H
  VARIANT 38: note = Ancestral polymorphism is S, Derived polymorphism is L
  VARIANT 42: note = Ancestral polymorphism is Q, Derived polymorphism is H
  VARIANT 47: note = Ancestral polymorphism is A, Derived polymorphism is V
  VARIANT 51: note = Ancestral polymorphism is N, Derived polymorphism is T
  VARIANT 53: note = Ancestral polymorphism is L, Derived polymorphism is P
  VARIANT 56: note = Ancestral polymorphism is C, Derived polymorphism is Y
  VARIANT 66: note = Ancestral polymorphism is A, Derived polymorphism is V
  VARIANT 78: note = Ancestral polymorphism is W, Derived polymorphism is C
  VARIANT 80: note = Ancestral polymorphism is L, Derived polymorphism is F
  VARIANT 100: note = Ancestral polymorphism is L, Derived polymorphism is R
  VARIANT 113: note = Ancestral polymorphism is K, Derived polymorphism is N
MRDSVSWSRTLSFSATFISHLFWNGHPLSSISSRFLASFFKQACELAPIFNELVDCVSLDGESLQAALSRQVLNSIHWILVVPMWDLSFYNFIHEFTARLLDIHDKMMLIKNKEDIRLILHRSYYMLDSETNSLLQIENSRSYCFATNAATFCCSI

SEQ ID NO: 18748 - protein, 210 aa, Zea mays
  VARIANT 98: note = Ancestral polymorphism is P, Derived polymorphism is L
  VARIANT 90: note = Ancestral polymorphism is V, Derived polymorphism is I
  VARIANT 88: note = Ancestral polymorphism is C, Derived polymorphism is Y
  VARIANT 78: note = Ancestral polymorphism is K, Derived polymorphism is T
  VARIANT 67: note = Ancestral polymorphism is G, Derived polymorphism is S
  VARIANT 65..210: note = Derived polymorphism lacks residues 65 to 210
  VARIANT 51: note = Ancestral polymorphism is E, Derived polymorphism is G
  VARIANT 45..210: note = Derived polymorphism lacks residues 45 to 210
  VARIANT 42: note = Ancestral polymorphism is G, Derived polymorphism is S
  VARIANT 41: note = Ancestral polymorphism is F, Derived polymorphism is V
  VARIANT 33: note = Ancestral polymorphism is A, Derived polymorphism is V
MKITALLVLKPSTSGAGSSSSGGESGPEAVVLANAIDVSHFGYFQRSAAREFIVFVARTVAQRTQPGQRQSVQHEEYKVHSHNRNGLCAVAFMDDHYPVRSAFSLLNQVLDEYQKAYGDSWKSVTADETQQWAFLTDALTKFQDPAEADKLMKIQRDLDETKIILHKTIESVLARGERLDSLVEKSSDLSAASQMFYKQAKKTNQCCTIL

SEQ ID NO: 18749 - protein, 136 aa, Zea mays
  VARIANT 58: note = Ancestral polymorphism is S, Derived polymorphism is C
  VARIANT 43: note = Ancestral polymorphism is R, Derived polymorphism is S
  VARIANT 39: note = Ancestral polymorphism is P, Derived polymorphism is S
  VARIANT 20..136: note = Derived polymorphism lacks residues 20 to 136
MARTKQTARKSTGGKAPRKQLATKAARKSAPATGGVKKPHRFRPGTVALREIRKYQKSTELLIRKLPFQRLVREIAQDFKTDLRFQSSAVSALQEAAEAYLVGLFEDTNLCAIHAKRVTIMPKDIQLARRIRGERA

SEQ ID NO: 18750 - protein, 376 aa, Zea mays
  VARIANT 339: note = Ancestral polymorphism is S, Derived polymorphism is N
  VARIANT 315: note = Ancestral polymorphism is S, Derived polymorphism is I
  VARIANT 279: note = Ancestral polymorphism is T, Derived polymorphism is M
  VARIANT 251: note = Ancestral polymorphism is I, Derived polymorphism is T
  VARIANT 211: note = Ancestral polymorphism is R, Derived polymorphism is S
  VARIANT 174: note = Ancestral polymorphism is H, Derived polymorphism is Y
  VARIANT 140: note = Ancestral polymorphism is V, Derived polymorphism is I
  VARIANT 139: note = Ancestral polymorphism is A, Derived polymorphism is T
  VARIANT 136: note = Ancestral polymorphism is A, Derived polymorphism is T
  VARIANT 108: note = Ancestral polymorphism is E, Derived polymorphism is K
  VARIANT 80..376: note = Derived polymorphism lacks residues 80 to 376
  VARIANT 53: note = Ancestral polymorphism is A, Derived polymorphism is S
  VARIANT 42: note = Ancestral polymorphism is T, Derived polymorphism is S
  VARIANT 1: note = Ancestral polymorphism is M, Derived polymorphism is L
MAEEDVQPLVCDNGTGMVKAGFAGDDAPRAVFPSIVGRPRHTGVMVGMGQKDAYVGDEAQSKRGILTLKYPIEHGIVGNWDDMEKIWHHTFYNELRVAPEEHPILLTEAPLNPKANREKMTQIMFETFNCPAMYVAIQAVLSLYASGRTTGIVLDSGDGVSHTVPIYEGYTLPHAILRLDLAGRDLTDNLMKILTERGYSFTTTAEREIVRDIKEKLAYVALDYEQELETARTSSSVEKSYELPDGQVITIGAERFRCPEVLFQPSFIGMESAGIHEATYNSIMKCDVDIRKDLYGNVVLSGGSTMFPGIGDRMSKEITALAPSSMKVKVVAPPERKYSVWIGGSILASLSTFQQMWISKEEYDESGPGIVHMKCF

SEQ ID NO: 18751 - protein, 62 aa, Zea mays
  VARIANT 19..62: note = Derived polymorphism lacks residues 19 to 62
  VARIANT 26: note = Ancestral polymorphism is R, Derived polymorphism is K
  VARIANT 42: note = Ancestral polymorphism is G, Derived polymorphism is R
MTLNILADLSPLFTWDTKQQSVGLHRMLLFKKLTSVKEKSLGLLTQNFVKLFFTMKVETISL

SEQ ID NO: 18752 - protein, 222 aa, Zea mays
  VARIANT 57: note = Ancestral polymorphism is S, Derived polymorphism is F
  VARIANT 70..222: note = Derived polymorphism lacks residues 70 to 222
  VARIANT 71: note = Ancestral polymorphism is Y, Derived polymorphism is N
  VARIANT 72: note = Ancestral polymorphism is R, Derived polymorphism is Q
MDLSADAAPLEHVESFVLAFVQALGPDAGPDARPWETPFLQVLELLSVWHGHMVTFSVPHTFIWHFYAIQYRFLVDGVWRCDETKPFVRDEYGLISNEVLVENNVQPVVQPEPSIIGTNMDKGTILKTMPPEPSSQNPSMQIAVIRHVVSGILLHNTIYDVVPLSSKLTVLDTQLPVKQAFKIVHDEVCMLLCLLELLQIVHFPSMVLVCSHFNFALFLLSF

SEQ ID NO: 18753 - protein, 250 aa, Zea mays
  VARIANT 82: note = Ancestral polymorphism is R, Derived polymorphism is H
  VARIANT 158: note = Ancestral polymorphism is G, Derived polymorphism is D
  VARIANT 183: note = Ancestral polymorphism is Y, Derived polymorphism is S
MAAYEKQRPEAPMNAAYYGQPIRPLQPPYYPPPPPPPPPPQGPPPPRPVPRLGGGPRCLLGFLVTLIVAIGVATLVLRLISRPYSLKAYADSAALSRFDLGSGSSGGGDDLLQYNLTVDIRLRNPSRFGVRCDYAEAQAFYGGDRFGFDPLRPFYLDGRSDARVTATFGGSAVVDGDGARRTYQRESGEGFYYVKVKVYADLRFRVRTIVRRRVFKSKITCVLRLPVPAAGGGVNSTAMTTLGTRCDVDF

SEQ ID NO: 18754 - protein, 247 aa, Zea mays
  VARIANT 130: note = Ancestral polymorphism is R, Derived polymorphism is K
  VARIANT 202: note = Ancestral polymorphism is A, Derived polymorphism is T
MSGTGRWSSSSSRKGRGSSSFTLRQPPVVDIGCNCRRPKLFSVFSSSSSSLFRGGRGKPKSPNASSASTTTTAFTATTNAGTRSGTTANSTTDSSSWGAPASFVATNSLYEEPVPAVAPLQEREHQDQARRRRRQQRRRRSSRRAAPPARHGVVVEEEEEEEEEHGRRVARESVAVAVDSAEPYEDFRESMVQMVVEKEIYAWDDLNDLLHQFLSLNSPRHHPLILHAFADLWTRNGLFCPPSPCQF

SEQ ID NO: 18755 - protein, 417 aa, Zea mays
  VARIANT 165..417: note = Derived polymorphism lacks residues 165 to 417
MISPERSSSQSPRSQAVAGAPFLWISVMDPVKMGTGVQAYISYRVITKTNLPEFEGPEKIVIRRYSDFEWLHDRLAERYKGVFIPPLPEKNAVEKFRFSKEFIELRRQALDLFVNRIASHPELKQSDVLRTFLQADEEIMDRARSYETGIFKKPSDFLQMFKDVQSKVSDVVLGKEKPVEESTPEYEKLKSYIFELEIHLAEAQKQAYRLVKRHRELGQSLADFGKAIKLLGSCEGDLMEKVFSEVGSKSEMLSIKLQREADNLLFNFEEPLKDYVRALQSIKATMLDRANAFRQHFDLDQERKYKELNLEKLKFMNPEKYAEAESEFRGASCCNFPLRNSLHSLVDELKADSEEATKKFEHIVRLMNEELSRFQEQKTADIGLAFHEFAKGQAKLAKDIADAWRSVLPKLEACSTS

SEQ ID NO: 18756 - protein, 206 aa, Zea mays
  VARIANT 52: note = Ancestral polymorphism is F, Derived polymorphism is C
MRSCSSARQMLLTRLSSVSCSSTAQQLHAGVGKFAAAACWSWKKKREELPCFRARLAGKPPRASPAKGGIVPASDDDDGVSLGTVKLPGNIDTARLESLLFQWGNSLCQGANLPLPVPLKISSPDAIDQVDKVEGGIRLGFVAVEDGATRTLVYIDCLVSPAPDGSGPVFRAIRNGPMKDKEPPGEPRIMRSLLQALEKSIQIARV

SEQ ID NO: 18757 - protein, 465 aa, Zea mays
  VARIANT 132: note = Ancestral polymorphism is A, Derived polymorphism is V
  VARIANT 143: note = Ancestral polymorphism is G, Derived polymorphism is D
  VARIANT 199: note = Ancestral polymorphism is T, Derived polymorphism is I
MDPANSSAGAELDDASEWRTRALGGTEYSWLRAVPGGTGTTLLALRLSRGDAAEAALRSLRDAHPVLRARLRTSSPSGPTLAFPDPAPPFPLAPLPAPGSAPDFHALLEHELNRNPWADDPASSDDAPVLFATLYELPAATGDAALFVRIHTVACDRSAASALARELVALLAGAGGEEPDPEDAAAEAGLEARIPQRDTWKPFWARGLDMVGYSINGLRTSTLPFVETGTERSTQMLRLGLGLDETTRLLDACKENGVRLCSAVAAATMLAARQSKPLESGQQETYSVVTLINCRKFLEPVLEDRNVGFFYSAITNTHTIHGGEGLWELAKRCHDSYTSAKSNKKHLTDINDLNFLMCRAIENPQLTTAGALRTALVSVFEDPVVADVAEVQSKAGVEDCVCCATVHGIGPSIGVFDSIKDGKLDWACVYPSPLHSRKQVQEIFDKVTQILHHAAAAEENFGDCT

SEQ ID NO: 18758 - protein, 211 aa, Zea mays
  VARIANT 207: note = Ancestral polymorphism is I, Derived polymorphism is T
  VARIANT 49: note = Ancestral polymorphism is L, Derived polymorphism is F
  VARIANT 36: note = Ancestral polymorphism is R, Derived polymorphism is L
MGNCSPSPSVSTAAVDAEDGGVVRVYGSDGCPVAWRLRVSLLYKAAAPLHFTPSEAAPLGRPVLRLSAADPEVCGTPDELLRQVDARFEGKPRVAPPERPRTGSPSAAAAAAAEVAELVRLQHRSAERHLEGVAAKVVEMVKKGKKSGKGRSVVEGAEVRSLGKWYGDAMEVMLEHARMEETLIFPDIQRASFPGRLGFDLIYLCRIALCS

SEQ ID NO: 18759 - protein, 274 aa, Zea mays
  VARIANT 63..274: note = Derived polymorphism lacks residues 63 to 274
  VARIANT 188: note = Ancestral polymorphism is A, Derived polymorphism is V
MPQVDLVCGASGAGAGAGDRKVSCETVIAGGSGDASPPPPPPPDPDFPPDSITIPIGDDAAFSELNPMYERDDSTKGSTNPKSAAAAVANPIVAAKTRSNSTRAAGGAPPPPASGTTFFGLPARIRPTFSRRRPSQSQSQSQSQGRILRDKRAGGEVEPRSPKVSCIGKVLSDRERHGRRRGWWHGVAAMFRCDGCARVARGASRNMAALEDDGVEQQQQQQAGVAGMRRFKSGRRAASWGDEALATAAVGDVDEGMEMPDSQDAEQWSRRPVI

SEQ ID NO: 18760 - protein, 555 aa, Zea mays
  VARIANT 17: note = Ancestral polymorphism is P, Derived polymorphism is R
MVQGEESSWRMERAALPLNQALAYGVQAHGAGGAAAAPPTCFLYRLSLFPQLYFRDFHQPAAAAAAYFGFGELEEALIHGGGGGVDPGVITKNDVAQAKSAAAAAGYLAGAAARPPTLEIFPSLPMRHQQQLHSGNSQSVGSTTDSSSAQNAMSQMELASPAASSAPRQEAMMVTADGYSYKPGLAAAAAGAAPPSFQFQQQHQHHHPLPLHGDGGGDHDKCHSHVQRKHGSTGKDGKLVDAKTERRLAQNREAARKSRLRKKAYVQQLETTRIRLQHVEHEFQRARSHSQGVGVGGCGAAGDMSCGAAMFDMEYARWLDDDSKRLAELRGGLQAHLLLDANLGLIVEECMQHHDELFQLKAALARSDVFHLLTGSWTTPAERCFFWMGGFRPSELLKVLIPQLDPLTEQQLLGICSLQQSSEQAEEALAQGLHQLHQALADTVAAGTLNEGSAAPNCMNIMAVALDKIASLENFYQQADNLRQQTLHQMRRILTTRQAARCFLSIGEYYSRLRALSNLWASRPGDTFIRSESLSPTATELQALHHQRQNQFSGF

SEQ ID NO: 18761 - protein, 346 aa, Zea mays
  VARIANT 294..346: note = Derived polymorphism lacks residues 294 to 346
  VARIANT 255..346: note = Derived polymorphism lacks residues 255 to 346
MGWGISRLIGLKAAALLSVACFFQGLGVTLISFPLIYASIIAILVSIASRPSIDLPLLLGKASDGSFPLWSWIIFSPFLLFIHLFVLLRRFVKNEPLYTEVADGVFVGGWPSSVEHLPPGDPAIIDCTCELPKSSTISNNAYLCIATWDTRAPQPSQIESAVQWAVRKRSQNKPVYVHCAYGHGRSVCVMCALLVALGFAEDWKAAAQMIREKRPSISMNTLHRKSLEEWSKHLLSSKRSGESDSSASLIFCSVCSCGFLSFFPGLSVSEILHNRLIQLSMADDIGSRVDFGILSLLISDKLISNNVKIASPFLHLSIDRSGLASYNLLVSLCKIPIAVFTCVAQY

SEQ ID NO: 18762 - protein, 412 aa, Zea mays
  VARIANT 58..412: note = Derived polymorphism lacks residues 58 to 412
MASEMSKNVKALDEQEVTSQHSRAQTSDAAEEQQQQQQAVDPLARQSSIMSLTLEELQNSLCEPGRNFGSMNMDEFMANIWNAEEFQAATAGCNKEGAEREPVPVATTTGTGENGGGGGSGRGLVRQGSFALPPPLSRKTVEEVWAEISQGPADFQASAAPQPVAQPQAASGGGVAASGRQATLGEMTLEDFLVKAGVVRGAFAGHGHGVGMVPAGPMGMQHNAAPPMMYQVAAAAAPPPGAVYPVMGDGMGYHGGGYPGGVAVVPPPPPSQCVAAAASPGSSDGMSAMTQAEMMNCIGNGGVVRNGGGGARKRDFPEDGCTEKTVERRQRRMIKNRESAARSRARKQAYTVELEAELNHLKEENERLRAEERTILLSKKKMLVEKMMEQARENVSAKKVGPGLRRWGSAMW

SEQ ID NO: 18763 - protein, 78 aa, Zea mays
  VARIANT 28: note = Ancestral polymorphism is P, Derived polymorphism is L
  VARIANT 14..78: note = Derived polymorphism lacks residues 14 to 78
MFSSPPPRVPLSPQPLSAASSSVVLGVPLHARPRPTTLAAPPPSSSMTPPLAPSSSASEPALSVMGEGKAKEEQEPSS

SEQ ID NO: 18764 - protein, 394 aa, Zea mays
  VARIANT 137: note = Ancestral polymorphism is R, Derived polymorphism is C
MKRPLRRSFAVLIFVGLVGAASFSTALRRAVAPAPAQEPPPLDPARLNATLLRLAAADPSEASLRRDVDGLLEGRLPASAARARAWRRDRLLHPLHLHRHRSFPLPRRGRYPDDDHDILLHPLPRHEQLHIDPALRRDLRSWHRLRRYDPAVLATLPSLLSIPGRIPSCAVVGNSGILLRANHGALIDSHAAVFRLNNARVSGYAAHVGSKTNFSFINSNVLHLCARRPGCFCHPYGHGVPILLYICQAAHFVDVAACNATSSSRHGSPISVTDARLDVLCARIVKYYSLRRFVAETGRAPEEWDRAHDAAMFHYSSGMQAIMVAVGVCDRVSVFGFGKSSDAKHHYHSNQKAELDLHDYDAEYAFYHDLSEQPQVVPFLKDSGFAVPPVVFYH

SEQ ID NO: 18765 - protein, 540 aa, Zea mays
  VARIANT 522..540: note = Ancestral polymorphism lacks residues 522 to 540
MQPQVAAVFFVSAACTVALAALLAVLRMRPPWWCACPVCEAYLTASWAGDFDNLCDWYAHLLRTSPAQTVHVHVLRNVLTANPATVDHMLRARFDNYPKGAPFSAILADFLGRGIFNVDGDAWLFQRKLAAAELASPALRAFAVRVVASELRGRLIPLLRSAACASGREGGGGGGGGRVLDLQDVFRRFAFDCICKISFGLDPGCLQLSMPVSSFEDAFDTASTLSARRATAPMHVVWKLKRLLNLGDERRLRDAVHLVDALAAEVIRQRRKLGGAASSGSDLLSRFMGSIDDDKYLRDIVVSFMLAGRDTVASALTAFFLLLSDHPEVAAAIRDEAARVAGDDDDGDGDDGRLTDSAFGKLKGMHYVHAALYESMRLFPPVQFDSKFAAGDDTLPDGTAAGIQGKMKWEKSRKWPTCLVQEPGPCGTRDGAVCCKARMYGGINRCRFLVVGSGWRRQEGTTGPCATRTAPQAFGGAPVIWSRRGAVLVPHVWGPPSRQPSHAHAPVEYHYQGQSQRARFVSRCRDEDPAPAVRKMLSRI

SEQ ID NO: 18766 - protein, 724 aa, Zea mays
  VARIANT 460..724: note = Derived polymorphism lacks residues 460 to 724
MSSTSGALPQPRRGRPGPWPPAPPPQPQAQPLSWAKRTGFQSRVSGESLPSSSAHNSGQAPLPRPAEAPSDLESGPPARPSSTLPAPPAAAGNGERQHPPPPPPQARTRRRDSDSGRPNGQIAAPSLPQLQEEEEAPERPAHVKYELRDTPGICEYPTEEEKCARAMCAMGNDGRCIDLIGFKLRCSSSGGIRIPALYFHGRFNHPDSSRDGPCYGWLGCYIWSCLGQDDMAAVVSTVLLVTGVTTLLHMFVGTRLPLVQGPSFVYLAPALAIINSPELFGINDNNFKHIMKHLQGAIIIGGAFQVFLGYTGLMSLFLRLINPVVVSPTVAAVGLSFFSYGFTKIGTCIEMGILQLLMVVIFALYLRKIKLFGYRVFLIYAVPLGLGITWAVAFVLTATGVYSYKGCDANIPASNNVSAFCRKHVLRMRSCRVDTSHALRSSPWFRFPYPLQWGTPVFSWKMGLVMCVVSVIASVDSVGSYHASSLFVATRPPTSGVVSRGIGVEGVSTVLAGLWGTGVGSATITENVHTIAVTKMGSRRAVGFGAILLILLSIVGKVGAFIASIPDVMVAALLCFMWAMLCALGLSNLRYSATGSSRNSIIVGLALFLSLSVPSYFQQYGVHPSANSSVPTYFQPYVVASHGPVHTGSGGVNYVLNTILSLNMAIAFLVALVLDNTVPGGRQERGLYVWSEAEAAMRESTFMKDYELPFKIGRPFRWVKCVGL

SEQ ID NO: 18767 - protein, 242 aa, Zea mays
  VARIANT 212: note = Ancestral polymorphism is L, Derived polymorphism is R
  VARIANT 162..242: note = Derived polymorphism lacks residues 162 to 242
  VARIANT 159: note = Ancestral polymorphism is C, Derived polymorphism is Y
  VARIANT 149..242: note = Derived polymorphism lacks residues 149 to 242
  VARIANT 15: note = Ancestral polymorphism is R, Derived polymorphism is W
MFMAQLPQMPSRQLRRKEIDQPTLIPHIAEAKSQKYSYEVLFRSLQKLLIDTATSEYLFTDDFFGEESIFHDIFAVFLKCFLSPSIIRWAQRWMPYQPYRTDQMWGRFLCAFSHTFNYLFLPFSWASGALDPEGAAAHNSLTSIKRGVWAMIAAFLAYCTLQAPSTILIRPHPAVWHLVHGLAVVYLVALIFLLFQNRDDARQFMKLLHPDLGVELPERTYGADCRLYVPENPKNKFINIYV

SEQ ID NO: 18768 - protein, 133 aa, Zea mays
  VARIANT 61: note = Ancestral polymorphism is H, Derived polymorphism is Y
  VARIANT 50: note = Ancestral polymorphism is F, Derived polymorphism is L
  VARIANT 39: note = Ancestral polymorphism is V, Derived polymorphism is I
  VARIANT 36: note = Ancestral polymorphism is R, Derived polymorphism is Q
  VARIANT 18: note = Ancestral polymorphism is R, Derived polymorphism is H
MESLLISSSMNLHVVTYRETTLLFDEMHSAAANKQRVAVVVAHELAHQWFGNFVTMEWWTHMWLNEGFATWVSYLAADQFFPEWNVWTQFLEESTIGFKLDALAGSHPIEVTKFFVTLQCYDHICALWEFTDS

SEQ ID NO: 18769 - protein, 201 aa, Zea mays
  VARIANT 134..201: note = Derived polymorphism lacks residues 134 to 201
  VARIANT 133: note = Ancestral polymorphism is A, Derived polymorphism is V
  VARIANT 124: note = Ancestral polymorphism is R, Derived polymorphism is C
  VARIANT 82..201: note = Derived polymorphism lacks residues 82 to 201
  VARIANT 69: note = Ancestral polymorphism is T, Derived polymorphism is M
  VARIANT 48..201: note = Derived polymorphism lacks residues 48 to 201
  VARIANT 18: note = Ancestral polymorphism is S, Derived polymorphism is F
MGHRWRSSPSPQIMNLCSVSSSIAKPPWVGTWNQPDHTNQTTASSPERSLTAGALGDTLLDDVAARAVTRRRHHSSLWSHLQDSIFHHSFDTPLYRFNVPELRVDTLDSLLALSDDLVKVRRTRFPLFALLLAQALGSGSVSSCVCLYTHSPMLSCRVCRTRFEGRSRTSSTPKVSRAGPSPSTASPPTPSSTMKCKVHSP

SEQ ID NO: 18770 - protein, 287 aa, Zea mays
  VARIANT 45: note = Ancestral polymorphism is G, Derived polymorphism is R
  VARIANT 164: note = Ancestral polymorphism is A, Derived polymorphism is T
MLFSRSPAATNQPLVPSRRTLLLSPCPRAGATPAPVADAALLPGGLRAESLPRHVAVVMDGNSRWARARGLPSAAGHEAGRRALEEVVRLSRAWGVRTLTAFAFSHENWSRPKVEVEFLMGQFERAIRESVAEFLREGIRLRVIGDSSRLPVSLQRTAREAEEATRNNSQLDLTLAISYSGRRDIVQACRTLAQKVRDKLLEPEDIDESLFAGELETSHANGNELPYPDLVIRTSGELRLSNFLLWQSAYAELFFTDTLWPDFGEADYLQALVSFQSRDRRFGVRKL

SEQ ID NO: 18771 - protein, 351 aa, Zea mays
  VARIANT 340: note = Ancestral polymorphism is R, Derived polymorphism is P
  VARIANT 338: note = Ancestral polymorphism is L, Derived polymorphism is R
  VARIANT 330..351: note = Derived polymorphism lacks residues 330 to 351
MEVAAVACRAGLLARARPSSRARTWAVAVGPAPSAARRRLLVASLGVGEPLPAQSLGEEAVALEVGEEEDDLNSIVSVENLPPAAAHVPEARRTTVRVRFVLRKQCAFGHQFLVAGDDAALGLWDPAKAISLVWSEGHVWTANTDLPANRSIEFKFLLRDASGHAHWQHGANRTLRITTETPNTVVVHEDWDHGNKQKVSEEEELSIGEDVMFPDDLAGTDGASAMPADNPEKHQNVETDSDRSAAVVADAPPQQEMVAANGTGQPQLVVDGHKTILEEVPGEENGTLSAANYAGNGSIDDDDDDDTTLYQGGDVLPNRPTSIFENDLAWAGKAMQQLLRVLGFQIGTTRT

SEQ ID NO: 18772 - protein, 736 aa, Zea mays
  VARIANT 131: note = Ancestral polymorphism is P, Derived polymorphism is L
MATSFGFGSSATAGSTASSPFSSTPSAFSFSQPASASSPAPAFGSSLFSSSSAAASSAPTFGSSLFRASSAAAAPASSPAFGFGSTFSFGQSMAAASSAASAPSLFGATPASSAGTTLSLFGAATSAASSPGFFGATSTAASSPGLFGASATGSAATSPSLFGGTSGLFGGTSSAATTPSPFGATSSTAATVSPFGAASSAASTPSLFSGGATGFSFGSSASGSTTTTAAAPAPSFGFSFNSGPAASSTASTPTSAPALGFGGATGSSLFGSTTSAPLFSTTTASSPASAATTTPSFGFSSSPATTASAPSFGFTPSSGSATTANTAPSLFSSSATTLTTPASSSSTGFSLATSQAAPAPSLFSTSAIGSSSVTTPGFSFGSSSAASTPTLASVFATGSSTVPSAAAASAASGSSFPAVSTSGFSFAVAPSSSAAAATATTTTVTSASTSAGMTTTAPLTGTTGFPNFNLQTTTPASTSSPTLAFGVSTTAASSSATSTTTQATSSAVQVSSTGPTTTTSITPAASQAPKLPSEIVGKNVEEIIRDWNNELQDRTAKFRKHATAIAEWDKRILQNRNVLIRLEAEVAKVVETQTGLERQLELIETHQREVDKALQSMEEEAERVFQDERVLLHEDGAASARDTMYEQAEVVEHELQHMTEQVKSIIQTMNATQGGELESADSMTPFDVAVRILDNQLRSLMWIDEKVNEFSGRIQRLPNNSVSAERDSGIPRFWLS

SEQ ID NO: 18773 - protein, 425 aa, Zea mays
  VARIANT 323: note = Ancestral polymorphism is G, Derived polymorphism is R
MPADVEALVTVVVVAVAAAADDDGATAKLKPLVETAGNDDPDAAEAAAADGTVEEPVANTEAKVGVEAAEDEPKENPGVVTDELPIALVENNEGAGAACEVAKEKPVEDEDAGVVSVVADDENKEGAVFAVVALPDDGVKPNDGAEAVVAGEEENPKDGVVVAADAGEEAVVVLKRGAEVVDPNSDEPVAPPNPKAGADVGVDAVLDAAGPELNEKPNDGAGAAAVVVVEPDADEPKLNPVAPPEKRLGVDAAEEAAPNGLTVAAVEEVAPNGLGVVAAEEVPPNRPEVPPNRLGEVAAEPVADAPKRPGLLAAVEVAPKNPGLLAAEKVDPNPKAGEEAGAAAADEALNREDPKVGAEEAAAEDEEKREEPKAGAGEEADAGWEKEKADGVEEKGEEAVEPAVAELPKPKEVAIAGAGMIWARF

SEQ ID NO: 18774 - protein, 92 aa, Zea mays
  VARIANT 39: note = Ancestral polymorphism is V, Derived polymorphism is M
  VARIANT 28: note = Ancestral polymorphism is V, Derived polymorphism is D
  VARIANT 27: note = Ancestral polymorphism is S, Derived polymorphism is L
  VARIANT 15: note = Ancestral polymorphism is P, Derived polymorphism is L
  VARIANT 13: note = Ancestral polymorphism is L, Derived polymorphism is P
  VARIANT 6: note = Ancestral polymorphism is D, Derived polymorphism is Y
  VARIANT 1: note = Ancestral polymorphism is M, Derived polymorphism is T
MIDNPDQRFAAFLSPLTLGRVNIAVNSVYISKVSLAIAVRYSLSRRAFSIAPDAPESRSPRHPPPLAASLHCCSPSIDGASLLRRPRPTYDY

SEQ ID NO: 18775 - protein, 193 aa, Zea mays
  VARIANT 72: note = Ancestral polymorphism is A, Derived polymorphism is V
  VARIANT 25..193: note = Derived polymorphism lacks residues 25 to 193
  VARIANT 5: note = Ancestral polymorphism is M, Derived polymorphism is I
MYKCMLVSIGVMVEVVNGLLQREDWETAIKVPLGIISAGTGNGMARSLLHAAGEPFSISNAVFAIIRGHKRALDVTSVVQGKARFFSVLMLTWGLVADVDIESEKYSATIQDADRTNLQKNGSPVSGRKIRVKLAMDRAPLKERLQKGNMQVKDSDGNHEISPAEKHKGNLIKRIQSNCICCQMMLRYQRKLP

SEQ ID NO: 18776 - protein, 474 aa, Zea mays
  VARIANT 87: note = Ancestral polymorphism is D, Derived polymorphism is A
  VARIANT 130: note = Ancestral polymorphism is A, Derived polymorphism is T
  VARIANT 136: note = Ancestral polymorphism is P, Derived polymorphism is S
  VARIANT 172..474: note = Derived polymorphism lacks residues 172 to 474
  VARIANT 256: note = Ancestral polymorphism is R, Derived polymorphism is C
  VARIANT 271: note = Ancestral polymorphism is A, Derived polymorphism is D
MATPKLSPVSPVRQDGNDKPCAPSSPSSSPSTVLSAQDAYEQHLRLPELSSLWTAGCFPEWAGEGLVKPALQALEVTFRLASLALSDPRGHAGRRELARRLESLAAREVELVSALCEGDGRGAPLAELSASGGVLPRERSASEVVVWQLPGSAAAVVCRASEASLLPRLAAWEKSEALAARITYAVEGQMQGCAFTLGLGEPNLAGKPVLEYDRVVRPHELHALKPDPAPEPMSGYRNRELETLFTMYQILESWLRVASQLLTRLDERIEDKCWEAAAGDCWILERVWKLLADVEDLHLLMDPDEFLRLKSQLAVRAAPGSESASFCFRSTALLHVASATRDLKKRVPWVLGVEADPSGGPRVQEAAMKLYHSRRRGEGEEAGKVDLLQAFQAVEVAVRAFFFGYRQLVAAVMGTAEASGNRALFVPAEEMDPLAQMFLEPPYYPSLDAAKTFLADYWVQLQQMAEASAPSRQS

SEQ ID NO: 18777 - protein, 423 aa, Zea mays
  VARIANT 45: note = Ancestral polymorphism is A, Derived polymorphism is V
  VARIANT 63..423: note = Derived polymorphism lacks residues 63 to 423
  VARIANT 232: note = Ancestral polymorphism is P, Derived polymorphism is L
MDARAPPPPQPHPPRAPSPQPPPAPSRRYGLHFSASSFIQAPLTALLEYSGILRPDPGGGIQQPGTGARPGEVSIRIVAPGEAGTSSERAEEVIVEEEEEDGQATRTRPEDPSPAAGGGEGGRESSSSYQRYDIQQVARWVEQILPFSLLLLVVFIRQHLQGFFVTIWIAAVMFKSNDILCKQTALKRERKIPVLVGITILFVVHVSGFYWCYKNGDLIRPLMMLPPKEIPPFWHAIFIILVNDTMVRQTAMVVKCLLLMYYKNSRGRSYRRQGQMLTIVEYFLLLYRALLPTPVWYRFFLNKEYGSLFSSLTTGLYLTFKLTSVVEKVQSFLTALRALSHKDFHYGSYATSEQVVAAGDLCAICQEKMHVPILLRCKHIFCEDCVSEWFERERTCPLCRALVKPADLRSFSDGSTSLFFQLF

SEQ ID NO: 18778 - protein, 479 aa, Zea mays
  VARIANT 354..479: note = Derived polymorphism lacks residues 354 to 479
  VARIANT 303..479: note = Derived polymorphism lacks residues 303 to 479
  VARIANT 232: note = Ancestral polymorphism is G, Derived polymorphism is S
  VARIANT 226: note = Ancestral polymorphism is T, Derived polymorphism is I
  VARIANT 57: note = Ancestral polymorphism is T, Derived polymorphism is A
  VARIANT 54: note = Ancestral polymorphism is A, Derived polymorphism is V
  VARIANT 37..479: note = Derived polymorphism lacks residues 37 to 479
  VARIANT 33..479: note = Derived polymorphism lacks residues 33 to 479
MWKTIGKRSTWGTADGDRLEQRLGEDKVKILEQAFMEAADNALPHPMEDAYLEACHTNNMEWKMCIYGADCSEISLVQVRGSGMLKDSACHELDKIRSLKRPYIKRVQDRHKETINCLKRNTIEMEGYIRPLDVVIIVLQYIPCSDDQHSDGVADDHPSDSLFSPTYHHHKEVYVAVSIGLDVKPGSTVKCEPGYGFMLHLSQNPHIQFDLVFDKEFELSHTSKTTIVFFTGYKVEQPFKEDGYPFLFSIELVLFQVEVIRTFFVSLTSCLPSSTMDLDSEDEDEELNVPVVKENGKAGGKIQKSQEKAIFTDIFNNDLGGPYAFLEFNSLIKRTAQASPHGANHTGKADGKKQKSQEKAVPAASKSSPASKKSKDDDDSDEDETDDSNEDETDDSDEGEGLSPEEGDDDDSSDEDDTSDDEEEDTSTPKKHEAGKKRAAESFVLKTPLSDKKAKVATPSAQKTGVPLNGLTKLSSKIV

SEQ ID NO: 18779 - protein, 548 aa, Zea mays
  VARIANT 189: note = Ancestral polymorphism is D, Derived polymorphism is N
  VARIANT 93..548: note = Derived polymorphism lacks residues 93 to 548
  VARIANT 85: note = Ancestral polymorphism is P, Derived polymorphism is L
MATTVLDAGELHLHPYAVAAAAAALVSMYMVWFWALTRGLSGPRMWPLVGSLPSVVLNRARVHDWIVDNLRSTGEAATYQTCILPMPFLARRQGLVTVTCNPRNLEHILRARFDNYPKGPMWQAAFHDLLGQGIFNSDGETWLLQRKTAALEFTTRTLRQAMARWANRIIKYRLWSILADHCEAAASVDLQDLLLRLTFDNICGLTFGKDPETLSPGLQENPFANAFDSATEATLQRFLFPSFLWRVKKALGVGSERSLRESLATVDQYMTEAIAARKATPSDDLLSRFMKKRDGSGRAFPEDVLQWVALNFVLAGRDTSSVALSWFFWMLMLRRDVERKVVLEIVSVVRETRGDDSRRWTEEPLDFDELDRLVYLKAALAETLRLYPSVPQDSKYVVEDDVLPDGTVVPAGSAVTYSIYSVGRMESIWGKDCAEFRPERWLSADGTRFEPPKDAYRFVAFNGGPRTCLGKDLAYLQMKSIASAVLLRHSVELVPGHKVEQKMSLTLFMKNGLRVHVKPRDLAGYVAAPEDAPQLGAFVIPTTTAAAA

SEQ ID NO: 18780 - protein, 235 aa, Zea mays
  VARIANT 32: note = Ancestral polymorphism is R, Derived polymorphism is H
  VARIANT 128: note = Ancestral polymorphism is S, Derived polymorphism is R
MDTEAPSGRVGVKCGRWNPTPEQVKVLTELFRAGLRTPSTDQIQRISAHLGAFGKVESKNVFYWFQNHKARERHHHKKKKRRRRGAAMASSSSPDSGSGSGSSEEDGRVAAAADADLVLQPSPGRSKSKREARRSYGGGHHRRLVTCKQLAHTHRYVRDVVEQQEEDTWERPTREAVETLELFPLKSYVDLEAEKVRRYVVRAGASEQCRDFSFFDVSGGRDPPLLELRLCSFGP

SEQ ID NO: 18781 - protein, 463 aa, Zea mays
  VARIANT 383..463: note = Derived polymorphism lacks residues 383 to 463
  VARIANT 106: note = Ancestral polymorphism is A, Derived polymorphism is P
  VARIANT 78: note = Ancestral polymorphism is S, Derived polymorphism is C
  VARIANT 64: note = Ancestral polymorphism is G, Derived polymorphism is V
  VARIANT 38: note = Ancestral polymorphism is S, Derived polymorphism is F
  VARIANT 36: note = Ancestral polymorphism is G, Derived polymorphism is R
MAVDTMESVAVVAVPFPAQGHLNQLLHLSLLLASRGLSVHYAAPPPHVRQARARVHGWDPRALGSIHFHDLDVPAYDSPAPDLAAPSPFPNHLMPMFEAFAAAARAPLAALLQRLSTSYRRVAVVFDRLNPFAATEAARLANADAFGLQCVAISYTVGWLDPGHRLLSDYGLQFLPPDDCMSREFVDLVFRMEEEEQGAPVAGLVMNTCRALEGEFLDAVAAQPPFQGQRFFAVGPLNPLLLDADARTAPRHECLEWLDRQPPESVLYVSFGTTSCLHADQVAELAAALKGSKQRFVWVLRDADRADIYAESGDSRHAKFLSEFTRETEGTGLVVTGWAPQLEILAHGATAAFMSHCGWNSIIESLSHGKPVLAWPMHSDQPWDSELLCNYFKAGLLVRPWEKHAEIIPAQAIQKVIEEAMLSDSGMAVRQRAKELGEAVRASVADGGNSRKDLDDFIGYITR

SEQ ID NO: 18782 - protein, 327 aa, Zea mays
  VARIANT 94: note = Ancestral polymorphism is T, Derived polymorphism is I
  VARIANT 68: note = Ancestral polymorphism is R, Derived polymorphism is H
MASPSPSSPLHPHQHPPPPNVHHQFQSLPPSMPPPPPSTALPKALDLEVTVVCGKHLKNVNWRRGDLRAYVVVYLDPSRRAATRPDDGGGCKPTWNERLVLPLPPHLSPHDPSILLSLDVFHSKPSDSPKPLVGSARSPLRDLLFPANPNPSHDPAASALVSLPLLRPSGRPQGKIRIRVAIRERSPPPPEPQYPPPSSSPYYFPPPPPAYSAPPQYGSDQYYRPSGYYSAPAPPPHPYEYTGGPSAPVDYNRQYEQRGRTGAAGSGSGNGRYGAGTGLAVGAVAGALGGLAIDEAVKYKEDKGAERVEEKVVPAGRDDYSEYRGDY

SEQ ID NO: 18783 - protein, 233 aa, Zea mays
  VARIANT 164: note = Ancestral polymorphism is Y, Derived polymorphism is C
MMAEAWTPVLLPATAPCFWQQDTHSVLWRRGDAWTAEENKLFEKALAQIDRNAPDRWEKVAAVLPWKTVDDVRSHYHALEKDVGVIEAGGLVPFPRYSGSVPPPSGFALEDWGGGDRGFRRARGSEEMQERKKGVPWTEEEHKLFLMGLRKYGRGDWRNISRKYVTTRTPTQVASHAQKYFIRLSSGGKDKRRSSIHDITTVNLPGDAPRSSPPAATTNPSAGALVVDVKPFV

SEQ ID NO: 18784 - protein, 596 aa, Zea mays
  VARIANT 448..596: note = Derived polymorphism lacks residues 448 to 596
  VARIANT 43: note = Ancestral polymorphism is A, Derived polymorphism is T
MGGEVPEPRRLSRSLSFGCGGVPEEALHLVLGYVDDPRDREAASLVCRRWHRIDALSRKHVTVGFCYAVEPARLLARFRRLESLALKGRPRAAMYGLIPEDFGAYAAPWVAELAAPLDCLKALHLRRMTVTDEDIAVLVRARGHMLQVLKLDKCSGFSTDALRLVARSCRSLRTLFLEECIIADEGSEWLHELAVNNSVLVTLNFYMTELKVEPADLELLARNCKSLISLKMSDCDLSDLIGFLQTSKALQEFAGGAFFEVGEYTKYEKVKLPPRLCFLGGLTFMGKNEMPVIFPYSASLKKLDLQYTFLTTEDHCQLIAKCPNLLVLEVRNVIGDRGLEVVADTCKKLRRLRIERGDDDPGQEEQGGVSQIGLTAVAVGCRELEYIAAYVSDITNGALESIGTFCKNMYDFRLVLLDKQNKITDLPLDNGVRALLRSCTKLRRFALYLRPGGLSDAGLGYVGQYSGNIQYMLLGNVGESDNGLIRFAMGCANLRKLELRGCCFSERALAVAVLQMPSLRYVWVQGYRASQTGRDLMLMARPYWNIEFVPPRPESACRVMADGQPCVDTHAQVLAYYSLAGRRPDCPRWLVTLHPA

SEQ ID NO: 18785 - protein, 257 aa, Zea mays
  VARIANT 173: note = Ancestral polymorphism is K, Derived polymorphism is E
  VARIANT 174: note = Ancestral polymorphism is A, Derived polymorphism is D
MLTLHTIQSCPSLRRSSLFRRALLGRKRSFISASSSEDAESGTPPPLGGDKHQQEVLAQIAMLQTQKVRITDFLDERSAYLTKFAKDADSEFDLIGQNAMKELDAVGDQILERLDSKMQAFEETAEVQRQEIEMNDKVLEDFEDWIEKEKNEGMFFKSLGKVKPRNKMEIKVKAKVEAQKVKEIAEESAGSKTRMNIYLGLMGILGITIANAIFATPEVEWRKVAALGLIFIGLVAQVIYEQDISPPEAEKTEKIEE

SEQ ID NO: 18786 - protein, 702 aa, Zea mays
  VARIANT 20: note = Ancestral polymorphism is I, Derived polymorphism is M
MPPARPDPEPPPIHRLLELIKSERDLANALSRLELLVSTRPAFPPPQPLIFHLLRRLATTSPSHLPRLLDLLPRMRRRPRFSESAALVVLSAFSRALMPDAALAAFRDLPSLLGCNPGIRSHNALLDAFVRARRYSEADAFFASLSHGACGRRLAPNLQTYNIILRSLCARGDVDRAVSLFSSLRRRGVAPDRVTYSTLMSGLVKHDQLDNALDLLDEMPDYGVQADAVCYNALLSGCFKTGMFEKAIKVWEQLVRDPGASPNLATYKVMLDGLCKLGRFKEAGEVWSRMVANNHQPDTVTYGILIHGLCRSGDVDSAARVYSDMVKAGLVLDVAVYNSLIKGFCKVGRTGEAWKFWDSTGFSGIRQITTYNVMMKGLLDSGMVNEATELLKQLENDASCFPDKVTFGTLIHGLCENGFANKAFEILEDARNSGEELDVFSYSSMINRFCKDGRTHGANEVYKNMMKDGCKPNSHVYNALINGFCRACKISDAVKIYIEMTGNGCCPTIITYNTLIDGLCKAEKYQEASSLTKEMLERGFKPDIRTYGSLIRGLCRVKKIDAALCIWNEILDAGIQVDVIVHNILIHGLCSAGKVNDAFCIYLEMKEKNCSPNLVTYNTLMDGFYEIGSIDTAASLWAAILDNGLKPDIVTYNTRIKGLCSCNRTPEGVLLLNEVLATGIMPSVITWSILVRAVIRYGPIQI

SEQ ID NO: 18787 - protein, 208 aa, Zea mays
  VARIANT 171..208: note = Derived polymorphism lacks residues 171 to 208
  VARIANT 169: note = Ancestral polymorphism is T, Derived polymorphism is I
  VARIANT 165: note = Ancestral polymorphism is C, Derived polymorphism is Y
  VARIANT 130..208: note = Derived polymorphism lacks residues 130 to 208
MDFSCWQVPHVQQTFTWDCGLACVLMVLRTLGIDCCDGIADLERLCHTTSIWTVDLAYLLNKFSVSFSFCTVTLGANPQYSAESFYRLLCRSITAYDIAFLLLSGHCIAIALVDKSKLNLPCMSDYDVQQHNDEPDYMGHYVVICGYDADNCEFEIRYPASARKCERVTMKSLDEARKSFGTDEDILLVSLTGKSGMKLSRKLLACSM

SEQ ID NO: 18788 - protein, 232 aa, Zea mays
  VARIANT 183: note = Ancestral polymorphism is R, Derived polymorphism is W
  VARIANT 39..232: note = Derived polymorphism lacks residues 39 to 232
MPCKESFAWAMIPLFEGNHAGGLSDAAYPSSPLATSLLGSTSQDSIVDPILKLTLDGKVNHYSSGSSVIVEISNLNKVKESYIVDSLQDPKRKVHKPVKGVLRLEVEKLHGGHNDVDNTSEGGSMANDLNDAGDINNGRSNRSSFDGIHSFVNSIAIAQKDAHHNGIISNAENGDNFEAFDFRMLTRSEPFSQLFHCLYVYQLTVSLSRKRNLFVRVELRKDDSDIRKPPLE

SEQ ID NO: 18789 - protein, 449 aa, Zea mays
  VARIANT 199..449: note = Derived polymorphism lacks residues 199 to 449
  VARIANT 288: note = Ancestral polymorphism is R, Derived polymorphism is M
MAQVGIQVNTITFNVLIDGYAKSGQMHQASAAYREMQARGLVPDSCTFNIIAARAHKFRLCWDHRLDDAWELRLGAIEQGVPLRVTGFNALIAAYNKEGLHEEASELYRIINKLGLTPSSSTFNYLIMGLCNQTDFIAFSAYINGRSRLDYVNEAYQAFAEMTSRGIVPNNITYNSIISALCKAGNMTEAFKLEQNMRQSGLVPDIYTSNILIDGLCREGKLKMVDNLLLDMCSNGLTPDTVTYNTIINAYCRAQDMNSAMNFMNKMLVAGCEPDIFTYNIWMHSLYRNHMLNQAGKLLDELVAVDCSPNSVTYNTLMDGICSDVLDRAMILTGRLIKMAFKPNTITLNVFLSHFCKQGFGNRALMWAEKLREDSYVFYGATRNIIDWARREMEDDPQANNEDIGRCMFLEFLMFMTYEAMLNSRSSKATHMLTEKGFDPASNSMIRKE

SEQ ID NO: 18790 - protein, 435 aa, Zea mays
  VARIANT 349: note = Ancestral polymorphism is P, Derived polymorphism is S
MSSHVSTSRGLHPPGKLGTLDSPGAWQPPAPMAQPEAGRGDDQEVRLLSVAWNQDCGCFAAGTSNGFRIFNCEPFKETFRRDLKSGGFAIVEMLFRCNVLALVGGGSNVLYPPNKVIIWDDLLSRCIGEFAFRSDVRAVKLAKDYIVIVLERKIFVYNFTDLKLLYQIDTLSNPNGLCCLSHHSNTSVLACPGLHQGHVRVEHFGLQMVKTIPAHDSHISCMSLTMDGLLLATASTKGTLIRIFNTMDGTRLQEVRRGLDKAEIYSIALSPNVQWLAVSSDKGTVHIFSLRVRVAGVDSSNEQRALEGPRMDHQNSSSSIDPLIQANTGSNASSSLSFMRDDAYIIAIPVELSIWILPKYFSSEWSFAQFHLPEVTRYIVAFGAQNTVMMVGLDGRYLPYFYRCSFDQANGGQMLQREHFRFLKSDSPPFRTAAA

SEQ ID NO: 18791 - protein, 145 aa, Zea mays
  VARIANT 118: note = Ancestral polymorphism is E, Derived polymorphism is K
  VARIANT 103..145: note = Derived polymorphism lacks residues 103 to 145
  VARIANT 93..145: note = Derived polymorphism lacks residues 93 to 145
  VARIANT 86: note = Ancestral polymorphism is P, Derived polymorphism is T
  VARIANT 56..145: note = Derived polymorphism lacks residues 56 to 145
  VARIANT 23: note = Ancestral polymorphism is D, Derived polymorphism is N
MLISQPNPKDGSPGAASAIPETDLPEIVQVIRSRRDGIHKVVELLQHKFPNVSKTQLNRKGKMNLTCYVLHVKKEVLDKLGLDSSPVKSKKNKSIAMYFSKRCLPPKEAVNALSASPELRLKSRAIQNGNGGTEAPQINLFPPKQ

SEQ ID NO: 18792 - protein, 132 aa, Zea mays
  VARIANT 62: note = Ancestral polymorphism is K, Derived polymorphism is N
  VARIANT 63: note = Ancestral polymorphism is R, Derived polymorphism is H
  VARIANT 64: note = Ancestral polymorphism is R, Derived polymorphism is Q
  VARIANT 66: note = Ancestral polymorphism is R, Derived polymorphism is H
  VARIANT 69: note = Ancestral polymorphism is K, Derived polymorphism is N
  VARIANT 72..132: note = Derived polymorphism lacks residues 72 to 132
  VARIANT 102: note = Ancestral polymorphism is A, Derived polymorphism is V
MLLLSSPFVSVSPPPPPLSSHGARPALRIEAARQLTGRVVTTKADKTVGVEVVRLAPHPKYKRRERIKKKYQAHDPDNQFKVGDVVELQPSRPISKTKHFLAIPLPPRDTRRKSQLLPPLQSDDDQEPSSRE

SEQ ID NO: 18793 - protein, 315 aa, Zea mays
  VARIANT 174: note = Ancestral polymorphism is I, Derived polymorphism is V
  VARIANT 160: note = Ancestral polymorphism is V, Derived polymorphism is I
  VARIANT 147: note = Ancestral polymorphism is G, Derived polymorphism is A
  VARIANT 138: note = Ancestral polymorphism is L, Derived polymorphism is V
  VARIANT 24: note = Ancestral polymorphism is Q, Derived polymorphism is H
MFSLADHGICIEQEKLPLEDQISQTWFCGKYCKEIFIGLRSHVGTDNILDSDLSWSILRCNNDGQKLHSVQKIACLAECNMKLAVALTLLEECIIRMVDPRTGVDMIPHVLYNKGSNFARVDYQGFYTVILEKGDKILCVASIRVHGTKAAELPFIATSVDFRRQGMCRILMSIIEKMLCSFNVKMLVLSAIPELVSTWVSGFGFKPIEDAERKQLHNVNLMLFPGTSLLTKRLDGFIMATKPGAEKDIHEVSGVPNLKRMPNGKASEHFKLHDLDLSGTEFKAEVSVNGPFRTLKHECGSAAWFQSTKVWYINP

SEQ ID NO: 18794 - protein, 501 aa, Zea mays
  VARIANT 15..501: note = Derived polymorphism lacks residues 15 to 501
  VARIANT 41: note = Ancestral polymorphism is P, Derived polymorphism is R
  VARIANT 90: note = Ancestral polymorphism is L, Derived polymorphism is R
  VARIANT 254: note = Ancestral polymorphism is V, Derived polymorphism is A
  VARIANT 305: note = Ancestral polymorphism is G, Derived polymorphism is V
  VARIANT 310: note = Ancestral polymorphism is T, Derived polymorphism is A
  VARIANT 383: note = Ancestral polymorphism is S, Derived polymorphism is C
  VARIANT 424: note = Ancestral polymorphism is L, Derived polymorphism is P
MVAVGGVRRKRAWRWAMRAVASAVVWTAVVQVASIAGLFRPRVVADCGGKGGGGAAAGLAALAGEDSAAARLSPPALVPKRIYKSNGYLRVTCNGGLNQMRAGICDMVTIARHLNLTLVVPELDKRSFWADPSDFGDIFDVDHFINSLRDELMIVKELPLKLQLIRTKKRLYSMSPVSWSNETYYLKRILPLARKHKVIHFDKSDARLANNGLPVQLQMLRCRVNFDALRFTPQIEALGRQLISTLQRSGQFVVLHLRYEMDMLSFSGCTHGCSTEEAEELTRMRYAYPWWKEKEIGSEAKRLQGLCPLTPEEITLVLKALGFTKDTLIYIASGEIYGGERRLAVLKAAYPKLVRKEKILSPDELRPFQNHSTQMAALDYMVSLASDIFIPSYDGNMARVVEGHRRYMGFRKTIALDRKKLVELLDLFQGRALSWDEFSGAVKEAHKSRTGQPTDRKAIPGQPKEEDYFYANPQECLGSSILTARPGNPLPMNNGASTTVV

SEQ ID NO: 18795 - protein, 291 aa, Zea mays
  VARIANT 211: note = Ancestral polymorphism is I, Derived polymorphism is T
MDLVLFIASVLTSFVIFVALVLLFTWLSRRLGNAPVYYPNLLLRGLDPWAGHGRGKRSPMGWLRDAISASEPDVVAAGGVDATFYLVFLSSVLSILVYSGIVLLPVLLPVAATGGALSTIPIPTNKTAQSAQNFLSIERLGVGNVLSLNGCSTKIFADMEELGVRPDGSIIRMLGDVFQKLEMMDKYEKLKKKYPPPKWEYRYIKGKRIRIRVYLDSKSEEAARGDPDNDELREVESIHLDNELEEANSGLDKSVLDDAALETLNIYNSELPFGIFFNACLIKVAWSKLNR

SEQ ID NO: 18796 - protein, 239 aa, Zea mays
  VARIANT 201: note = Ancestral polymorphism is A, Derived polymorphism is V
  VARIANT 112: note = Ancestral polymorphism is R, Derived polymorphism is H
MTSEEHPSYASSNGITTIGSDEHLDPSPSPSTSFDSPSESDDSAASLLLSDDSSESEPIIFKKPHPPVRSWLASDEIVILKTVVSHRQKHGRLPLADNLATAVWGRLSVGDRLSAAQITRRLCVFRNRYDDAVICLKHGTIPMKDSDVTIYMLSKLIWEGTRRGRIEKKTHVPDARNDPRGFDELAELYACLSAEVEVIGARFCWTAWKGRRKWATCGGSRLHDRGEGSVGRGRAGAQG

SEQ ID NO: 18797 - protein, 103 aa, Zea mays
  VARIANT 78: note = Ancestral polymorphism is K, Derived polymorphism is Q
  VARIANT 34: note = Ancestral polymorphism is K, Derived polymorphism is E
  VARIANT 1: note = Ancestral polymorphism is T, Derived polymorphism is M
MYKGILGDGSVVAVKSLSKTSCKQEESDFLRGLKMLTLLQHDNLVSLRGFCCSRGRGECFLVYDFMVNGCLSRYLDVKDGSSGGTVLDWPTRVSIIRGIAKRD

SEQ ID NO: 18798 - protein, 104 aa, Zea mays
  VARIANT 89..104: note = Derived polymorphism lacks residues 89 to 104
  VARIANT 16: note = Ancestral polymorphism is T, Derived polymorphism is M
  VARIANT 5..104: note = Derived polymorphism lacks residues 5 to 104
MARVQDRTKHFKEVAMLSHGYTESVFFPKKQINHVAPEPLSEIAEEHDGLERVLVPMQGIVDNGKSTSELLTGSVSLRSAEVARSPVGRTVKCEEFLNRTCYGM

SEQ ID NO: 18799 - protein, 334 aa, Zea mays
  VARIANT 176: note = Ancestral polymorphism is A, Derived polymorphism is P
MEAASNGGLLYHEVQEGKLCAVHCVNTALQGPFFSEFDLAALAADLDQRERLVMLEGSRSPGAGNAAAGDFFAEGEGSHNVSLGGDFSIQVLQKALEVWDLQVIPLDSPAAGSSLFDPEQEVAFICHLQDHWFCMRKVNGEWYNFNSLYPAPEHLSKFYLSAFIDTLKGSGWSIFAVRGNFPKECPMATEGSNGFGQWFTPDDARRITASCNQVQTPPTEQVQSPLLAEQPEGMSEMDMIAAQQEEADLNAAIAASLMDTGVPFASYAAAREHSDSQDSPAREAAPSKDNNQEEAGKAEPSAPPCEEDIQELASGSDTRREVPSVEEKGSAKEE

SEQ ID NO: 18800 - protein, 545 aa, Zea mays
  VARIANT 243: note = Ancestral polymorphism is D, Derived polymorphism is Y
  VARIANT 430..545: note = Derived polymorphism lacks residues 430 to 545
MVASPSPTPSAPSSSPCSCSSSSSCSPVTSGAAHRRRLPDLPAAADRSGGAARARALFFARRASGKRAAAVLDQAWARNAVACLLGAAVVVGLVTTTSRRGAVVGAGMGSRLVRRAVPAEALRLGEEENLAAVARRPLDDDDPPPSMMAQVWTKPDSEGYTKCTGRTKNRHGTNSTTAGYIIADANGGLNQMRLGISDMVAVAKLMNATLVIPALDHKSFWTDPSDFKDIFDVQHFKQTLEDDIMVVDSLPPDFKRFKPYTRAPKSWARASYYRAFTKTLKKARVVRFTHTDSRIANNGLPPSIQRLRCRANYEALRYEKDMLSFTGCSHNLTHQEAEELREMRLRVQHWKEKEINGKERRLQGGCPMTPREAALFLKAMGYPSSTRIYVVSGEIYGVRSMDALKAEYPNVYTHYSLATVNELESLRLYQNRLAAVDYNVALQSDVFVYTYDGNMARAVQGHRRYEGFQKTINPDRRKLVELIDKLDEGTIDWTGFASEVKMHHGNRLGGPYQRLFGRSPRHEEYFYANPLPGCLCRRNTQDQVA

SEQ ID NO: 18801 - protein, 326 aa, Zea mays
  VARIANT 81: note = Ancestral polymorphism is G, Derived polymorphism is D
  VARIANT 43: note = Ancestral polymorphism is P, Derived polymorphism is S
MGFGVVHLLDAVFRRMFRSAGLRPGSATVNAEDDTVIHYWAHPSLLRPPPSDSDSEQRQPVVVLIHGFGPDPTWQWAAQAGPLSRHFRLVVPTLLFFGASGTRAPARSDASQAAALAALLAGPGQQHLPGLGAGRTVHVVGTSYGGLVAYHLARELERQGGGVRVGKVVLCDSDACKGAEDDRALAARSGVAEVAELLAPADTRALRRLMAVCAHRPVKYVPECLLRDMLRRYFADKREEKMALIRGIATGEGFELAPLPQEVLIIWGEFDQIFPVDKAHKVKEKLGEKATVKVIPNAGHLPQQEDSKLFNRVLLDFLLRPSSTAA

SEQ ID NO: 18802 - protein, 197 aa, Zea mays
  VARIANT 35..197: note = Derived polymorphism lacks residues 35 to 197
  VARIANT 51: note = Ancestral polymorphism is C, Derived polymorphism is F
  VARIANT 58: note = Ancestral polymorphism is A, Derived polymorphism is V
  VARIANT 70: note = Ancestral polymorphism is S, Derived polymorphism is G
  VARIANT 115..197: note = Derived polymorphism lacks residues 115 to 197
  VARIANT 120: note = Ancestral polymorphism is A, Derived polymorphism is T
  VARIANT 123..197: note = Derived polymorphism lacks residues 123 to 197
  VARIANT 145..197: note = Derived polymorphism lacks residues 145 to 197
MRRTCSHSLATGCSHNLTHQEAEELREMRLRVQHWKEKEINGKERRLQGGCPMTPREAALFLKAMGYPSSTRIYVVSGEIYGVRSMDALKAEYPNVYTHYSLATVNGLESLRLYQNKLAAVDYNVALQSDVFVYTYDGNMARAVQGHRRYEGFQKTINPDRRKLVELIDKLDEGTVDWTEFASEVKMHHRNKLGGPY

SEQ ID NO: 18803 - protein, 140 aa, Zea mays
  VARIANT 118: note = Ancestral polymorphism is E, Derived polymorphism is K
  VARIANT 95..140: note = Derived polymorphism lacks residues 95 to 140
  VARIANT 61: note = Ancestral polymorphism is D, Derived polymorphism is A
  VARIANT 47: note = Ancestral polymorphism is S, Derived polymorphism is R
  VARIANT 42: note = Ancestral polymorphism is N, Derived polymorphism is D
  VARIANT 30..140: note = Derived polymorphism lacks residues 30 to 140
  VARIANT 26: note = Ancestral polymorphism is R, Derived polymorphism is H
  VARIANT 12: note = Ancestral polymorphism is S, Derived polymorphism is L
MLAVSDKHDTLLKESLLLLCTKNVIRLFSLGHTIHGTKKIINKKKLSSSCFTSLIHSSSNDIGLIFVFYNGKIEIRSLPDFSLLKDAFLRDFVYSRNLNSSSSIACSSEGEAILLNGEEIYFSLRSARMRYTCMFLCHSM

SEQ ID NO: 18804 - protein, 588 aa, Zea mays
  VARIANT 426: note = Ancestral polymorphism is R, Derived polymorphism is C
  VARIANT 408: note = Ancestral polymorphism is R, Derived polymorphism is C
  VARIANT 405: note = Ancestral polymorphism is A, Derived polymorphism is V
  VARIANT 383: note = Ancestral polymorphism is A, Derived polymorphism is V
MGRRSNLATWLLALVVLALALFARSCAAAQIKTTDTRWSFQLPLPSGLRGAESLAFDGKGEGPYAGVSDGRVLKWGGTTVGWTTFAHSANYRKIPLCTAGVVPSEETESMCGRPLGLQFHAKTGDLYIADAYLGLMRVGPGGGEAEVLATGAGGAPFHFINGLDVDQSTGDVYFTDSSATYPRRFNTEIMMNADATGRLLRYDARTKSVAVLKAGLPYPNGVAVSRDGAHVVVAHTVPCQAFRYFLSGARAGQYDLLADLPGYPDNVRRDGKGGYWVALNQEKQRLDAMPATAPVKHLVGVRLNADGAEVEELTAAKGVTLSDVAEMKGKLWLGSALVLAISSHPLPTLAAFLASRRDELLRADITSLLKALELPGHWEWALALLRWAGKEGATDASALELVVRALGREGQHCVLLDEMPLPPSSRLDVSAYTTVLHALELFAELQRLGYEIKRDKSKTTYHLYLCLTTAVLTENGEFLLSARRNRKTSCTSILSRWMLTTYQDLPTHIGKLRSNFLSTKFMISNMQPPYSGAVVPHAGRTNRRFDSRKVSLRKVSPKLRQVIDLKRHFKRAGKSTALPKYNAQRPAH

SEQ ID NO: 18805 - protein, 225 aa, Zea mays
  VARIANT 199: note = Ancestral polymorphism is G, Derived polymorphism is V
MAMVLGMVLGKIPVETPKHEVLHTGAGYEIRKYPPSIAAELTYDPKEMRGDPDGGFTVLANYIGVLGKPQNTKPEKIAMTAPVITTGSGSGGDGEKIAMTAPVITTGGGEPEPIAMTAPVITDDQQAPGKVTMQFLLPSKYTRVEEAPRPTDERVVIREVPERKFGVARFSGVATDRTVREKAKGLKAALEKDGYTIKVPFVLARYNPSFTLPPLRTNEVMFPVE

SEQ ID NO: 18806 - protein, 401 aa, Zea mays
  VARIANT 17..401: note = Derived polymorphism lacks residues 17 to 401
  VARIANT 138: note = Ancestral polymorphism is R, Derived polymorphism is P
  VARIANT 139..401: note = Derived polymorphism lacks residues 139 to 401
MSAAETAVSPTTTPQPQLQSDPNAAADAASSNSLWVADETQTLTEVLLQPQPNHLSPPPSGEGDDGITASGAPVGGDAAASASAAAAANATIEERVRGPWSPEEDAVLSNLVEKFGARNWTLIARGIPGRSGKSCRLRWCNQLDPQVKRKPFTEEEDRIIMAAHAVHGNKWASIAKLLDGRTDNAIKNHWNSTLRRRYCNDGQCKHGGSVERSIPKVSREVSEEPWPLNDLNSFTAMDVKDDPVQTAPDTSPRARHITDHCSITQVVDPPYLSRPAAKIGAFRPYYLGHTEPTQQEMPGAVVMFDSTHKVSTPESEVFKFVDPICFAAEVPDKCGYGCCGAHEQHRKNSLLGPEFSEFEGHPPVLNISFASLVSEISSIAWMRSGMQSSDSSNLMQSIPPT

SEQ ID NO: 18807 - protein, 324 aa, Zea mays
  VARIANT 144..324: note = Derived polymorphism lacks residues 144 to 324
  VARIANT 101: note = Ancestral polymorphism is S, Derived polymorphism is N
  VARIANT 74..324: note = Derived polymorphism lacks residues 74 to 324
  VARIANT 55: note = Ancestral polymorphism is P, Derived polymorphism is L
  VARIANT 27: note = Ancestral polymorphism is E, Derived polymorphism is Q
  VARIANT 26: note = Ancestral polymorphism is F, Derived polymorphism is L
MYVARESTKLWRRVCAETTAELQLLLQKWQLLLAGLVFQYIHGLAARGVHYLHQPGPLLQDLGFMALPELGQEKGYLSESVFTFIFISFLLWSFHPFIYHSKRFYTVLLWRRVLAFLVASQFLRIMTFYSTQLPGPNYHCREGSKLATLPPPNNALEVLLINFPRGVLFGCGDLIFSSHMIFTLVFVRTYHKYGSNRLIKLLSWFMAVIQSLLIIASRKHYTVDVVVAWYTVNLVVFFVDNKLPEMADRTNGLSLLPVSTKDKDGRMKEELHKLEKDGRMMDEFHKLLNGNSIDATDWRQRVQMNGKHGEDTSHTVADATSAGT

SEQ ID NO: 18808 - protein, 370 aa, Zea mays
  VARIANT 118..370: note = Derived polymorphism lacks residues 118 to 370
MAEECPPTGGGVELWLPDEFLDDDFFSEEEKAAVAARSENDDEEEGADGLPRRRAGLVVGNAKGQGDGSPANAEVLAGSPQSILCGLQDYGEDSPNGAASKVCSPPSSPLERPPADPWDVLKEAAGQVARLRTNSTPVPTNDAAANQGLPVTPPAKKLSAPAETAKANHSQPPNNSVEERRIQIARFNALKQRQLLKHRRDRELAVATAAAWGTSVAGSHRAAAAAAGGYGAPAPAPAPRVLSSYAWPPLQKQRQAPASPEGVRALFLAPPPGATRECAGTGVFIPRQAGAPAEPKKRPACSPVLLPVRVVQALNLNVVDLGARPIYPGGFVLDHDALVSRSNALLASRPSQLHHGASSREVNLPQEWTY

SEQ ID NO: 18809 - protein, 126 aa, Zea mays
  VARIANT 110..126: note = Derived polymorphism lacks residues 110 to 126
MQPELLRHFQDRDVVVTDHAVRKVKLDELAVALTDGVQACISDLAASIETEVGGGKGSVMGLNQGRNSHIREILAAIQINVNQPTVRALHQWKEAIVGDCTKATQIDVLQLRADHAHHSKAGVGEA

SEQ ID NO: 18810 - protein, 191 aa, Zea mays
  VARIANT 30: note = Ancestral polymorphism is K, Derived polymorphism is R
MAERKIGVAMDFSPSSKKALRWAIDNLVRRGDTLVLLHVRHHGREEGKNVLWSRTGSRKSLLDCLALCTVMLIASQPLRWVFLNLMNRRAALVPLEELMEPPVRQRYDVPYDAEVFDMLNAAARQKEMRVVVKMYWGDPREKVCDAVEELQIESLVMGSRGLGQIQRILLGSVTNYVLSNASCPVTVVKSK

SEQ ID NO: 18811 - protein, 181 aa, Zea mays
  VARIANT 80: note = Ancestral polymorphism is G, Derived polymorphism is C
MEPKKSSVQRQPHAMEPNKSSPCGATATAPAATTEAESPLCSLFYPPAPAPTAANGKDSDLYSILYKGQSGSAQAGVTDGKPQWAPSRSRAANAKDGKHSPPYDSVDTSCFGSSVDYGGRDYFYGSSTPKKVTESSTDYKGNKKDPAADSHGDWWQGTEGDSIDSSSGTEEQKEKIVLSVS

SEQ ID NO: 18812 - protein, 258 aa, Zea mays
  VARIANT 15: note = Ancestral polymorphism is K, Derived polymorphism is M
  VARIANT 23: note = Ancestral polymorphism is E, Derived polymorphism is K
  VARIANT 150..258: note = Derived polymorphism lacks residues 150 to 258
  VARIANT 209: note = Ancestral polymorphism is I, Derived polymorphism is N
  VARIANT 234: note = Ancestral polymorphism is G, Derived polymorphism is R
MMPDIFATGDVDLKKLLNAEDRKLISQIKSILGPFILRRLKSDVMQQLVPKIQHVKFVVMGTEQSEAYKNVINEYRAACQARSAKSSDGISNNIAGLIPKRQISNYFTQFRKVVNDLNPSGQNLQNKEDLQSIRFDDDVEDGKSHELKVYSLDRIRAVTINFSDSNKLGEGGFGPVYMGTLPGGEVAVKRLCRNSGQGLEEFKNEVILNANGYMSTEYAMEGIFSIKSDVYGFGVLILSFHCHEDSLNIAGYVNTGGY

SEQ ID NO: 18813 - protein, 145 aa, Zea mays
  VARIANT 103: note = Ancestral polymorphism is R, Derived polymorphism is W
  VARIANT 74..145: note = Derived polymorphism lacks residues 74 to 145
  VARIANT 61: note = Ancestral polymorphism is G, Derived polymorphism is S
  VARIANT 17: note = Ancestral polymorphism is L, Derived polymorphism is P
  VARIANT 13: note = Ancestral polymorphism is N, Derived polymorphism is D
MCRRQDDFFYAIDQCSLILIKKYSKPEDPPYSITSNLHGVLSHHPGEEVLSAKVRCHDDHGVPEVHRPVLPIHQPAVVEDLEQGVEHGDIGLVYLIKEDHVVWPPHLFSQLPTLFTADVASVIGKKIPTHVRTRVHLITQLKYNI

SEQ ID NO: 18814 - protein, 528 aa, Zea mays
  VARIANT 466..528: note = Derived polymorphism lacks residues 466 to 528
  VARIANT 447..528: note = Derived polymorphism lacks residues 447 to 528
MPALLFCCSPLSQRPSTYQAGLNPPGGLWQGDGDGYKAGDPILLTTSSRRYKAFYYCNSVAFVASLVAIVLVRMKTLHHHNALEAAMILDLFGLIGAYAAGSCRDVSTSIYAVALAGAVLVYVVIHVVFFTLGHSDGEASAEKEVKDAESVKKRRKRLLLFAILAATITYQAGLTPPGGFLAKYDPVTGNHAGDPVLLNNYPRRYTAFFYCNSVSFMLSIALIILLVNPNLYRPAIQSNALSVCTAAGMIGIMGAYAAGSTQHRKTSIYIFALAGFVLSVVFLLVVLFYVIDPDKKNRTADEPTQEGRPADETTQEGRAADTTGSSMEADPEAQKSDAPNEMAAEREAETKDVDEYEKKLHARRKYLMLLGILVAGITYQAGLAPPGGVWQANDGGHEAGDPVMHDNRRHRYLAFFYSNSASFVASVVVIVLRLPDSLHEKWWMDWWLGVMNTTIVLDLLGLLVAYAAGSSRSWKTSGYVSALVIAVLAYFVIHVVLSCFIRISKSRNTQNRGGTSQPNKQLQLAQIG

SEQ ID NO: 18815 - protein, 90 aa, Zea mays
  VARIANT 68..90: note = Derived polymorphism lacks residues 68 to 90
  VARIANT 44: note = Ancestral polymorphism is G, Derived polymorphism is E
  VARIANT 41..90: note = Derived polymorphism lacks residues 41 to 90
  VARIANT 30: note = Ancestral polymorphism is T, Derived polymorphism is I
  VARIANT 18: note = Ancestral polymorphism is D, Derived polymorphism is Y
  VARIANT 17..90: note = Derived polymorphism lacks residues 17 to 90
  VARIANT 11: note = Ancestral polymorphism is P, Derived polymorphism is A
MGDPNADSDHPLLKMEQDAQIGKGSRRDVTILPTLVVNNRQYRGKLERKAVLKAICAGFEETTEPNVCLSGDIETNECLNDNGGYWQDKS

SEQ ID NO: 18816 - protein, 204 aa, Zea mays
  VARIANT 12: note = Ancestral polymorphism is G, Derived polymorphism is R
  VARIANT 18: note = Ancestral polymorphism is G, Derived polymorphism is R
  VARIANT 20: note = Ancestral polymorphism is R, Derived polymorphism is W
  VARIANT 108: note = Ancestral polymorphism is A, Derived polymorphism is V
  VARIANT 111: note = Ancestral polymorphism is M, Derived polymorphism is K
  VARIANT 152..204: note = Derived polymorphism lacks residues 152 to 204
  VARIANT 173..204: note = Derived polymorphism lacks residues 173 to 204
MVFEYMDHDLTGLADRPGMRFIVPQIKCYMKQLLTGLHYCHVNQVLHRDIKGSNLLIDNEGNLKLADFGLARSFSSDHNGNLTNRVITLWYSCRPPELLLGSTKYNLAVDMWSVGCIFAELLNGKPILPGKNEPEQLTKIFELCGTPDDTIWPGVTKMPWYNNFKPHRPLKIRVKDFFKHFDRHALDLLEKMLTLDPSQVYYIV

SEQ ID NO: 18817 - protein, 589 aa, Zea mays
  VARIANT 135..589: note = Derived polymorphism lacks residues 135 to 589
MAVPIQRPSARHVSEIGHVGVRCGAPAPEETDTAPTLASQPHARKSKWPPQARNQHQRFARLLRCPLPSASDRNQRWIRRPRLPEEMNGRGTGGGGGGEDEMEEDSGPSCAQGEGAGNKERVVLMWGYLPGVSPQRSPLLGPVPVRLPPTAATAAGDGWRDVCGGGCGFAMAISESGKLLTWGSADDMGQSYVTAGKHEETPEAFPLPSSVVIVRADAGWAHCVAITDEYDVYTWGWKECVPTGRVIGDQSSVGTMEKDERQMAMATDQGVSPRSQVSRTSSGAAAGSSESRGTDDSTKRRKLSLAKHGPESSTSSDESLSAPPCVVTFSTGVKIVAVAAGGRHTLALSDLGQVWGWGYGGEGQLGLGSRIRTVSSPHPVPCIESALYTKDRPSAMKGNKAAEGHVSKVLGNCVRAIACGGRHSAVVTDSGALLTFGWGLYGQCGQGNTDDVLSPTCVSSILGIKMQDVAAGLWHTVCTSVDGDVYSFGGNQFGQLGTGSDQAETLPKLVDATSLENKNARSVSCGARHSAIITDEGEVFCWGWNKYGQLGLGDSMDRNVPCSVRVDAYHPLNVSCGWWHTLVLAESPA

SEQ ID NO: 18818 - protein, 648 aa, Zea mays
  VARIANT 213..648: note = Derived polymorphism lacks residues 213 to 648
MKALGAHAADLLRGPHLLRAAVFAFAVALAFLVGYHWPNASPRLHPACFFYSQCLVPARTTTADIGAAASPPPPPPPARLGIVGEDGAMQDDFDIGNVGANDTDLATDETAPQEPSDVGASGGPPRVRIERFPVCPESMREYIPCLDNEDDIKRLPSTERGERFERHCPAKDKGLSCLVPAPNGYKAPIPWPRSRDEVWFSNVPHTRLIDDKGGQNWITKVKDKFRFPGGGTQFIHGANQYLDQISQMVPNVAFGSHTRVVLDVGCGVASFGAYLLSRDVLTLSIAPKDVHENQIQFALERGVPAMAAAFATRRLLYTSQAFDIIHCSRCRINWTRDDGILLLEVNRLLRAGGYFAWAAQPVYKHEEAQQEAWKEMENLTARLCWEFVKKEGYIAMWRKPLNNSCYINRGPEGKPPLCDADDNPDDVWYVGLKACISRLPENGEAPTPVQWPARLMEPPKRLQGVEMDAYSSKNELFKAETKFWDDIIDGYIRIFKWRKFKVRNVMDMRAGFGGFAAALIRQKLDWWVMNVVPISEPNTLPVIFDRGLLGVAHDWCEPFDTYPRTYDLLHASGLFSKEQNRCNISSILLEMDRILRPGGKAYIRDRKEVIQEIKEITNAMGWRGTIRDTAEGAYASRKVLMCDKPMAR

SEQ ID NO: 18819 - protein, 192 aa, Zea mays
  VARIANT 17: note = Ancestral polymorphism is S, Derived polymorphism is L
  VARIANT 20: note = Ancestral polymorphism is G, Derived polymorphism is R
  VARIANT 25..192: note = Derived polymorphism lacks residues 25 to 192
  VARIANT 27: note = Ancestral polymorphism is R, Derived polymorphism is H
  VARIANT 29: note = Ancestral polymorphism is L, Derived polymorphism is Q
  VARIANT 38: note = Ancestral polymorphism is R, Derived polymorphism is H
  VARIANT 72: note = Ancestral polymorphism is M, Derived polymorphism is K
  VARIANT 98: note = Ancestral polymorphism is G, Derived polymorphism is V
MACGKHTVYNYSDMLWSHYRPYWRQLRKLWVTELLSARQLRLTERVRAEEKYVGEDGAGPGAAATPEEFRWMIEEIFLNGALHVGDMVSWLGWLDAHGYVGRMKRLAAKFDRFIEHVLREHGERQQREGGAFVPGDMVDLLLYLYLAGGTLQYGARNLVSIDNPVTPPPPAPVSGPPIGPGFVRPPPPPQEV

SEQ ID NO: 18820 - protein, 564 aa, Zea mays
  VARIANT 171: note = Ancestral polymorphism is A, Derived polymorphism is T
MGAMAEVVQEGCVENRQPLAASSSSVSDGSSCGGGGRAGTSPPVSSSGNSISVLRRTTGPIRRAKGGWTPEEDETLQKAVVAFKGRNWKKIAEFFQDRTEVQCLHRWQKVLNPELIKGPWTQEEDEKIIDLVGKYGPTKWSIIAKSLPGRIGKQCRERWHNHLNPEIRKDAWTPEEERALIDAHQVFGNKWAEIAKALPGRTDNSIKNHWNSSLRKKLEAYSSVLSAPKLFVHDDFKDKMKPVATDSHLDLNQMPSVGSKDVPGRAYCTILSPPSQAYNLDSSGLFSFSIPTTQPLTSYAMSSLVDGSAVTLAAQGLQSDSVRDKGLEIDSVHEKGVEVGSTPDPAGVELESAPAKRGAELSSKIELHSILGPLCYQIPNMEDVVPISTPLRSEHNSAQKTSQHCMSPNGYTSPSATIGNVSSQLTVDSILRIAADTFPCTPSILRKRKRDKATPASGNELKTGGVTNDSFYTPNRTNGKDTTSPRSFKTAASFLSLGSVNGLLTSARSFDSSPPYQKKRSKRMAIIKSVEKQLDFSADGLDTSGSEIMNSPCHNSQGANSNRI

SEQ ID NO: 18821 - protein, 530 aa, Zea mays
  VARIANT 404: note = Ancestral polymorphism is K, Derived polymorphism is N
  VARIANT 291: note = Ancestral polymorphism is R, Derived polymorphism is W
  VARIANT 186: note = Ancestral polymorphism is R, Derived polymorphism is W
MPSAALNLGTAVEGSFQGAGGGMVPSARLLTANGGGAPSRREETANGGGPGSDLAALRPTKRPRGKAQLAGKPRRRAPIWNLQAAVFVSVVLNVGLLLQHHVNSTAPSHHDHDHGHRQEHQACPTHLDGGGVSRSSRGRQEVEAAASAASVPKAAGAPSTGKPPVTPDSVINLDHGDPTMFEEFWRGTGAAAEIVIPGWQTMSYFSDVGNVCWFLEPGLDHEVRRLHRLVGNAAVDDGYHVLVGTGSTQLFMAALYALSPPAAAPMSVVSAAPYYSSYPAVTDFLQSGLFRWAGDASSFTGDAYIELVCSPNNPDGAIREAVLPSGGSGVAVHDLAYYWPQYTAITRRADHDIMLFTVSKSTGHAGTRIGWALVKDRDVAKRMAKFIELNTIGVSKDSQLRAAKVLGAVSDAYELPEAAQHRLFDYGRRKMVERWRVLREAAAASGAFSLPHETSAFCNFTKETAATNPAFAWLRCDREDVEDCASFLRGHGILTRSGSQFGADPRYVRVSMLDRDDAYDIFVKRLSSLH

SEQ ID NO: 18822 - protein, 256 aa, Zea mays
  VARIANT 45: note = Ancestral polymorphism is P, Derived polymorphism is L
  VARIANT 52..256: note = Derived polymorphism lacks residues 52 to 256
  VARIANT 55: note = Ancestral polymorphism is G, Derived polymorphism is R
  VARIANT 63: note = Ancestral polymorphism is V, Derived polymorphism is I
  VARIANT 66..256: note = Derived polymorphism lacks residues 66 to 256
MASRKFFVGGNWKCNGTGEDVKKIVTVLNQAEVPSEDVVEVVVSPPFVFLQQVKGLLRLDFAVAAQNCWVRKGGAFTGEISAEMLVNLQVPWVILGHSERRALLGESSDFVADKVAYALTQGLKVIACIGETLEQREAGTTMDVVAAQTKAIAEKISDWTNIVLAYEPVWAIGTGKVATPAQAQEVHDGLRKWLHSNVSPAVAELTRIIYGGSVNGANCKELAAQPDVDGFLVGGASLKPEFVDIIKSATVKSSSA

SEQ ID NO: 18823 - protein, 584 aa, Zea mays
  VARIANT 14: note = Ancestral polymorphism is M, Derived polymorphism is K
MAISSALPCSSLLMAAAQLMLLASVVVQVQGITRHYDFNVTMANVTRLCATKSIVTVNGQFPGPKIVAREGDRLIIRVTNQAQHNISLHWHGIRQLRTGWADGPAYITQCPIQTGQSYVYNYTVAGQRGTLWWHAHISWLRATVYGPLVVLPRPGVPYPFPAPYKEVPVIFGEWWLADTEVVVEQALQLGAGPNVSDAHTINGLPGPLYNCSAKDTYKLKVKPGKTYMLRLINAALNDELFFSVANHSLTVVEVDAVYVKPFTVDTLPIAPGQTTNVLLAAKPFYPGANYYMSAKPYSTARPATFDNTTVAGILEYEYPDAPSSSAASFDKALPLHRPTLPQLNDTSFVGNFTAKLRSLATPQYPAAVPRTVDRAFFFTVGLGTHPCPGNATCLGPTNTTQFAAAVNNVSFVLPTRALLHSHFAGLSSGVYSSDFPVAPLTPFNYTGTPPNNTNVASGTKLMVVPYGANVELVLQGTSILGVESHPLHLHGFNFFVVGQGYGNYDPVNDPPKFNLVDPVERNTVGVPAGGWVAIRFLADNPGVWFMHCHLEVHTTWGLRMAWLVLDGSLPHQKLLPPPSDLPKC

SEQ ID NO: 18824 - protein, 147 aa, Zea mays
  VARIANT 25: note = Ancestral polymorphism is E, Derived polymorphism is Q
  VARIANT 51: note = Ancestral polymorphism is T, Derived polymorphism is I
  VARIANT 62: note = Ancestral polymorphism is A, Derived polymorphism is T
  VARIANT 66: note = Ancestral polymorphism is A, Derived polymorphism is T
  VARIANT 69: note = Ancestral polymorphism is M, Derived polymorphism is I
MELIGKVCQHQNIVPLRAYYYSKDEKLLVYDYVPLGSLCAALHGNKAAGRTPLDWETRVKITLGTTRGMAYLHSHISHTTRSVGKESTHEFVNTMCKGVHQRDVPHLQGCCFVTTLVPCPGIAGCLEEDDGVLFPPPAAIEEGEVCG

SEQ ID NO: 18825 - protein, 51 aa, Zea mays
  VARIANT 36: note = Ancestral polymorphism is R, Derived polymorphism is C
  VARIANT 29: note = Ancestral polymorphism is D, Derived polymorphism is G
  VARIANT 27: note = Ancestral polymorphism is R, Derived polymorphism is C
MATMASSKLTSDKDNPKKLQDRLKYVRGDKEGFANCAEVEAKRLSMHLLAF

SEQ ID NO: 18826 - protein, 74 aa, Zea mays
  VARIANT 16: note = Ancestral polymorphism is R, Derived polymorphism is K
  VARIANT 21: note = Ancestral polymorphism is G, Derived polymorphism is D
MELFAAAEEKPCRLFKKRSGGGGKGGMGVRADGSGKGGSFSGRCARLVKQQRARFYIMRRCVTMLVCWREREYA

SEQ ID NO: 18827 - protein, 426 aa, Zea mays
  VARIANT 189: note = Ancestral polymorphism is S, Derived polymorphism is C
MGRGLGAAPVSPRLASLGAAALALLVAAALPSPAAGAGLNATAVLSAFPNFADFARLLASTPVASELAGRSSLTLLAVPNANLPQSPSAFVAGADIADVLRYHVLLEYLSPSDLARLPPSGKLVTTLFQTTGRAPSDFGAVNLTVGPNSTVVVRSPAPSPGSSATVLGAVTAVPYNLSVLAVGGLIVPSGFDLAASESRPPPPVNITRVLTDARGFYVAASMLQASGVASEFEADERGAGITVFVPTDDAFAGLPATDRLQSLPAERKAVVLRFHVLHSYYPLGSLESIVNPVQPTLATEHTEAGHFTLNITRVNGSIAIDTGIVQASITRTVFDQNPVAVFAVSKVLLPKEMFSRGDSGSTAMVPPSVAMAPGDAGTEQTPQTRLSSPPDLHGEDSESSAALATAKGTSWWCVGLMYLHLLLSLV

SEQ ID NO: 18828 - protein, 293 aa, Zea mays
  VARIANT 211..293: note = Ancestral polymorphism lacks residues 211 to 293
  VARIANT 11: note = Ancestral polymorphism is R, Derived polymorphism is Q
MDAPFFHELRRQASSYLTGKIRSARLALTDVTPTQLLTEEATNGDASPPNVRTMGRIARQAFDVDEYVRITGVLHGRLASFDRRQWREAYKALLLLEHLLTHGPRSVAAEFHKDREAIDRMATFQHVDEKGFNWGLTVRSKSERVLKLLERGPFLEEERERARKIAREITGFGSFSLSAGASHHAVSQSQPPGDDGNRGDGRSSSKREERQRHDDGGRFGRSHSQFEERWWKHKDGDDGDKENLIQSPEPTARVAPREVDAEAEEEELHHHQLHPFHGLGQKQRPEATLLLSQ

SEQ ID NO: 18829 - protein, 648 aa, Zea mays
  VARIANT 156..648: note = Derived polymorphism lacks residues 156 to 648
MAKSEGPAIGIDLGTTYSCVGVWQHDRVEIIANDQGNRTTPSYVGFTDTERLIGDAAKNQVAMNPTNTVFDAKRLIGRRFSDPSVQSDMKLWPFKVIPGPGDKPMIVVNYKGEEKQFAAEEISSMVLIKMKEIAEAYLGSTIKNAVVTVPAYFNDSQRQATKDAGVIAGLNVMRIINEPTAAAIAYGLDKKATSSGEKNVLIFDLGGGTFDVSLLTIEEGIFEVKATAGDTHLGGEDFDNRMVNHFVQEFKRKNKKDISGNPRALRRLRTACERAKRTLSSTAQTTIEIDSLFEGIDFYSTITRARFEELNMDLFRKCMEPVEKCLRDAKMDKSSVHDVVLVGGSTRIPKVQQLLQDFFNGKELCKSINPDEAVAYGAAVQAAILSGEGNEKVQDLLLLDVTPLSLGLETAGGVMTVLIPRNTTIPTKKEQVFSTYSDNQPGVLIQVYEGERARTKDNNLLGKFELSGIPPAPRGVPQITVTFDIDANGILNVSAEDKTTGQKNKITITNDKGRLSKEEIEKMVQEAEKYKAEDEEVKKKVDAKNALENYAYNMRNTIKDDKIASKLPAEDKKKIEDAVDGAISWLDSNQLAEVEEFEDKMKELEGICNPIIAKMYQGEGAGMGAAAGMDEDAPSGGSGAGPKIEEVD

SEQ ID NO: 18830 - protein, 169 aa, Zea mays
  VARIANT 35: note = Ancestral polymorphism is S, Derived polymorphism is R
  VARIANT 47: note = Ancestral polymorphism is P, Derived polymorphism is L
  VARIANT 48: note = Ancestral polymorphism is P, Derived polymorphism is S
  VARIANT 78: note = Ancestral polymorphism is S, Derived polymorphism is F
  VARIANT 81..169: note = Derived polymorphism lacks residues 81 to 169
  VARIANT 90: note = Ancestral polymorphism is R, Derived polymorphism is Q
  VARIANT 96: note = Ancestral polymorphism is L, Derived polymorphism is P
  VARIANT 100: note = Ancestral polymorphism is G, Derived polymorphism is C
  VARIANT 106: note = Ancestral polymorphism is Y, Derived polymorphism is S
  VARIANT 115: note = Ancestral polymorphism is P, Derived polymorphism is L
  VARIANT 151: note = Ancestral polymorphism is R, Derived polymorphism is M
MATTTTQASLLLQKQLRDLAKHPVDGFSAGLVDDSNVFEWQVTIIGPPDTLYDGGYFNAIMSFPQNYPNSPPSVRFTSEMWHPNVYPDGRVCISILHPPGEDPNGYELASERWTPVHTVESIVLSIISMLSSPNDESPANIEAAKEWREQREDFKKKVRRIVRKSQEMF

SEQ ID NO: 18831 - protein, 137 aa, Zea mays
  VARIANT 8: note = Ancestral polymorphism is K, Derived polymorphism is N
  VARIANT 71: note = Ancestral polymorphism is A, Derived polymorphism is D
  VARIANT 85: note = Ancestral polymorphism is K, Derived polymorphism is R
  VARIANT 86: note = Ancestral polymorphism is L, Derived polymorphism is I
  VARIANT 95: note = Ancestral polymorphism is R, Derived polymorphism is H
  VARIANT 100: note = Ancestral polymorphism is P, Derived polymorphism is S
MAPKAEKKPAEKKPAEEKAEKKPRAEKRVPSKEGGEKKGKKKAKKSVETYKIYIFKVLKQVHPDIGISSKAMSIMNSFINDIFEKLAAEAAKLARYNKKPTITSREIQTSVRLVLPGELAKHAVSEGTKAVTKFTSS

SEQ ID NO: 18832 - protein, 178 aa, Zea mays
  VARIANT 85: note = Ancestral polymorphism is F, Derived polymorphism is S
  VARIANT 76: note = Ancestral polymorphism is D, Derived polymorphism is Y
  VARIANT 47: note = Ancestral polymorphism is L, Derived polymorphism is P
  VARIANT 35: note = Ancestral polymorphism is V, Derived polymorphism is G
  VARIANT 27: note = Ancestral polymorphism is G, Derived polymorphism is S
  VARIANT 12: note = Ancestral polymorphism is K, Derived polymorphism is N
  VARIANT 5: note = Ancestral polymorphism is C, Derived polymorphism is S
MNQKCGYAQNAKGEEALYAYRMMRATGLMPDNTTVLGLLFGCKHAGLVDEGNALFKTAGMEQPGILKAEHYACVVDLSLSHAKWFDDCKGFLEELLLESFGSWQGVSMIRREIKVKGLKRITGCSWIEVQDKEEHTRPDYTSVLHAGRMNNQISGFINAFAVAAIKVPPSIPTAKESA

SEQ ID NO: 18833 - protein, 161 aa, Zea mays
  VARIANT 10: note = Ancestral polymorphism is D, Derived polymorphism is N
MGKFRKLGRDYSQRICMLRTMVSQLVKHERIETTVAKAKEVRRKADQMVQLGKEGTQHAARRAAAFVRGDDVVHKLFTELAFRYRDRAGGYTRMLRTRIRVGDAAPMAYIEFVDRENELREAKPATPPPPQRVPLDPWAKSRASQQWAGPKITKSSETDGL

SEQ ID NO: 18834 - protein, 159 aa, Zea mays
  VARIANT 132..159: note = Derived polymorphism lacks residues 132 to 159
  VARIANT 118: note = Ancestral polymorphism is G, Derived polymorphism is R
  VARIANT 110: note = Ancestral polymorphism is P, Derived polymorphism is L
  VARIANT 99: note = Ancestral polymorphism is P, Derived polymorphism is S
  VARIANT 98..159: note = Derived polymorphism lacks residues 98 to 159
  VARIANT 77: note = Ancestral polymorphism is R, Derived polymorphism is C
  VARIANT 64: note = Ancestral polymorphism is A, Derived polymorphism is S
  VARIANT 43: note = Ancestral polymorphism is L, Derived polymorphism is S
  VARIANT 38: note = Ancestral polymorphism is K, Derived polymorphism is N
  VARIANT 18: note = Ancestral polymorphism is S, Derived polymorphism is R
MSFLLALLKSVALFMTSSFLATTLPILISPFYGVSMQKFQYLLRCLKLWARKRGLDCHLLGFFAGIHLAILAAYVCRRHPNASINTLLSLFFDIFVHWPWPLPVSLLDPPVLCGGPDGCSLMPIMLPCIPPEFCSSSTTESTFSKIKEELRRGYALSKV

SEQ ID NO: 18835 - protein, 211 aa, Zea mays
  VARIANT 23: note = Ancestral polymorphism is T, Derived polymorphism is A
  VARIANT 55: note = Ancestral polymorphism is A, Derived polymorphism is T
MMAAKRDRAAWEAEAAAAGVADTARLRLLGLLAQAQRQHLLHLRRAHHGMPPLPTGRVFQCKTCSRQFPTFQALGGHRASHKRPRVLQHQQQPVVADHAGLCLGRQQPPQPPPTPKPRVHACPVCGLEFAIGQALGGHMRRHRADADADAEASNKLRPPLDKAACDVAGGICLDLNLTPLENCAKCRGVLVLGAAGQGGVHKTLAMLDCSL

SEQ ID NO: 18836 - protein, 103 aa, Zea mays
  VARIANT 73: note = Ancestral polymorphism is Y, Derived polymorphism is C
  VARIANT 67: note = Ancestral polymorphism is F, Derived polymorphism is V
  VARIANT 47: note = Ancestral polymorphism is M, Derived polymorphism is V
  VARIANT 46: note = Ancestral polymorphism is V, Derived polymorphism is A
  VARIANT 43: note = Ancestral polymorphism is H, Derived polymorphism is N
MDDDDAASSSPAASYVRLVQHLIEKCICYKLNKEECMETLEKHAKVMPVITSTAVWKELEKENREFFETYKKYLGQESALQKNPSDGQEQPSSASKSSDDDDD

SEQ ID NO: 18837 - protein, 212 aa, Zea mays
  VARIANT 9: note = Ancestral polymorphism is I, Derived polymorphism is M
  VARIANT 22: note = Ancestral polymorphism is L, Derived polymorphism is R
  VARIANT 27: note = Ancestral polymorphism is T, Derived polymorphism is M
  VARIANT 101: note = Ancestral polymorphism is T, Derived polymorphism is I
  VARIANT 105: note = Ancestral polymorphism is E, Derived polymorphism is K
  VARIANT 114: note = Ancestral polymorphism is G, Derived polymorphism is R
  VARIANT 118: note = Ancestral polymorphism is D, Derived polymorphism is Y
  VARIANT 120: note = Ancestral polymorphism is R, Derived polymorphism is S
  VARIANT 137: note = Ancestral polymorphism is V, Derived polymorphism is L
  VARIANT 139: note = Ancestral polymorphism is V, Derived polymorphism is M
MHAQSRTRILKQACAAALALLLAVTSTAASARPARRGSSPSPPSRSSAQTITLYTTGTGVASPKPTAPSTRRPVFTDEGPIGSRWLRALTRPDALRPAAVTVVDERLRGSKEFGLPLDGRLQGVLVTGVADNGSHMVAVKASFAGDGAGDSISFFGVRRDDQEESHVAVVGGTGRYSGASGFAVVRAAGGVPETGGNNVSLSRVLSFSVHLK

SEQ ID NO: 18838 - protein, 405 aa, Zea mays
  VARIANT 290..405: note = Derived polymorphism lacks residues 290 to 405
  VARIANT 227..405: note = Derived polymorphism lacks residues 227 to 405
  VARIANT 134..405: note = Derived polymorphism lacks residues 134 to 405
MKQLHKSSPTQAPSPAHAPAPKAAKPARPGPRSWIGYILREQRLLFVLLGALIATTFFLIRPYFSLSPSSHLPDVRPLFSFAARSAVPPGFRPPPRRVVVTGGAGFVGSHLVDRLLEQGDSVIVVDNFFTGRKENVAHHLRNPRFELLRHDVVEPILLEVDRIYHLACPASPVHYKYNPIKTIKTNVMGTLNMLGLAKRVGARFLLTSTSEVYGDPLEHPQKESYWGHVNPIGVRSCYDEGKRTAETSTMDYHRGAGVEVRIARIFNTYGPRMCLDDGRVVSNFVAQALRRQPMTVYGDGKQTRSFQYVSDLVAGLMALMESDHIGPFNLGNPGEFTMLELAQVVKETIDPMATIEFKPNTADDPHMRKPDITKAKQLLHWEPNVSLREGLPLMVKDFRQRISDE

SEQ ID NO: 18839 - protein, 448 aa, Zea mays
  VARIANT 375: note = Ancestral polymorphism is G, Derived polymorphism is R
MGLAAAARAVLLLLAVAGVLLRPAAAEIKQESFKDDSRGSILFEKFGFGPHGMVSISVTGAKASSALAKPDPAQLGFFLLSDESLFEAIYDQPAPTDLNPNPESSPTCVLSSPYVKPLFTFAELDDKGFHNQTFPITHPDEYSLFFANCAPETSVTMEVRTDMYNTNLDGTKDYLSVGMASVPAIYAFFAVCYVVFLAGWLYVTLYRNRLSAQRIHHLMSGLLVARMLYCISAAEDQHYIRTAGTPHGWDIMFYLFQLVKGVILFAVIALIGTGWSFLKPFLQDKEKKVLMLVIPLQVAANIAAAVVGETGPFLQGWVTWNQIFLFVDVACCCAVLFPVVWSMRSLRESSKTDGKAARTLAKLMLFRQFYVVVIGYLYFTRIIVYALRTITNYKYRWVSVAAEEVSTMAFYMFMFYMFRPAERNQYFALDEDDEEAAEMVLREQEFEL

SEQ ID NO: 18840 - protein, 103 aa, Zea mays; identical to SEQ ID NO: 2445
  VARIANT 79: note = Ancestral polymorphism is R, Derived polymorphism is S
  VARIANT 61: note = Ancestral polymorphism is I, Derived polymorphism is V

SEQ ID NO: 18841 - protein, 385 aa, Zea mays
  VARIANT 287..385: note = Derived polymorphism lacks residues 287 to 385
MDEDSLDSFDISSEAQEDEADGTSGRRQVVLDGLEGKDKILLKDYASILQNYRDTKKQLSEIERKNREYHLEAMSEMRELKSANITKDDEIHSLKRMLSSLQSKISTNPIQCVEKSEESSKENKDPCLEEKEIGEIEEYMKNCQNEEPHVSSLEKKFGEEISKVLEESLDFWLRFSTSYRYIQKFQKTFDKAKAELDRLTDAKVQEGLDTGSAGQSVRKQDSVVLEKKLRDLSTDLQVWLENNVLLQGELESRFSLLCSIQEEISKVTTLDQTDKAHFTPFQAAKFQGEVSNMKQENNKVTKELQAGLDHVRGLQVEIGRAVLKLRDNIELSIGRSNRAQKNFRSLSKARVPLRNFLFGSKPKKGSLFSCMPVMPKPVSDMRQGP

SEQ ID NO: 18842 - protein, 49 aa, Zea mays
  VARIANT 7: note = Ancestral polymorphism is C, Derived polymorphism is W
  VARIANT 10: note = Ancestral polymorphism is C, Derived polymorphism is Y
  VARIANT 25: note = Ancestral polymorphism is L, Derived polymorphism is Q
  VARIANT 28: note = Ancestral polymorphism is A, Derived polymorphism is T
MEHGYPCNGCGKEKRPPLKRGQLKLQIARTLLGSLAAPVAKNRDRGFGR

SEQ ID NO: 18843 - protein, 528 aa, Zea mays
  VARIANT 247..528: note = Derived polymorphism lacks residues 247 to 528
MADDSGSHEGGGGDDDVREQDMFLPITSITRIMKKAVPANAKITKDAKEIMQYCVSEFIFFVTSEAREKSKKEERKRINVDDLLWSVDTAGFEYVELLRICLQKYREGDSNKVSTKAGEGSLNKDAVSTHGGTSNSSNQHGVYNQEMVPPQHGVNNKEMDDMSPQLVHHGVYNLEMDNMLSQLDQHEVYNQGMDDMPAHLVQHGVYNQGICDMTPQLVQHGVYNQGMSDMPPKHGVYNQAMNDMPTQLVQHGVYNQEMDDMLPQLVQHGVYNQGMSDMSPQLVQHGGYNQEMDDMTPQLVPHGVYNQGMSDMLPQLVQHGVHNQEMDDMPPQLVQHGVYNQEINDMQPQLVQHGLYNGEMDDMPPQLVQHGVDNQEMDDMPPHLVQHGVYNQEVDNMVPHLVQHGVYNQGMSDMLPQLVPHGVYNQEMDNITPQHGVYNQGMDDMPPQLVQHGVYNQGMDDISPQLVQHGVCNQGMVDMQLQFVQHGVCNQGMDDIPPQLRDVNLLEDTGVNNLGPAFLRECELCHSI

SEQ ID NO: 18844 - protein, 818 aa, Zea mays
  VARIANT 65..818: note = Derived polymorphism lacks residues 65 to 818
MGLFDRLPPMDHMRSEKMCFVQLIMPAESSRLAVTYLGELGLLQFKDLNEDKSPFQRIFVNQVKRCAEMSRKLKFFSDQINRAGLRSSVRPALEPDIDLEELEARLGEHEHELLEMNTNSDKLKQTYNELLEFKLVLSKAGHILASSHSHAASAEHELDENIYDNGIHEGNAYLLEQGVHQGAHGHSGVRFVSGIILKSKALAFERMLFRATRGNMLFNQASAGEPVTDPISGEEVEKAVFVVFFSGEQAKAKILKICDSFGASCYPVPEEMVKQRQIFNEVSARLSDLEVTLDAGIQHRNKALESIGSQLWRWTIMVKKEKAVYDTLNMLNFDVTKKCLVGEGWCPIFAKSQIKDCLQRSTIHSNSQVGTIFHEMDTIESPPTYFRTDKFTNAFQEIVDAYGVARYQEANPAVYSVVTFPFLFAVMFGDWGHGICLLLGALVLILREKRFSSQKLGSFMELAFGGRYVILLMAIFSIYCGLIYNEFFSVPFHIFGKSAYECRDKSCSDAHTFGLIKVREPYPFGVDPSWRGSRSELPFLNSLKMKMSILMGVAQMNLGIVLSYFDARYHGNALDIRYQFIPQMIFLNSLFGYLALLILIKWCTGSQADLYHVMIYMFLDPAGDLGENQLFWGQKELQILLLLLALIAVPWMLFPKPFILKKLHKERFQGHTYRFLGTSEMDPDSEPDSARARHDDFNFSEVFVHQMIHSIEFVLGAVSNTASYLRLWALSLAHSELSTVFYEKLLLLAWGYDSLIVKFVGLIVFSFATAFILLMMETLSAFLHALRLHWVEFMNKFYHGDGYKFKPFSFALLADDED

SEQ ID NO: 18845 - protein, 92 aa, Zea mays
  VARIANT 80: note = Ancestral polymorphism is G, Derived polymorphism is D
  VARIANT 76: note = Ancestral polymorphism is R, Derived polymorphism is Q
  VARIANT 43: note = Ancestral polymorphism is Q, Derived polymorphism is H
  VARIANT 32: note = Ancestral polymorphism is F, Derived polymorphism is S
  VARIANT 20: note = Ancestral polymorphism is G, Derived polymorphism is S
MAGEMSWVGKKIHLYNVTMGLYMLDWWERCLFSILPPCLDPIQFIVDILVLILLWFICFNGSRFATDVYESHLKARIFQGANYGMGIGMPSS

SEQ ID NO: 18846 - protein, 148 aa, Zea mays
  VARIANT 14: note = Ancestral polymorphism is A, Derived polymorphism is V
  VARIANT 44: note = Ancestral polymorphism is K, Derived polymorphism is M
  VARIANT 57: note = Ancestral polymorphism is W, Derived polymorphism is R
  VARIANT 76: note = Ancestral polymorphism is D, Derived polymorphism is N
  VARIANT 78: note = Ancestral polymorphism is D, Derived polymorphism is G
  VARIANT 89: note = Ancestral polymorphism is S, Derived polymorphism is L
  VARIANT 99: note = Ancestral polymorphism is G, Derived polymorphism is E
  VARIANT 108: note = Ancestral polymorphism is L, Derived polymorphism is Q
MILAPKDMQVFRGADGIACKYNWNSLPLANMQQCYWVLLGRFPKIYASNLPRTDSSWYQDLGFQVHFPSLPVLSSNTDDVIPVTATRYSIDALKLPTAGGWNQVYKGQTLVTIAGAGHEVPLHRPRQALIMFRHFLQNKPMPTKKIAN

SEQ ID NO: 18847 - protein, 163 aa, Zea mays
  VARIANT 149..163: note = Derived polymorphism lacks residues 149 to 163
  VARIANT 78..163: note = Derived polymorphism lacks residues 78 to 163
MERSLDSYSSIKDVTYSCGYCGYALNLSSSARDTEGIGPKYRKQIRKGVVAFVAVDESRFTLAHELTCTPYFRSARSWGLFRRRSRLLCRKCGGHIGSAYGKEEEEDSSSSSLFGGDGSSDDTRPSSGSGRSSVASSQKSYVVRISALQPSSDDSAVVPFTHR

SEQ ID NO: 18848 - protein, 345 aa, Zea mays
  VARIANT 39: note = Ancestral polymorphism is Q, Derived polymorphism is K
MAATEVYSPTTAAAAQQQRGKAASQAWRAVVGWIGFFLQVLLQILRGTPSCAQLLSFVGFRYPLLSGPAASEPLPEVAFMPLHSEIPADAAPAPKPASEPLGRLTLIIDDPVHGAVILLNIFSCVYAWNILTTLGLSVQVVLDLDETLVSAYESSSLPAIVRTQAVEAGLHCFDMECISSDKDVEGKQKVNHVTVFERPGLHEFLRKTSEFADLILFTAGLEGYARPLVDRIDVHNRFRIRLYRPSTVTTEYREHVKDLTRVSKDFGRIVIVDNNPFSFILQPLNGIPCVPFSAGQHSDDQLMTVIFPLLKHLSLQKDVRPVLRERFHMPEWFQNHGIPQISQAV

SEQ ID NO: 18849 - protein, 779 aa, Zea mays
  VARIANT 503: note = Ancestral polymorphism is S, Derived polymorphism is C
  VARIANT 290..779: note = Derived polymorphism lacks residues 290 to 779
  VARIANT 166..779: note = Derived polymorphism lacks residues 166 to 779
MAAPGLDQVMAFLTDHGFAGAASALRDDVLARTAAGDEGHDAALGPRLPPLRMPAAGTGSGSGAGSGTPAPASPGSSSGSASSSAFVSMRSTPSGELLNLSGSATFVSVSALGLVPNFLHILPILNENSLSVLPTVGLLNPYGLWSPRHSQSDVSSSEMEFGTARQYDTTDLFFQEDWLYDDHLFPSKLDDEDDEREEEDKFVLDAHGGASAQTEIGKLGAGHNHRHEHIGGDRCEGCAEVYTCSSPLCGCCGGGLKNDGLHVARSSSSTVYGRYQIMDDRTETMDDCAQDGFQLKQSGDIMFECGMQRDPGRGDDDSDLSVVEKELQMLSSFDTDAVTNHGVHDFTDNGDLNGICDKNPKISIDKEYLKGHRIQPFPEIGDPDEAYEFRNVGSLNADVQHSTALEAEEDAETNIDLALSDFHREYEVFELRIIHRKNRFTSLFYFEFSLQNCMLVDPFSYLYNIGMHCRTGFEENKDFPIVLNSVVAGRYCITEYLGSAAFSKVVQAHDLQTGMDVCLKIIKNDKDFFDQSLDEIKLLKFVNKYDPLDEHHVLRLYDYFYHQKYNQESGGEVYFTLPRIQVIARQCLEALVYLHHLRIIHCDLKPENILIKSYSRCEIKVIDLGSSCFLTDNLCLYVQSRSYRAPEVILGLPYDQRIDIWSLGCIISELYTGEVLFPNEPVSMMLAQMIGIIGPVDMEMLELGQETQKYFTDDYDLFTKNEETDQLEYLIPEKTSLRRHLQCPDSEFVDFLSYLLQINPRKRPTADEALQHPWLSFAY

SEQ ID NO: 18850 - protein, 472 aa, Zea mays
  VARIANT 291: note = Ancestral polymorphism is V, Derived polymorphism is L
  VARIANT 217: note = Ancestral polymorphism is Q, Derived polymorphism is L
MTHESSSSSVVTGIPIHDRRRPIPSCPLSPSPLFLRASNAYAVTSVLSSLSAAEPTVNFFTVAHAQACRARSARQKEGRTRGTQFQMADCMQEWPEPVVRVQALAESGLSVIPSCYVKPPCDRPAPAPAPTMAPPAPAVHPRKKEPSSDAIASIPVVDLGELLAADGAVATVTEAVAAACRDWGFFQVVNHGVRPELMRAAREAWRGFFRRPPAEKQRYANSPRTYEGYGSRLGVQRGAVLDWGDYFFLHLAPEAAKSTPRFWPAQPSNCKDVSEEYGREVVRLCELLMRVLSVSLGLDEAHLQRAFGGAECGATLRANYYPRCPQPDLTLGLSAHSDPGALTVLLADVLVRGLQVRRAAADDWVTVQPVRDAFIVNVGDQVQILSNSVYKSVEHRVVVNAEEERISLALFYNPKGDVPIAPAPELVAAASLPALYPTMTFDEYRLYVRNKGARGKAQIEALKGQGTPESQL

SEQ ID NO: 18851 - protein, 536 aa, Zea mays
  VARIANT 460..536: note = Derived polymorphism lacks residues 460 to 536
MGNCCRSPAAVAREDVSSSHFPASNAKKKPHQARNGGGAGQKRLSVLGDEGCEVVGIDDKYVLDRELGRGEFGVTYLCMDRGTKELLACKSISKRKLRTAVDVEDVRREVAIMRHLPKSPSVVSLREACEDDGAVHLVMELCEGGELFDRIVARGHYTERAAASVTRTILEVVQLCHRHGVIHRDLKPENFLFANKKENSPLKAIDFGLSIFFKPGEKFSEIVGSPYYMAPEVLKRNYGPEIDIWSAGVILYILLCGVPPFWAETEQGVAQAILRGNIDFKREPWPNVSENAKDLVRHMLEPDPKLRLTAKQVLEHHWLQNAKKAPNVPLGDIVKSRLKQFSRMNRFKRRALRVIADHLSAEEVEDIKDMFKTMDTDNDGIVSYEELKTGIAKLGSHLAESEVQMLIEAVDTNGRGALDYGEFLAVSLHLQRMANDEHLRRAFLFFDKDGNGFIEPEELREALVDDGAADSMEEVVNDILQEVDTDKDGKISYEEFVAMMKTGTDWRKASRHYSRGRFNSLSMKLIKDGSVKLGVE

SEQ ID NO: 18852 - protein, 242 aa, Zea mays
  VARIANT 16: note = Ancestral polymorphism is F, Derived polymorphism is S
  VARIANT 140: note = Ancestral polymorphism is G, Derived polymorphism is E
MDRVQLVLLGLPILLFCSDVVTLFAPLPPPGPGPDRGPHAFQPGAESSSAADASAHVEPQVDGTGSGTTVDFKFCASCSYRGTAMTMKRMLETSFPGIHVVLENYPPPFPKRALSKAVPLLQFGAMATLMAGDQIFPRFGMVPPPWYYSLRANRFGTMASIWLFGNFAHSFLQSSGAFEVYCNGQLVFSKLSEQRFPSELELQELIGSRIPDSQIVENLEKDLVLEKDLVLDDVDADDAMRD

SEQ ID NO: 18853 - protein, 241 aa, Zea mays
  VARIANT 150: note = Ancestral polymorphism is T, Derived polymorphism is M
  VARIANT 20: note = Ancestral polymorphism is I, Derived polymorphism is T
MMSGRSGGRDGEAAGPVIRIRVSHGATFREVVVPAQATFGELKRILVQTTGLEPERQRLFFRGKEKSDREFLHAAGVKDGAKLLLLEKPSPANIEQKVEPVIMDESVMKACEAVARVRAEVDRLSAKVCDLEKNVLAGRKVDDKEFVVLTELLMIQLLKLDGIEAEGEARAQRKAEVRRVQSLVETLDKLKARNANPFSDHNNAVSVTTQWETFENGMGSFSAPPPHVPSEQVNTDWEQFD

SEQ ID NO: 18854 - protein, 525 aa, Zea mays
  VARIANT 73: note = Ancestral polymorphism is A, Derived polymorphism is G
MAASSLLRSFTRRSCAGPSAFAYRHHQRQQPWSPFSTSAAAVTQDEAAKRFPGLGPTAKGEKARVVVLGTGWAGSRLMKDLDTQGYDVVCVAPRNHMVFTPLLASTCVGTLEFRSVAEPVARIQPAVSKSPGSYFLLARCTGVDPDGHTIDCETVTDGEKDSLEPWKFKVAYDKLVFACGAEASTFGIHGVTDHAIFLREVHHAQEIRRRLLLNLMLSDLPGISEEEKCRLLHCVVVGGGPTGVEFSGELSDFIIRDVKQRYSHVKDYIHVTLIEANEILSSFDVRLRQYATKQLIKSGVRLVQGIVKDVQPNKIILDNGEEVPYGLLVWSTGVGASPFVKSLPFPKSPGGRIFTRFFNVDRIGVNEWLRVPSVHDVYAIGDCSGFLESTGKEVLPALAQVVQVSYRNVHSTMAVAERQGKYLASLLNHVMKAGGGHANSETEADLGRPPFVYKHLGSMATVGRYKALVDLRQSKESRGISLAGFVSWFIWRSAYLTRVVSWRNRFYVAINWLTTLLFGRDISRI

SEQ ID NO: 18855 - protein, 301 aa, Zea mays
  VARIANT 40: note = Ancestral polymorphism is V, Derived polymorphism is A
MASSSSLFSPCALTAKLGIGHASYGSGRRANLRRRGRLSVVAVQTGPQKPSPSSSQAAAAEDEADALQKLLKREYKYGFEGAEIKYSTVQNWYSGDEEGKGGIYNFVTKRGRCKGHGSKISWTQVETGSAITWKYPSVELIGDDSVGEFYSVALTKDCQQADTGTKMIHKGKNSRSRIISKGISAGKSRNCYRGLVLMNPSAENAYNSSQCDSLLIGDNAAANTYPTIQVGCTSGRVEHEASTSKIGEDQLFYFQQRGVDHEKAVAAMIGGFCRSVFEHLPYEFAQEVDALMNLKLEGSVG

SEQ ID NO: 18856 - protein, 107 aa, Zea mays
  VARIANT 22: note = Ancestral polymorphism is T, Derived polymorphism is P
  VARIANT 40: note = Ancestral polymorphism is L, Derived polymorphism is F
MIYKAAAFLIGPVQFDRFVHATLFLCAMEATRKPAVCRALLVLLIVVSSAAVSTAQDESCWKDDDHHPICLPEDCVATCRDHGHADGRCSWAWSWRPYCQCLLADCQ

SEQ ID NO: 18857 - protein, 137 aa, Zea mays
  VARIANT 60: note = Ancestral polymorphism is Y, Derived polymorphism is H
MGGGMEVHKNRWIEEWNAGRENLEFNFRWTRRSLAVVGLFGLAVPILVYKGIVREFVIHYSEPLLSFHCPFPLSPNPKINFLFVPAGLDPAYAGRGCRPAIQEVPVSGVQGCRRRRSLDRGCEEGSFHSVCVGIVLV

SEQ ID NO: 18858 - protein, 115 aa, Zea mays
  VARIANT 54: note = Ancestral polymorphism is A, Derived polymorphism is G
MDPRYLPELAALLPRLASPRRATLPQVFVGGRHLGGADEVRRLHEAGELRRVVAGAGAASLAACGRCGGEQYVLCGSCDGSHKRYSAKGGGGFRACAGCNENGLVRCPVCSPPDV

SEQ ID NO: 18859 - protein, 426 aa, Zea mays
  VARIANT 196: note = Ancestral polymorphism is C, Derived polymorphism is S
  VARIANT 301: note = Ancestral polymorphism is L, Derived polymorphism is V
MAAAEAASSAPAPEHLLEVEDDEVMIDFKPNAKCRADLRLRSLHPSLPVAFKVQTSSPLKFLVSPPRGAVPPLSSASLRVVLRPQPHAPPSFPRSRADRFLVLSSLSAARLDSVGSSNDGGGGGGGVRAVRLRVFFGGPYLLRLAADAGDAAAVRLILRRQPHLLPFLEHQQAAAAPDAGEQQWAPLHAAAARGDCGELRRLGPEALAARDREGRTVLHAVAAAGEAEAVAVLVDMGADTSAVDARGRTPLDVARDKGYCNGGGVVNFCPVQQEVVDVLERWELVMTAARRGDLGSLESLLSKRAGVRGRDQYGLTALHLAAIKGHGDAIALLAGPGCMDVECEDVEGHRPLHLAVEGGHAEAVELLLDMGADANARTRRGATPLQMAEAMGYEAIAQLLCARGAEVAAASALCAASSSSSSISCA

SEQ ID NO: 18860 - protein, 208 aa, Zea mays
  VARIANT 16: note = Ancestral polymorphism is G, Derived polymorphism is R
  VARIANT 54: note = Ancestral polymorphism is P, Derived polymorphism is L
  VARIANT 92: note = Ancestral polymorphism is P, Derived polymorphism is R
  VARIANT 103: note = Ancestral polymorphism is R, Derived polymorphism is C
  VARIANT 168..208: note = Derived polymorphism lacks residues 168 to 208
MDPSGPGPSSVIGAAGGDEAAAVALQRPAQLSRYESQKRRDWNTFLQYLRNHRPPLTLARCSGAHVIEFLRYLDQFGKTKVHAAGCAYYGQRAPPGPCPCPLRQAWGSLDALIGRLRAAYEESGRTPESNPLAARAVRIYLREVRDSQAKARGIPYEKKTKRKRAQQQATEPSTSSSDAAAGSGRARAAAAAASAAQAGGSSAAPSST

SEQ ID NO: 18861 - protein, 257 aa, Zea mays
  VARIANT 132: note = Ancestral polymorphism is A, Derived polymorphism is S
  VARIANT 92: note = Ancestral polymorphism is E, Derived polymorphism is D
  VARIANT 65: note = Ancestral polymorphism is S, Derived polymorphism is F
  VARIANT 63: note = Ancestral polymorphism is G, Derived polymorphism is E
  VARIANT 46: note = Ancestral polymorphism is P, Derived polymorphism is L
  VARIANT 31: note = Ancestral polymorphism is A, Derived polymorphism is T
MAMASRPPLHRRRRLPLVPLLVLLCLSPGCAAGRVPVSVYYETLCPFCSAFVVNDLSRIFRDGIFSIADLRLVPFGNGRVSADGTVTCQHGEDECQLNAIEACVIRIWPDAEQHFPFIQCVEHLALTRKWDAWQSCFHETGLAYQPAIDCYNSGYGRQVGEKLLDFLLSFCFQSSSTKLVLQYAAETNALQPPHRFVPWVVVNGKPLGDDYMNFEAYICSAYDGKLPKACKGKHLAIAQETKASRGDKVCPASKTIS

SEQ ID NO: 18862 - protein, 352 aa, Zea mays
  VARIANT 262: note = Ancestral polymorphism is L, Derived polymorphism is S
MAQAHHPLLLLILLLFLSSTAIPSSKRTQPKFSAVFYFGDSVLDTGNNNHLPTVAVANHAPYGRDFPGKKPTGRFSDGRLIPDLLNERLQLKEFSPPFLDARLPNSDVATGVNFASAGSGFNDQTSRLSNTLPMSKQVDLFEDYLLRLRGIVGDKEASRIVARSLIFISSGTNDFSHYYRSPKKRKMEIGDYQDIVLQMVQVYVKELYDLGGRQFCLAGLPPFGCTPIQITLSGDPDRACVDEQNWDAHVYNSKLQRLLAKLQGSLHGSRIVYVDAYRALMEILENPAKYGFTETTRGCCGTGLREVALLCNAFTPTCKNISSYVFYDAVHPTERVYMLVNDYIVNDVIPQF

SEQ ID NO: 18863 - protein, 571 aa, Zea mays
  VARIANT 24: note = Ancestral polymorphism is A, Derived polymorphism is P
  VARIANT 12: note = Ancestral polymorphism is L, Derived polymorphism is R
  VARIANT 2: note = Ancestral polymorphism is A, Derived polymorphism is T
MTSPSSSSSWLLLLLSCLALALLAADAEVHHHEFVVQETPVKRLCKTHNVITVNGQYPGPTLEVREGDTLVINVVNRAQYNVTIHWHGIRQMRTGWADGPEFVTQCPIRPGGSYKYRFTIEGQEGTLWWHAHSSWLRATVYGALIIRPRENKTYPFAKPSREVPVILGEWWDANPIDVIREAQRTGGAPNVSDAFTINGQPGDLYKCSQKETTAIPVKPGETALLRFINAALNHELFVTIAQHRMTVVATDASYTKPFTTSVLMVAPGQTTDVLVTMDQAPARYYVAARAYVSGQNVAFDNTTTTAVVEYDCGCASDFGPKIQPAFPSLPAFNDTAAAAAFAAGIKSPGRVRVHESVDEHLFFTVGLGLFNCEPGQLCAGPNNSTRFTASMNNVSFVFPRTDSLLHAHYFKTPGVFTTDFPAHPPVQFDYTAQNVSQALWQPVPATKLYPLRFGSVVQLVLQDTSIVTPENHPIHIHGYDFFILAEGFGNFDPEKDVDKFNYVVPPQRNTVAVPVNGWAVIQFVADNPGVWLMHCHLDVHITWGLAMAFLVEDGYGELQSLEPPPVDLPMC

SEQ ID NO: 18864 - protein, 135 aa, Zea mays
  VARIANT 103: note = Ancestral polymorphism is R, Derived polymorphism is W
  VARIANT 94: note = Ancestral polymorphism is G, Derived polymorphism is D
  VARIANT 67..135: note = Derived polymorphism lacks residues 67 to 135
MDVGSSERAQDIAQQREGMLRRCCTSSPNPSTSSRSPTSSRRPRAGAAEPKLRPAPKTEGKDRSAAQPAAANVDSEESRAEVVGGGSFHSINDGVLLTFYMSRAPTWSFIVRLARTPSSASICRSPNIASDCSKR

SEQ ID NO: 18865 - protein, 106 aa, Zea mays
  VARIANT 33: note = Ancestral polymorphism is F, Derived polymorphism is S
MQRHDFVNQRCATLQRYLRRLAVVGHSPVLHASLTATGPNGIPTSDAQKRQAAGISNFASAVVRVNRSQAKLNAEILKHLATYSDHFASIWTKVAEETKGYAKSSS

SEQ ID NO: 18866 - protein, 174 aa, Zea mays
  VARIANT 53: note = Ancestral polymorphism is T, Derived polymorphism is A
MGNSLRCCLACMVPCGALDVVRVVHLSGRVDEFSCPVAAATVLAANPAHTLTTAWSPSGAPGCGSRKLAIVSPDSDLKRGRIYFLIPSATLPADRRSKKQSSKRPSQSQSQSQSRLRHHAKKQSAGGTAEQDNYLRELLSEKAASGGGHRRRRSGARVGVWRPRLESIVEEASD

SEQ ID NO: 18867 - protein, 593 aa, Zea mays
  VARIANT 127..593: note = Derived polymorphism lacks residues 127 to 593
MTTSSSGSIEAPANSRPGSFAFASTSTSTSTSFTDMLGGSTDAAGGASRYKAMTPPSLPLSPSSFFSNNPGGLNPADFLDSPALFSSSCSGARCRAAHVPGNANALCTFQIFTSPTTNAFASQQFSWLATSGAEQSGKDERRPSSYPDFSFQTAPTTEEAVRTTTTFQPPIPAASLGEEAYRSQQQQPWAYQQQQPGMDAGSSQQAAPYGEPFQAASSDAATMAPHVPASGGYSHQAQQSQRQSSDDGYNWRKYGQKQMKGSENPRSYYKCTFPGCPTKKKVERSLDGQITEIVYRGTHNHAKPQNTRRNSSAAAQLLQSGGGDASEHSFGGMLGTPVATPENSSASFGDEEAGVGSPRAGGNAGGDEDEPDSKRWRKDGDGVGEGISMAANRTVREPRVVVQTMSDIDILDDGYRWRKYGQKVVKGNPNPRSYYKCTTPGCPVRKHVERACHDLRAVITTYEGKHNHDVPAARGSAALYRPAPPPGDNAGHYLGGAAGAAQTGMAYQLAGQQYGFGGQLGSFGLSGGAPAQSSGPSGSLALSSGFDNPMPMGSLYMSQSQQQGQHDAMHAPRAKEEPREEDMFFQQSMVYTD

SEQ ID NO: 18868 - protein, 122 aa, Zea mays
  VARIANT 5: note = Ancestral polymorphism is P, Derived polymorphism is S
  VARIANT 10: note = Ancestral polymorphism is R, Derived polymorphism is Q
  VARIANT 13: note = Ancestral polymorphism is F, Derived polymorphism is L
  VARIANT 17: note = Ancestral polymorphism is T, Derived polymorphism is I
  VARIANT 24: note = Ancestral polymorphism is V, Derived polymorphism is F
  VARIANT 25: note = Ancestral polymorphism is A, Derived polymorphism is T
  VARIANT 34: note = Ancestral polymorphism is R, Derived polymorphism is K
  VARIANT 36: note = Ancestral polymorphism is Y, Derived polymorphism is N
  VARIANT 37: note = Ancestral polymorphism is P, Derived polymorphism is H
  VARIANT 50: note = Ancestral polymorphism is V, Derived polymorphism is F
  VARIANT 62: note = Ancestral polymorphism is R, Derived polymorphism is W
  VARIANT 102: note = Ancestral polymorphism is D, Derived polymorphism is E
  VARIANT 114: note = Ancestral polymorphism is I, Derived polymorphism is T
  VARIANT 115: note = Ancestral polymorphism is E, Derived polymorphism is D
  VARIANT 117: note = Ancestral polymorphism is V, Derived polymorphism is L
MCGDPNSVLQFAFIEFTDEEGARVALNLSGTVLRYYPVRVLPSKTAIAPVNPTFVPRSDDEREMCARTIYCTNIDKKVTQADLKLFFESICGEVFRLRLLGDYHHSLESIYFAIEGVFDNNR

SEQ ID NO: 18869 - protein, 196 aa, Zea mays
  VARIANT 149: note = Ancestral polymorphism is A, Derived polymorphism is T
  VARIANT 126: note = Ancestral polymorphism is G, Derived polymorphism is E
  VARIANT 82: note = Ancestral polymorphism is R, Derived polymorphism is W
  VARIANT 64..196: note = Derived polymorphism lacks residues 64 to 196
  VARIANT 51: note = Ancestral polymorphism is R, Derived polymorphism is G
  VARIANT 32: note = Ancestral polymorphism is L, Derived polymorphism is P
MTCLCQYADCSLYRSYPSIPRCDFADNFFFIPGIAAPVFAGVYTAHSLLSRGNEAPSDEGTNESDTVQEETKPPETGNCEKRKVRVQLYKLQEAESQASLLESCLKSLCTVGLLLGYSVLLLYSPETMAVVELKVGMHCERCIKAIKKAIKTIDDMESYRLETEINKVTVTGSVTPEEVVKALHKIGKTATCWTQD

SEQ ID NO: 18870 - protein, 507 aa, Zea mays
  VARIANT 48: note = Ancestral polymorphism is P, Derived polymorphism is A
MASNRALFVLPMLLAVAVLLPEQIALSSADFPLGRQATVQLPPAPYQPGFAARAVVLDAKQGHRQPAFAAAVSAEAGAGRCTCSLVVLLGGVKVWASDHLEKFVPAALCRLELTEDGQLRLTDGAGKVGWLSGTAGQGVKALHLDRRTGNLVLLDAQNCTMWQSLDDPTDTFLRGQQRRLPVYLIAPTTNMAASSVFYSFELDGDRIATYVNFGDTRYSYWELAPPANRTMAAARLNGSGLGMLDLRGVTVAQITPPVKKPPVSFLALGGDGNLVMYYYDTRHQKFRASYKALGFCQLPLSCSVHEVCSSAGKCKDFSEYADRPAARAGNASSSNPREGAGDKARMVHLRGVTTVLRTASPLANVTLRECVVQCARNLSCNAALYVRDNAGVAAADHGVCSHYKVTAGAREVTDGSRRYSYWVKFPEAAAGGDEEDDDSSPGTSTILMICGAIDVVCALVFVLLISLYFCRLRRQAAAVDRVVELQECDGEGAREHNDTDSNGSEQT

SEQ ID NO: 18871 - protein, 276 aa, Zea mays
  VARIANT 223: note = Ancestral polymorphism is S, Derived polymorphism is W
  VARIANT 211..276: note = Derived polymorphism lacks residues 211 to 276
  VARIANT 177: note = Ancestral polymorphism is G, Derived polymorphism is D
  VARIANT 175..276: note = Derived polymorphism lacks residues 175 to 276
  VARIANT 160: note = Ancestral polymorphism is W, Derived polymorphism is S
  VARIANT 157..276: note = Derived polymorphism lacks residues 157 to 276
  VARIANT 155: note = Ancestral polymorphism is K, Derived polymorphism is I
  VARIANT 144: note = Ancestral polymorphism is F, Derived polymorphism is S
  VARIANT 143: note = Ancestral polymorphism is T, Derived polymorphism is S
  VARIANT 137: note = Ancestral polymorphism is T, Derived polymorphism is M
  VARIANT 134: note = Ancestral polymorphism is M, Derived polymorphism is T
  VARIANT 124..276: note = Derived polymorphism lacks residues 124 to 276
  VARIANT 114: note = Ancestral polymorphism is C, Derived polymorphism is Y
  VARIANT 77: note = Ancestral polymorphism is E, Derived polymorphism is G
  VARIANT 58: note = Ancestral polymorphism is K, Derived polymorphism is N
  VARIANT 47: note = Ancestral polymorphism is K, Derived polymorphism is N
  VARIANT 39: note = Ancestral polymorphism is G, Derived polymorphism is R
  VARIANT 31: note = Ancestral polymorphism is G, Derived polymorphism is D
MVINGQDRHRGPEEAMATCLKVHMCLAWEEGLLVGISFGAKLATCLKVHMCAQGPYEKFLNQLYMLVRHMWDFKEEEDRRLLLLLTFVTPTSRTERFVCSILFHSLFDAVDDDCLVKFGRWEMEVVATPSVEHMKATRSANLTFCEEGWNGANVKRYFVWLFLDMFELLAGYYSRYDLYHVDFQDPELPRTPKLSALWYDEFLKNEIDIIENVVVSATDDARWHAAGEACPARSLVKSGRSIFMHIPGQASDQTKESNKSCLCRSERPVRMPYLPP

SEQ ID NO: 18872 - protein, 262 aa, Zea mays
  VARIANT 89..262: note = Derived polymorphism lacks residues 89 to 262
  VARIANT 64: note = Ancestral polymorphism is H, Derived polymorphism is R
  VARIANT 16: note = Ancestral polymorphism is P, Derived polymorphism is A
  VARIANT 8: note = Ancestral polymorphism is H, Derived polymorphism is R
  VARIANT 6..262: note = Derived polymorphism lacks residues 6 to 262
MEAVWQIHAKAGGAVPRRRRLPLPLPLPLRRSALGLQWLYCAAPFRVLETRTGGSTLRQSGVLHGWAMAAAAGGWSGVIPATVHVQVRRLQPLLPGARGRAAGRARHYRVLPGGVEVQVRQPPLHAMSAVRASRQAASQPASEGSRAPAEARWAYAPLLHRAGWLSRSRLRCAARARAVSWSSRRAHGRDLRSAAARAGRGQWRPTTLTGCRLGPLPGDAETVHGFFRAARWNSHGPTTSAWRLGAERRHGGRTARQRVLDR

SEQ ID NO: 18873 - protein, 137 aa, Zea mays
  VARIANT 120: note = Ancestral polymorphism is C, Derived polymorphism is Y
  VARIANT 111: note = Ancestral polymorphism is G, Derived polymorphism is S
  VARIANT 106: note = Ancestral polymorphism is T, Derived polymorphism is I
  VARIANT 103: note = Ancestral polymorphism is L, Derived polymorphism is P
  VARIANT 95: note = Ancestral polymorphism is A, Derived polymorphism is S
  VARIANT 83: note = Ancestral polymorphism is S, Derived polymorphism is P
  VARIANT 82: note = Ancestral polymorphism is I, Derived polymorphism is V
  VARIANT 80..137: note = Derived polymorphism lacks residues 80 to 137
  VARIANT 72..137: note = Derived polymorphism lacks residues 72 to 137
  VARIANT 68: note = Ancestral polymorphism is P, Derived polymorphism is L
  VARIANT 55..137: note = Derived polymorphism lacks residues 55 to 137
  VARIANT 53: note = Ancestral polymorphism is P, Derived polymorphism is S
  VARIANT 49: note = Ancestral polymorphism is P, Derived polymorphism is S
  VARIANT 46: note = Ancestral polymorphism is N, Derived polymorphism is I
  VARIANT 44: note = Ancestral polymorphism is P, Derived polymorphism is L
  VARIANT 31: note = Ancestral polymorphism is M, Derived polymorphism is T
  VARIANT 12: note = Ancestral polymorphism is R, Derived polymorphism is H
  VARIANT 9: note = Ancestral polymorphism is R, Derived polymorphism is C
  VARIANT 6: note = Ancestral polymorphism is A, Derived polymorphism is T
  VARIANT 3: note = Ancestral polymorphism is S, Derived polymorphism is N
MPSVRTLPRRLRGCAARSRAIGDLFVVSRFMVAHANNLSTTTAPANGQPLLVPLQCGCPSRSPSSYAPMQYQIGPGDTYWIVSTTKLQNLTQYKAVERMNPTLVPTDLDVGTMVTFPVFCQCPAAADNATTLVTYVM

SEQ ID NO: 18874 - protein, 663 aa, Zea mays
  VARIANT 432: note = Ancestral polymorphism is A, Derived polymorphism is D
  VARIANT 450: note = Ancestral polymorphism is I, Derived polymorphism is T
MAPAPPSPSDGELLRSLHRLARDLSAAAETPAPFLRGALASITRRSKLLAAAFDDLVPCAAAEDMPRSASLCLREVLLVLQRFKALAADCAARSRMRLLLRSDEIEEEVRELHQDLATLLDLLPVVELGLAEDVMDLLDLASRQCRRFALSVQAEQALKARVLALIQEIEREIVPERETLQEILEEVGINDPASCSEEIESLEREISDRASERWTDAMIALVGLLRYAKCVLFSATPRPTDSRPDPEIDEEREPPAPPPDFRCPIALDVMRDPVVVASGQTYDRESIFRWFDSGKSTCPKTGQVLTILELVPNTALKNLISKWCRDNGVAMEIGEASKSEPAQAVAANKAALEAARMTASFLVKKLAVSFSPDAANRVVHEIRLLSKSGADSRAFVGEAGAVPLLVPLLYSEDAGLQLNAVTALLNLSILEANKKRIMHAEGAVEAVAHTMSAGVTWRAKENAAAAVLSLASVHTYRRRLGRNLSIVEKLVHLARTGPTSTKKDALAALLSLASERENVGKLVDAGVAQVALSAISEEETAAAVLAALAKRGGAEAIVGIDGAVARLVAEMRRGTEWARENATAALVLLCRRLGARAVTQVMAVPGVEWAIWELMGTGTERARRKAASLGRICRRWAAASTADGERGSVCPAASVVPPAMMAS

SEQ ID NO: 18875 - protein, 260 aa, Zea mays; identical to SEQ ID NO: 14852
  VARIANT 220: note = Ancestral polymorphism is G, Derived polymorphism is E

SEQ ID NO: 18876 - protein, 367 aa, Zea mays
  VARIANT 149: note = Ancestral polymorphism is F, Derived polymorphism is S
  VARIANT 139..367: note = Derived polymorphism lacks residues 139 to 367
  VARIANT 133: note = Ancestral polymorphism is G, Derived polymorphism is R
MTATSKAPRRPRIRPRGPPPAPTPIRTARGARTAAADERVLAEFLEASLRVPDLSLPPRKRFSFPPPPAPEPDGIPSHALVSGDADAEQRAIAAAAETGAFRVTSAVDAREARDAVEAASELVFAAPEEVKRGLERWYRRRDREPREEFVWFRPMSADEDRAMAAAFPGSTYRAFREKVDTLASKMEDIAKAVIRVLHDNVKNPKASAEPREAAPSILRLALYSSDTSSTCWNELDSTTAPNSHALSVHLCGQDRRICLRRSLGGSTVSTLPAGCMLVTVGKQIQEWSNGQFKAAVGGEVVLFETTDEPGPFVSAELIVYCYCPHDLRLSEAGRYASRRVDRATIVSFRDQILVALVLLSLFYLFRG

SEQ ID NO: 18877 - protein, 378 aa, Zea mays
  VARIANT 154..378: note = Derived polymorphism lacks residues 154 to 378
MARIPSLKSLNAFPHAEEHLLKKTYSGAVVTIFGLLIMITLFVHELQFYLTTYTVHQMSVDLKRGETLPIHINMSFPSLPCEVLSVDAIDMSGKHEVDLHTNIWKLRLDKYGHIIGTEYLSDLVEKGHGAHHDHGFNPVPTSIEAGSPSCFLLQKIKNWHLFDHDHDHHDEQKKHEQTFNEEAEKMIKSVKQALGNGEGCRVYGMLDVQRVAGNFHISVHGLNIFVAEKIFEGSNHVNVSHVIHELSFGPKYPGIHNPLDETSRILHDTSGTFKYYIKVVPTEYKYLSKKVLPTNQFSVTEYFLPIRPTDRAWPAVYFLYDLSPITVTIKEERRNFLHFVTRLCAVLGGTFAMTGMLDRWMYQLIKTVTNSKTRSVLR

SEQ ID NO: 18878 - protein, 264 aa, Zea mays
  VARIANT 30: note = Ancestral polymorphism is A, Derived polymorphism is T
  VARIANT 24: note = Ancestral polymorphism is L, Derived polymorphism is I
  VARIANT 21: note = Ancestral polymorphism is A, Derived polymorphism is T
  VARIANT 18..264: note = Derived polymorphism lacks residues 18 to 264
MTLDTPAAVVLELMTMGQQSAAHLGDLLRAASPAAASPHQELAAEILRCCGRVIDALRAAAAASGHKRKAAAEYQDAAAGGGASPPPPPPPPGPPLKRRARGGEATREVTSGTTVDGFIWRKLYYRCAHKDQGCDATRRVQRTREQPAAYEIAYYGDHTCRGAATAWQQGAPAPAVVDFGSNSWGSADTTSGGSPASVPLGGWWSPSASSEVGFEAHAAAHEWRDTAAAAPDPVMEFLDGAFGWESVLEDRFDLGGLHGIATFQ

SEQ ID NO: 18879 - protein, 352 aa, Zea mays
  VARIANT 20: note = Ancestral polymorphism is T, Derived polymorphism is A
MATDQDAKLFDVLAGGYHLTTQLQALLGGRRPLDGIGQQEAMAFSQELSRVFKVSMSMLNGSAVAGAKTAPAVRPGAIVQAVAKDKRARSDSREVVTPARRSREDGVTRKEITASPYKDGYVWRKYGQKNIQNCNFVRCSRDRRCEAKKKVQQQDDDGSHLPPMFEVTYLNEHTCHALRATTTANGDAAVPVPVAASPPTTNRRWYYRDDAARDDDGGLQFDLSSFPRMSGPGGAGGSAQENQTIVSCLADVIRGAAPSPWSPVAADASDAGAASYGPAPMQMQMMQASGSGHSASVAQDGGATMMTTMIGTDDTDFCCWDPSLVGEADHQMMDEDHRDMLHVVDVARLADT

SEQ ID NO: 18880 - protein, 237 aa, Zea mays
  VARIANT 76: note = Ancestral polymorphism is H, Derived polymorphism is N
MSRGIRPIPSALGMQVNERFLDLACTHAYRLRRCHAVSSFAFENNEFGRICLATRDSLGMDGSGGSQRCYYRCTYHQDHGCPATKHVEQNNSQDPPLFRVIYTNEHTCCSTHVSDYMASSIYIQQIADASLREAEVEIPSQLAQCFGGHELIEEENDAIISSLLTAISGCDVATLDGGQHAAIEENTPARMPRSRIEASPSISPVLLHASSDKLKTDFIEPLETQWFELLDLGWFIE

SEQ ID NO: 18881 - protein, 429 aa, Zea mays
  VARIANT 16: note = Ancestral polymorphism is R, Derived polymorphism is G
  VARIANT 25..429: note = Derived polymorphism lacks residues 25 to 429
  VARIANT 36: note = Ancestral polymorphism is G, Derived polymorphism is V
  VARIANT 41: note = Ancestral polymorphism is A, Derived polymorphism is V
  VARIANT 68: note = Ancestral polymorphism is G, Derived polymorphism is R
  VARIANT 75: note = Ancestral polymorphism is I, Derived polymorphism is T
  VARIANT 94: note = Ancestral polymorphism is F, Derived polymorphism is S
  VARIANT 97: note = Ancestral polymorphism is H, Derived polymorphism is Q
  VARIANT 101: note = Ancestral polymorphism is D, Derived polymorphism is Y
  VARIANT 132: note = Ancestral polymorphism is T, Derived polymorphism is I
  VARIANT 139: note = Ancestral polymorphism is S, Derived polymorphism is P
  VARIANT 180..429: note = Derived polymorphism lacks residues 180 to 429
MPLPQRAQRPPLVMAGIGNCDAINWQSIASIRWRRGGSIYASIYKDVPMMVSLSGRFHLERGIEERLGKEFMDRINKEGYIDVTSKSDFIPRFFTIHGSADLIIRVEDAYEFAWLIPNYMLHVIEGANHCYTAHCREHSDDVVEAITSSEIIELLSVRPPIDAKLKLMKEIAEEHIPAGQLHLVKPYMVAVQSNNVSAVNEALNELYVEDEDYERLRESVDMHDNFDQIGLAQKLEKHELLEMRRIAAYIYKKAGRWKQSIALSKKDNMYKDCMETCSQSGDRELSEDLLVYFIKQGKKECFASCLFICYDLIRPDVALELAWMNNMVDFAFPYLLQFIREYTSKVDDLVKDKIESQKEERAKEKEEKDLATQQNMYAQLLPLALPAPPMPGMGGPPPPMGGMGMPPMAGMGMPPMGPGPMPAFGMGGY

SEQ ID NO: 18882 - protein, 384 aa, Zea mays
  VARIANT 44: note = Ancestral polymorphism is G, Derived polymorphism is R
  VARIANT 159: note = Ancestral polymorphism is D, Derived polymorphism is Y
  VARIANT 186: note = Ancestral polymorphism is I, Derived polymorphism is V
MVLLFVEKLLVGLLASVMVAIAVSKIRGRKLRLPPGPVPVPVFGNWLQVGDDLNHRNLAALSRKFGDVFLLRMGQRNLVVVSSPPLAREVLHTQGVEFGSRTRNVVFDIFTDKGQDMVFTVYGDHWRKMRRIMTVPFFTNKVVQQYRHGWEAEAAAVVDDVRLDPKAATDGIVLRRRLQLMMYNNIYRIMFDRRFESMDDPLFLRLRALNGERSRLAQSFEYNYGDFIPILRPFLRGYLRVCKEVKETRLKLFKDFFLEERKKLASTKATDSNGLKCAIDHILEAQQKGEINEDNVLFIVENINKHVEANGNDFRYLPFGVGRRSCPGIILALPILGITIGRLVQNFELLPPPGQDKVDTTEKGGQFSLHILKHSTIVCKPRTL

SEQ ID NO: 18883 - protein, 218 aa, Zea mays
  VARIANT 95: note = Ancestral polymorphism is K, Derived polymorphism is N
MVNGTAVGSGLASTVLFEANILAILAEVLSAVFCEVMNGKPEYIDHLTHKLKHHPGHIEAAAIMEHILEGNSFMKLAKKLGELDPLMKPKQDQSKTNLQSLMSAAIPNVIGWIAISFAKGTKMVYKHLATLYFVFVFDSSENELAMLDLVQVFVETLDRCFKNVCELDIIFNFNKVPYVHMILPFLSFYNRIVCLSRMQGFYPAENSIYDSSIACCMF

SEQ ID NO: 18884 - protein, 139 aa, Zea mays
  VARIANT 48: note = Ancestral polymorphism is E, Derived polymorphism is V
MEESGFAITSINGRINMAVWGPLNRTIVTARVDATIRIWDSEEAQEDEERERVCQKQGHQREGNHGGVVDAELDFGKKLPSFFFIQKRMAFSDDGKMKPNLFRTRGNRRIAMTNNGAEKKNKRSSNGRCAKVGAIEQSE

SEQ ID NO: 18885 - protein, 455 aa, Zea mays
  VARIANT 358..455: note = Derived polymorphism lacks residues 358 to 455
  VARIANT 337..455: note = Derived polymorphism lacks residues 337 to 455
MQAEDVRSRFGRCPYCRAMIYQDLSAVIFYCTRCRTPIRGRNPQPADETEYALAQLEILSADTASVFSDVDAEPPNPRSAWAVEDDDGEQSRSATATRRSSASSPSYREGEFGSVRAGPTSSGSALNSGLNRDHRSEAARSASPLHSRVTQLRPSSRRTRRSSSGDVDVRSDAGSNTESYSAATDTSYTRRSSPLSSQELQAPTALSAAAGFESADLTRTPLGDPAFQKDLLQALDNLRKLIAVVDHPPRSVDVDDGHLQGATPRLSASCNNGSSGGKRTTTRRSSRLMLRLESQSQLTRALPAERPRRRDANTSTSSSSSASSSRRRGGARARAPQCRPVLGGTPFVVCGECSEILQLPPALPAGRVCRLQCGGCGEAFEMTLPAVGSTGLPKKIFSAPQPAVSGGEDAEEYPLARSNLSLSLSREQPRPTMEPLHRVLGYSSVSSVLRSLRYS

SEQ ID NO: 18886 - protein, 148 aa, Zea mays
  VARIANT 132: note = Ancestral polymorphism is P, Derived polymorphism is S
MASKRILKELKDLQKDPPTSCSAGPAGEDMFHWQATIMGPPDSPYAGGVFLVNIHFPPDYPFKPPKVSFKTKVFHPNINSNGSICLDILKEQWSPALTISKVLLSICSLLTDPNPDDPLVPEIAHMYKTDRPKYEATARSWTQKYAMG

SEQ ID NO: 18887 - protein, 282 aa, Zea mays
  VARIANT 68: note = Ancestral polymorphism is T, Derived polymorphism is I
MDWGNRTKAAAAAAAPDERAGGGEGLGGYVKVMTDEQMEVLRKQISIYATICEQLVEMHRVLTEHQDTIAGLRFSNLYCDPLIIPGGHKITARQRWQPTPMQLQILESIFDQGNGTPSKQKIKEITAELSQHGQISETNVYNWFQNRRARSKRKQAAASLPNNAESEAEADEEPLADKKPKSDRPPPPPPPIQDNTKATGALSADRVSGGTRHLDTGHDQTSGVMYGCNDSGLLRSSGSSGQMSLYENFMSNPRIDRFPAKVESSRSFPHLQQHGEGFGMFG

SEQ ID NO: 18888 - protein, 206 aa, Zea mays
  VARIANT 175: note = Ancestral polymorphism is P, Derived polymorphism is A
  VARIANT 66: note = Ancestral polymorphism is E, Derived polymorphism is G
  VARIANT 43: note = Ancestral polymorphism is T, Derived polymorphism is K
  VARIANT 17: note = Ancestral polymorphism is P, Derived polymorphism is R
MAKVHPDRHPNVLPPSPAEEKEEEATSLTVWRKSLLFNCRGYTVFDGRGDLAYRVDSYDDAGADAGAVLMDPAGRPAFTVARRSRLLGLLSGQQRLIYAGEDTRRPAVYAVVRRRGKATARVTPCAAAGAAYEVEGSYARRRCVVYDAERRVVVAEVRPKEAVVGTDVFRLVVRPGFDVSLAMAVVVALDQLFGGRPSLLRSWSTM

SEQ ID NO: 18889 - protein, 286 aa, Zea mays
  VARIANT 29: note = Ancestral polymorphism is P, Derived polymorphism is Q
  VARIANT 99: note = Ancestral polymorphism is A, Derived polymorphism is S
MSMWRVSRSLLRAASAVGRGAAPSRWVPQPCALQRCGYALLPEAARRDGEEEVTAAEARRLMRLANVEALKRRLGNGEVIPYADLLRACQDSGAARTRAEAAALAAALDEAGVVLLFRDRVYLHPDKIVDLVRKAMPLALTPENDPGKEELKQLQVQLEDINKLAHKQVRRILWSGLGFLITQVGLFFRLTFWEFSWDVMEPITFFTTTTGLVVGYAYFLITSRDPTYRDFMERMFESRQRKLIQRQNFNLDKYLELQRRCKDPLEKACGTTNPDTAHLHELSVHK

SEQ ID NO: 18890 - protein, 519 aa, Zea mays
  VARIANT 259: note = Ancestral polymorphism is A, Derived polymorphism is S
  VARIANT 74: note = Ancestral polymorphism is A, Derived polymorphism is V
MWRRLLARAIPLAPASSGFPKPLSPLLHIGGPRLTTSSGDPVADGGIGGEDDPFCFPDHYYEQLPPDVARGVDAVVAAAEATGSNATDAARALDGCGAEASEPLVVASLARLRNSCAAAHAAFRWAAAQPGYAPGRRACHSMLDILAKHRRFDAARALLDEMRRASTASPAAVLLLVRRHCAARDVAGAVAAFRALPSFGFHTGAAEFHGLLSALCRYKNVQDAENLLISWQKEFPFETKSFNIVLNGWCNIVCSVREAKRFWSSMERKGIARDVLSYGSMISCFSKAGSLDSVMKLFNRMNEAGVAPDRKVYNAIVFALAKGRCVKEAKMLVRSMEEKQVAPDTATFNSLIGPLCKARQFQEAMEMFDAMLQRKLSPSVRTFHALLNVARNSTEVFDLLDKMKQLRCEPEMDTYIMLIRKFCRWREHESVEKLWSAMPANGLSPDRSAYIVLIHGLFLNGRLEEAARYYEEMKSKGFLPEKKTEEMVMAWLEGRELAKASVISSKGGRGPVSLKLPKK

SEQ ID NO: 18891 - protein, 131 aa, Zea mays
  VARIANT 29: note = Ancestral polymorphism is C, Derived polymorphism is Y
  VARIANT 35: note = Ancestral polymorphism is A, Derived polymorphism is V
  VARIANT 38: note = Ancestral polymorphism is D, Derived polymorphism is Y
  VARIANT 45..131: note = Derived polymorphism lacks residues 45 to 131
  VARIANT 50: note = Ancestral polymorphism is S, Derived polymorphism is L
  VARIANT 53: note = Ancestral polymorphism is E, Derived polymorphism is G
  VARIANT 90: note = Ancestral polymorphism is A, Derived polymorphism is V
  VARIANT 94: note = Ancestral polymorphism is Q, Derived polymorphism is R
  VARIANT 95: note = Ancestral polymorphism is W, Derived polymorphism is R
  VARIANT 103: note = Ancestral polymorphism is T, Derived polymorphism is R
MRRLKKKTLHASTRLTHSLKKRGKRKVDCRVPRIVIEDVRDAEEEQAVNSFREVLFARDLLPVKHDNYHTMLRFLKARKFDFEKAAQMWANMLQWRKEFGTDTIFEGWKNFSKIARDLMRCMQKIDGDYYP

SEQ ID NO: 18892 - protein, 335 aa, Zea mays
  VARIANT 36..335: note = Derived polymorphism lacks residues 36 to 335
  VARIANT 56: note = Ancestral polymorphism is E, Derived polymorphism is K
  VARIANT 95..335: note = Derived polymorphism lacks residues 95 to 335
  VARIANT 121..335: note = Derived polymorphism lacks residues 121 to 335
MGEPSADFSAEDVSSISGPCHNTCLKPCCEHGCACWEDEYVEAVISCVQDDLAVEEIGIALTEVTTIDLLAVDEGSGLHEDSDDDYIDDPILSLESDSTDDLVNVDFISPAFPIGGVTESSISNSVAGNSSINGTPRLVSAMKGTRAKKGIKTKLSVSWATDVYDPPITSDSHTVKGHRKSSTKGNYKYKCSKSSSSSNHSTTGSKKDKKHSRHRSSSGGGSKRDRKHSYCSSASSNSSRVVTNGSLYGNTCSGGGISSSSRTTTCVPESAKVSTLMVAENATPQERVPVLKTPEPIKCTTSYGKEKPFALLSRQFPPARYKGMFSFWSQNQLAS

SEQ ID NO: 18893 - protein, 229 aa, Zea mays
  VARIANT 33: note = Ancestral polymorphism is C, Derived polymorphism is G
  VARIANT 43: note = Ancestral polymorphism is A, Derived polymorphism is V
  VARIANT 60: note = Ancestral polymorphism is A, Derived polymorphism is T
  VARIANT 95..229: note = Derived polymorphism lacks residues 95 to 229
  VARIANT 121..229: note = Derived polymorphism lacks residues 121 to 229
  VARIANT 150: note = Ancestral polymorphism is G, Derived polymorphism is R
  VARIANT 158..229: note = Derived polymorphism lacks residues 158 to 229
MGEPSADFSAEDVSSISGPCHSTCLKPCCEHGCACWEDEYVEAIISCGQDDLAVEKIGIALTEVTMTDLLAVDEGSGLHEDSDDDYSDDPILSLESDSTDDLVNVDFISPAFPIGDVTESSISNSVAGNSSINGTPRLVSAMKGTRAKKGIKTKLSVSWATDVYDPPITSDSHTVKGHRSSSTKGNYKYKCSKSCSSSSHSTTGSKKDKKHSRNRSSSGGGSKRARKHS

SEQ ID NO: 18894 - protein, 194 aa, Zea mays
  VARIANT 6: note = Ancestral polymorphism is R, Derived polymorphism is S
MAMLPRPTALVAAVVVAAALVLGMASAQGPAAAPAPGPAPGISDECFNAVLNMSDCLTYVTAGSKARHPDTPCCPELAGLLESHPVCLCQLLGGAAESYGVSVDYKRALALPGICRLTAPPVSACAAFGFPIPEGLVPTAAPMAGLSPSSIGPDVPANTPTGSAKSPAGRVTAAGGLVALAALPVAVAAAGIMF

SEQ ID NO: 18895 - protein, 446 aa, Zea mays
  VARIANT 300: note = Ancestral polymorphism is D, Derived polymorphism is H
  VARIANT 370..446: note = Derived polymorphism lacks residues 370 to 446
MSAAAADWLPSASVTASGRPVLSAGEVERNLLPLVDLEPEENPRLAPLRACLLALTSHRLIFLHEPSRSARGLPLATVVHAYPPHRRHSHNPLRSLFSAPSSSSSSQHHRIRLQISMPPVRSEVIAIVVTCKADVDVFFGRLLEAIRARAWEVTPAAAPSSGTSVAEGAAPTEDIAIRMPVVGVSGILRMEQESWENAGQNLQDAFQDLNALMSKAKEMMQLAEKMRLKLLMNSSTESNSNDEEMGSKQDMQDLLLSVGIVSPVTKETAGALYHQQLSLQLADFVRIPLEKAGGMMALVDVYCLFNRARGTELISPEDLLQACSLWEKVDVPVMLRKFDSGVKVIQTKTHSDEEVFARISSLAQKPDALQKGISPSDAAFTLGIAPALAKEHLLNAENKGLLCRDVSPDGFRFFSNLFNDIDPQNIHSQKPHGMYKAWISVAMASH

SEQ ID NO: 18896 - protein, 203 aa, Zea mays
  VARIANT 59: note = Ancestral polymorphism is E, Derived polymorphism is D
  VARIANT 45: note = Ancestral polymorphism is R, Derived polymorphism is M
  VARIANT 39: note = Ancestral polymorphism is S, Derived polymorphism is R
  VARIANT 23..203: note = Derived polymorphism lacks residues 23 to 203
MNDTADATTPATALSSLTLPDEEVDADDLDDAANTHMESKILTIMGFLEDPDQDFPGEEMGLSFGKLFSRLFAKKEMRILMVGLDAAGKTTILYKLKLGEIVTTIPTIGFNVETVEYKNISFTVWDVGGQDKIRPLWRHYFQNTQGLIFVVDSNDRERVVEARDELHRMLNERHWYIQSTCATSGEGLYEGLDWLSSNISSKS

SEQ ID NO: 18897 - protein, 280 aa, Zea mays
  VARIANT 39: note = Ancestral polymorphism is N, Derived polymorphism is T
  VARIANT 141: note = Ancestral polymorphism is D, Derived polymorphism is V
MTSQAGGSGGDVGGSAGAGAGAGQHGQMQSLARQGSLYNLTLDEVQSHLGEPLHSMDLEELLKSVFPDGLDPDGGTTSQYEQSSGLLRQGSITMPLELSKRTVDEVWKGIQDVPKRNVGEGDQQSQERERQPTLEKMTLEDFLVKAGVVAEGYLKDLNDVGNVDQVSSAGAAGPGAILESYSDGHITSPMMGALSDSPTPGRKRGSPGDVTDKLMERRQKRMVKNRESAARSTVQGLGSSLLELARISLSGQASQIHSLAQARFPQSMGAQAAQASAWLA

SEQ ID NO: 18898 - protein, 343 aa, Zea mays
  VARIANT 23: note = Ancestral polymorphism is A, Derived polymorphism is E
MASTAFAAAKYFPAHLDSSPRIAPRRAAPTASLSFSPLSASPSSLLRLRTPCPSGPGGRLPPPPPPPPRSYGGGGGSGGDAANSGGGRRGGGILGLFLAGWAARVAADPQFPFKVLMEELVGVTACVLGDMASRPNFGLNELDFVFSTLVVGSILNFVLMYLLAPTAAASSAASALPSHMFEPGAFSLGSRVATLVSKGATFAVVGFAAGLAGTALSNGLMAMRKRMDPAFETPNKPPPTLLNAATWALHMAGSSNLRYQTLNGVEYMLGKVAPAPVFKASVVVLRCLNNVLGGVSFVLLARLTGAQKSDKPATVAEEKDRLIAVGNAAADAIGEARDGEEGK

SEQ ID NO: 18899 - protein, 256 aa, Zea mays
  VARIANT 168: note = Ancestral polymorphism is F, Derived polymorphism is S
  VARIANT 78: note = Ancestral polymorphism is M, Derived polymorphism is I
  VARIANT 73: note = Ancestral polymorphism is H, Derived polymorphism is L
MSSIGTGYDLSVTTFSPDGRVFQVEYATKAVDNSGTVVGIKCKDGIVLGVEKLVTSKMMLEGSNRRIHSVHRHSGLVILIHLQVVAGLAADGRQIVSRAKSEAASYEKVYGEPIPVKDLADRVASYVHLCTLYWWLRPFGCGVILGGYDRDGPQLYMIEPSGVSYKYFGAALGKGRQAAKTEIEKLKLSELTCREGIVEVAKIIYGVHDESKDKAFELELSWICDESNRQHQKVPNELLEQAKAAAQAALEEMDAD

SEQ ID NO: 18900 - protein, 67 aa, Zea mays
  VARIANT 5: note = Ancestral polymorphism is G, Derived polymorphism is E
  VARIANT 15: note = Ancestral polymorphism is P, Derived polymorphism is L
  VARIANT 28: note = Ancestral polymorphism is V, Derived polymorphism is I
  VARIANT 38: note = Ancestral polymorphism is R, Derived polymorphism is P
MNTLGYPLPVNDRILEITEARNIECSLVLVFSCAFCTRQNISLSIQDSVMSGLNTSASGSGKNAAAS

SEQ ID NO: 18901 - protein, 186 aa, Zea mays
  VARIANT 34: note = Ancestral polymorphism is G, Derived polymorphism is R
MDHEQRRQRQQHSPRGNAPGSGRCGSSSRKHKGGGKKPIKVVYISNPVRVKTSAAGFRALVQELTGRDADPSKYSPEDLAGAAVAAGDPDCGAAQGLSPGDTTAASSDTIVAIPSPAAVDHLHEHDASPAAAPADGGDYYYDDEEDEGGFGSQLLEKYYTVFSPPTLLYDYDHHPHNKCSFWRGYY

SEQ ID NO: 18902 - protein, 470 aa, Zea mays
  VARIANT 224: note = Ancestral polymorphism is L, Derived polymorphism is R
  VARIANT 418: note = Ancestral polymorphism is M, Derived polymorphism is T
MESRRGGSGAAAEDAGGAMPSFGPTQHAIRAGADVNSMQPSRVTDFGALAQSAGFRIEDLANLNANALFNLKPNSHTIDNSPLQFGNYGKSISPHINTTEATTAATRIDPQLSAQQTGAQPILVALPTGNMENWGESAMAGSPMTDTSTDPDTDERNQMFEQGLVAVPTASDSSDKSRDKLDQKTLRRLAQNREAARKSRLRKKAYIQNLESSRLKLTQLEQELQRARQQGIFISTSGDQPQSTSGNGNTTLTWLFLKGALAFDMEYARWLEEHNKHVNELRAAVNAHAGDNDLRCIVDSIMVHYDEIFKLKGVAAKADVFHVLSGMWKTPAERCFMWLGGFRSSELLKLLAGHLEPLTDQQLVGISNLQQSSQQAEDALSQGMEALQQSLAETLASGSLGPAGPSGNVANYMGQMAMAMGKLGTLENFLRQAIQIIRRGTTARSISSEGSSVGGIELLNLIKTCRKVAA

SEQ ID NO: 18903 - protein, 260 aa, Zea mays
  VARIANT 54: note = Ancestral polymorphism is R, Derived polymorphism is C
MSPLVAPATPRTPGAPASDASPLPTITLTAPPSNKRRRRGGAARSSLRAIRAVRALFRSLPILAPACRFPGVIPRHGGGGGGPRGHGGHIGGACRTTGTLFGHRRARVTLAVQETPGSVPVLLLELAMQTGRFMQEMGAEHLRVALECEKKPPPGAGRTRLLHEPLWTAYVNGRKIGYAVRREPTEDDLTVLQLLRTVSAGAGVLPADAVGAPEGQDAGDLAYMRAHFDRVVGSRDSESFYMLNPDGNHGPELSIFFIRI

SEQ ID NO: 18904 - protein, 448 aa, Zea mays
  VARIANT 341: note = Ancestral polymorphism is F, Derived polymorphism is S
  VARIANT 334..448: note = Derived polymorphism lacks residues 334 to 448
  VARIANT 313: note = Ancestral polymorphism is A, Derived polymorphism is D
MREILHIQGGQCGNQIGAKFWEVVCDEHGIDTTGRYTGTSDLQLERVNVYYNEASCGRFVPRAVLMDLEPGTMDSVRTGPYGQIFRPDNFVFGQSGAGNNWAKGHYTEGAELIDSVLDVVRKEAENCDCLQGFQVCHSLGGGTGSGMGTLLISKIREEYPDRMMLTFSVFPSPKVSDTVVEPYNATLSVHQLVENADECMVLDNEALYDICFRTLKLTTPSFGDLNHLISATMSGVTCCLRFPGQLNSDLRKLAVNLIPFPRLHFFMVGFAPLTSRGSQQYRALTVPELTQQMWDAKNMMCAADPRHGRYLTASAMFRGKMSTKEVDEQMINVQNKNSSYFVEWIPNNVKSSVCDIPPRGLSMASTFVGNSTSIQEMFRRVSEQFTAMFRRKAFLHWYTGEGMDEMEFTEAESNMNDLVSEYQQYQDATADDDEEAEYEDEEEPADGM

SEQ ID NO: 18905 - protein, 210 aa, Zea mays
  VARIANT 7: note = Ancestral polymorphism is T, Derived polymorphism is S
MSAGLVTDEATVGRLYRIRRTVMQMLRDRGYLVVDHELATSRRDFLRKFGESFHREDLLINKYKKNDPSDQIYVFFPNDDKVGMKHIKKYVEMMTHENVSRAVLVLQQNLTPFAKSFLIELEPKIHLEIFQEAEMLINIKEHVLVPEHQVLTNEEKKTLLERYTLKETQLPRIQITDPIARYYGLRRGQVVKIIRPSETAGRYVTYRYVV

SEQ ID NO: 18906 - protein, 449 aa, Zea mays
  VARIANT 3: note = Ancestral polymorphism is T, Derived polymorphism is R
  VARIANT 124: note = Ancestral polymorphism is D, Derived polymorphism is G
  VARIANT 227: note = Ancestral polymorphism is D, Derived polymorphism is G
  VARIANT 312: note = Ancestral polymorphism is S, Derived polymorphism is N
  VARIANT 338: note = Ancestral polymorphism is K, Derived polymorphism is I
MPTRNHNAAAAAAPQHHHHNRGGAPALGKSKAVPGRADAMNRRAPLGDIGNLVSVRPAEGKPQLQEQINRPITRSFGAQLVKNVQANAAIKNAAILPARHAPRQERKAPAKQPPPEDVIVLSSDSEQSRTQLESSASSVRSRKKVINTLSSVLSARSKAACGITDKRRQVAVIEDIDKLDVNNELAVVEYIEDIYTFYKIAQHDRRPCDYIDTQVEINPKMRAILAGWIIEVHHKFELMPETLYLTMYIIDQYLSLQPVLRRELQLVGVSAMLIACKYEEIWAPEVNDFILISDSAYSREQILSMEKGILNSLEWNLTVPTVYMFLVRFLKAAALGNKVEKEMENMVFFFAELALMQYGLVTRLPSLVAASVVYAARLTLKRAPLWTDTLKHHTGFRESETELIECTKLLVSAHSSAADSKLRSVYKKYSSEQFGGVALRPPAAAVEIK

SEQ ID NO: 18907 - protein, 150 aa, Zea mays
  VARIANT 57: note = Ancestral polymorphism is R, Derived polymorphism is C
MAAEAQAEGRALPRAPPPPLARGGSSASPEKRGLPIPGFDGVAEEEEERVPEPKRRRAWVAALDSAVAGCGGDGDGGSFSFQHAPGCFVAPEATPKFGSFNPPGDQAELAGLDPKPVGREADAEDSPEAGDEVSAASAPGAEAKDERLMA

SEQ ID NO: 18908 - protein, 346 aa, Zea mays
  VARIANT 76: note = Ancestral polymorphism is A, Derived polymorphism is S
  VARIANT 72: note = Ancestral polymorphism is R, Derived polymorphism is W
MSNRATHWCYACQRPIRLRGQDIICPNCSDGFIQEISEMGGVLNTYGLTEPDFEERQARRFGMMDAISSLMRQRLSEIGRDSLFDIHGRQGTGTEYGRRSTAIPTLVFGGIPSPAVGSSDINVVIREGRRAGAARPNFSSLVVGPSLEALFEQLLLQNNRQGPPPAPQSAIDSMPVVKINRRHLDEDPQCAVCKDKFEVGAEAREMPCKHLYHTDCIIPWLVQHNSCPVCRHPLPSQRSGSSTSSARVPSAYYNETACPPAVARADFDPVPSAYYNETATDPPAVTRADFDPAPGNYGSESQESHVPFSFLWPFGPSSSYQYEENVDEPAVYDPNQIAYSAWHYDH

SEQ ID NO: 18909 - protein, 194 aa, Zea mays
  VARIANT 75..194: note = Derived polymorphism lacks residues 75 to 194
  VARIANT 95..194: note = Derived polymorphism lacks residues 95 to 194
  VARIANT 121: note = Ancestral polymorphism is P, Derived polymorphism is S
  VARIANT 162: note = Ancestral polymorphism is R, Derived polymorphism is L
MGRPDARDLCAAEAGAGAGLSGIVTSRTRRSRRCTVAQGGPRDLHRGAASQGLPRHATARARHPLAVWLKEMEEEEERKRGQPLDNSIEIQLDSCPEFFNSHDREFHVASLPYKPDFKVMSEGWDGTTRDPDEVLYEISMKEDQILYEEFVQRLEFNKKKVRTSFDLHHLLDYVYDEHVYDEQYDLLQFSVNVC

SEQ ID NO: 18910 - protein, 346 aa, Zea mays
  VARIANT 11: note = Ancestral polymorphism is C, Derived polymorphism is F
MRMAGLWIAAFSLLLCSSLSGVEGIGVNYGTIASNLPSPDKVIALCKAKGITDVRLFHPDTAVLAALRGSGLGVVLGTLNEDLARLASDPSFAASWVQAYVRPFAGAVRFRYVAAGNEVVPGDLASHVLPAMQNLESALRAAGLGGVRVTTAVSTSVLGTSYPPSQGAFSDAALPSMGPIASFLAPRSTPLLVNVYPYFAYSADPASVSLDYALLRSDSGGGAVVVADGGASYGNMFDAIVDAVYAALERAGARGLELVVSETGWPSGGGGAGASVGNASAYVNNVVRHVGSGRGTPRRPGKPVEAFIFAMFNENQKPEGVEQHFGMFQPDMTEVYHVDFTAASSS

SEQ ID NO: 18911 - protein, 337 aa, Zea mays
  VARIANT 50: note = Ancestral polymorphism is T, Derived polymorphism is A
  VARIANT 58..337: note = Derived polymorphism lacks residues 58 to 337
  VARIANT 91: note = Ancestral polymorphism is P, Derived polymorphism is S
  VARIANT 110: note = Ancestral polymorphism is P, Derived polymorphism is L
  VARIANT 134..337: note = Derived polymorphism lacks residues 134 to 337
MAERRPIYREPGKPRRRPRSQGSVNLSVPMWEKKFCTDACAVPWAKLCEAKRLMTLYKSVVDWDDSAALEAFNDAKARFCAVYHGQHYDIPLPDPDMFIDIINPDEYVDLELVADLEKSRRRVPRKDDGVPDVWDSFILSDKPVPVTGWGDTDTSFTHGQQLSVNWDYQLKHSVEANHKHMSANWDYSIKRPAQIVCQQNSGKQQDQTSSQGEQTNSCISHWIMRGGSQDAWKHDSGWGPAAIQTDLWDNRQGSYEVPDSTGMPYGHWTHCRRRNDDSGRRNTRNRGGPISSKPMKSKYQTDEHNVAINGWWNCRIRNDVYYYPHGQADYTKQSHAM

SEQ ID NO: 18912 - protein, 163 aa, Zea mays
  VARIANT 117..163: note = Derived polymorphism lacks residues 117 to 163
  VARIANT 107..163: note = Derived polymorphism lacks residues 107 to 163
MFMRCFLLHIAMRIDYSLILHYCNLVVITTVGLMTFIDHLENLAPLKTYIAKGLLHSVREPRGFGFIQYFDPEDASDANGRGRSYDGRLRSRSPGLKDSPRGRSRSQSRSYLPALKRKHYSRSPAPRPRERSLSCSLAVNRSRSASPIVSRSPRRQGSLSVSE

SEQ ID NO: 18913 - protein, 204 aa, Zea mays
  VARIANT 111: note = Ancestral polymorphism is S, Derived polymorphism is F
MARLFLACMLVLLLGIATAARTTADDPPAGDCDQDLQDLMSSCQQYVHFPADPKIPPSPACCSVVQRVNIPCLCSKVTPTVEALICMDKVVYVASYCKRPLQPGSTCGTMFAIGSHADGDCENDLQSLISDCKTYVMFPANPKVPPSDACCGVIKKANVSCLCSKVTKETEKVVCMEKVVYVAEQCKRPFEHGFQCGSYKVPAN

SEQ ID NO: 18914 - protein, 675 aa, Zea mays
  VARIANT 331: note = Ancestral polymorphism is S, Derived polymorphism is F
MMAFFVVQRGSSQLTPLLALALLGLLRCAAVSCSAAAAATTLLHRESYAGKSEFRTVNRKPLGSCVDPSPYLAIDVGAAGPIPDEAFLQVTVSGVQRPDPSDWVAMITPSNSSVAGCPLSEVNYVETGDLANLPLLCHYPVKAQYLTSDPGYLGCKNAGCGKRDASGACTARTCAATLTFHVVNFRTDVEFVLFSGGFKAPCLLKRSGARRFANPASPLYGHLSSTDSKATSMRLTWVSGDGNPQRVQYGDGKSSTSEVATFTQDDMCSISVLPSPAKDFGWHDPGYIHSAVMTGLQPSQSYTYRYGSDSVGWSDTVKFRTAPAAGSDELSFVIYGDMGKAPLDPSVEHYIQPGSVSVAKAVAKEIQTGNVDSIFHIGDISYATGFLVEWDFFLHLITPLASQVPYMTAIGNHERDYASSASVYVTPDSGGECGVAYESYFPMPAVSKDKPWYSIEQGTVHFIVMSTEHEWSEKSEQYNWMDEDLSSVDRSRTPWVIFIGHRPMYSSHGGILPNVDSNFVASVEPLLLNYQVDLVFFGHVHNYERTCAVYQGNCKGMPTTDKSGIDVYDNSNYTAPVHVIVGAGGFSLDSFPNKGEAWSLSRVSEFGYGKVHATRTDMLVQVSSPCVVFRPLYFSMFISTPNIEVFVNSSSMEVRDQFRIVKGAPANKSLSLIIQ

SEQ ID NO: 18915 - protein, 750 aa, Zea mays
  VARIANT 131: note = Ancestral polymorphism is P, Derived polymorphism is L
  VARIANT 556..750: note = Derived polymorphism lacks residues 556 to 750
MCMSSLIAPTRPRRLSFENSKRLEEASTDYMDAERDIKPFVFPTVPTTIQRNFHGPGARQPTARPLERCGTRVLPQTHRPCSAPRLSRKFWGAGDYDAVAGRSAPQPPSLQNRMCVHPEFLHSNATSHKWPFGVCLTFFPIAIAVAELLDNAVDEIETGGATTILLDKLIDKRNGSPALLIQDDGGGMDPDSLRRCMSFGFSEKQSGSSIGQYGNGFKTSTMRLGADAIVFSRCCTRSSGPTQSIGLLSYTFLVETGHTNVVVPMRLERHGSKQFFSNLSALLKWSPFATEEELMQNFCDIGPHGTKIIVFNLWSNDDGNLELDFDTNPEDIMISGAPNPEQISNSVRRANENHLANRLRYSLRVYASVLYLQLPDYFRIMLRGREVERHHIASDLIYPERISYRPQSCGIIREAEVLTTIGFLKGAPTISVHGFNIYHKNRLILPFHRVLSTASSKGRSVSGVLEVDFIKPTHDKQDFEKSQLFQRLMNRLKEMTNEYCTDAYFASNVTTQMSRSFHRDLYSNKIGYVKVPRVRAAPTPAPPVMLAIENGPAEPSERSAPAPTQPLRWQHGNSSCVNAVPIAMAPPAFHPAPVKTETDAPGAPTGYAYSYSPSWPSVQAMQIEKIKEEPSMAAPGTDWVETRKRTNDDGATTVALFKRRKAPQELAGSGSRSATDQVSRYVGEGELNEFCFLKMENRMLRGECSEFEMAEKELRVKEQNLRLEIEMAQEQFKRLLGEYVSFSSMPTRKP

SEQ ID NO: 18916 - protein, 326 aa, Zea mays
  VARIANT 7: note = Ancestral polymorphism is D, Derived polymorphism is Y
  VARIANT 78..326: note = Derived polymorphism lacks residues 78 to 326
MDLASSDLAALGAAELIRVSASIPRAAPRTFALLTACLVFPLSFAVLAHSLFTHPILLRIRGAAHSGFAPWLGLFAYQFIYLIVLFTFSLLSTAAAVFTVASLYTGKPASVSSSLSALRPILPRLLRTFLWVSLLMLAYHLAFALAVLLLIVVFAPNASESAPPSLAFVLFLLLVVLVFLGIHVYISALWHLASVVSVLEPLCGLAAMAKSRQLLQGRTGTAATLVVSYFAVCGATSLLFRAAVVKGRTEEGSFGLALPGRLLVGAVLVCVLVSVNLLGLLVQSVFYYACKAFHSQQIDRTALYEHLGGYLGEYVPLKSNIQMENL

SEQ ID NO: 18917 - protein, 64 aa, Zea mays
  VARIANT 2: note = Ancestral polymorphism is A, Derived polymorphism is T
MANHSLRAFLVLLVAKVCFVMAMVATAVQGRPGPGPTALESVPACCFYHPECCYDAAGPPADLG

SEQ ID NO: 18918 - protein, 449 aa, Zea mays
  VARIANT 78: note = Ancestral polymorphism is P, Derived polymorphism is A
MVGSGAAGGGADHARSKEAAGMMALHEALRNVCLSSDWTYSVFWTIRPRPRCRGGNGCKVGDDNGSLMLMWEDGFCRPRVAECLEDMDGEDPVRKAFIKMSIQLYNYGEGLMGKVASDKCHKWVFKEPSECEPNISNYWQSSFDATIAVIQAGHGLLQLGSCKIIPEDLHFVLRMRHMFESLGYQSGFFLSQLFSSSRGASPTPTPPFPLKQPPAAPAARAPPQLFSWPGHHQPQQLPSPAGASPLFPPGPGAFHPSSARPMPPFPGGKDEGHMFHLPPAAHHGTNKQPPQHMDEHHHHQQQPMVGAGGDAPDGDLRWPNGLSFFTALTGRADDAKLLFGGPGAGAGAADDDDKAAPDAHGGAENVEEYLSLESHSNKARKVESPAAQSTNKFKRSFTLPARMSSSSSTSAFPSVSASTAPPQQQQAGMEYRGPHEGGVYSDLMETFLE

SEQ ID NO: 18919 - protein, 165 aa, Zea mays
  VARIANT 48: note = Ancestral polymorphism is W, Derived polymorphism is C
  VARIANT 42: note = Ancestral polymorphism is A, Derived polymorphism is S
MDPTPRAVLSHSSSGGAKGGGGGGSHAHYRGVRKRPWGRYASEIRDPWKKTRVWLGTFDTPLEAALAYDRAARTLRGAKARTNFPDDHAGQGQLQQQHLRRRQHPPPQHVSFGGVGVDCASPWHFVCFQTPTTAPATETPSTALELGTGRRCGGLPFDLNEAPSC

SEQ ID NO: 18920 - protein, 637 aa, Zea mays
  VARIANT 607..637: note = Derived polymorphism lacks residues 607 to 637
  VARIANT 500: note = Ancestral polymorphism is M, Derived polymorphism is T
MGLRNTTATIVESLRTVEGQLVRVEVLVLLSNLLLALLVVLSPYRHRRGDKSFRFLMWAIYTLSTVLVPYTIGFWCYSATIWIFWILSIAKAHAKFQALREASRTDGLMKHTKVVADYMMTEHESGHVFDATNMQGYRYIFHGEDLTLPYLSKPDYRTALAACAFTTVDTVWQWIDSQSVSVFSREHGGILKDIALSFTLFKLLKRRFGKYDHGEAGRPKTRTLIVSGLLREEAGYSRAFRVIEMELTFLYDFFYTRHQSHTQYVGMTVVFVLPVIVWNAISGAFSRHYHRTSLEQTVNGTDVIHCITIVLMVVVVVVLVVESRINDQKWRVVDDLHTLTGASKITWKGEAVPFDDGSRKQATKGIKKRKHRKLTGRNWDRKLGQYSLLHSFDYHPRNVASILSLGLIEPTRDGQKASKKVELPEEVVMHVLSRFKANDGRLADGRAALAVAGNDASRLTWACELPTSVHTVLVWHIATTICDTTTPRQQTGDRLVAKCTSEYCAYLVAFVPDMLPGHAYDTRRIFNAVVMEARDYLAGCDTMRDRCVKLLELQCNELTILGMGAKLGSELRYRVHDRSRRWKVLADFWAELVLFLAPSSNADIHAEKLAAGGEFMTHLWTLLIHAGILERPSSSSP

SEQ ID NO: 18921 - protein, 299 aa, Zea mays
  VARIANT 226: note = Ancestral polymorphism is T, Derived polymorphism is M
  VARIANT 172: note = Ancestral polymorphism is K, Derived polymorphism is R
MATASEIAAVGVIGAGQMGSGIAQLAAAGGCAVLLLDADPTALSRAVISISASLRRLAAKGQLSQAACEDSIKRIRCVSAVQDLRDADLVIEAVVENEAVKKKLFVELDKVTKPSAILASNTSSISITRLASATKRPSQVIGMHFFNPPPVMKLIEIIRGADTSDEVFAAVRSFSERLGKSVICSQDYPGFIVNRILMPMINEAFWALYTGVATKEDIDAGMKLGTNHPMGPLQLADFIGLDVCLSVLRVLHSGLGDSKYSPCPLLVQYVDAGRLGKKRGVGVYSYGHRPSSVRPKSSL

SEQ ID NO: 18922 - protein, 398 aa, Zea mays
  VARIANT 212: note = Ancestral polymorphism is A, Derived polymorphism is G
MAGDPGDAPEVGGGGIRSVLTTASLVAPSGDEVQFREIDGKIIGLYFAANWYPKCEAFTPVLAAAYEQLKERGAGFEVVLVSCDEDRPSFERFHGTMPWPAVPFGDLSCKKRLSERFQVEGIPRLVVLAPDGGAVVHPDAADLVHRYGERAFPFTAARVAELEADDQRKYASQTLEKLFSVSGKEYVMNSGNNEKVPVSSLVGKTVGLYFSANHCAPCIKFTTKLAAIYSSLRGKAEDFEVVYVPMDREEDGYLRSCGDMPWLALPYDGAPSRALARYFDVREIPTLVVVGPDGRTVTRDGRNLVNLYFDMAFPFTDAQIRLLQEAEDEAAKEYPRSLRHRGHRHELSIVSEKSGGGPYICCECEEQGLGWAYQCIACGYEIHLRCGQNAEGGSAGTA

SEQ ID NO: 18923 - protein, 599 aa, Zea mays
  VARIANT 397..599: note = Derived polymorphism lacks residues 397 to 599
  VARIANT 300: note = Ancestral polymorphism is S, Derived polymorphism is Y
MARPGSRPLPPASTEPRAAATLPRPGSASRRRARRVRVQSPSLAAVRRGPAPPTPTPTPHPPPETPPVRWPLDAGDRSTHRPGAGAALSVREIAAALWRMLQPPPPPPPPPGPARAPRRAQRDAGREIYTLREELVVAQDRIHELEAECRSTKKQLDHLAKNISEEKASLKSREHDKFHHILDAVKEELNRERKQRHRAEMMNSKLLNDLSEMELAAKRYSRDYEKERKARVLMEEVCDELAKEITEDRAEVEAMRSESMKIRDELEEEKKMLQMAEVWREERVHMKLVDAKLTLENKYSQLSMLQNELEDFLRFHPGCNMEKGTVREAERLKEAICSSKINGIKEFSYKLPPPSEDIYAVFEELKQREDTAEKVIVQCNGNRPKGRASRAQTASPETDMFLENQPSRYCNQPRTRNEAAEDDSEWEAVSQVEENGSSNSPGGSEPSVNGFCGENDASVSGTDRDENCDNDQARSEISEVCSIAAGWSHNKRPFVGLWRSSSTAHRKSMGSSTLNGRSSNARMSNLTESPDLKSSEVCGSPRVTGQWRPDLLNPDIVRAIKGCIDWSHGAQKHGLKSEILEARIDGSKVQLRQALKQKI

SEQ ID NO: 18924 - protein, 123 aa, Zea mays
  VARIANT 96: note = Ancestral polymorphism is A, Derived polymorphism is V
MGNCAVAQHAVTSWADDGEWDVPSAAEDEAGGAAGTSGWEWDKDRAAAEVTIRIPRRQLQELMEKRAPAAGGLLRGLASRGAAAQAQLLLADVMNAGHVYLHRCRAAHWKPALQSIPEAAVES

SEQ ID NO: 18925 - protein, 415 aa, Zea mays
  VARIANT 24: note = Ancestral polymorphism is K, Derived polymorphism is E
MAPTPQWHLTMLPSIYIDTAAALKLASNRLGSSLTHVSSMASKEVLAIVFLSILLHGAVTTKVVDGANVIDRCWRGQPNWAANRQRLAACSVGFAGKMRQNRGPGVIPYTVTDPGDDPVRPRPGTLRYGATVLGGKVWITFQRDMHIRLAQPLFVKSFTAIDGRGADVHIAGGAGIVLHRVSSVIIHGLHIHGCRSQPEGLAVRPGGAVQPAGGMDGDAIRLVSSAKVWIDHNSLSRCEDGLLDVTVGSTDVTISNNWFFNHDKVMLLGHDDGHAEDRRMRVTVAFNRFGPSVNQRMPRIRHGYAHVVNNVYLGWKDYAIGGSMGPSVKSQGNLFVASAAADNKKVTRRMPVAGREWDWASIGDSFLNGAVFKQTGSRVRPNYNKHQAFAAASSNQVKSLTKDAGVLRCSVGSAC

SEQ ID NO: 18926 - protein, 148 aa, Zea mays
  VARIANT 29: note = Ancestral polymorphism is L, Derived polymorphism is R
  VARIANT 38: note = Ancestral polymorphism is D, Derived polymorphism is Y
  VARIANT 64: note = Ancestral polymorphism is P, Derived polymorphism is L
  VARIANT 91: note = Ancestral polymorphism is A, Derived polymorphism is G
  VARIANT 98: note = Ancestral polymorphism is G, Derived polymorphism is D
MANRSKQLVTTALPLAAAAAASLAVVLLLCSTGSSEADGYLGRVGAPWGRTLTVLPFSPADLLPLLPRGVAMAALRALRGVSDIFPVFVGAASAGGSGSVPGSGGTVRWKGACFYENEAWLVFHNESGSKYGGGTLHIKVRASSPDRS

SEQ ID NO: 18927 - protein, 564 aa, Zea mays
  VARIANT 28: note = Ancestral polymorphism is P, Derived polymorphism is R
  VARIANT 415: note = Ancestral polymorphism is A, Derived polymorphism is D
MTAPKLKLLALPTLLVLILLLLLSAARRRVLLETLLLRAPVLPGDLLPLLPWPVAQPLLRRLALRGPADLLPAFVGAARAPGSDDAYPVAEWKGACFYENRAWVEFRNGTGGGLGGGVVHVETSKAHSWTCIDLYVFATPYRVTWDYYFLGREHTLDIKEWESEAEYEYVKRNGVSIFLMPSGTIGTLRALWDVFPLFTNTAWGENANLAFLEKHMGATFEERPKPWVSELNPDDIQSGDFLVLSKIRGRWGGFETLEKWVTGAYAGHTAVCLRDSDGKLWVGESGNENEQGEDVIAILPWEEWWEFEVTKDDSNPQIALLPLHPDLRAKFNETAAWIYAKSMEGKPYGYHNMIFSWIDTISDNYPPPLDAHVVASVMTVWSKLQPEYAANMWKEALNKRLGTKVCLNLFFGVSARCYLVLFFYFQGLDLSEIIVESEKRGITFDKLLSVPENDSWVYEDGQSASCVAFVLMMYKEAGLFDPITSSIEVTEFTIKDAYILNFFEDNSTRLPEWCNKDDDVKLPFCQIKGKYRMELPGYNTMKPYAHMNERCPSLPPDYNRTKGC

SEQ ID NO: 18928 - protein, 108 aa, Zea mays
  VARIANT 46: note = Ancestral polymorphism is A, Derived polymorphism is V
MAPKKEKAPPPSSKPAKSGGGKQKKKKWSKGKQKEKVNNAVLFDQATYDKLLSEVPKYKQITPSILSERLRVNGSLARRAIKDLMAKGLIRMVSVHSSQQIYTRATNT

SEQ ID NO: 18929 - protein, 220 aa, Zea mays
  VARIANT 72: note = Ancestral polymorphism is K, Derived polymorphism is T
  VARIANT 145: note = Ancestral polymorphism is S, Derived polymorphism is P
MASATGVSSSEMAVDHATGPGAVDKPRFDALTPNEMSGGRPQFRKVPVPQHRFAPLKRCWMEIYTPVYEHMKIDIRMNLKARRVELKTRQDTPDVSNLQKCADFVHAFMLGFDIADAVALLRLDDLYVDSFEIKDVKTLRGEHLSRAIGRLSGKGGKTKYAIENSTRTRIVIADTKIHILGSFVNIKVARDSLCSLILGSPAGKVYSKLRAVSARLAERY

SEQ ID NO: 18930 - protein, 208 aa, Zea mays
  VARIANT 15: note = Ancestral polymorphism is V, Derived polymorphism is A
MAQGRMSCVFLACLVAVASVSASTASAFVFKAGGTGEWRVPAAAGSGNGSSYNAWAQRNRFRVGDAIAFTYQPGNDSVLLVDKRSYDACDTGSPTDTFADGSTVFTFTRSGPFYFISGNKDNCDRGEKLIVVVMAERAAVGNATEPGAGLAPSPSGPFSSFSPPPPFGIDISPTAPYPPPNAAAPPKVAAGVAGAATFAIGALFYALV

SEQ ID NO: 18931 - protein, 245 aa, Zea mays
  VARIANT 33: note = Ancestral polymorphism is A, Derived polymorphism is D
MDAPAAAAQGCGGKHIVLVHGACLGGWSWFKVAPALREVPTFRDYTGPLLELLASLPDGDRVVLVGHSLGGLSVALAAETFPDKVAAVVFLCAFMPDCAARPSHVLEKFVEGKWLEWMDTELKPQDGEGKLPTSMLFGPRIIREKFTQLCSPEDVTLMTSLLRPSSMFVEDLVLQQPYTKERYGSARKVYVVCTEDHAIAEGFQRWMVENSPVDEVREIVADHLVMLSRPSDLVRCLADIADKYA

SEQ ID NO: 18932 - protein, 142 aa, Zea mays
  VARIANT 44: note = Ancestral polymorphism is A, Derived polymorphism is S
  VARIANT 15: note = Ancestral polymorphism is E, Derived polymorphism is V
MDLARREADRAAAAEFVALDIRGEGESPANDPELKLMESSFVAAKEFERDRRGDVISSSSGAYEKQTVPVHVDDCPREHLQPSTPTAGGGAKRRRSSRRVLGWRDPRKILFAFAALSSVGTLILLYFTLSMGKMTGGQADGQ

SEQ ID NO: 18933 - protein, 203 aa, Zea mays
  VARIANT 87: note = Ancestral polymorphism is A, Derived polymorphism is T
  VARIANT 39: note = Ancestral polymorphism is Q, Derived polymorphism is L
MAVKVYVVYYSMYGHVGKLAEEIQKGASSVEGVEAKTWQVPETLPEEVLGKMGAPPKPDVPVITPQELAEADGILFGFPTRFGMMAAQMKAFFDATGGLWREQSLAGKPAGVFFCTGSQGGGQETTALTAITQLTHHGMVFVPVGYTFGAKLFGMDQVQGGSPYGAGTFAADGSRWPSEVELEHAFHQGKYFAGIAKKLKGSA

SEQ ID NO: 18934 - protein, 112 aa, Zea mays
  VARIANT 16: note = Ancestral polymorphism is R, Derived polymorphism is W
  VARIANT 28: note = Ancestral polymorphism is S, Derived polymorphism is F
MTMGVAMGICGLQLFWNITGNLEVRFGSIIFTPFAYSILARDVLFHLEQAEKARLWSVATMNCLDFDAWTTVVEETDKNAELKLCMLQDYLCSDCHHVATLRSPLDHGTPIL

SEQ ID NO: 18935 - protein, 266 aa, Zea mays
  VARIANT 17: note = Ancestral polymorphism is P, Derived polymorphism is L
  VARIANT 32..266: note = Derived polymorphism lacks residues 32 to 266
  VARIANT 80: note = Ancestral polymorphism is G, Derived polymorphism is E
  VARIANT 103: note = Ancestral polymorphism is P, Derived polymorphism is L
  VARIANT 108: note = Ancestral polymorphism is D, Derived polymorphism is A
  VARIANT 111: note = Ancestral polymorphism is D, Derived polymorphism is V
  VARIANT 134: note = Ancestral polymorphism is E, Derived polymorphism is K
  VARIANT 156..266: note = Derived polymorphism lacks residues 156 to 266
  VARIANT 168: note = Ancestral polymorphism is D, Derived polymorphism is H
  VARIANT 172: note = Ancestral polymorphism is R, Derived polymorphism is H
  VARIANT 181: note = Ancestral polymorphism is G, Derived polymorphism is S
  VARIANT 184: note = Ancestral polymorphism is A, Derived polymorphism is T
MATNPSNGAGADVPAAPAAVRLSVAAQAAAIQPSSPRFFFSSLAGTNPASPHRRIAIAVDLSDESAFAVKWAVQNYLRPGDAVVLLHVRPTSVLYGADWGSIPVSVADEDDAAEDAAAAAEGGPSEEELQKKREEDYDAFTSTKAQDLAQPLVDAQIPFKIHVVKDHDMKERLCLEAERLGLSAMIMGSRGFGASRKGSKGRLGSVSDYCVHHCVCPVVVVRYPDDAADAGGDASGVTDELHTVPEDEPVYHDAPEVQKGSLLFFL

SEQ ID NO: 18936 - protein, 438 aa, Zea mays
  VARIANT 176..438: note = Derived polymorphism lacks residues 176 to 438
  VARIANT 214..438: note = Derived polymorphism lacks residues 214 to 438
  VARIANT 215: note = Ancestral polymorphism is T, Derived polymorphism is I
  VARIANT 271..438: note = Derived polymorphism lacks residues 271 to 438
  VARIANT 393..438: note = Derived polymorphism lacks residues 393 to 438
MEEGLVSVDKFSGGSQAYFLTHLHQDHTRGLGAVGGWRHGPLYCSPTTARLLPIRFPGIDASLLRPLAPGASASIYLFSPSSGQSLSLHVTAIPALHCPGSLMYLFRGDLGCMLYTGDFRWELGCDEARRAKQDLLDALDGDTIDVLYLDNTYCHPSLNFPPRPVVAEQVIDIIRSHPDHEVIIGVDTLGKEDLLLHISRALQTKIWVWPQRLQTIHLLGIDENRDIFTTQTSLTRIRAVPRYSVTIDNLEALNTVCPTIGILPSAIPCLWKSSEGKAKSKGRSSVKSIRSSGRGEGLTEMDCNPLSPPKLFDKDSYTLPYSEHACFSELEDFMHTVRPWTVSGIVSSSFCYVNPRHHFRHLCLDNNVNDETDMTPIKNKGRDNDKLTPKRWRNGSVTPKERKVRISSSSLYRSKVTMKRKECCGARINDTEEHIGVT

SEQ ID NO: 18937 - protein, 127 aa, Zea mays
  VARIANT 5: note = Ancestral polymorphism is G, Derived polymorphism is R
  VARIANT 19: note = Ancestral polymorphism is A, Derived polymorphism is S
  VARIANT 25: note = Ancestral polymorphism is D, Derived polymorphism is A
  VARIANT 39: note = Ancestral polymorphism is R, Derived polymorphism is H
  VARIANT 103: note = Ancestral polymorphism is G, Derived polymorphism is A
MANHGAAALLLIASVLAAAALSGADARLTVRPNMAAALRAANGRFAVRPGTKVTLRRDAHGGYVVDVAAVPDLTCNTVRGVQADETCFSVAQGAGLTQDQFLAFNPNINCAKIFVGQWVCLDATTSA

SEQ ID NO: 18938 - protein, 578 aa, Zea mays
  VARIANT 48: note = Ancestral polymorphism is I, Derived polymorphism is S
  VARIANT 46: note = Ancestral polymorphism is L, Derived polymorphism is V
MASNGSSLVRRAAAAVRRMPRWKKRLVFFAVGASTLTYACQDNRVLQICDVTGNKKKVVILGTGWAGASFLRNIDTSLYDVHVVSPRNYFTFTPLLPSVTCGTVEARSIVEPIRNIVRKRNGAFRFWEAECFKIDPTNKKVHCRSDVGTNINGNGEFVVDYDYLIVSVGARPNTFNTPGVTENCHFLKEVEDAQKIRKSVMKCFERAALPNLSEEERKKNLHFVIIGGGPTGVEFAAELHDFVNEDLAKLYPDVKKHVNISVIEAGGHILTMFDKRITQFAEEKFKRDGIDLKTNFKVVKVSNKDILMTNPATGEVAVPYGMAVWSTGIGTRPIIMDFMKQVGQENRRVLATDEWLRVQGCEDVYALGDCATIAQRKVMEDVAAIFRVADKDNSGTLTVKKIKDVLGDIYERYPQVELYLKSNQMKGFHDLLKDSDGSSKEFKELDIEQFKRALAQVDSQVKMLPATAQVAAQEGSYLADCFNRMKMCEEYPEGPIRIRGAGRHRFKPFRYKHLGQFAPLGGEQTAYQLPGDWVHVGHSTQWLWYSVYASKQFSWRTRMLVVSDWGRRFIFGRDSSSI

SEQ ID NO: 18939 - protein, 258 aa, Zea mays
  VARIANT 3: note = Ancestral polymorphism is A, Derived polymorphism is P
  VARIANT 7: note = Ancestral polymorphism is L, Derived polymorphism is M
MMACRRLARDAVAASLRRSAATETTASTPAFFSSSSAAASSCSSGAPVAGSPIRHFLARYSSPAFQIQPSAAGLGPSFAARVALGLRPQLSGLNLIKGFGTSTMLAMTLHQGQVTAATKEQPSKAIAGPPQGSLKTKLGSFWPLVRKLQLPVGLIFLIMSGLHSPLSLTLNILLLLYCSSPSRYSIYLFLQELHHREVGQNHAVSKEEYMRTRNIITEDYKFFSIGTIELVDGRVLHLIGMLGSWWIYRVSFKCKELV

SEQ ID NO: 18940 - protein, 213 aa, Zea mays
  VARIANT 177: note = Ancestral polymorphism is H, Derived polymorphism is L
MEVKLWNDKRERELLESYADLYAIIKVTEKLERAYVRDLVSAADYEAECLKLISQFNSLSSSLAGTVAVPRFVQAYRLDCPAALNRLLQSGVPATVELRAASASSAPAATSASAAAIAHCVQTFITAMDAVKLNMLANDQVRPLLQDVATSMARLGSLLPPDFEGKVKVNEWLGKLHKMGAADELTEQQARQLNFDLDSAYSAFLAALPAAGL

SEQ ID NO: 18941 - protein, 212 aa, Zea mays
  VARIANT 15: note = Ancestral polymorphism is G, Derived polymorphism is E
  VARIANT 58: note = Ancestral polymorphism is S, Derived polymorphism is Y
  VARIANT 87: note = Ancestral polymorphism is K, Derived polymorphism is N
  VARIANT 103: note = Ancestral polymorphism is G, Derived polymorphism is R
  VARIANT 146: note = Ancestral polymorphism is C, Derived polymorphism is R
  VARIANT 150: note = Ancestral polymorphism is C, Derived polymorphism is Y
MAAANGAAAVGAGAGLFSEEELREVSGVRWGEDFVEVTCGCTSHRYGDAVGRLRVCASGDLEINCECTPGCREDKLTPAAFEKHSGKETAGKWRNSVWVMVEGEKVPLSKTVLLKYYYLARKSGSGGGGGCGRRNGRPSHRDEFVCCTRCGKGRRVSCADEEERASRKVLRGCSRSPSCTGCMKCVCFGCETCRFVDCDCQTCVDFYRNSKE

SEQ ID NO: 18942 - protein, 1249 aa, Zea mays
  VARIANT 243..1249: note = Derived polymorphism lacks residues 243 to 1249
MAEEPVVGYDGFEAAGDAGAGGAEDNLSMSLGDFMAFLETEPTSPEEGWKEEQQMQPAVNQGCLEMPANTDCSEDLFQSHEAEMLENAEFWSKSNYSPVEHLECHMEVNMELNEGEQMIDHTEASRYELFSNDLQSQSRTSNLDNEHFPRDASNHANVEATGPPYDLSNGGISTEHSDWSEIKWGSTDEMLGNTGQDDDHFTPMGMFCLTNNTDILDLSCIESNMGERTESIRNGNSSCLTMQEEHLQAECGGYPHPDYISVDMIDERSLHDLPHGLSQNNEQYEMEQLPQNICESGSMQMASPDQYCSSPDQYCDDTSLSDFYMDVSSPESISCEQNQPEDIFFKSESSTDSSPVPSSRNSTTEDADKYLGQPSKQLLDSKIVPFSNQHTFKNMEYQKPLVLDKQYAYRSNNSSIHNSTKGCFSRDGDMVSDLCVLEGNRNPAPAHLWPYQGKFHHNFQQPVYGNSIIPAFGGTRYKPHDERTTLRLALQDISQPNSEANPPDGVLAVPLLRHQKIALSWMVKKETSISLCYGGILADDQGLGKTVSAISLILTERPPVPQSSTKNEPCEAVTLDEDDDCIGPHSEKLMRTCSSQVTSNTVKQENPIVAVKARPAAGTLVVCPTSVLRQWAGELKNKVTSKANLSFLIYHGSNRTKDPNELTKYDVVLTTYSIVSMEVPKQSNPDSDGEEKGKPDPYGAPVSSSGSKKRKASSSKKTKNKSVAESCLPEKPLAKVAWFRVILDEAQSIKNYRTQVARACWGLRAKRRWCLSGTPIQNAVEDLYSYFRFLRYNPYAVYKQFCTLIKIPISRNPNNGYKKLQAVLKPVMLRRTKATMLDGEPIISLPPKTVSLKTVDFTSEERGFYNTLEVESREQFKEYAAAGTVKQNYVNILLMLLRLRQACDHPHLVRGYDSCSSWMSSLEMVKKLPMERQHKLLICLQSCSAFCALCNDAPEDPVVTLCGHVFCNQCILEQLTGDDSVCPVSNCRVRLNTSSLFSRGTLECSLSKLASDFKSDDTCMEMIHAEKRPGMDSSYASSKLRAALDILLSLPKIDPTIDSKCSIGIESEKFDGKGISEQTDTKLTEKAIVFSQWTRMLDLLEVHLKASHVTYRRLDGTMSVAARDKAVNDFNMVPEVSILQFLYWQVTVMIMSLKAASLGLNMVAACHVLMLDLWWNPTTEDQAVDRAHRIGQKRPVTVSRLTIKDTVEDRILALQEKKREMVASAFGEDKSGSRQTRLTVEDLNYLFMV

SEQ ID NO: 18943 - protein, 89 aa, Zea mays
  VARIANT 35: note = Ancestral polymorphism is A, Derived polymorphism is G
MCHPGLPPSCAVRRREQQAAVAPSLSPSVPWARHGAPHHYCVCSPTAHRGSFRCRWHRSGFEWGRRRPFANTPGRAEAGPAMHARMAAP

SEQ ID NO: 18944 - protein, 254 aa, Zea mays
  VARIANT 103: note = Ancestral polymorphism is S, Derived polymorphism is L
  VARIANT 30: note = Ancestral polymorphism is K, Derived polymorphism is N
MSPSEYLTKRVVMLENELKCYYQTEGLNQKNQNSSVIQYIQVHQDDAILNIKLELFSLIASQPAFNQLRTVEQLGYITSLSLRSDYGVLALQVVIQSTVKDPSYLDGRVDEFFKMFESKIYELSDKDFKRNVKSLIDSKLEKFKNLWEESDFYWGEIQAGTLKFDRVESEVTMLRELKKEEFIEYFDQYIKVDAPQRRTLSVQVFGGNHSAEFKTAIAEADPPKMYRITDIFGFKRSRPLYSSLKGGPGRITMD

SEQ ID NO: 18945 - protein, 158 aa, Zea mays
  VARIANT 68: note = Ancestral polymorphism is D, Derived polymorphism is Y
  VARIANT 86: note = Ancestral polymorphism is T, Derived polymorphism is I
  VARIANT 88: note = Ancestral polymorphism is A, Derived polymorphism is T
MARRNIGVAVDFSSCSKAALRWASTNLARNGDRLILIHVNSSCQNERGAVHLWEQSGSPLIPLAEFSDVARTYGVSPDKETIEILTRAANHRGIEVFAKVLYGDPAKKLYEAADLVPLSCMVVGSRGLSTLKRALMGSVSTYIVNHAACPVTVVKEMV

SEQ ID NO: 18946 - protein, 192 aa, Zea mays
  VARIANT 158: note = Ancestral polymorphism is S, Derived polymorphism is F
  VARIANT 5: note = Ancestral polymorphism is R, Derived polymorphism is Q
  VARIANT 4: note = Ancestral polymorphism is A, Derived polymorphism is S
MEAARAMAGTDDTALAKATAGASATGAPMTMAAKMQTRTGQWIKKAPTEKLHLPEPNIFVPKDLSLKEVHEKVTFPTVLRKSPLSQLWYKPDTLFSTPKVHIIIDFHCPLSSHSSEAVVATELFVDLLVDYLNAYAYDAQIAGLFYSIYLTSAGFQVSLGGYNDKMRALLNAILVQIASFEVKPNRFSALKI

SEQ ID NO: 18947 - protein, 157 aa, Zea mays
  VARIANT 59: note = Ancestral polymorphism is T, Derived polymorphism is I
MATASSFTAIFFSSAFVACFAEVKAFFVRCAVVGDVSLLSKILAALATGVIAIVVANPTDLVKVRLQADGKANTVKRSYSGALNVYATIIRHVTLTIMGSHCIADSEEQKVHVIADERPLELLAKEYAINSFDIDPQNPSDVVFTLEWESIGVLPCG

SEQ ID NO: 18948 - protein, 201 aa, Zea mays
  VARIANT 75: note = Ancestral polymorphism is V, Derived polymorphism is M
  VARIANT 72: note = Ancestral polymorphism is R, Derived polymorphism is Q
  VARIANT 59: note = Ancestral polymorphism is S, Derived polymorphism is A
  VARIANT 58: note = Ancestral polymorphism is A, Derived polymorphism is T
  VARIANT 47: note = Ancestral polymorphism is R, Derived polymorphism is C
  VARIANT 45: note = Ancestral polymorphism is P, Derived polymorphism is L
  VARIANT 43: note = Ancestral polymorphism is P, Derived polymorphism is L
  VARIANT 36: note = Ancestral polymorphism is P, Derived polymorphism is R
  VARIANT 31: note = Ancestral polymorphism is V, Derived polymorphism is M
  VARIANT 27..201: note = Derived polymorphism lacks residues 27 to 201
  VARIANT 25..201: note = Derived polymorphism lacks residues 25 to 201
  VARIANT 23: note = Ancestral polymorphism is E, Derived polymorphism is K
  VARIANT 5: note = Ancestral polymorphism is G, Derived polymorphism is D
MEAIGNTLPALGTLADNDMVLVEEQQQALEVVCPSPPPLLPLPEPVCGTVFLELLESASWVALEDKKTLVERNIVKETQCKWNLKKKGLWMMTVVKYVTKTVKLLRTSSSTARLHANFGAPSDSLSLMIWAPRTCQTSVALIAFRVQNSTPLSSSGAGNCGNTEMVSSFVRIMPLLRPLYIHALLKQKLGRTGTTGKRHKY

SEQ ID NO: 18949 - protein, 180 aa, Zea mays
  VARIANT 65: note = Ancestral polymorphism is A, Derived polymorphism is V
  VARIANT 146: note = Ancestral polymorphism is I, Derived polymorphism is T
  VARIANT 157..180: note = Derived polymorphism lacks residues 157 to 180
  VARIANT 160: note = Ancestral polymorphism is C, Derived polymorphism is F
  VARIANT 161: note = Ancestral polymorphism is I, Derived polymorphism is T
MASLTTTTSSPAALPAATTATAASSISPHAGSKRPLLAGDDAPWRATAATAAGQGIRPVPRIHHAPVLSVATQEDYAAYALDIMKHPNPIGEGLAMEAFAEAAGPECIVPGQQAPLRLMGLKVWPLDIDMKFLEPFGRELHSMKKIIHVLMLCSKREDSFIVTMFMDKSCSVMDSSMANK

SEQ ID NO: 18950 - protein, 647 aa, Zea mays
  VARIANT 544..647: note = Derived polymorphism lacks residues 544 to 647
  VARIANT 17: note = Ancestral polymorphism is A, Derived polymorphism is V
MAMPSLLRFLVLLTAGAAVSQVVAAWVDCGDASPSPPPYSSSPSPSPSSTPANGSSNAPFRANLMTLLDALPRAAAPTGFASLSLGAGRDRAFVRGLCRGDFDPPRCLAELQEAVRTLGGSCPSSSRRGAVWLDVYVAYADTNVSTPREDDVRMVLYDTRLVAHPAAYLQAYSALMGTLVARAVGGGGGEAGTSRQFFATGEANYASDDPNGTMYGLVQCMRDITAADCVHCLQASVPQLPCCKGNQGGVVLAYNCYLRIQVYTYYDLALDAPPPAAEPAPPVPSPPPAGETSGTGTRPRNTIVLLAVVVPLGTLLLLAFVVAGVYLRRRRGVVVEERGRERGCTAVEDEPSMTYVHPEKFTLAALRVATGNFAAGNKLGEGGFGEVFKGRLEDGHPVAVKRLSKGSSQGFDELKNELILAAKLKHRNLVQLLGVCLEESEKLVVYEYVPNRSLDTVLFDAGRRPQQALEWSERYKIIRGIARGLLYLHEESRLRIIHRDLKPSNVLLDSDMTPKISDFGLARAFWGDESRGVWDQWRRGSVAEVVDASPCAGGQCAGTEALSCVQIGLLCVQKDPRSRPDASEVVLMLEGRCAIQQKPSRPAFYSGHISVASARRAARGSAVSYGRLSAIGTVSENGVTVSELDPR

SEQ ID NO: 18951 - protein, 713 aa, Zea mays
  VARIANT 54: note = Ancestral polymorphism is C, Derived polymorphism is R
  VARIANT 585..713: note = Derived polymorphism lacks residues 585 to 713
MPLNMWLIWPYGSALSVDPTIYIYGIVMLYANCTHSFMFYPLLSFSIKGINYYCHLLDNLINANYTIIFVKLQHATDINFSLLQSVSDNDVRNIVLSYLMHNCFKETAEAFLSSTGLNLPVDYSVDVDKRKAIFNFVLEGNALKAIELTEEMAPNLLENDMDLHFDLLSLHFIELVRSKKFTEALDFGQKKLTSFQKVTKYIEKLEDFMALLAYEEPEKSPMFHLLSPEHRQNVAEGLNRAVLAHANLPAYSSLERVVQQATVVRQYLQQEVGKDSYPPFSLKAFLSNFYADSTGTSMSMSISIPVRFGPWGGNSGTIFDDGIYTGVRQINLTRGLVGISSMKVLYDRNGQAVWGDKRGVSGGSTRAQKVVFDFPSEILTHITGYFGSTTATMKMKMGPTVIRSLTFHTTRKSHGPFGGDEQHGTFFSSCLADGRIVGFHGRAGWYIDSVGVHVLEGKVLSQQRDDETRCSLALAAREREAGDEVAPATTTTTYGVVKEPVPIGPGPWGGDGGKPWDDGVYTGVRQMYITRTDDFIGSVQMEYDRSGKSVWSTKHGNGGQQQITITHRIKLDYPHEVLTCVYGYYNACVEEGPRVLRSLTLVSSRGRYGPFGDEVGAYFTSATTEGKVVGFHGRCGLYLDAIGVHMQHWLGVGDARTARASAPSKYYISRPGHIDWGLRCSVLYRSKTQVAGRSGVVDLADFEKSKSTTQLFA

SEQ ID NO: 18952 - protein, 264 aa, Zea mays
  VARIANT 250: note = Ancestral polymorphism is W, Derived polymorphism is S
  VARIANT 193: note = Ancestral polymorphism is G, Derived polymorphism is V
  VARIANT 173: note = Ancestral polymorphism is R, Derived polymorphism is Q
  VARIANT 170: note = Ancestral polymorphism is R, Derived polymorphism is T
  VARIANT 72: note = Ancestral polymorphism is R, Derived polymorphism is L
  VARIANT 64: note = Ancestral polymorphism is Y, Derived polymorphism is S
MDPFYFGPDQLDAAAVDEDYLTSLGLVVLSPEPVAPLPGGAFEAYQRRAPALLEHSLQTMSRRYSGEHNMHRRMFSYLRRVAHDAGAAVVAAPAFPAPARESVPGFGVGTSQAPRSSRFRNIMRERLRRERLSQGFADLHALLPHGASSKGGKNDIVGAAAGYVRELVARKEQLSARNQELLEKAASRWKQQGGTRSGVGRGMVVKVQAESQDHSMALGAFVRVLQRLKAMEAGLQVTAIRTRFSAGGVWMNIGVEGQFLLSLT

SEQ ID NO: 18953 - protein, 651 aa, Zea mays
  VARIANT 153: note = Ancestral polymorphism is S, Derived polymorphism is F
MQPIRRRHRGFALLCLSAALLAAATLLPGAAVAEGVTPSEARRLRDEVKDMFYHAFDGYMKYAFPLDELRPLSCQGEDSLGGYALTLIDSLDTLALLGDKEKFGAAVEWVGKNVHFDINKTVSVFETNIRILGGLLSAHLIASDYATGMRIQSYDDQLLHLAADLAQRLLPAFDTPTGIPFGSVNLLYGVDENESKITSTAGGGTLTLEFGILSRLTNNTVFERVTKKSVRGIWSRRSKLNLVGAHINVFTGEWTQKDAGIGTSIDSFYEYLLKAYLLFGDEEYLYIFQEAYKAAMHYLHHDPWYVEVNMNSGATVWPLFNSLQAFWPGLQVLAGDVDPAIRTHAAFFSVWKKYGFTPEGFNLATSTVQNGQRSYPLRPELIESTYWLFKATRDYRYLDVGRDILASLQYGARCPCGYCHISDVETHKQDDHMESFFLAETVKYLWLLFDLAAGPDNIVENGPYKYIFSTEGHLLPVTPEIALEDEHCSYFGAFCNGGADHGYGASASSTKHRNGNYTQLDDIQTPSSHYSMSNVLFTPGYIKGVCPGLTHAQKFGISYSDEEDNFIEQTSESLDHHGESAIESSVQDQSSSIILISHPVASQQDEAFESESGSQDHANIVVTSDSDSDSTSRDNTVGSPGMNSEELMDDI

SEQ ID NO: 18954 - protein, 410 aa, Zea mays
  VARIANT 256: note = Ancestral polymorphism is T, Derived polymorphism is I
  VARIANT 170: note = Ancestral polymorphism is S, Derived polymorphism is F
MEAAPRRQQQQQEEEEEGCPCGGPEAADHFERLHDAVLLDVLNRIGDVKALGRCALVSRRFHALVPLVDSVFVRVDCVIPDDPPSSSSAGAAPGSPPHQAPAPTARGRGALARVARALLGGVARPIHALGQILSSAAATVSRRSEPLPASPPPAPVADVSHHSPSEVLRSFRELRRLHIELPTGELGIDDGVLLKWKADFGSTLGSCVILGASSVSSKSPAGSAQAETAAADSAAAAPDTGRETEEPGSLPDSLYTNGGLKLRVVWTISSLIAASARHYLLHPIICNHGTLESLDLTDADGQGVLTMDKRQLQELRVRPVSPSGSSHRTLMPALSMRLHYAPLIELPGGTLLKGATLVAIRPSEDALREGQGVAGPAGTCWISEAFEEPYRTAAKVLLKRRAYCLEMNSF

SEQ ID NO: 18955 - protein, 282 aa, Zea mays
  VARIANT 90: note = Ancestral polymorphism is P, Derived polymorphism is A
MTHGLAVGFGSLRCGPSVSSSSATIHRTLVAPPRRSLRICSSTFPPPPAPAIEGRDVSLSVTTRRGRVLPVLKGCSLLVPPGQLWMLLGPNGCGKSTLLKVLAGFQNPTAGTVYINRPCSYVFQNPDHQVVVMPTVGSDVAFGLGKLKLPLDEVRLRVSKSLDAVGMLSYSQRPIQTLSGGQKQRVAIAGALAEASKVLLLDELTTFLDEHDQIGVINAVRDSVAADGEVAALWVTHRLEELKYADGAIYMEDGQIIIQGDVSTISKFIKKKQARYFGHFEL

SEQ ID NO: 18956 - protein, 146 aa, Zea mays
  VARIANT 69: note = Ancestral polymorphism is T, Derived polymorphism is K
MASLLCPASSCPSASLRRTAASPAAPSFASSRHYGAPLTFRVASQPPQALAAAPYGYGSDLLRPIDTQTIIIAAAVVSAVSLSLVLGLKGDPVPCDRCAGNGGTKCVFCNDGKMKVENGVVECRVCRGAGLILCKKCAGSGYSKRL

SEQ ID NO: 18957 - protein, 254 aa, Zea mays
  VARIANT 116: note = Ancestral polymorphism is A, Derived polymorphism is V
  VARIANT 145: note = Ancestral polymorphism is E, Derived polymorphism is V
  VARIANT 167: note = Ancestral polymorphism is R, Derived polymorphism is K
MLPCARSVLRRRGLASSLLRMCGGEGQCSTGTGELVANARCASTLAALGGGGRVLERGARWAYLQTGVIGAGRMARTQTRCFLGCGDGEEGGVLSKVYEERRVMGYSPEQMFAVVAAVDLYEDFVPWCQRSRIVRRHDDGSFDAELEIGFKFLVESYVSRVEMEKPRYIKTTASESGLFDHLINVWEFKPGPVPGTCDLYFLVDFKFQSPLYRQVASMFFKEVVSRLVSSFSDRCFRIYGPAVPVLENTYGQGR

SEQ ID NO: 18958 - protein, 409 aa, Zea mays
  VARIANT 138: note = Ancestral polymorphism is D, Derived polymorphism is G
  VARIANT 388: note = Ancestral polymorphism is G, Derived polymorphism is W
MGASWITTCSPWSAFATLAALTTSALVLGYVSSSLLGQQAAYEYDDAYSPDAEPSGPAAPPRRGAGYPPVFAYYITGGRGDCLRMTRLLKAAYHPRNRYLLHLDAGAGAYERARLARYVRSEQVFLEYANVHVVGKGDALDGRGPSAVAAVLRGAAVLLRVGAEWDWLVTLSAADYPLVTQDDLLYAFSSVPRDLSFIDHRPDSETHHVVVLDQNLLQSTNAEISIASGHREKPDAFDLFRGSPWPILSRAFTEHCVAAPDNLPRTLLMYFSNSLEAKEFYFQTVMANSPRFRNSTVNHSLRVNVPPPPPQSAGQQARYDALVAGGAAFAGRFGDDEALLQRIDEEVLRRPLDGITPGEWCAVGGGEDGAGECSVGGDIDAVRQGAAGRKLASLMAGLVGTAPCGGCNS

SEQ ID NO: 18959 - protein, 121 aa, Zea mays
  VARIANT 28: note = Ancestral polymorphism is G, Derived polymorphism is C
  VARIANT 27: note = Ancestral polymorphism is L, Derived polymorphism is V
MSAGRWLRLALLLSLVPLALRAASLLLGVPALASPSSSSRQSWTTDPHERAAAAAVSVWPARDRDRPYRHARHRRRAGSGSAASSSDDGARRRLRQAAAGDWFEDDKRLAPTGSNPLHNLR

SEQ ID NO: 18960 - protein, 765 aa, Zea mays
  VARIANT 697..765: note = Derived polymorphism lacks residues 697 to 765
  VARIANT 722..765: note = Derived polymorphism lacks residues 722 to 765
MGAAPSTPTLDVAPLTPRLGAAGAPPSPSAAEQMFAALVGEKAYPISSEFWNQLLELPLTLQWPRDRVLQACHAFAENNYKTKHLAKILIHLVCCLQECTSTTSVSSVVYQRAINAAYISSIFLKFIIENAKTDSWQELCLDIDRSEKGLEKIPAENTVEYFLMRGVLDYIGSVDVRYLIHHLYILMFPVSMYGLFIFDLTAICTVLSPELCYLHHELLNLMLVLMSTQLCSGPSPEPKDVHPFIDAAMLQDSSIVASVVQKLLLNFVTRPKIPLNASHPVFSDDGRPGVLQRVGSAAANFVLLPYYYLVSSTPEGATSQLADNSLLVLLIMIHYRKCISTNESIPTNNVYTMDSNTNDKDAPVFHDNPYCKALNSAKDIQYDRADVEGNAQDRPVVRLSFASLFDAFGRCLNDESSVLLLYSLVYGNCDFQEYVLVRTDLDTLLMPILEMLYNASRKTSNQIYMLLIILLILSQDSTFNASVHQLVLPAVPWYHERLMHQTSLGSLMVVILIRTIKYNLSKLKDVYLHTNCLAILANMAPHVHRLSAYASQRLVSLFDMLSRKYAKLAELKNDKSLKVIYDQMEADIADDMSIELHIYTDFLRIVLEIIIAILTYALPRNPEVVYAVLHRQEVFEPFKNHPRFSELLENIYTVLDFFNSRMDMQQLDGEWSVDKVLEVINKTCRSWRGEGMKMFTQLRFTYEQESHPEEFFIPYAWRLVLSRGFSFNPDAINLFPVEIHLEFWKLWSQPKFFSVNRVPAGSRSG

SEQ ID NO: 18961 - protein, 544 aa, Zea mays
  VARIANT 452: note = Ancestral polymorphism is F, Derived polymorphism is L
MGEEREFVGARLDAGLRAARFSSPPSADEFAADVEPKNVPAVFRGVVKEWAASSRWDPLHGGLDYLLEKVGPDVAVEAMMSNTGHVFYGDLRSHERVSVSFSTFIQSCKSYLDHMNAASDSSKEQGMLGEPASSRETCSNSSENLEQVYLAQVSIMNAENKEGCSLQVLEGDIQEPIFLRGKSFSSINFWMNKGHLRSSTHYDPHHNLLCVVSGRKKVTLWPPSASPFLYPLPVYGEASNHSSVSVEEPDYSIYTRARYMKEYSETVILNCSDVVFIPEGWYHQVDSDDLTIAVNFWWKSRIMTQMLEHMDAYYLRRIMSRLVDQEMSIMAQKSPFGHLKDCTDIQHMAKTLTGFQLFNLQKDSPLRTLEPSTLQALYELISLVHDGAEAVSQMDKIEATSQNKSSNQRDDTDTSAAADDSSLLDKDPVAKIILPVEPLELRTMLLAMVHTFPRTLENLILNMLGVGAEILTRKFDEMDQQTTKEEQSEFYKIFYSVFDDQYAAMDALLNGKELFSFQIFQNVLDKYLGVHVDRPSRFVTRTNQ

SEQ ID NO: 18962 - protein, 384 aa, Zea mays
  VARIANT 304: note = Ancestral polymorphism is M, Derived polymorphism is T
  VARIANT 222: note = Ancestral polymorphism is A, Derived polymorphism is V
  VARIANT 192: note = Ancestral polymorphism is P, Derived polymorphism is T
MQSSLARPLRPPVLAGRGGRRGLVAVARCHAEAAPPVGTASRAPAGPYTGRDPEVKKPAWLRQRAAQGEKYARLRESIGELKLNTVCVEAQCPNIGECWNGGGGAGGEGDGIATATIMVLGDTCTRGCRFCAVKTSNKPPPPDPLEPLNTALAVASWGVDYVVLTSVDRDDLPDGGSSHFAQTVKALKELKPGILVECLTSDFRGDLEAISSLANSGLDVYAHNIETVRSLQRIVRDPRAGFDITLDLNANVSVNDIIAKGPLAYDQSLAVLKHAKACREGMVTKSSIMLGLGETDEEVKQAMMDLRAIGVDILTLGQYLQPTERHLTVREYVTPEKFQFWKEYGESVGFRYVASGPLVRSSYRAGELFVQNLVRNNKTGSSSS

SEQ ID NO: 18963 - protein, 688 aa, Zea mays
  VARIANT 59: note = Ancestral polymorphism is H, Derived polymorphism is L
  VARIANT 29..688: note = Derived polymorphism lacks residues 29 to 688
  VARIANT 25..688: note = Derived polymorphism lacks residues 25 to 688
MPQWWGREARGGGGGGGTSVVVKMESPDWAVREPEAARGKAGRGKNARQITWVLLLKAHRAAGKLTGAASAALSVAAAARRRVAAGRTDADADAGAGAGAAPHGESPALRTRLYGFLRASLVLSMLLLAADVAAHLQGWHLLAVDVPDLLAVEGLFAAGYASWVRVRLQYLAPALQFLANACVLLFLVQSADRLILCLGCLWIKLRGIKPVPNAAGKGPDDVEAGTGEFPMVLVQIPMCNEKEVYQQSIGAVCGLDWPRPNFLVQVLDDSDDAATSALIKEEVERWQREGVRILYRHRVIRDGYKAGNLKSAMNCSYVKDYEFVVIFDADFQPQPDFLKRTVPHFKGNEDVGLVQARWSFVNKDENLLTRLQNINLCFHFEVEQQVNGIFLNFFGFNGTAGVWRIKALEDSGGWMERTTVEDMDIAVRAHLKGWKFLFLNDVECQCELPESYEAYRKQQHRWHSGPMQLFRLCFVDIIKSKIGFWKKFNLIFLFFLLRKLILPFYSFTLFCIILPMTMFIPEAELPAWVVCYIPATMSLLNILPAPKSFPFIVPYLLFENTMSVTKFNAMVSGLFQLGSAYEWVVTKKSGRSSEGDLIALVEKQPKQQRVGSAPNLESLTKESSSLKRDSKRKKHNRIYRKELALSFLLLTAAARSLLSVQGIHFYFLLFQGVSFLVVGLDLIGEQVE

SEQ ID NO: 18964 - protein, 517 aa, Zea mays
  VARIANT 338..517: note = Derived polymorphism lacks residues 338 to 517
  VARIANT 276..517: note = Derived polymorphism lacks residues 276 to 517
  VARIANT 219..517: note = Derived polymorphism lacks residues 219 to 517
  VARIANT 214: note = Ancestral polymorphism is S, Derived polymorphism is L
  VARIANT 198: note = Ancestral polymorphism is W, Derived polymorphism is C
MMHPLRRILALLLVGLLPAAAWSLAPPRFPRPQPRSRPGANGVGDYEYETRYFRQRLDHFSFPGVGDEDEDEAAAFFQQRYLVGRGGGWAGPGGPIFFYCGNEGDIAWFAANSGLVWEAAPRFAALVVFAEHRYYGESMPFGSKAKAYSDSKSLAYLTAEQALADFAVLLTDLKRNLSAEGSPVVLFGGSYGGMLAAWMRLKYPHIAIGALASSAPILQFEDIVPSTIFYDLVSDDFRRESLSCFLTIKDSWKELDDQANEQDGLLKLSKTFHLCQTLKTSGDLSDWLSSAYSYLAMVDYPLPSEFLMPLPANPIKEVCRNIDSQPKGTGTLERIYAGVNVYYNYTGTVDCFDLNDDPHGMGGWDWQACTEMVMPMSYSEQRSMYPPYKFDYASYAEDCIKSYGVRPRPKWITTEFGGHNITKVLENFGSNIIFFNGLLDPWSGGGVLKNISESVVAIVAPLGAHHIDLRPATPDDPDWLVALRESELEIISGWLWDYYGAGGALFQPVAVKGSSSY

SEQ ID NO: 18965 - protein, 122 aa, Zea mays
  VARIANT 17: note = Ancestral polymorphism is Q, Derived polymorphism is L
  VARIANT 32: note = Ancestral polymorphism is N, Derived polymorphism is S
  VARIANT 34: note = Ancestral polymorphism is A, Derived polymorphism is V
  VARIANT 37: note = Ancestral polymorphism is R, Derived polymorphism is L
  VARIANT 40: note = Ancestral polymorphism is R, Derived polymorphism is H
  VARIANT 43: note = Ancestral polymorphism is G, Derived polymorphism is D
  VARIANT 62: note = Ancestral polymorphism is F, Derived polymorphism is V
  VARIANT 88..122: note = Derived polymorphism lacks residues 88 to 122
MSGRGKGGKGLGKGGALRHRKVLRDNIQGITNPAIQRLARRGGVKRISGLIYEETRGVLKIFLEQGCWFRGSSRAHPARPPRSVAMAQCRHHLLLMVIAAPVRPYFLLDCFLFPFRCVFTCP

SEQ ID NO: 18966 - protein, 229 aa, Zea mays
  VARIANT 8: note = Ancestral polymorphism is A, Derived polymorphism is V
MASTRDLAIASLSAATGAVVAAAALRLLSSRRTSSVRPQNLPAAANGSASERPLAQSPFDPVKREGYISWDDYFMAIAFLSAERSKDPNRQVGACLVSQEGIILGIGYNGFPRGCSDDKLPWAKKSASGDPLETKFPSYVVHAEVNAILNTNHASAAGQKLYVTMFPCNECAKIIIQSGVSEVIYFVEKKIDNSAHVYVASHKLLSMAGVKVRKHQPQMAQIPIKFQEP

SEQ ID NO: 18967 - protein, 334 aa, Zea mays
  VARIANT 277: note = Ancestral polymorphism is A, Derived polymorphism is V
MQGISICGSVASPHGANCRRACVARNDVRLPCEVNAVSQGLHSLHWWCAHKPQMKNNGRRMNAAVKTNARWLFGGDGRSNDARLERSESANEDILIFYFQMDLQTRIQYALNIEQFDVAKQLREKLTEIETEIIRQREARRGSPKTEAQDKALNLIRVRADLQKAIDSENYALAAGLRDDIAKLEVESLAVSAKALAYQNVKYAFRLGQKVRHNIHGYRGVICGMDPVCCESKSWMETANVEKLSKGPNQPFYQVLVDVYVDPELLVAYVAEENLSAAEESEKGRFDHPYIEFLFYGEDTAGDFIPIKQLREKYDQPRYEASGDESDNDGNTNS

SEQ ID NO: 18968 - protein, 365 aa, Zea mays
  VARIANT 172: note = Ancestral polymorphism is K, Derived polymorphism is T
  VARIANT 283: note = Ancestral polymorphism is A, Derived polymorphism is V
MAFKLVTKPAAASPAAAHWGDLARGPQGTSRVAFGPAPRNKGLRTANNSATPMAKEERVDRSEILTLDSIRQVLIRLEDSIIFGLLERAQFCYNADTYDSNAFHMDGFGGSLVEYMVRETEKLHAQVGRYKSPDEHPFFSKDLPEPQLPPMQYPRVLHPIADSININKEIWTMYFDELLPRLVKEGSDGNAGSNALCDTTCLQVQLIFMLYFSELYSVLVLWMHICLCSSQLGVEIPFALSAAEEYILGCYILANKALSKRIHYGKFVAEAKFQESPEAYTPAIIAQDRDQLMRLLTYETVERAVEHRVEAKAKIFGQEVNIGAKDNGSQPVYKIRPSLVAELYSYRIMPLTKEVEVAYLLRRLD

SEQ ID NO: 18969 - protein, 214 aa, Zea mays
  VARIANT 171: note = Ancestral polymorphism is V, Derived polymorphism is G
MAPMKLYGAVMSWNVTRCATALEEAGSDYEIVPINFATAEHKSPEHLVRNPFGQVPALQDGDLYLFESRAICKYAARKNKPELLREGNLEEAAMVDVWIEVEANQYTAALNPILFQVLISPMLGGTTDQKVVDENLEKLKKVLEVYEARLTKCKYLAGDFLSLADLNHVSVTLCLFATPYASVLDAYPHVKAWWSGLMERPSVQKVAALMKPSA

SEQ ID NO: 18970 - protein, 382 aa, Zea mays
  VARIANT 212: note = Ancestral polymorphism is L, Derived polymorphism is P
  VARIANT 237: note = Ancestral polymorphism is N, Derived polymorphism is D
  VARIANT 291: note = Ancestral polymorphism is S, Derived polymorphism is F
MRKLCPNLDRDDSLDTVLEVPIPDEMLINAPGADKRRGAGGANMRAWLKNQAFDRATVDGPASATAELQLFLNVVGSPLIPCPVPHDRAFSRSIRDSSIQASTAKYIIQQYIAATGGQAALQGVRSMYAVGKVRMCASEFHLGDQTVTAAQGRAEVGGFVLWQKTPEVWFFELIMAGHKMSAGSDGKVAWRQSAAEHSRVSRGPPRPLRRSLQGLDPRSIANLFSDAVCIGEKILNNEECFILKLEAGAATLRARSAPAFDIIHHTVWGYFSQRTGLLIQLEDSHLLRMKSGKGARRSENIFWETSMESVISDYRYIDGINIAHGGHTNVTLFRYGEGSVNHKRKLEETWTVEEADFNVHGLTTDYFLPPADLKKDDEDHNK

SEQ ID NO: 18971 - protein, 205 aa, Zea mays
  VARIANT 166: note = Ancestral polymorphism is A, Derived polymorphism is S
MASAASSAAAAGKSLFQGFRRFLKKPWEITGPCASPEYRSALPGALEYRVKCPATVRDDRDKAIVPTSDPETVYDIKYFTRDRRRNRPPVRRTLLRKPDLERYMVTKQFDPTKDFPVPYVNTTVEEDDNTLTGQACNVRQGILVVLGLHEQLHKFRFSFQISPFSASFLVVKDDGGNNMVLELTGCTFLVTCIPKLYLPETIVTV

SEQ ID NO: 18972 - protein, 538 aa, Zea mays
  VARIANT 123..538: note = Derived polymorphism lacks residues 123 to 538
MRRKLLQFPSLVAQHALRGAPTPRFQPQPHHHRFLHSPSAPTSASPSSSPSAHLIWNRLSGSTGISPLPRTAADVAAAARTAASRWLATARGARSLDLFSLPRWRRASGRQFSPSPFLQGATWASWMESADGAVWMLIGANVAVFLLWRVADPGFMRKHFMISLDNFKSGRLHTLLTSAFSHAEFNHLFANMFGLFFFGSSALHFSLTTITERASFIAINLFNITTAEITNVFGPAFLLKLYVGGALTGSVFFLLEKAFLAYRKQDYVGWDTSRAAELVCGFLFQQHILKIAAICTTAFANCTILLQPAHQMVHITWELGASAAVNATMLLQIFLYPKGLVYIYFVIPVPAALMGAGLIGADLVRLKDERGQCCEGRYKVMVLFVESPPGSGKGTQSPIIKDEYCLCHLATGDMLRAAVAAKTPLGIKAKEAMNRGELVSDDLVVGIIDEAMKKPSCQKGFILDGFPRIVTQAQKLDEMLAKQGANVDKVLNFAIDDVVLEERITGRWIHSASGRTYHSKFAPPKSPGVDDVSRVQNI

SEQ ID NO: 18973 - protein, 253 aa, Zea mays
  VARIANT 11..253: note = Derived polymorphism lacks residues 11 to 253
  VARIANT 14: note = Ancestral polymorphism is R, Derived polymorphism is Q
  VARIANT 18: note = Ancestral polymorphism is Q, Derived polymorphism is E
  VARIANT 19: note = Ancestral polymorphism is R, Derived polymorphism is I
  VARIANT 26: note = Ancestral polymorphism is T, Derived polymorphism is I
  VARIANT 40: note = Ancestral polymorphism is A, Derived polymorphism is V
  VARIANT 65: note = Ancestral polymorphism is D, Derived polymorphism is Y
  VARIANT 73..253: note = Derived polymorphism lacks residues 73 to 253
  VARIANT 90: note = Ancestral polymorphism is T, Derived polymorphism is A
  VARIANT 177: note = Ancestral polymorphism is W, Derived polymorphism is L
  VARIANT 183: note = Ancestral polymorphism is S, Derived polymorphism is F
  VARIANT 190: note = Ancestral polymorphism is C, Derived polymorphism is G
  VARIANT 192: note = Ancestral polymorphism is E, Derived polymorphism is K
  VARIANT 208..253: note = Derived polymorphism lacks residues 208 to 253
MRSAISETFPEPNRRLLQRILKMMHTVASHTSENRMTASAVAACMAPLLLRPLLAGECEMDEVFDMDGDDSAQLLAAANAANSAQGIVATLLEEYEGIFHDEHLICSLSPESQIEDSGTEASTDDGNLEAKGNGFHDAENDVDQELDDDNGVEHILSGKLSESSGYAGSDLYDYKVWFCVLHSFDFSDACLENQITALENKCSGDYQWIGFCHNDLQNGNIMIDEKTNVLTIIVIHGEDWVSYNNVRAANEPI

SEQ ID NO: 18974 - protein, 348 aa, Zea mays
  VARIANT 16: note = Ancestral polymorphism is A, Derived polymorphism is V
MKLSVAVLCALLAVQAAVLLATVPTSQASELEVGYYSKKCKGVENVVKWHVIKALKASRRTGAALVRLLFHDCFVRGCDGSVLLDASYDNPHPEKEAPVNIGLAAFDLLEEIKAAVEKRCPGVVSCSDILIYAARDAASVLSNGHVHFAVPAGRLDGFVSKAEEAQAELPDSNQDVQQLIDNFARKNFTVEELVILTGAHSIGQGHCSSFTGRLSEPSQQITPAYRDLLNYKCSQGSNPPVDNNVRDEDYDVVARFMPGFTSRVRKIPDFLDNSFYHNNLAKIVTFHSDWTLLTHKEAFGHVVEYAENATLWDEDFSDSLLKLSKLPMPKGSKGEIRKKCSVVNHRLY

SEQ ID NO: 18975 - protein, 220 aa, Zea mays
  VARIANT 135: note = Ancestral polymorphism is V, Derived polymorphism is L
  VARIANT 206: note = Ancestral polymorphism is H, Derived polymorphism is R
MVYYGGRAAAGFSPSFHHIIAYEWTFTRPQTVVLLSENSSSGRGRPCSTSAHQRAGAAQTAAMQGSGALPGLTGTGRGGGFLPCGSLGKRTPAGRRGATSVRAVDGASVAAAASAAADSPLPPVQVTWQIAVGALAGVTPFVVAGVEFGKRIIAQKKCQVCGGSGLVTKNDYYVRCQKCGKKSPTMAYLWRIKRDNGFLPQVVFFRGSLGEDSSRGERGL

SEQ ID NO: 18976 - protein, 887 aa, Zea mays
  VARIANT 110..887: note = Derived polymorphism lacks residues 110 to 887
  VARIANT 363..887: note = Derived polymorphism lacks residues 363 to 887
  VARIANT 526..887: note = Derived polymorphism lacks residues 526 to 887
  VARIANT 545..887: note = Derived polymorphism lacks residues 545 to 887
  VARIANT 602..887: note = Derived polymorphism lacks residues 602 to 887
MDDIASEAPVGAFAIGPSTALGGAVALRVLLCGSAARLRHRLAAALRAALPVAAAWLHPRDNTRGILLAVCAVALLLRGRRGRAGLRARVQSAYRCKFWRNMMRAALTYEEWAHAARMLELEAAPRRASDADLYDEELVRNKLRELRHRRQEGSLRDIVFCMRADLLRNLGNMCNPELHKGRLQVPRLIKEYIEEVSTQLKMVCDSDSDELPLEEKLAFMHETRHAFGRTALLLSGGASLGSFHVGVVKTLVEHKLLPRIVSGSSVGSIMCSIVATRSWPELESFFEEWHSLKFFDQMGGIFPVVKRILTHGALHDIRHLQVLLRNLTSNLTFQEAYDITGRILVVTVCSPRKHEPPRCLNYLTSPHVLIWSAVTASCAFPGLFEAQELMAKDRFGQTIPFHAPFLLGMEERTVAPTRRWRDGSLESDLPMKQLKELFNVNHFIVSQANPHIAPLLRLKEIIRAYGGSFAAKLAELAEMEVKHRCNQVLELGFPLGGLAKLFAQDWEGDVTVVMPATLAQYSKMIQNPSYAELQKAANQGRRCTWEKLSAIRANCAIELALDECVALLNHLRRLKRSAERASASQGYGPVIRFCPSRRIPSWNLIARENSTGSLDEEMLASPHTNHQGPGGVAGTSTRNQYLQRNAHESSDSESESIDLHSWTRNGGPLMRTASANKFISFVQNLEIDTEFRTIPSRENLTDLVTPNAGTLAAHAVSREATDRSLDISALDIHDTATPRSTFGRSTSIVVSEGDLLQPEKIENGILFNVVRRDTLLESSSGVESQGSPREPDVETVQTECLDGISASDDDDKELNVIVDEATDPMSSNNLQDQGSSLEENSYSHFPLNSADETSTNKPETASIFDICTEMHPASISLPQGSSEKAEL

SEQ ID NO: 18977 - protein, 252 aa, Zea mays
  VARIANT 143: note = Ancestral polymorphism is S, Derived polymorphism is G
  VARIANT 184: note = Ancestral polymorphism is I, Derived polymorphism is S
MDAEAGEAGVQQPAGAASTSTAAVPFDRSSSRLGAPGAESFDGALRELKDLRSQLHEAADCCAKAFLSTDKKKMILEGTKGYICDAVVAVIDHLGTVSSKLEHKLQERTEVAQTERKINFLKQVIFGPELHSSLSLRFYQEISIDICMRQGFAVVCSLRQRLLTCEQYAVSLKLLSVRGDPDAIRYHRRYISQLKMVHDFRKLLAQQYLELPSLSSHMMFNQPSDVHVVLGDHKKKGNHGSNILSFLKKTRR

SEQ ID NO: 18978 - protein, 287 aa, Zea mays
  VARIANT 257..287: note = Derived polymorphism lacks residues 257 to 287
  VARIANT 189: note = Ancestral polymorphism is T, Derived polymorphism is K
  VARIANT 171..287: note = Derived polymorphism lacks residues 171 to 287
  VARIANT 167: note = Ancestral polymorphism is G, Derived polymorphism is S
  VARIANT 160: note = Ancestral polymorphism is R, Derived polymorphism is M
  VARIANT 89: note = Ancestral polymorphism is L, Derived polymorphism is Q
  VARIANT 69: note = Ancestral polymorphism is K, Derived polymorphism is N
  VARIANT 24: note = Ancestral polymorphism is T, Derived polymorphism is A
MEVLIGLHLLHLRAAVTLSSARHTQLMGTQQRRDLQANIPALRKLDTMLLRVRTSQERANEKWWIPIVNVPPGGLSPTSRAWLLHQKELVNQVLKAAMAINANCLNMENGRASLGDALYRVITDVEFDPNDFLSTMDLTSEHKILDLKDRIEASVIIWNRKVHNKDSKSSWGSAVSQEKREQFEERAQTLLLILKHRHRFPGIPLSALDIAKIQENRDVGFALLESYSRVLESLAFNVMSRIEDVVQTDNLARDIAKKNAPPAADPAARTRAGWNGDAEGKNDDASF

SEQ ID NO: 18979 - protein, 576 aa, Zea mays
  VARIANT 149..576: note = Derived polymorphism lacks residues 149 to 576
  VARIANT 132..576: note = Derived polymorphism lacks residues 132 to 576
MAEVKPEEISHPPMEQLQGFEYCIDSNPPWGEAIILGFQHYILALGTAVMIPTVLVPMMGGDDGDRVRVVQTLLFVTGINTLLQSLFGTRLPTVIGGSYAFVIPIMAIIQDPSLSGIPDGHERFLETMKAIQGALIVSSSIQIILGYSQLWGIFSRSLSFTLRSFLPRAIPNLPIYYQVVPFFSPVGMTPVVALLGFGLFERGFPVVGRCVEIGLPMLILFVVLSQYLKNIQIKEIPILERFSLFICVALVWAYAQILTSGGAYKNSAEVTQNNCRTDRANLISSAPWIKIPYPLQWGAPTFNAGQSFGIVSAVLVSLVESTASYKAAARLASATPPPAHILSRGIGWQGIGILLDGLFGTGTGSTVSVENVGLLGSTRIGSRRVIQISAGFMIFFSMLGEQNMSLLRAKGGGRLLTPLHFILSVAGKFGALFASIPFTIFAAVYCVLFGLVAAVGLSFLQFTNMNSMRNLFIVGVSIFLGLSVPEYFFRYTMAAHRGPAHTKAGWFNDYINTIFSSPPTVGLMVAVFLDNTLEVKQAGMDRGMPWWQRFRTFKGDSRNEEFYRLPFNLNRFFPPA

SEQ ID NO: 18980 - protein, 481 aa, Zea mays
  VARIANT 158: note = Ancestral polymorphism is L, Derived polymorphism is R
MASDTEGIAALFSMYNDDEEDEDADEPNPPSPAPLTTVTSSSPLSPQAGGEDPNPSLAPPSPPRPEESASLKTLVSPHPSPARALLPPLPSRRSSSPFAASPPSPLRGPSSAPPADLPRPPRRGALAIVDYAHDEMAMSPEQEVEPVKYVFSYAFRNLLVFLIGLISMDGLQDGEIMSHTYRFVSDAQAAEGNLEERTLSGTVHIMTPNTPAELSQHADAPEQNQLGTDMAVDITRAEIEDAQVEETTDISTNGENDDPLSRFLPPPVTTKCSAALKQKINKFLAYKRAGKSFNAEVRNRKDYRNPDFLQHAVRYQEIDQIGTCFSKDVFDPYGYDKGDYYDEIEAEMKRELERKEQEKKRNPKVEFITGGVQTPHSASIPKIPGLAGVCTLPVPTEGVQKETRPNKKSKWDKVDDDVKNHVVPSGHDNLSATASVALLTSANVGAGYAAFAPVAIFLCSRQQKRKEAEEKRSDHKSDRRS

SEQ ID NO: 18981 - protein, 630 aa, Zea mays
  VARIANT 6: note = Ancestral polymorphism is W, Derived polymorphism is R
MGWWWWCLPVAALLAAILPSSDATLSPAGINYEVVALMAIKTELEDPYNVLDNWDINSVDPCSWRMVTCSSDGYVSALGLPSQTLSGKLSPGIGNLTRLQSVLLQNNGISGPIPGTIGRLGMLKTLDMSDNQLTGTIPSSLGKLKNLNYLKLNNNSLSGVLPDSLASIDGFALVDLSFNNLSGPLPKISARTFIIAGNPMICGNNSGDKCSSVSLDPLSYPPDDLKTQPQQGIGKSHHIATICGVTVGSVAFIAFVVGILLWWRHRRNQQIFFDVNDQYDPEVCLGHLKQYAFKELRAATNNFNSKNILGEGGYGIVYKGYLRDGSVVAVKRLKDYNAVGGEIQFQTEVEVISLAVHRNLLRLIGFCTTESERLLVYPYMPNGSVASQLREHINAKPALDWSRRKRVALGTARGLLYLHEQCDPKIIHRDVKASNVLLDEYFEAIVGDFGLAKLLDHRESHVTTAVRGTVGHIAPEYLSTGQSSEKTDVFGFGVLLVELVTGQKALDFGRVANQKGGVLDWVKKLHQEKQLGVMVDKDLGSSYDGVELEEMVQLALLCTQYHPSHRPRMSEVIRMLEGEPGLAERWEASQSNVDTPKSVSSELLPPKYVDFAAADESSLGLEAMELSGPR

SEQ ID NO: 18982 - protein, 134 aa, Zea mays
  VARIANT 119: note = Ancestral polymorphism is R, Derived polymorphism is C
  VARIANT 101: note = Ancestral polymorphism is S, Derived polymorphism is F
  VARIANT 80: note = Ancestral polymorphism is M, Derived polymorphism is V
  VARIANT 74: note = Ancestral polymorphism is K, Derived polymorphism is E
  VARIANT 71: note = Ancestral polymorphism is G, Derived polymorphism is E
  VARIANT 62: note = Ancestral polymorphism is E, Derived polymorphism is K
  VARIANT 54: note = Ancestral polymorphism is I, Derived polymorphism is F
  VARIANT 45: note = Ancestral polymorphism is A, Derived polymorphism is S
  VARIANT 42: note = Ancestral polymorphism is R, Derived polymorphism is L
  VARIANT 41: note = Ancestral polymorphism is C, Derived polymorphism is Y
  VARIANT 26: note = Ancestral polymorphism is A, Derived polymorphism is T
  VARIANT 24: note = Ancestral polymorphism is G, Derived polymorphism is D
  VARIANT 21: note = Ancestral polymorphism is C, Derived polymorphism is Y
  VARIANT 10: note = Ancestral polymorphism is V, Derived polymorphism is F
  VARIANT 9: note = Ancestral polymorphism is D, Derived polymorphism is Y
  VARIANT 8: note = Ancestral polymorphism is P, Derived polymorphism is S
  VARIANT 5: note = Ancestral polymorphism is G, Derived polymorphism is D
  VARIANT 2: note = Ancestral polymorphism is W, Derived polymorphism is L
MWMYGIAPDVITYNSNLNGLCKVGKAKKVNDTFEWMILKGCRSNAMTYNILIEIFCKINQPEEAYGVIVSGIVEMGWFLVLNGDLDGAYLLLHKLDEKGYSVTTNTSNSHVLLLSSSIRNTREPLPLTIPTALT

SEQ ID NO: 18983 - protein, 246 aa, Zea mays
  VARIANT 17: note = Ancestral polymorphism is P, Derived polymorphism is S
  VARIANT 34: note = Ancestral polymorphism is D, Derived polymorphism is N
MPKIKNLSNACKVSFSPEGPISEEVLERVRALLDEIRPLDVGLDNEAQIARNWSSTTRPSNGRRGRNGANQFTAPIKYLHIHECESFSMGIFCMPPSSVIPLHNHPGMTVLSKLLYGRLHAESYDWVDVPDHPIDQLQPRPAKLVKDCEMTAPETTILYPNAGGNIHTFRAITPCALFDVLSPPYSAEDGRHCSYFRKSQMNQPSVVLPAEIDSTQVVWLEELEDHQPPEGFVVARGMYKGPVIRR

SEQ ID NO: 18984 - protein, 215 aa, Zea mays
  VARIANT 6: note = Ancestral polymorphism is C, Derived polymorphism is F
  VARIANT 48..215: note = Derived polymorphism lacks residues 48 to 215
  VARIANT 50: note = Ancestral polymorphism is V, Derived polymorphism is G
  VARIANT 131: note = Ancestral polymorphism is R, Derived polymorphism is K
METIKCCIACILPCGALDVVRIVHSNGRVEEISGGPVLAAEIMKAYPKHVLRKPPSTCPADAAGIVVHKPVVLPPSAELHKGKIYFLTPVMADATPPAPAPENKPPAASLQPPPPPPPAAQQTASSAARTRRRRRKGHTTAAAREGAPACSSGAGAGARTAAGLAPQEGDKERLLDNERYLSEIMKETASTPRDRRQGRVAVWRPHLESITEDDL

SEQ ID NO: 18985 - protein, 223 aa, Zea mays
  VARIANT 57: note = Ancestral polymorphism is S, Derived polymorphism is L
MVSHVEMGLAAGGFKLFGKVITQCAESAPPASLVARERDDPDERDQPVVKREAAAASDSDSAVVLVDKQRRSGGPAESEDSKGQHHPRPRQPQQQDTAEARAAASAPPLPCPRCRSRNTKFCYFNNYNVNQPRHFCKDCHRYWTAGGALRNVPVGAGRRKNRPLGAAPIPLAVSVPAQHLQHPQHPAAAAGHGLGLPGQHPSCPTSPSPAYAGRWPVCPDRRF

SEQ ID NO: 18986 - protein, 97 aa, Zea mays
  VARIANT 84: note = Ancestral polymorphism is L, Derived polymorphism is F
  VARIANT 81..97: note = Derived polymorphism lacks residues 81 to 97
  VARIANT 58: note = Ancestral polymorphism is S, Derived polymorphism is L
  VARIANT 33: note = Ancestral polymorphism is L, Derived polymorphism is S
  VARIANT 30: note = Ancestral polymorphism is H, Derived polymorphism is Y
  VARIANT 18..97: note = Derived polymorphism lacks residues 18 to 97
MVPGRKGFNAQGNPAVIWAVILIALLLWSHTHLIENGLVTANTTSVDESGKQHFLDASVAYKRVVLNDIEYLARFGYSKEQVYLLLSCCPCEAGSLE

SEQ ID NO: 18987 - protein, 215 aa, Zea mays
  VARIANT 14: note = Ancestral polymorphism is L, Derived polymorphism is P
  VARIANT 22: note = Ancestral polymorphism is V, Derived polymorphism is A
  VARIANT 48: note = Ancestral polymorphism is Y, Derived polymorphism is H
  VARIANT 64: note = Ancestral polymorphism is I, Derived polymorphism is M
  VARIANT 91: note = Ancestral polymorphism is D, Derived polymorphism is G
  VARIANT 96: note = Ancestral polymorphism is N, Derived polymorphism is S
  VARIANT 99: note = Ancestral polymorphism is W, Derived polymorphism is R
  VARIANT 122: note = Ancestral polymorphism is A, Derived polymorphism is V
  VARIANT 128: note = Ancestral polymorphism is G, Derived polymorphism is E
  VARIANT 149: note = Ancestral polymorphism is M, Derived polymorphism is T
  VARIANT 180: note = Ancestral polymorphism is D, Derived polymorphism is G
MLNIRDTKVVSCTPPMLFFHSVGVKGAKASGAKAVAVPSLQNQRNHYYIADVILYSLLDFQPEMWGLPPFEDRIQGVLPIDPLLSNARIGGKILNNIHWVISDDCAYEYIPDQISGIFLGWAKSKVHGFSKVIVATGWDFSQQTVERVMHVHFLDCSGTVETEPVKLLIIGYIRKLQSADDILQALSVTDEDRRIARDALDLPTFSEYANDLHLA

SEQ ID NO: 18988 - protein, 238 aa, Zea mays
  VARIANT 85: note = Ancestral polymorphism is Y, Derived polymorphism is C
  VARIANT 117: note = Ancestral polymorphism is Y, Derived polymorphism is C
  VARIANT 183: note = Ancestral polymorphism is V, Derived polymorphism is A
MSSDELRLELDELRRLEGLAKRPRVQTLLANEIRNIEAKMAKATEPSPEPLAAASAPTAAARSDLSYATLGSFSWEQDNEKIRIYIPLEGVEQGKVEATFKPTSVDVKFHDVKGKNYRCAIPKLNKETVPDKCKVVVKPTKVIVTLFKASKGNWLDLHFKEDKFHISTLLDTVLSFNFCLLFVVFKPSMDKEKDPMSGIMDLMKNMYEDGDEDMKRTIAKAWSDARSGKTTDSLSGLR

SEQ ID NO: 18989 - protein, 102 aa, Zea mays
  VARIANT 2: note = Ancestral polymorphism is P, Derived polymorphism is L
  VARIANT 10: note = Ancestral polymorphism is V, Derived polymorphism is M
  VARIANT 23: note = Ancestral polymorphism is A, Derived polymorphism is V
  VARIANT 31: note = Ancestral polymorphism is T, Derived polymorphism is M
  VARIANT 32: note = Ancestral polymorphism is M, Derived polymorphism is I
  VARIANT 44: note = Ancestral polymorphism is L, Derived polymorphism is M
  VARIANT 55: note = Ancestral polymorphism is A, Derived polymorphism is V
  VARIANT 56: note = Ancestral polymorphism is A, Derived polymorphism is V
  VARIANT 78: note = Ancestral polymorphism is E, Derived polymorphism is A
  VARIANT 83: note = Ancestral polymorphism is V, Derived polymorphism is I
MPEMEFMGTVTIDDFFDFFGGHAMALAGGTTMHIDFIIHVNSNLTAWSESDKHKAAKASMDYGFHMAITKWDDEVAREMEVMVKEHGQRIIGEPVVIPMQFL

SEQ ID NO: 18990 - protein, 338 aa, Zea mays
  VARIANT 243: note = Ancestral polymorphism is D, Derived polymorphism is V
  VARIANT 35: note = Ancestral polymorphism is S, Derived polymorphism is C
MVVVLANPPVVDQIPLLRSPGPRDSFSCVPVVDLSGPGAARAIVDACERFGFFKVVNHGVPAATMDVAESEAVGFFAQAQADKDRAGPRASYPFGYGSKRIGLNGDMGWLEYLLLAVDSASLSDACPVPSGAAFRSALNEYVAAVRDVAARVLEAMAEGLGIADAAALSSMVTGAGSDQVFRVNHYPPCPALQGLGCTATATGFGEHTDPQIISVLRSNGTSGLQVALRDAAQAQQWVSVPSDRDAFFVNVGDSLQVLTNGRFESVKHRVVTNSLKSRVSFIYFAGPALEQRIAPLAQLLAEGEESLYREFTWGEYKTAAYKTRLGDNRLAQFQRCSI

SEQ ID NO: 18991 - protein, 76 aa, Zea mays
  VARIANT 67: note = Ancestral polymorphism is L, Derived polymorphism is R
  VARIANT 53: note = Ancestral polymorphism is G, Derived polymorphism is R
  VARIANT 48: note = Ancestral polymorphism is V, Derived polymorphism is E
  VARIANT 14: note = Ancestral polymorphism is A, Derived polymorphism is T
MAAASSKTIAVLLAALLLALVASAVASRKLEEEDAFLGSLSPAPAPAEGGAAGLASGTPGAWAVAALVSLIAFLAN

SEQ ID NO: 18992 - protein, 69 aa, Zea mays
  VARIANT 53: note = Ancestral polymorphism is S, Derived polymorphism is N
  VARIANT 45: note = Ancestral polymorphism is G, Derived polymorphism is R
  VARIANT 44: note = Ancestral polymorphism is T, Derived polymorphism is N
  VARIANT 39..69: note = Derived polymorphism lacks residues 39 to 69
  VARIANT 36: note = Ancestral polymorphism is R, Derived polymorphism is H
  VARIANT 33: note = Ancestral polymorphism is G, Derived polymorphism is D
  VARIANT 27: note = Ancestral polymorphism is A, Derived polymorphism is V
  VARIANT 11: note = Ancestral polymorphism is N, Derived polymorphism is I
MVADVNLDGANASVSSLAFCPLSVTLAVGTTSGLVRIYKLREHTGGSNFIFVSEFKQGKYFIRNLMIDA

SEQ ID NO: 18993 - protein, 1031 aa, Zea mays
  VARIANT 651..1031: note = Derived polymorphism lacks residues 651 to 1031
  VARIANT 598..1031: note = Derived polymorphism lacks residues 598 to 1031
MARSSSATGSWARRFPCCCDGDRRNRFGGRSLSGDLLPPPSVGAMAQQPPRLRKKNLVSPYDPRYNPRRVWETFLILLVVYSAWICPLEFAFLRYLPRAPFVVDDVVNGFFAVDIVLTFFVPYVDSKSCLVVDDHRKIAARYLSTWFAFDVCSTFPFQSISLLFDEHEHSLGLKFLNVLRLWRLRRVSSLFARLEKDIRFNYAVIRCTKLISVTLFAIHCAGCINYLIADRYPDPRRTWIGAAMPDFREAGLWIRYVTSMYWSITTMTTTGYGDLHAENSREMLFGIAFMLFNLWLTAYLIGNMTNLVVHSTGRTRDFRDMVQVASEFAARNQLPQQIEEQMLNHICLRFRTEGLKQQETLDMLPKAMRSSISLYLFFPVVQGSYLFKGVSSGFIQQLATEMQPEYFAPKEDIMLQNDKPSDMYLLVSGAVDILTFLDGTEQVYGKAAEGELLGEVGVMSNKPQPFTFRTTRLSQILRIARSKLMDIMRENGEDGQIIRSNFQQRLRVEQRLYIAMHQDDVSVGVHRLRWCTVLPCPLLRDSRLYRHPRPRPALHRRRKDAIPGITPPFSPSSALRHPRPHPPPPSLPSYAQVLGAPYPANVVSQGRPFPCSRRLRAILGSVVHGAILGSGVRARARRLRAILGFGDPGSQDGGYSGGVSHALRTGLLVAGATLLLIAAAIAFFVARDIRKRRRVAARGDWKMTPFVVDLGFGEESILRGLTEANIAGRGGSGRVYRVTFTNRLNGAAGAVAVKQIRTARKLDGKLEREFESEAGILGNVRHNNIVRLLCCLSGAEAKLLVYDYMDNGSLDNWLHGDALAAGGHPMAMRDRGRFISWVVPDVGTGREIFNAYCSLHMIIYHWLQHVMLLMLLQASVLFRLCPRTVTPFVARNWSYQMAYPRFYFPKNLEFVTMRVFQDQHHEEYDQTARGILVGSFSEAVGIEQSGLTPAAEASMLPVPDGQPNNKLEGNEVDEHNCSYDAKFLNREASNLHKDVCVDPCSEDSHRSHLPPLISPQRSAYFHNENDSGSIG

SEQ ID NO: 18994 - protein, 419 aa, Zea mays
  VARIANT 285: note = Ancestral polymorphism is A, Derived polymorphism is S
  VARIANT 223: note = Ancestral polymorphism is D, Derived polymorphism is Y
MRAMEHSKLLLPPFLFICRWIVQFCTIQRQIKRNGGSTKFTFTLTSVFLSSCITGLLSNGDFETAPAGGFVRSASVAEGASSIPGWTINGTVELISAGQHQGGMILIVPQGDHAVRLGNDASVGQVVDVEKGSDYAVTFSAARTCAQLEALNVSVLGGVSQTVDLQTLYNIEGWDAYALAFQATEEQAHLQFMNPGMEDDPTCGPILDNVAVKKLFTPDKPKDNVVLNGDFEEGPWMFPNTSFGVLLPTNLDEQTSAIPGWMIESNRAVRYIDSDQYKVPQGKRAIELLSGKEGIISQMVETTPEKVYSLTAMLGAAGDSCQPPMAIMAFAGDQAQNFHYSPLGNATSQAVNVTFTARAERTRVAFYSVYYNTRSDDHSSLCGPVIDDVRVWGLNTAAGLKASAGLVLGIVGVVGMVLF

SEQ ID NO: 18995 - protein, 698 aa, Zea mays
  VARIANT 247..698: note = Derived polymorphism lacks residues 247 to 698
  VARIANT 168..698: note = Derived polymorphism lacks residues 168 to 698
  VARIANT 64..698: note = Derived polymorphism lacks residues 64 to 698
MPPPYSDALTGLPPTSSGKQRKLHRQRSQSSSASDQHSTTRGRLKLACRETVEGQRQSLDETRQLLDQRNISGAIPAALGNAKSLKFLRLDHNRLKGPIPRELAGLPNLGIVDFSNNDLCGAIPTDGAFQNIPRSSELLLVDACQHIPGDPSTSFSVFTVTTLPFVQQIVAETSGTTLTFVIIDKWVVTVASIGDSHCGQCYIFISKNCLMFIIFLFFSVKRVMPCGSKVGKMDIGGGPEVKYSHSQETGSPTKWSAEVSTLKLEEDKNQLSKGLDPWSNPTAATSTLHYLLQEKERAQAHEQLQIYHQQGFSYLQHRRRQQQQQQQPRAAGAGSDGVSSGESTPVDALATAFGSGRIVRSAAGRKDRHSKVCTARGLRDRRVRLAAHTAIRFYDVQDRLGYDRPSKAVDWLIRNAKAAIDELSADREEGQPAAEAADATTTEPAEQVTSTSYGFAIGGVAGSFMPHSVGADDVSGSGSGSGSGNVKSLFPSSSTTSTTPTQDEYRGSPPDLLSRTTSSNQPQELCLTLQSTNNHHHQQQQQQQIFSHVSPNHHGSMISVAGVQGWPEAHGQRMPPWHAPENSGAGDDGRGAAGNGDSYMFGVPGPRQGLDHLQGQLIFSQGEPLQSSGGGWPSSSARAWLDPLVAIHQHQPSTMSGQVGFGHLVGGAGSGFMGFLAPPAQRLQLQSEDEQGSEAMRE

SEQ ID NO: 18996 - protein, 693 aa, Zea mays
  VARIANT 403..693: note = Derived polymorphism lacks residues 403 to 693
  VARIANT 391..693: note = Derived polymorphism lacks residues 391 to 693
  VARIANT 378..693: note = Derived polymorphism lacks residues 378 to 693
  VARIANT 375..693: note = Derived polymorphism lacks residues 375 to 693
  VARIANT 311: note = Ancestral polymorphism is E, Derived polymorphism is K
  VARIANT 248..693: note = Derived polymorphism lacks residues 248 to 693
  VARIANT 206: note = Ancestral polymorphism is G, Derived polymorphism is E
  VARIANT 205..693: note = Derived polymorphism lacks residues 205 to 693
  VARIANT 167..693: note = Derived polymorphism lacks residues 167 to 693
  VARIANT 133..693: note = Derived polymorphism lacks residues 133 to 693
  VARIANT 48..693: note = Derived polymorphism lacks residues 48 to 693
  VARIANT 40..693: note = Derived polymorphism lacks residues 40 to 693
MASSASAPASTGPRYAPPDPTLPKPWRGLIDGNTGYLYFWNPETKVTQYERPVAAVPAPQSQPLVYSRPDDVPRSSAPAEQRSEAAVSRPQFVPPSDNRTRIDHSESSSASGVNLSQSALSTNQVSQYANGSQMSTEAYRAKHEITIVGNEAPAPFMTFQSTGFPSEILREVLQAGFSAPTPIQAQSWPIALRGRDIVAVAKTGSGKTLGYLLPGFILLKRLQHNSREGPTVLVLSPTRELATQIQDEAIKFGRSSRISSTCLYGGAPKGPQLRELERGADIVVATPGRLNDILEMNRVSLHQVSYLVLDEADRMLDMGFEPQIRKIVKQIPPKRQTLMYTATWPREVRKIASDLLANPVQVNIGNTDQLVANKSITQHVEVIPHMEKSRRLDQILRSQDPGSKSIIFCSTKRMCDQLARNLSRQYRASAIHGDKSQAERDSVLNDFRSGRCPVLVATDVAARGLDIKDISFHLTIFTMSSHRVVVNYDFPTGVEDYVHRIGRTGRAGATGSAYTFFGDQDSKYASDLVKILEGANQSVPPQLKEMALRGGYGGRSRRWASSDDSYGGQGYGAKRSTDSFNNNNFGNQAGGGSSFHSSHKESSISSLYNSSSGGQFGDTTSFHGSFDNSVRNNQTGDNASFPPSSSNNQAGDGLSFHERFYGSRGRDQSRTSNDGFRARSRSPPGKPVEVSNW

SEQ ID NO: 18997 - protein, 80 aa, Zea mays
  VARIANT 2: note = Ancestral polymorphism is A, Derived polymorphism is E
  VARIANT 25: note = Ancestral polymorphism is A, Derived polymorphism is V
  VARIANT 40: note = Ancestral polymorphism is Q, Derived polymorphism is E
MARIGASHVLLVVLLLSAVLSSGSARVPRERPDAMLPAGQTAAMAEMTVPGEGQSSGPAFGVAAHESKRLSPGGPDPQHH

SEQ ID NO: 18998 - protein, 139 aa, Zea mays
  VARIANT 111: note = Ancestral polymorphism is G, Derived polymorphism is C
MAAAASAARSFLRSSGSSSLRSAVARAASRAGPGPAPLPRRMPTSAPRVLLRSPVEMSSVCLESLMPMHSATASALMTSLLAAPACKGFGWLSEGRWMICRYWRSAVMVSCLDYGYLVNLKYLVGVSVNMFCALGLQFV

SEQ ID NO: 18999 - protein, 420 aa, Zea mays
  VARIANT 40: note = Ancestral polymorphism is L, Derived polymorphism is H
  VARIANT 30..420: note = Derived polymorphism lacks residues 30 to 420
MIRGKASHNLKCYGKQLSTALNIPKDLALKGKQLFTCLNLDLWFLLVIRSIFTIFRSNIDIMSLDMFHFNKQIVLSDFPGGHILRTEVTMADASPRTETSTDDTDDNNGLEPGRGGLVASDSSDRSKDKHGDQKVQTLRRLAQNREAARKSRLRKKAYVQQLENSRLKLTQLEQELQRARQQGIFISSSVDQSHSMSGNGALAFDMEYARWLEEHNRQISELRAGVSAHASDTDLRSVVDKIMSHYDEIFRLKGNAAKADVFHVLSGMWKTPAERCFLWLGGFRPSEVLKLLSTQLEPLTEQQLSGISNLQQSSQQAEDALSQGMEALQQSLAETLAGSLSSSGSTGNVANYMGQMAMAMGKLGTLENFLRQADNLRLQTLQQMQRILTTRQSARALLVISDYSSRLRALSSLWLARPKE

SEQ ID NO: 19000 - protein, 180 aa, Zea mays
  VARIANT 168: note = Ancestral polymorphism is D, Derived polymorphism is G
  VARIANT 165: note = Ancestral polymorphism is T, Derived polymorphism is I
  VARIANT 138: note = Ancestral polymorphism is V, Derived polymorphism is E
  VARIANT 57..180: note = Derived polymorphism lacks residues 57 to 180
MNTYMSLSLERSSSVVRDVATPAPPATSGASAPYPRAGAGASLSLPGAAAAHGHSQYLPLNEDDSLDMVLFDVLREASGPGSASAAAPDTYQPPSSLPTLKALASGAARRGSRTAYAPKAATAGHHIPRGEAAAVGQVIQVQDLVIGYFAYPYFAAQVTPPIVFTSIDWTANKKSQFLAS

SEQ ID NO: 19001 - protein, 243 aa, Zea mays
  VARIANT 53: note = Ancestral polymorphism is S, Derived polymorphism is A
MWTPRPSRRVVSSASDTLLLCLLLLAGAADAAPLLVGVFPKGELRSRAYLRTSFLDLLTESFPPDEAYFATQVIACRDGSGSFPRSRLNDGYCDCGDGTDEPGTSACPEGKFYCRNIGDTPRLLFSSFVNDKICDCCDGSDEYESGIHCQNTCRNIKDTAEADGGGGDLAVTHLDSTDDFMSKHAIAMEDHIQNNSNRDLVQKIRGLRTALVIELGLVVCIFAFCIARRRTRTRRRQHILKRE

SEQ ID NO: 19002 - protein, 112 aa, Zea mays
  VARIANT 83: note = Ancestral polymorphism is S, Derived polymorphism is R
  VARIANT 76: note = Ancestral polymorphism is T, Derived polymorphism is K
  VARIANT 53: note = Ancestral polymorphism is R, Derived polymorphism is L
  VARIANT 52: note = Ancestral polymorphism is R, Derived polymorphism is T
  VARIANT 46: note = Ancestral polymorphism is A, Derived polymorphism is V
  VARIANT 45: note = Ancestral polymorphism is R, Derived polymorphism is C
  VARIANT 22: note = Ancestral polymorphism is R, Derived polymorphism is C
MASSSSSSSSSVAPWPRSAKHRGAPAVVRRAQLVLSRDVGWCGQRVWRKLLRRLAQETRCICSSPTAATGRPRPVTFGYDAASYAKNFDDGRSPAAPRGAAAPIVVRRQCGG

SEQ ID NO: 19003 - protein, 75 aa, Zea mays
  VARIANT 25: note = Ancestral polymorphism is F, Derived polymorphism is L
  VARIANT 37: note = Ancestral polymorphism is V, Derived polymorphism is I
MGGGMEVHKNRWIEEWNAGRENLEFNFRWTRRSLAVVGLFGLAVPILVYKGIVREFGWIQHMQDEDAGRPYRKFL

SEQ ID NO: 19004 - protein, 137 aa, Zea mays
  VARIANT 25: note = Ancestral polymorphism is F, Derived polymorphism is L
  VARIANT 37: note = Ancestral polymorphism is V, Derived polymorphism is I
  VARIANT 68: note = Ancestral polymorphism is H, Derived polymorphism is Y
  VARIANT 122..137: note = Derived polymorphism lacks residues 122 to 137
MGGGMEVHKNRWIEEWNAGRENLEFNFRWTRRSLAVVGLFGLAVPILVYKGIVREFVIHYSEHLLPFHCPFPLSPNPKINFLFVPAGLDPAYAGRGCRSAIQEVPVSGVQGCRIRRFLDRGCEEGSFRSVCVGIVLV

SEQ ID NO: 19005 - protein, 732 aa, Zea mays
  VARIANT 442..732: note = Derived polymorphism lacks residues 442 to 732
  VARIANT 74: note = Ancestral polymorphism is C, Derived polymorphism is W
MWSRDAATADATRSGMGPAPAARAISPSFRSGGPTPTASHADLPLYVSDDGSAMLTFESLAETAEFARKWVPFCKKYTIEPRAPEFYFSQKIDYLKDKIHPSFVKERRAMKRDYEEYKVRINALVAKAQKTPDEGWIMQDGTPWPWNNPRDHPGMHDPGSFLLTSEISGCDICAHTEQLLYCMMVFLGETGARDFDGNELPRLVYVSREKRPGYQHHKKAGAMNALVRVSAVLTNAPYILNLDCDHYVNNSKAVREAMCFMMDPTVGRDVCYVQFPQRFDGIDRYANRNVVFFDALYGYGPPSLPALPKSTICSWCCCCCPKKKVERSEREIHRDSRREDLESAIFNLREIDNYDEYERSMLISQMSFEKSFGLSSVFIESTLMENGGVPESANPSTLIKEAIHVISCGYEEKTEWGKEIGWIYGSVTEDILTGFKMHCRGWRSIYCMPVRPAFKGSAPINLSDRLHQVLRWALGSVEIFFSRHCPLWYGYGGGRLRWLQRLSYINTIVYPFTSLPLVAYCCLPAICLLTGKFIIPTLSNAATIWFLGLFMSIIVTSVLELRWSGIGIEDWWRNEQFWVIGGVSAHLFAVFQGILKMIAGLDTNFTVTAKATDDTEFGELYVFKWTTVLIPPTSILVLNLVGVVAGFSAALNSGYESWGPLFGKVFFAMWVIMHLYPFLKGLMGRQNRTPTIVVLWSVLLASVFSLLWVKIDPFVGGTETGVNTNSCNTVIC

SEQ ID NO: 19006 - protein, 101 aa, Zea mays
  VARIANT 1: note = Ancestral polymorphism is M, Derived polymorphism is I
  VARIANT 5: note = Ancestral polymorphism is E, Derived polymorphism is G
  VARIANT 6: note = Ancestral polymorphism is V, Derived polymorphism is M
  VARIANT 10: note = Ancestral polymorphism is M, Derived polymorphism is K
  VARIANT 16: note = Ancestral polymorphism is C, Derived polymorphism is Y
  VARIANT 17: note = Ancestral polymorphism is Q, Derived polymorphism is R
  VARIANT 19: note = Ancestral polymorphism is Y, Derived polymorphism is C
  VARIANT 20: note = Ancestral polymorphism is T, Derived polymorphism is I
  VARIANT 40: note = Ancestral polymorphism is T, Derived polymorphism is K
  VARIANT 70: note = Ancestral polymorphism is I, Derived polymorphism is S
MIHAEVHKYMLVDGTCQRYTVSTGTHFIFYVFQLEKTFKTTFSSFVLHMGLVSRHLKEEGNGGVKFGQYIYTSWSIGINVLNLLKFQIILVITLTIRIKSL

SEQ ID NO: 19007 - protein, 1694 aa, Zea mays
  VARIANT 741..1694: note = Derived polymorphism lacks residues 741 to 1694
MQPLCRRTPNNLRACRWSPQPNRPRICPSPISMVSSPPILFQFGCWLLAAIPCGFATELLEIKSKESSLHVLLLAGNPASLDRKVHVSILHHIYVSMEPTVLNRERNAADRQKRMPMLFDDYRDEDYYVLPRKFSIVARVEVKFPIEPRYRDRQHFILSDINGAKIETMTSSYETVKHFNNLLHEKHVFKMHNVDFSISMGAHQFRHISGPMELYLTRQTVVEPYTVPFQMPPFPKHIFLSLADIAELPNRTLVDIMAIVVHLDIIHRTMWGPFRKIVVMDARWSLHAIKVWGDLLNKNALRWVLAKENCSIIIGTMFRRFRRQECLESSDYTTIHFNPFHHNNHHFEHFFNGHFSFTTFNCEYDQNLASSRDGVYTFKAHGQVYHRIHSFGRRESDPKHLELYFYDDDPLLSHRMRLARDEVFKAKDQNVMTKLANLLRENPYAETFRSIGQYGNIDEYRIDLNTDYKLDQRTFNTPTSSEVAAVWVEGTELHRQFERGVTLYGNDNAFYSIKPHHGCYDPLAYPLFFPRGELGWHSGIPKVGVNTARIDGRQSTDSDNPGLMDSVYAGEHRASALGKLWVLPASFIGGPRDMRRRYMDAFALVQKYGKPDIFLTMTCNPNWEEITSELEPGQKSQDRCDLVVRVFKAKLDNLKHQLFKKHILGVVAAHVYVIEFQKRGLPHAHFLLIMQTGSKLTVPDQYDAVISAELPDKNRFPELFDMVVKHMMHGPCGHLNMQNTCMKNGSCKCHYPRLFGETTLQGKDSYPIYRRRDDRQKVRVRGHDLDNRWVVPYNPTLLRMYDCHINVEVCSSIKAVKYIYKYIHKGHDRASVTVIDVDGGQSINEIENFRDARWVSPQEALWRIYSFDLHGISPPVLQLQLHLPGMHLVSYNINDDMRQVLNKDNIDKSMLTEYFRANQLFDWASNYLYREFPEVARWWPGAKKWTARQQRMQVGRIVSAHPAEGERYYLRVLLNHVRGATSFESLRTYDGNVYPTFREAAEKRGLIEADNNIDECLTEASGFHMPPSLRRLFATILVFCEPTDVVGLWNKHLEAMSDDFCRTHSNSNVVEQLVLLDIRDMLQTMGKDIRLFPLPAIKDEHDNMADVVREIFEEMNIPEDPEAEFVVSSLNHEQRHAYDVILSSVENISGGVFFVDGPGGTGKTFLYKALLATVRRSGKIAIATATSGVAASIMPGGRTAHSRFKIPLNIKEDNNDGENIKDIVGNVVEQSLDVVAVGNDPVHVSAKADVGEQPNVTPLSSLDVQNESTQISSDVDTLEQIEQDNLDTLIRICEHNKPKKLNVARVLPKDYTCTTEDLQLIEYIKSLPRKQVVVNIDTAWLNRYDMECLFHGDLQLTGEASTSILYNIKYISLYLSYYIVLSAYIHSIRDEEHILHREGGKVFLESTFISSLLKRDGDPKILLNCKEDTLENRVDNYLQADMVFIPINIENFHWYLAIVNAKKNEVHILDSMGPQITDRRDLYTTVNIDVTSWPVIEKITKQMQTDGVSCGLWMVNYMEYWTGSSLSNNITQNDITKFRFKLPAILWNSRLNTKKGHQETNHHADEDGGSSCDVEIIKTPCELPISLNASSQVQPFISSCALPATLTSTNTQELMSALCTYIMEIDDAEYLEDLSGFLVINFMHSWNGKRLPCISTTSSVLRTKFLVELMKYQDNECNDNIPEEIQKIIKRISV

SEQ ID NO: 19008 - protein, 277 aa, Zea mays
  VARIANT 58: note = Ancestral polymorphism is S, Derived polymorphism is R
MSSGEDGYCSSDSPRAESPDQPQAAAAADADADAESPRAGAGPNKRDLHASSPAAKRSRRSVEKRVVSVPLAECGEGPPPSDSWAWRKYGQKPIKGSPYPRGYYRCSSSKGCPARKQVERSRADPAVLLVTYTFDHNHEAPRPKSSCCHQQGRPPAPKPDEPVAEQEDELGPEHEPEDEQEPEQKVVPGLAGPETAPATATLAPVAEEDESFDLGWFDQYPTWHRSALYAPLLPPEEWERELQGEDALFAGLGELPECAVVFGRRRELSLAATAPCS

SEQ ID NO: 19009 - protein, 544 aa, Zea mays
  VARIANT 307..544: note = Derived polymorphism lacks residues 307 to 544
MGDCVVEDGHGHHYSEAVEGAVSLTVAVELDERAEESREEEEGGGQRKKMGGIPREPSFSRWCRDPSAASASNTAAAAATSDSDASEEFELPLLPSSSGGGGSPMDIEVGATARSDDLPISPRLLAKVIGLIACWYTLSTCLTLYNKEMLGKHMWKFPAPFLMNTVHFTMQAVASRAIVWFQQRGLEGGPSKMSWKDYCLRVVPTALATALDINLSNISLVFITVTFATMCKSASPIFILLFAFMFRYCACYSVISCMGLIVFSFSNFSPSLNLLMFFFICYLSLKFSFHVLLLCFVPFFLSQAEVYLLFAKETEFNLWGFMFIMLAAVMAGFRWILSPVSFVYLWLYFHFIVTELSPLFFVCLPKFLKKEEYALHLFFHAALKNPFTLMSHVAPVMAIVTAIISIVMDPWHDFRASHFFDSSTHIIRSSVLLLLGGALAFFMVLTEYVLVSVTSAVTVTVAGIVKEAVTILVAVLFFNDPFTWLKALGLAIIIFGVSLFNIYKYKRFKKGHHSEDAGTNIQSYNGTSKYVILDDDTEDQDDSG

SEQ ID NO: 19010 - protein, 200 aa, Zea mays
  VARIANT 138: note = Ancestral polymorphism is L, Derived polymorphism is M
MASGAVPPQRVALLALAAALSVVSFPHLSLLASSHPLPQEAAAAAAGAAAGGEASEPHGTAADGAAVARRACTYTVQIKTSCASPRSSADAVSLAFGDAYRNEVYAATVTPRRGFERCATDTFRVAGPCGYGVCYLYLRRSGRAAGWTPEWVRVYEPASGAPSTFYYGDPLPDGVWYGFDRCVKAGAGASAEHGAAARTL

SEQ ID NO: 19011 - protein, 1579 aa, Zea mays
  VARIANT 938..1579: note = Derived polymorphism lacks residues 938 to 1579
  VARIANT 1006..1579: note = Derived polymorphism lacks residues 1006 to 1579
  VARIANT 1092..1579: note = Derived polymorphism lacks residues 1092 to 1579
  VARIANT 1114..1579: note = Derived polymorphism lacks residues 1114 to 1579
  VARIANT 1142..1579: note = Derived polymorphism lacks residues 1142 to 1579
  VARIANT 1165..1579: note = Derived polymorphism lacks residues 1165 to 1579
  VARIANT 1247..1579: note = Derived polymorphism lacks residues 1247 to 1579
  VARIANT 1300..1579: note = Derived polymorphism lacks residues 1300 to 1579
  VARIANT 1379..1579: note = Derived polymorphism lacks residues 1379 to 1579
  VARIANT 1407..1579: note = Derived polymorphism lacks residues 1407 to 1579
  VARIANT 1452..1579: note = Derived polymorphism lacks residues 1452 to 1579
MGRKGSEMSPSKRYPLRSPHSSGRVLRSALANDNKDSEPLNAAAATQAAVKKRSGSQLDSPNSSVRLFHSTSKNKNEACSGPLNDRIPDKPAANKRKRASPSQVGSSSNSVRVLRSAIKNKDEACSKSLSDRTAGEPAANKRKNVNRSKTGSLSCGVRVLLSASKAKDETSTKPLNDSAAVEPASGKRKGTSPSKVGSASNSVRVLRSTSKYKNETCTEPLNDSGAVEPAANKRKGVSRSKKRSLNSSVRVLRSASNNKIEVSIKPLGNSTAGQPAAKRRKSGSSFEAGSPVSSARVLRSTSERKNEASKPLNESTAAQPAARKKKAGVISKTDNPKIGLRVLRSASGKKNEACIGHVNDSTSAEPTVTKRNRKPSMDRSPKKDYLKICQRVRYILNRMNYQQTFIQAYASEGWKGQSLEKIRPEKELERAKAEILQCKLRIREAFRNMDSLLSKGKLEESLFDSAGEISSEDIFCAVCGSKDVTLQNDIILCDGACDRGFHQNCLNPPLLTEDSNIHYIFWFPYVLKSSLHPLLIFFLFLVPPGDQRWLCPACVCKADSIDALNELQGSKLSIHDSWEKVFPEAASIANGSKQVDTSDLLPDHIKHSDNPALVEGLMVNEVRLSAEDDSKADDLGLPSEDSGDGDFDPSGPDSSEDQKDGLNSEESDFTSDSDDFCAEIAKSCGQDEVSASPLSNVINHTYRMKLRASNNRSNEENHDHVFMDMELGQDMVLPVSSRRQVERLDYKKLYDEAYGKESSNSSDDKEWSGKELLEGSETDSLSERPHPVKRCSRRAQAEQQNNEHTPQRERLHGSESEQKTGILRSNGSSSTGRKFGPVATQKLKVHFEKDPYPSRETKENISEELGLTFNQVSRWFSSTRHYSRVASARKEMHPDGHTSENNDTTTVDSMQARQPNTVVMEKLTGNRNDIVSEKPMVQNNLNQGVAEKLTRDRNDIVPEKQVVQSNLNQCNNEDIPLSGTEIEMESYEQESSESSDEEWSTLSTPRKTKLQGNEKVSLTESLRSAKRCSRRAPAREQNNEHTQSEQLHGSASEQQAREQLHGSVSKQQTEVLRSNVSSGDASKCHFGPIVTQKLKEHFEKDPYPCRATKEGLAQELGLTFNQISKWFSATHHYSRDAVAKNQKYPGENTTENNSSTIFDGIQVIEPNFGLIDKPDADTNDMISEKLMVQINLNEGIEEDIPPSQYTTRCEEKLTMTQAAISREAGPPGYGPGENFLQVSSRITSCEQSVIMAPSAIARGVGPPGYTPGEHQGNGAPWNTSYERRPFTSPTTSSREVGPPGYGPEENQGSGISCNTSREQILFMSPTTISRELGPPGYLPRENQRSDTSWNTSCESGLFMSPATTSIEHGPPGYGPGENQENDSTSCELRMFTSPTIVSREVGPPGYQQGVFMSPKTISREVCPPGFGSGENQGNDTTWYKQSAFTSPTTISREVGPPGYGQEDQGNGGSWNTSCEQGVFTSPTRGISREVGPPGYGPGESQGNTTSWISTCQQRMLAGIQRTGGSRSMDLEAFPPGYGPGGASGSVISPQARSAENVEFSDEARKKAIQRELRRRQKFR

SEQ ID NO: 19012 - protein, 164 aa, Zea mays
  VARIANT 132: note = Ancestral polymorphism is P, Derived polymorphism is L
  VARIANT 134: note = Ancestral polymorphism is Y, Derived polymorphism is C
  VARIANT 161..164: note = Derived polymorphism lacks residues 161 to 164
MSSQPPSTRTSPDTKVPRTGELALRRAIPANPNMKAIQIAMDNKEAILASIPEEHKEEGAKLYTSLLEEKTGLQTLLKYIKENNPDKLSIALASSLDTVAELELLQAPGLSFLLVCPFSVEERLAGCRYLAPEYAGDHPIFLLTKYHMCSLQLTSTLHLTYSYL

SEQ ID NO: 19013 - protein, 1844 aa, Zea mays
  VARIANT 475..1844: note = Derived polymorphism lacks residues 475 to 1844
  VARIANT 491..1844: note = Derived polymorphism lacks residues 491 to 1844
MSDAEPPPAMEVATLTTPDVMLGEDYKDIEAIEGQKDYETCYGGGGSVIVANELVGISEDPNQPDIATADEPEEGADVEGQTNDISAAVSTSKLVDDPMEVGMQTEVSAAADDLIEVGAALVSSAEDCTAVAACLVNDDCNIIFPGGVHRSDDQTDQEFGGNSLDADEVALLVNDIQDDSARMDMDVSAHGDVHAQDRESSQLDVATALLNEVGTELVEAGDHAVQECTNMDMRIQAGDNNEAERVGTIADTATNEEHRHMGEVTMTRDDSEKHDVAGGVDVPDERIQMGRGGLPGDDNEQKEVATADEDRVEDEGMQVDAVNITGDMVEEGRIAVEYIAGEAVIGEGGIDVPEEKAAQIDRAGNDIPEEEGLQMGEAGLIGSDNGLKEAVIADHDGVEVNAIPTEATGTTNDDDENNTIVGEDVAEAVNDITGDDVPDEEAAHMEDDDDDEPPPLVEKKGGGRRKRGRPSSKVQGVVKPSVKRKDEEEVCFICFDGGDLVICDRVALKPTILLVLTGMMTSSSQRVGGTVGTQPYHLQATFNSCLHPFKRDGVIDEDVSHRIKAGWMKWCQALGVLCDKRVPQKLKGKFYRTTIMPAMLYGAECWPTKRRHIQQLSVAEMRMLRWICGHTRLDRERNDDISDRLGVAPIEEKLIQQRLRWFGHVQRRPPEAPVHRGIIRRDNNVKRGWHICSNCQKPARHMCYTCTFSLCKACMKDAKFSCVRENKGFCDTCMNTVMLIENREEAADPMEVDFDDKGSWWYLFKDYWLNLKTNLSLTVEEISAAKSRKSGELPDTNDEVNSESSSGRNLESNTSKKRGRKRSKQAAINEGSEGKASTRKSAKRDLSGIHDVQTSSGKKVRKLSRRSLSSQHSSKDSESVGTSTSSAEEDSWASKELINFVAHVRNGDKSVISRYDVQPLLLDYIKRNKLRDPRRKSQIICDSLLQSLFAKERVGHFEMLKLLESHFFMSEVSPIDADENHGGVVDPDPSQDADGNSEASVVMSSEKRRKSRKYDLRHQPNLDDYAAIDNHNIGLMYLRRNLMEELIGDVDTFDEKVVGSFVRIKIPGTGQRQDIYRLVQIVGTGRSAEKYKYGKRTTDITLEILNLDKREAVTIDIISNQEFTEEECKRLRQSIKYGFIPRLTVGEVQEKARVLQTLKVNDKLRLLSTPEERARRLNEELEIHADPAMDPYYESPEEQEQEIEKSSFNKSRGSFLRKDGNPVPPGKGDGRNAAQRDSKTNWESNRNTWAESSSHMESPLPRRSTFSSQGESAGYTSKSESPNTGAQTVKLEGTTRSAPQGSPGASSGILANNICSGAKTAPQSAINESEKIWLYMDPSNKIQGPFSIIQLRKWNSNGYFPPSLKIWKASEKQDDSILLTDALAGKFEKDLPPWEPPHVSLFQINKTPLEQSTIAGEQTPKSVVAKSFSSSNQRHGYSSTNLGTTMIHSGTQGYYGMQNSHAAYTSQHSLTGSWNATSSQFGVAVNPVTPTQPAMGSFSGQNIVSAENMGHLTPGTAPAAANAEMVNSDLTSQKQISYLPQTDGILADDIESKSGEDVSHGKVSSSAKAIGPLGAQLGQGQLNTQQHEADIKNQMSSTDVSNSTMPSQMMSTPSAASVQPSLSTIAGSDNQSSGWAVPTQVVNTSGQSQITGNLTWGNTPQGDASLGWGMMGQNNMNMPWVASAQGASGYNMGAAMPTQPNAVPNMGWLPNPGNTNMNMIWAATQGQGIPNAAAMMGGQMQGVAVAPWGGVAAGNANSYPAWGNQQVGNMNQNVRWSAPVQGNPSQENNNMNWNAPNGNPNNWNNQQRENEGRHSGHRGAFSAGDSGRKSWKPRSGADGGSWGT

SEQ ID NO: 19014 - protein, 677 aa, Zea mays
  VARIANT 269..677: note = Derived polymorphism lacks residues 269 to 677
MPVLRSAARRAREAQGHPAAADEKAPEAAAAALAAAPAPPPVEKRRRVTRAEEREREEIRPREVVAGEGGDDEGERGMDEPDSAARSADKLTFDDEDGPTVPEAVQVGSSPKYRVDRKLGKGGFGQVYVGHRMSATGPGAVEVALKFEHRTSKGCHYGPPYEWTAYNAIGGIHGFPRVHYKGRQGDYFVMVMDMLGPSLWDVWNNKSHIMSVEMVSCIAIEAICILEKLHSKGYVHGDVKPENFLLGTPGTPEEKKLFLVDLGLATKWKDIATGRHVKYDQRSDVFRGTFRYASVHAHLGRTGSRRDDLESLAYTLVFLLRGCLPWQGYQGDNKSFLVCKKKMATFPVSLCCFCPHPFRKFVEYVVNLKFDEEPDYAKCASLFHSVLSVVGSNPDVRPINTDGAQKLIHQFGQKRGRFFIEEEADEQPKKKIRVGMPATQWISVYNGRVPMKQRYHYNVSDSRVGQHIEKGNADGLFISCITSCSDLWALIMDAGTGFTSQIYELIPHFLHKEWVMDQWERDYYITAVAGANNGSSLVVMSKGTKYTQQSYKVSNSFPYKWINKKWQDGFYVTSMATAGSRWAVVMSHNAGFSNQVVELDFLYPSEGIHKRWDRGYWITAAPATCDQAAFVLSVPRRRLTDETQETLRTINFPSKHVKDKWSKNLYLASVCYGRTIS

SEQ ID NO: 19015 - protein, 872 aa, Zea mays
  VARIANT 253..872: note = Derived polymorphism lacks residues 253 to 872
MGKVEDEYESHADEELREYLIDGTALCYIAEKLMPGIQEEMWGGNAWDQRSNVKKFLYFVAEMGLPGFSVKDLEEGSVSSVVECLLALKDNVTTGLGQNVTNNAAKTPLRRKLELESDGPIISVMTPGRRPGEERWKGHWDPKSQQRSILHSGQKVHDAFQLKRGSYTDLPAAKVSEMMHPRSLDNAPTQSLLRVVNGILDESIERKRGEIPHRAVYLLRNVVQEIEHRIAIQADHIRNQNSIIKTREDKYRSKIKALETLVNGTNEENEMTVDRLELVEVEKSKLDEKRKLGEQDMVRLMQEKENAENTIASLQQEIQVLSRMHEQYHERKETEARQMEEHLAMRLKEAEFLLMQSEKKVEEIESVSQLKSQLWTRKANIFQSFMDNQKLSIKDIRISSQSIKQEMFALQMKWIDEISSIGRELKGLVDAADNYHKVLAENQKLFNEVQELKGNIRVYCRVRPFLPGQDGKTTIIDYIGENGEILITNPFKQGKDVCRMFKFNKVFNTHASQAEVFSDIQPLIRSVLDGFNVCIFAYGQTGSGKTYTMPNGLVVPDASLHPVKSTLDVLQLMEIGQTNRAVGSTALNERSSRSHSILTVHVRGVDLKNGSTSRGCLHLIDLAGSERVERSEAIGDRLKEAQYINKSLSALGDVIFSLAQKNAHVPYRNSKLTQVLQSSLGGQAKTLMFVQINPDTGSYSETISTLKFAERVSGVELGAARSNKEGKDIKELLEQVSSLKDTISRKDMEIDQLLKNKAKSPGSSIDRNDSRQQIRRLSGTGSSEAECEDNMSDDGCSVAGTEYSVGGASEATAERMQKAPSRIARLFHTKNGQPANSKPKPRESALKPPGRTTSTGGSQATGGSLVKPPKRR

SEQ ID NO: 19016 - protein, 497 aa, Zea mays
  VARIANT 391: note = Ancestral polymorphism is F, Derived polymorphism is S
  VARIANT 370..497: note = Derived polymorphism lacks residues 370 to 497
  VARIANT 247: note = Ancestral polymorphism is E, Derived polymorphism is V
  VARIANT 197: note = Ancestral polymorphism is T, Derived polymorphism is I
  VARIANT 186: note = Ancestral polymorphism is Q, Derived polymorphism is H
  VARIANT 105: note = Ancestral polymorphism is L, Derived polymorphism is I
  VARIANT 79: note = Ancestral polymorphism is V, Derived polymorphism is E
  VARIANT 71..497: note = Derived polymorphism lacks residues 71 to 497
  VARIANT 69: note = Ancestral polymorphism is S, Derived polymorphism is I
  VARIANT 64..497: note = Derived polymorphism lacks residues 64 to 497
  VARIANT 62: note = Ancestral polymorphism is R, Derived polymorphism is P
  VARIANT 54..497: note = Derived polymorphism lacks residues 54 to 497
  VARIANT 42: note = Ancestral polymorphism is P, Derived polymorphism is L
  VARIANT 40: note = Ancestral polymorphism is L, Derived polymorphism is P
  VARIANT 25: note = Ancestral polymorphism is N, Derived polymorphism is I
  VARIANT 22..497: note = Derived polymorphism lacks residues 22 to 497
  VARIANT 7..497: note = Derived polymorphism lacks residues 7 to 497
  VARIANT 1: note = Ancestral polymorphism is M, Derived polymorphism is L
MLQNVRQFQVPLQRYTALMDLQERNERLFYKLLIDNVEELLPVVYTPTVGEACQKYGSIFRRPQGLYISLKEKGRILEVLRNWTEKSIQVIVVTDGERILGLGDLGCQGMGIPVGKLALYTALGGVRPSACLPITIDVGTNNEDLLKDEFYIGLKQRRATGQEYSEFLDEFMAAVRQNYGQKVLVQFEDFANHNAFTLLEKYRTNHLVFNDDIQGTAAVVLAGIIAALKSVGGTLADHTFLFFGAGEAGTGIAELVALEISRQANVSVEEARKKIWLVDSKGLIVASREETLQPFKKRYAHEHEPVKDLLGAVKAIRPTALIGSAGVGQSFTKEVIEVMSSINERPIVLALSNPTSQSECTAEQAYTWSQGRAIFGSGSPFDPVKYNDKLFVPAQANNAYIFPGFGLGVVISGAVRVSDDMVLAAAEALAEQVTPEHIEKGLIYPPFSIIRKISANIAAHVAAKAYDLGMATQLPRPKDLVKYAESCMYSPVYRSYR

SEQ ID NO: 19017 - protein, 361 aa, Zea mays
  VARIANT 32: note = Ancestral polymorphism is Q, Derived polymorphism is K
  VARIANT 36: note = Ancestral polymorphism is W, Derived polymorphism is R
MGMPRARSLACIAVAAIALLAPTRGAEMVERQFVEWVRYMGGLRHSTFQQHALDRASPSYSLVVDANPAFGDFTTIQAAVDSLPDMNLVRVVIRVNPGTYTEKVSISAMRAFITLEGAGADSTIVQWGDTADSPTGAKGRPLGTFNSASFAVNAQYFLARNITFKNTSPVPRPGATGKQAVALRVSADNAAFVGCSFLGAQDTLYDHSGRHYYKECYIQGSVDFIFGNALSLYEDCHVHAIALDYGALTAQNRQSMLEDTGFSFVNCRVTGSGALYLGRAWGTFSRVVFAYTYMDDIIIPKGWYNWGDPNRELTVFYGQYKCTGPGATYAGRVAWSHELTDDEARPFVSLNFIDGNEWIML

SEQ ID NO: 19018 - protein, 327 aa, Zea mays
  VARIANT 92..327: note = Derived polymorphism lacks residues 92 to 327
  VARIANT 9..327: note = Derived polymorphism lacks residues 9 to 327
MTMRRVVRWLKWILTGRKEEHRGLEAENRRRTTGGQDAGARQRRAAIVIQKTFRGYLARRALRALRSLVKIQALVRGYLVRKQAAITLHRLQTLMRLQADSIAVKNAPFRKSMEQEERIFARDLQTKPPAHRRRLSDSTDSNYERSPRIVEMDDTGYLRSRSSRITTSSYMYNPDHLLAERHRHAAPTPSCSPLPGGKQQPARRSYRRSTRDSRGSKPAQTGTPRIASSHDSSPAKSVDQHGLAVASTPRRRDREGLVSPRYMAGTASSAARTRCHSAPRQRRTAADAEHEQAPRRSCSHATRTTAGFSGIGVGDEAARDYYLDSFW

SEQ ID NO: 19019 - protein, 153 aa, Zea mays
  VARIANT 127: note = Ancestral polymorphism is L, Derived polymorphism is F
  VARIANT 130: note = Ancestral polymorphism is S, Derived polymorphism is P
  VARIANT 144: note = Ancestral polymorphism is R, Derived polymorphism is I
MFRNNPGLGKVSTFSPIVKNWASNREPKEEGLESCVCLCGCAMATKGSDPASPASAPPPPPKRRKIEPPRRLLRVRCQRELISTKLERQRDLPSLKRSMRDALEAIKASIPSLGITLFLSYQRTISFIRPGPNDEQEWLFVTNRMTTKFCNFL

SEQ ID NO: 19020 - protein, 843 aa, Zea mays
  VARIANT 15..843: note = Derived polymorphism lacks residues 15 to 843
MVKFTAEELRAIMDKKNNIRNMSVIAHVDHGKSTLTDSLVAAAGIIAQEVAGDVRMTDTRADEAERGITIKSTGISLYYEMTDESLKNYKGERDGNQYLINLIDSPGHVDFSSEVTAALRITDGALVVVDCIEGVCVQTETVLRQALGERIRPVLTVNKMDRCFLELQVEGEEAYQTFSRVIENANVIMATYEDKLLGDVQVYPEKGTVAFSAGLHGWAFTLTNFAKMYASKFGVDESKMMERLWGENFFDPATKKWTTKNTGSPTCKRGFVQFCYEPIKQIIKTCMNDQKEKLWPMLQKLNVTMKADEKELIGKALMKRVMQTWLPASTALLEMMIFHLPSPAKAQKYRVENLYEGPLDDVYATAIRNCDPEGPLMLYVSKMIPASDKGRFFAFGRVFSGKVATGMKVRIMGPNYVPGQKKDLYVKSVQRTVIWMGKKQESVEDVPCGNTVAMVGLDQFITKNATLTNEKEVDACPIRAMKFSVSPVVRVAVQCKVASDLPKLVEGLKRLAKSDPMVLCTMEESGEHIIAGAGELHLEICLKDLQEDFMGGAEIIVSPPVVSFRETVLEKSCRTVMSKSPNKHNRLYMEARPLEEGLAEAIDDGRIGPRDDPKVRSQILSQEFGWDKDLAKKIWCFGPETTGPNMVVDMCKGVQYLNEIKDSVVAGFQWASKEGALAEENMRGICFEVCDVVLHADAIHRGGGQVIPTARRVIYASQLTAKPRLLEPVYLVEIQAPENALGGIYGVLNQKRGHVFEEMQRPGTPLYNIKAFLPVIESFGFSSQLRAATSGQAFPQCVFDHWDMMGSDPLEAGSQAAQLVLDIRKRKGLKEQMTPLSEFEDKL

SEQ ID NO: 19021 - protein, 93 aa, Zea mays
  VARIANT 68: note = Ancestral polymorphism is P, Derived polymorphism is L
  VARIANT 16: note = Ancestral polymorphism is G, Derived polymorphism is R
  VARIANT 4: note = Ancestral polymorphism is G, Derived polymorphism is S
MAAGGVRRALVALRSGSPSTISATLSRQAAARSSELAGAPLPRASRRRLGISRVPVVALGGVQGSLMPMHSATASALLTSILGLKPDSWGVGF

SEQ ID NO: 19022 - protein, 140 aa, Zea mays
  VARIANT 2: note = Ancestral polymorphism is H, Derived polymorphism is Y
  VARIANT 9: note = Ancestral polymorphism is S, Derived polymorphism is L
MHITAAISSSPILIFLAVSPSRASPSTSPSPCIWATASPRTEGGWHSGTTPGPAPTAPADPPGKSQNHHQASAASRCGLSGEGHDLHVFSDRQETVGYVSHNKLEKMIILTRKVILTVHVTFADMDLDGFLHIRKAGRAF

SEQ ID NO: 19023 - protein, 357 aa, Zea mays
  VARIANT 94..357: note = Derived polymorphism lacks residues 94 to 357
MATPSESPDNKAEKLVVIYVPALTISHLFSSVELGELLAAHSLGVSIVVCGRTADTAAGSFAEGLAAAHPQLSFHLLPHVTRPRDVPAHDHVAQTIGLARASDSDLREFLRVASPSPSALVLDFFCGSAVDVGAELGIPTYFFFTSSISGLAELLYHAFALIHEQASPGISHQNLGGELLHVPGIPPISVDDFPAAWHDRDSLGNRLFLTLPDQMCSSHGIVVNSFRSLEPRTTDAIVAGLCTPPGRRTPPLHCVGPVIKKEEAGAHGHECLAWLDAQPEASVVFLCFGSMGRLSAEQTRHVARGLEMSGQRFLWVVRRPPTSTRSSPRCAPRARGWWSTRGRRSAGCWPTAPSAGS

SEQ ID NO: 19024 - protein, 95 aa, Zea mays
  VARIANT 19: note = Ancestral polymorphism is K, Derived polymorphism is N
MGGVPMLAWPMYAEQRMNKVFLVEELRLAVALEGYDKEMVKDEEVAAKVKWLMETDGGGELRERARAAMREAKKALSDGGESSTALLELVRQWKM

SEQ ID NO: 19025 - protein, 474 aa, Zea mays
  VARIANT 194: note = Ancestral polymorphism is I, Derived polymorphism is V
  VARIANT 191: note = Ancestral polymorphism is R, Derived polymorphism is S
  VARIANT 58: note = Ancestral polymorphism is P, Derived polymorphism is L
MGSVVVLYSWMVRGHLHPMVQLADRLAGHGVPITMAIADVPSSSESHDTVARLSATYPSVSFHLLQAATARSGDEADPDADPFITLIADLRATNPALLAFVRSLPSVKALVIDFFCGCALDAAAEVGLPAYLFFTSGASPLSVYLHIPVMRPDVSFGDMGRSLLHFPGVHPVPASDLPEVLLLGPRNEQYRATIGLFEQLPRAKGILANTFEWLEPRAVRAIEQGSPRPGEPVPRLFCVGPLVGEERGGDGKHNECLTWLDARPARSVVFLCFGSASSLPAEQLREIALGLERSGHAFLWAVRAPVAPDADSTKRFEGRGDAALEALLPDGFLDRTRGRGLVVPTWAPQVEVLRQPAIAAFVTHCGWNSTLEAVTAGVPMVCWPMYAEQRLNKVFVAEGMKLGVVMEGYDEAMVKAEEVEAKVRLVMESQQGEELRGRLAVAKDEAAAAALETAGSSKAALDDFISNLQISRNQ

SEQ ID NO: 19026 - protein, 106 aa, Zea mays
  VARIANT 2..106: note = Derived polymorphism lacks residues 2 to 106
MRFLLQKAFSTSNKLPQEPIRTRFCNHDKQIEQAYDDLLNSARGERPEDWVPPEDVSAVYYAKCDDIDETLPMGADGNDGIVDIFSAHSYYDAAGHNCDESFYYLF

SEQ ID NO: 19027 - protein, 197 aa, Zea mays
  VARIANT 5: note = Ancestral polymorphism is R, Derived polymorphism is C
  VARIANT 14: note = Ancestral polymorphism is R, Derived polymorphism is H
  VARIANT 49: note = Ancestral polymorphism is R, Derived polymorphism is C
  VARIANT 53: note = Ancestral polymorphism is E, Derived polymorphism is K
  VARIANT 62: note = Ancestral polymorphism is Q, Derived polymorphism is L
  VARIANT 90..197: note = Derived polymorphism lacks residues 90 to 197
  VARIANT 113: note = Ancestral polymorphism is S, Derived polymorphism is N
  VARIANT 117: note = Ancestral polymorphism is R, Derived polymorphism is Q
  VARIANT 134: note = Ancestral polymorphism is R, Derived polymorphism is I
  VARIANT 140: note = Ancestral polymorphism is F, Derived polymorphism is L
  VARIANT 163: note = Ancestral polymorphism is R, Derived polymorphism is C
  VARIANT 171: note = Ancestral polymorphism is S, Derived polymorphism is I
MDSVRSGPFDQIFRPNNFVFGQSSAGNNWAKGHYTEGAKLIDFVLDVVRKETENYDYLQGFQVCHSLGGGSRREGCFLEAFLRGDSPPYSADDLEGMTFIASMHVKVARRLHSNSLRYWLLEFLRRQPKGRKYRALILKFVKDRMGALLLVEVGMQVTTTISRGKVGDQVSVTVETAHPRDDILSVREVVEDTEDSE

SEQ ID NO: 19028 - protein, 27 aa, Zea mays
  VARIANT 21: note = Ancestral polymorphism is T, Derived polymorphism is M
MMRAAGVECARAAWVTGLLRTVASQRI

SEQ ID NO: 19029 - protein, 167 aa, Zea mays
  VARIANT 96: note = Ancestral polymorphism is Y, Derived polymorphism is H
MARSLSTALVRGLMRSSRASTSAAVSRPAIQQFMNYSSGLSGTPNANGDSVTTRVAADHDTHQDFQPTSKSSDMSFSDIVAQDVKEHPVVIYMKGYPDAPRCGFSALAVKVLQQYGVPISARDILSDLKLKESVKAYSNWPTFPQIFIKGEFVGGSDIILTMHQARL

SEQ ID NO: 19030 - protein, 433 aa, Zea mays
  VARIANT 359: note = Ancestral polymorphism is I, Derived polymorphism is N
MLARGAMPDAYTFPPLLKAVARGSSAAPVRAVHAHVVKFGMGRNAHVATSLVTAYAAGGDGAAARALLSERERDTPVVWNALISGHNRCRRFGEACCSFVDMARAGAAPTPVTYVSVLSACGKGTGDVLLGMQVHGRVVGSGVLPDLRVENALVDMYAECADMESAWKLFDGMQVRSVVSWTSLLSGLTRLGRVDEARDLFGRMPERDTVSWTAMIDGYVQAARFREALEMFREMQCSNVSADEFTMVSVITACAQLGALEMGEWVRVYMSRQGIKMDAFVGNALIDMYSKCGSIERALDVFKDMHHRDKFTWTAIILGLAVNGYGEEAIEMFHRMIGVSETPDEDLFSIPPGYVFAAIVPALMVAGLYFFDHSVSSQLAQQKEYNLKKPSAYHYDILVLGFVTKYDNLFLFRELKNFKDAVLQEGDAEGEIG

SEQ ID NO: 19031 - protein, 394 aa, Zea mays
  VARIANT 117: note = Ancestral polymorphism is V, Derived polymorphism is I
MGSFAKLARRAVETDAPVMVKIQELLRGAKDVMSLAQGVVYWQPPESAMDKIEKIIREPIVSKYGSDDGLPELREALLEKLSRENKLTKSSVMVTAGANQAFVNLVLTLCDAGDSVVMFAPYYFNAYMSFQMTGVTDILVGGCDPKTLHPDVDWLEKVLKENEPIPKLVTVVNPGNPSGAFIPRPMLERISDLCKNAGAWLVVDNTYEYFMYDGMEHYCLEDAHIVNLFSFSKAYGMMGWRVGYIAFPNEADGFHDQLLKVQDNIPICASIIGQRLALYSLEAGPEWIKERVKDLVKNRALLVEALSPLGEDNVKGGEGAIYLWAKLPDSCSDDFEAVRWLANKHGVAVIPGSASGGPGYIRVSFGGLKEEDTRLAAERLRRGLQELVTDGMVQ

SEQ ID NO: 19032 - protein, 275 aa, Zea mays
  VARIANT 262..275: note = Derived polymorphism lacks residues 262 to 275
  VARIANT 253: note = Ancestral polymorphism is Q, Derived polymorphism is K
  VARIANT 240..275: note = Derived polymorphism lacks residues 240 to 275
  VARIANT 238: note = Ancestral polymorphism is S, Derived polymorphism is N
  VARIANT 163..275: note = Derived polymorphism lacks residues 163 to 275
  VARIANT 95: note = Ancestral polymorphism is E, Derived polymorphism is G
  VARIANT 86: note = Ancestral polymorphism is T, Derived polymorphism is A
  VARIANT 79: note = Ancestral polymorphism is D, Derived polymorphism is A
  VARIANT 77..275: note = Derived polymorphism lacks residues 77 to 275
  VARIANT 73: note = Ancestral polymorphism is H, Derived polymorphism is Y
  VARIANT 56: note = Ancestral polymorphism is G, Derived polymorphism is S
  VARIANT 13: note = Ancestral polymorphism is N, Derived polymorphism is Y
MAEEDVQPLVCENGTEMVKAGFAGDDTPRAVFPSIYSNNCVVSDRNLSAGIVLDSGDGVSHTVPIYEGYTLPHAILRLALAGHDLTDNLMKILTERGYSFTTTVEREIVRDIKEKLACVALDYEQELETARTSSSVEKSYELPDGQVITISAERFRCPEVLFQPSFIGMESDGIHEATDNSIMKCDVDIRKDLYGNVVLSGGSTMFSGIGDRMSKEITAHAPSSMKVKVVAPPERKYSVWIGGSILASLSTFQQMWISKEEYDESGPGIVHMKCF

SEQ ID NO: 19033 - protein, 443 aa, Zea mays
  VARIANT 267..443: note = Derived polymorphism lacks residues 267 to 443
MASAAAEAPGASASSAENRLLQSLAERGWRFRDPTDEAIQALLLASPTPSPEAVESELVSMDLRMFGGKCLPDRAAAGGTSKRLSYLHGPVVLQIVSLRDIYHSSIDASFKNPQQRRLLRFGLTDGICEAVAIEFSPIPFITEEIAPGTKIRLENRVPINNGILCLSAKNVTVIGGAVQSLYEEWQMNQKYSGLSRPSLRLSPSDDGVGPPPFEKLDIEARPCRETKVQAYPDVLMTCDLSSLHKARKLAVTHDHGPVNSGGKPMNEGSNDENRDNIESKVESKQITQDSRPKEVSEAVPVQNQAAAQKLLQKMSQAVPEDRRGRGHRFKGKGKEEDAQVFTLDEWEKRKAISSKPAAESYVHDTSRDEELARQLQEQLDLEDLHGGAGAGVLHGGAESSDAERLRMSMFSFSGPDEAGGGRRDFRGRGRGRGGGRRRGRGRF

SEQ ID NO: 19034 - protein, 219 aa, Zea mays
  VARIANT 11: note = Ancestral polymorphism is E, Derived polymorphism is K
MSVDTERSSTESSAASGLGYEDTALALTLRLPGSDPGRSSPLAAPSDAAPSPKTRVVGWPPVRSYRKNALADSSKANRSASFVKVAVDGAAYLRKVDLQAYGGYDQLLRALQDKFFSHFTIRKFADDERKLVDAVNGTEYVPTYEDKDGDWMLVGDVPWKMFVETCRRLRLMKGSEAVNLGTTKSRPMRRKRNSSVTSTHWLLVAWLVGGTRERTSSLF

SEQ ID NO: 19035 - protein, 415 aa, Zea mays
  VARIANT 259: note = Ancestral polymorphism is E, Derived polymorphism is G
  VARIANT 51: note = Ancestral polymorphism is G, Derived polymorphism is A
  VARIANT 38: note = Ancestral polymorphism is T, Derived polymorphism is A
MATIVNTTEEEPMLAVVRFTAELAWADAGPEVADPEVTRLCLEAQEHILAGRWLDMASLMLASADLLLTSPSRVSDKDLECVLSVICSLVTKAGSEDQALQITELICAKLTQQHGDKPALRLKVLFSLYNLLPSPYGKAFVYKKALELATAGKAAEYIIPSFKNIDSFVSEWGIDNLEKRELYLAITTILKDHKGMAKEYFNFLNKYLATFKGSDDESATIGDAKEEAVAAIIEFVKSPNLFQCDLLNMPAVSQLEKDEKYQLVYELLKIFLTKKLDSYLEFQSANSDLLKDYGLVHDECVTKMRLMSLLDLSSRCSGEIPYSAITVELRINDDEVEQWIVKAIASKILDCKVDQLNQTVIVSRHTERIFGMEHWHALRTKLGAWRGNIARAINTIQANKVTEEGAQGMQGLAIH

SEQ ID NO: 19036 - protein, 54 aa, Zea mays
  VARIANT 48: note = Ancestral polymorphism is S, Derived polymorphism is L
  VARIANT 45: note = Ancestral polymorphism is A, Derived polymorphism is V
  VARIANT 40: note = Ancestral polymorphism is Q, Derived polymorphism is H
  VARIANT 39..54: note = Derived polymorphism lacks residues 39 to 54
  VARIANT 32: note = Ancestral polymorphism is R, Derived polymorphism is C
  VARIANT 16: note = Ancestral polymorphism is E, Derived polymorphism is K
  VARIANT 3: note = Ancestral polymorphism is D, Derived polymorphism is A
MEDEGWITIPCKAFPESWNDISEMVQLQALDRSFLFPGEQVPILACLSASKQDV

SEQ ID NO: 19037 - protein, 98 aa, Zea mays
  VARIANT 3: note = Ancestral polymorphism is A, Derived polymorphism is S
  VARIANT 27..98: note = Derived polymorphism lacks residues 27 to 98
  VARIANT 62: note = Ancestral polymorphism is A, Derived polymorphism is P
  VARIANT 75..98: note = Derived polymorphism lacks residues 75 to 98
  VARIANT 76: note = Ancestral polymorphism is R, Derived polymorphism is C
MCALCKSDPWLLACYNWSNSSSGRSSYFLDEHSGASNGLILFEVKFFWPAVMMISAAFQAAASIIKEFVFIDGAKCLEGKRPDIFVVNSFGSGFQVRQ

SEQ ID NO: 19038 - protein, 500 aa, Zea mays
  VARIANT 259: note = Ancestral polymorphism is E, Derived polymorphism is V
  VARIANT 117: note = Ancestral polymorphism is L, Derived polymorphism is S
  VARIANT 38: note = Ancestral polymorphism is A, Derived polymorphism is V
MPAMVVEEDLIRGAAPEPEPEPHLLVVTFPAQGHINPARHLARRLLRATGARVTVSTAVSALRKMFPGEQAGAEGHRDAAGVWYVPYSDGYDDGFDRDAHDATHYMEQIKLVGAATLGAVLDRLHGVGRPVTLVVYTLLLSWVADVARARSVPAALYWIQPATVLAVYLHFFRATDGVDRAIAAAGGDPWASVRFPGLPPLRVRDLPSFIVSTPENDPYAFVADAFRELVETLGREDKPSVLANTFDAVEPEAAASLREAGVDVVPVGPVVSFLDDAAAGAGGAKNGGNNNDLFKQDGEGYLDWLDAQAPGSVVYISFGSLSVMSKRQIEEVARGMAESGRPFLWVLREDNRSSEGAGAGAAPLADWEGERGMVVGWCDQVRVLSHPAVGCFVTHCGWNSTLESMACGVPVVCVPQWTDQGTNAWLVERIGTGVRAAVSDKDGVLEADELRRCLDFATSEMVRAKAAVWREKARAAASEGGSSEMNLRAFVAKQIAGGKN

SEQ ID NO: 19039 - protein, 223 aa, Zea mays
  VARIANT 42: note = Ancestral polymorphism is E, Derived polymorphism is K
  VARIANT 62..223: note = Derived polymorphism lacks residues 62 to 223
  VARIANT 113: note = Ancestral polymorphism is P, Derived polymorphism is T
  VARIANT 151: note = Ancestral polymorphism is A, Derived polymorphism is V
  VARIANT 154: note = Ancestral polymorphism is R, Derived polymorphism is W
  VARIANT 195: note = Ancestral polymorphism is G, Derived polymorphism is R
MSDLHPLEHQVAGHRASASKLGPLIDGSGLFYKPLQAGDRGEHEVAFYEAFSAHAAVPACIRDTFFPRFHGTRLLPTEAQPGEPHPHLVLDDLLAGFEAPCVTDIKIGAITWPPSSPEPYIAKCLAKDRGTTSVLLGFRVSGVRVVGPEGAVWRTERPEVKAMDTVGVRRVLRRYVSSVADEGIDCVLAAAVYGRKGGVMSQLCELKAWFEEQTLFHFYLDLI

SEQ ID NO: 19040 - protein, 159 aa, Zea mays
  VARIANT 145: note = Ancestral polymorphism is P, Derived polymorphism is L
  VARIANT 114: note = Ancestral polymorphism is P, Derived polymorphism is L
  VARIANT 111..159: note = Derived polymorphism lacks residues 111 to 159
  VARIANT 97: note = Ancestral polymorphism is L, Derived polymorphism is P
  VARIANT 69: note = Ancestral polymorphism is I, Derived polymorphism is T
  VARIANT 60: note = Ancestral polymorphism is E, Derived polymorphism is K
  VARIANT 49: note = Ancestral polymorphism is T, Derived polymorphism is A
  VARIANT 18..159: note = Derived polymorphism lacks residues 18 to 159
  VARIANT 14: note = Ancestral polymorphism is I, Derived polymorphism is T
MEGVLSHQLKQSVIDGNKVVLSVSNADTKVDDVEFEENELYAIDIVTSTREGKVDGAEFEENEVYAIDIVTSTGEGKLLDEKQTTIYKRAVDKNYNLKMKASTFIFSEISQKFPTMPFTARASEEKRARLGLVECMNHELLQLYPGLHEKPGRDYTVST

SEQ ID NO: 19041 - protein, 528 aa, Zea mays
  VARIANT 35: note = Ancestral polymorphism is V, Derived polymorphism is A
  VARIANT 31: note = Ancestral polymorphism is A, Derived polymorphism is V
MRGSVFLALLAAAAASSFGAAAAASEGRPTVAVEVDPSWRFPSRRLRDAYVALQTWKRQAIFSDPNNLTADWVGPGVCNYTGVYCAPLPSGGTHRRGALAVAGVDLNHGDIAGFLPPELGLLADLALLHLNSNRFCGVLPRALRRLRLLHELDLSNNRFVGKFPDVVLDLPALRFLDLRFNDFEGAVPPRLFDRPLDAIFLNHNRLRFQLPDNFGNSPASVVVLAHNAFGGCLPASVANMSGTLNEILLINNGLSSCFPPEIGLLRELTVLDVSFNQLAGPLPPELALMRKLEQLDVTHNLLTGAVPPGICNLPRLKNFTFAYNFFTGEPPACARVVPRDGDRSNCLPNRSSQRTPQQCAAFYARPPVNCAAFQCKPFVQPMPPPRLPSPPPPSPPPPSPPPPSPPPPLLSPPLPPPPLPSPPPPQLLPSPPPPSPLPHSPPPPSPPPPAPVYHPPPQCPPCPVLPPPLPCTPTHPWPPPPPPPYYPGPLPPTNPVRYASPPPPQQHHPWPSVHPVQYGSPPPPALHR

SEQ ID NO: 19042 - protein, 187 aa, Zea mays
  VARIANT 55: note = Ancestral polymorphism is T, Derived polymorphism is I
MLVSFPTAQRKMQIHDAPQKGHHKIIEFYDVRAAEGAARALNRSDLAGKKIKLETGRLSGARREASFLGLSSTLPQSLSSPIGIASAATHSNQAPLGELSHSLSRMNRHVNYGFQGLGAIHPHSLPDVHNGANNGTPYNLNTITPIGVNKNSRTAEAVDSRHLHKVGSGNLNGHSFDRAGEGVVKWW

SEQ ID NO: 19043 - protein, 297 aa, Zea mays
  VARIANT 143: note = Ancestral polymorphism is E, Derived polymorphism is K
  VARIANT 106: note = Ancestral polymorphism is G, Derived polymorphism is R
  VARIANT 83: note = Ancestral polymorphism is E, Derived polymorphism is K
MATLATAAAAWTREEDKAFENAVAAAAAPPDDGPPDDGWFTALVASVPARTAEEVRRHYEALVEDVAAIEAGRIPLPRYAGEESSAATPEGSGSAASAPKDAGGGGGGGGHRREERKSGVGVDVGKSSSKAEQERRKGIPWTEEEHRLFLLGLDKFGKGDWRSISRNFVISRTPTQVASHAQKYFIRLNSMNRDRRRSSIHDITSVSAGEVAAAGAPITGGPTTAGAMPMGPAGMKHHHHHPAPPMGMYGHAPMGHPVSGHMVAPAAVGTPVMFPPGHHSPYVVPVGYPAPPAKMHQ

SEQ ID NO: 19044 - protein, 419 aa, Zea mays
  VARIANT 117: note = Ancestral polymorphism is G, Derived polymorphism is R
  VARIANT 25: note = Ancestral polymorphism is A, Derived polymorphism is V
MARPRLPSMGHQQAMSLLLLSVLWAATTAAARREPVAWRPGMVRAEDCDKKHGKGGSGAGVGGGAAGGGIGAGGGGAIGSGAGGGRGGGMDGGGGSGSGRGGGGGLGGGIGGGAGFRGGAGAGSGGGAGIGGGGGLGGGGGGGVGAGGAGGGGFGAGGGAGGGIGGGDGLGGGVGEGGGGGGLDGGGGFGGGGGGGGGFGAGGGAGGVLGGGAGAGGGIGGGAGGGFGGGGGFGGGAGAGGGLGAGAGGGIGGGAGGGFGGGAGVGGGIGGGAGGGFGGGGGFGGGVGAGGGLGAGASGGIGGGAGSGFGGGFGGGAGAGGGIEGGAGGGFGGGGGFGGGIGGGAGLGGGTGGGLGGGGARDRFNAGSGTGIGAGGGGGIGAGAGGGIGGGIGIGGGAGSGVGGHHHDMSSVANRRHLD

SEQ ID NO: 19045 - protein, 200 aa, Zea mays
  VARIANT 107: note = Ancestral polymorphism is G, Derived polymorphism is R
  VARIANT 176: note = Ancestral polymorphism is R, Derived polymorphism is P
MATRWQRCAQLLSSHPYHAAISSSPSFSLGARDDDDGDHAAGSSLAPPHDSGRVAVAGALASPRTASELPPGAVLASDRFFVSPAPTASLVDDTAAAGESDSEALRGAVLVETYASDPRAQFLESMAGMAAACGAEGMPEPEYREFMEELLSCYLDHNDRRVHRHVLAAFADLTARRWPPKRRRPILELMKMNPCVSGRW

SEQ ID NO: 19046 - protein, 178 aa, Zea mays
  VARIANT 69: note = Ancestral polymorphism is A, Derived polymorphism is V
  VARIANT 68: note = Ancestral polymorphism is A, Derived polymorphism is V
MVAHSASAAAAMAGHSQSPPARPKLNPVWPQPSIRGSKKEDAVKILLGLREKYETYHKCKYTLEGINAALYLSARYIPDRHLPDKAIDLIDEAGSIARMESFKRKKEEQCSILSKSPNEYWQEIRAVQSTHEVALANRLKYSLDENDKEDGVNIEVIGDNKIASPSMPPTSINIWWSQ

SEQ ID NO: 19047 - protein, 173 aa, Zea mays
  VARIANT 53: note = Ancestral polymorphism is R, Derived polymorphism is C
  VARIANT 57..173: note = Derived polymorphism lacks residues 57 to 173
  VARIANT 63: note = Ancestral polymorphism is H, Derived polymorphism is Q
  VARIANT 78: note = Ancestral polymorphism is E, Derived polymorphism is K
  VARIANT 81: note = Ancestral polymorphism is P, Derived polymorphism is R
  VARIANT 97..173: note = Derived polymorphism lacks residues 97 to 173
  VARIANT 150: note = Ancestral polymorphism is E, Derived polymorphism is K
  VARIANT 151: note = Ancestral polymorphism is K, Derived polymorphism is N
  VARIANT 159: note = Ancestral polymorphism is S, Derived polymorphism is F
MCTLPPTPPPIPLPGSCSSVLPRPSGPAVRSHSGMGRQRRRVPADAQAEPEVRGDARLGHWVHDAVGRYGCAVPRTPERWPMLPRTPEYAPAPRREQARWGGESEAEALALYESRAESLRPAFLLTVAFALCFSLALRGSAQRANHRLAEKEIVVVLSSASAVLVDSSVAVVD

SEQ ID NO: 19048 - protein, 337 aa, Zea mays
  VARIANT 51..337: note = Derived polymorphism lacks residues 51 to 337
  VARIANT 96: note = Ancestral polymorphism is G, Derived polymorphism is R
  VARIANT 138..337: note = Derived polymorphism lacks residues 138 to 337
  VARIANT 189: note = Ancestral polymorphism is I, Derived polymorphism is T
  VARIANT 190: note = Ancestral polymorphism is R, Derived polymorphism is K
  VARIANT 199: note = Ancestral polymorphism is V, Derived polymorphism is A
  VARIANT 213: note = Ancestral polymorphism is P, Derived polymorphism is L
  VARIANT 223: note = Ancestral polymorphism is G, Derived polymorphism is V
  VARIANT 233: note = Ancestral polymorphism is A, Derived polymorphism is T
  VARIANT 240: note = Ancestral polymorphism is Q, Derived polymorphism is L
  VARIANT 241: note = Ancestral polymorphism is D, Derived polymorphism is Y
  VARIANT 245: note = Ancestral polymorphism is R, Derived polymorphism is H
  VARIANT 253: note = Ancestral polymorphism is Y, Derived polymorphism is H
  VARIANT 270: note = Ancestral polymorphism is S, Derived polymorphism is Y
MAIVVTEEQPDNNPEDQGFTPEENIDTDRNDNNMSDHEPVFTEDIYDPINWDNLDNKSRDILVEKGPIRDENIEFPLDTNGRHFSYTHYSRKMSNGEVYDRKWLVYSKHVDRVFCFSCKLFNTENCKSSLGHEGFKDWKHINERLKEHEASIQHITSMNSWNELRVRLGKHETIDKNIQQQITKEKERIRQVLQRIIVVVKFLGKQNLAFRGPSEQLYNDQNGNFLACVEMIAEFDLVMQDHLRRIQNNEIHYHYLSHKIQNEFISLLASDITKSIINTVKEAKIFSVILDCTPDVSHQEQMSLLIQCVNMSTRKVEEYFLGFMKMFGVKVMIMDLT

SEQ ID NO: 19049 - protein, 225 aa, Zea mays
  VARIANT 20: note = Ancestral polymorphism is S, Derived polymorphism is I
MDFSNIIRPALNRITSSCNSYGGGFITRVLSFTGSFNDRTSLLHEPTQTEEVAAAPAPPSPAAAEAAAPAAAASATTTTAAGHPFDIEAGTTTTPLAPTEAPAAEPFNDHQDAAESRRVGKSVQTVCLFAASASLVLFVNLPSSNKQPPPAAGQQQHALLYSADMAFISLGFFSSLTLSMFSIVARPGGDGEAAAVARVQKWGMVVAVASVVVAFSLRVCMTLAA

SEQ ID NO: 19050 - protein, 343 aa, Zea mays
  VARIANT 303..343: note = Derived polymorphism lacks residues 303 to 343
  VARIANT 152..343: note = Derived polymorphism lacks residues 152 to 343
  VARIANT 19: note = Ancestral polymorphism is C, Derived polymorphism is Y
  VARIANT 17: note = Ancestral polymorphism is C, Derived polymorphism is Y
MVSSKAFLLLLAVLIGCVCSFPSPVLAARELSDDAAMAERHERWMAEYGRVYKDAADKARRFEVFKDNFAFVESFNADKKNKFWLGVNQFADLTTEAFKANKGFKPISAEKAPTTGFKYENLSISALPTAVDWRTKGAVTPIKNQGQCGCCWAFSAVAAVEGIVKLSTGNLVSLSEQELVDCDTHSMDEGCEGGWMDSAFEFVIKNGGLATESSYPYKAVDGKCKGGSKSAATIKGHEDVPPNNEAALMKAVASQPVSVAVDASDRTFMLYSGGVMTGSCGTQLDHGIAAIGYGVESDGTKYWIMKNSWGTTWGEKGFLRMEKDISDKRGMCGLAMKPSYPTE

SEQ ID NO: 19051 - protein, 153 aa, Zea mays
  VARIANT 84..153: note = Derived polymorphism lacks residues 84 to 153
  VARIANT 64: note = Ancestral polymorphism is A, Derived polymorphism is V
  VARIANT 45..153: note = Derived polymorphism lacks residues 45 to 153
  VARIANT 39..153: note = Derived polymorphism lacks residues 39 to 153
  VARIANT 25: note = Ancestral polymorphism is F, Derived polymorphism is Y
  VARIANT 8: note = Ancestral polymorphism is P, Derived polymorphism is S
MKPMDINPGDDWTNMAMVGISPQIFMKSAYRSVMFYIGQKELEMQYKMNRIVGHCRQKCELMQAKFTEKLEEVSKKIAHSLVAGSVDLPKTPGQRDKGWGPPPRQRHCTSGPFDLSTGSPAHAVAPPADIRPRQQTRSVFGATCCHQMEGDIG

SEQ ID NO: 19052 - protein, 464 aa, Zea mays
  VARIANT 213..464: note = Derived polymorphism lacks residues 213 to 464
MGSDADMEDYGFEYSDEEPEEQDVDIENQYYNSKGLVETDPEGALAGFDQVVSMEPEKAEWGFKALKQTVKLYYKLGKYKEMMDAYREMLTYIKSAVTRNYSEKCINNIMDFVSGSASQNFSLLQEFYQTTLKALEEAKNERLWFKTNLKLCKIWFDMGEYGRMSKILKELHKSCQREDGSDDQKKGTQLLEVYAIEIQMYTETKNNKKLKPWILKSDVSCSYLIALFHHTIELLLQELYQRALSIKSAIPHPRIMGIIRECGGKMHMAERQWDEAATDFFEAFKNYDEAGNPRRIQCLKYLVLANMLMESEVNPFDGQEAKPYKNDSEILAMTNLIAAYQKNDIMEFEKILKSNRRTIMDDPFIRNYIEDLLKNIRTQVLLKLIKPYTRIRIPFISQELNFPEKDVEQLLVSLILDNRIQGHIDQVNKLLERGERSKGMRKYNAIDKWNTQLKSIYQTLSNRV

SEQ ID NO: 19053 - protein, 550 aa, Zea mays
  VARIANT 341..550: note = Derived polymorphism lacks residues 341 to 550
  VARIANT 333..550: note = Derived polymorphism lacks residues 333 to 550
  VARIANT 282: note = Ancestral polymorphism is R, Derived polymorphism is I
  VARIANT 281: note = Ancestral polymorphism is D, Derived polymorphism is Y
  VARIANT 268: note = Ancestral polymorphism is R, Derived polymorphism is W
  VARIANT 245: note = Ancestral polymorphism is F, Derived polymorphism is C
  VARIANT 243: note = Ancestral polymorphism is R, Derived polymorphism is H
  VARIANT 228: note = Ancestral polymorphism is P, Derived polymorphism is T
  VARIANT 167..550: note = Derived polymorphism lacks residues 167 to 550
  VARIANT 95..550: note = Derived polymorphism lacks residues 95 to 550
MIDHPRERRAGAATQAEKGKAMADAGTSSSVAGVMVMDQYGKPVKLNGPIDVTWSHDGRIRRARGKKLRLFVEKEVSATRQGYRSARIPLDEQAQIDMAMRNSLRDSFSTLEHDSCPPFGKSTGSASGAASCSTGKQSRLSSYYKNTQDISRGPFDIDLARSRTQVQPRIDVMLEKGHKEKLGIALAKWFHANDIPGRKQYMEAHMDKFKEDWKDYGVTIMCDSWTGPTMISIINFMIFCNGRMFFHKLHAMMREKIGGELVRWNATRFGTVFIFLHSFLDRKDKFKLWMASADWENSTALNPKALYTSKMARKPKFQHVVTMAIKKLSSSSSKASAAIDQYTFFRKQAGLFGGEEAKDSALNGRASAGNPIMEWLCSSRSESVPTLDENDESESPNRPSGFVLEELGGLNEEEMVLLNSRIGSGRKNGRKRNDVEEDIGDDFLSDSSEGGGSPTYNESGDSDSNDGGGDDEDGEPSGPCFAARTQPKLATDQYNGPGQDEQAVPLRPRSKRQKKLSIKGLYMLQKVNDLIFKHKHKNMAYTWTDSMARF

SEQ ID NO: 19054 - protein, 190 aa, Zea mays
  VARIANT 133..190: note = Derived polymorphism lacks residues 133 to 190
  VARIANT 53..190: note = Derived polymorphism lacks residues 53 to 190
  VARIANT 48: note = Ancestral polymorphism is I, Derived polymorphism is N
  VARIANT 42..190: note = Derived polymorphism lacks residues 42 to 190
MHYEFKGNVLEIGGLKNLYIGHQSSPNGRSIKVADHGNNSNESMMEKIRGVNWSRCRSNWFNDQKMETQQATRAAEDTPNLSSKVLEGKGNNNRHDNYVLPSLESSLKRSRSCGDGANNNTIKGEQWNCVLRRSNLSALIRYHTSVISNQGGMGLVGSCSPHDNNSEAMKKDSIYSMKSNSYAAPNKTRL

SEQ ID NO: 19055 - protein, 347 aa, Zea mays
  VARIANT 270: note = Ancestral polymorphism is C, Derived polymorphism is Y
MGDSSDSVSVDVERIFFGGKGHRVRTRHGPLSVSVYGDEDKPALVTYPDLALNHMSCFQGLFFCPEAASLLLHNFCVYHITPQGHELGAAPISADVHVPSVDDLADQVADVLDFFSLGSVMCLGVTAGAYVLTLFATKYRERVLGLMLVSPVCKAPSWSEWLYNKVLLNLLYYYGTRGIVKESLLQRYFSMDVLGNGQDPESEIVQACRSLLDDRQGTNVWRFLQAINRRHDLTESLEKLQCQTLIFVGENSQFHADAVHMTTKLDRRYCALVEVQACGSLVTEEQPHAMVIPMEYFLMGYGLYRPSQQESSPRSTLSPFCISPELLSPESMGVKLKPIKTRISRNV

SEQ ID NO: 19056 - protein, 227 aa, Zea mays
  VARIANT 56: note = Ancestral polymorphism is M, Derived polymorphism is I
MDPNGVRIQMLTAGQDVEPPSVQDDATKKKPQQTDDAATPKAPPARPALSSASDLMKLLPTGTVLAFQALAPSFSNHGVCHAANRYLVLSLIGACAVSCVLLSFTDSLVGRDGKLYHGAATFWGFYPFNYTGTREQREAAFDDEDLSRFRVTALDFVHAFFSALVFLAVALADASIQGCLFPDAGPDVRELLVNLPLGAGFLSSMVFMIFPTTRKSIGYMDMAPHAQ

SEQ ID NO: 19057 - protein, 347 aa, Zea mays
  VARIANT 148: note = Ancestral polymorphism is A, Derived polymorphism is E
MARKCSSCGNNGHNSRTCGGHSRTAAAFENNGGGVRLFGVQLHVGSSSPVAVAMKRCFSMECLSPPPPLPPPPAAPAYYAAALAAANSSSPSASASASSSSSLVSVEEAQAPEKMASGYLSDGLVGRAQAERKKGVPWTEDEHRRFLAGLEKLGKGDWRGISRHFVTTRTPTQVASHAQKYFLRQSSLAHKKRRSSLFDVVENAAERATTTSSRERPRLTVTDAIIATASAAAPGTTTAALPALSLGIRRPARPEYHAALPPNSLSLQLPRCSAAMGSASPSPSLALALAGPKHKHPSPSSLTAAKASSSGQAPDLELKISTGRQSEHQVQTGSPPRTPFLGTIRVT

SEQ ID NO: 19058 - protein, 237 aa, Zea mays
  VARIANT 154: note = Ancestral polymorphism is F, Derived polymorphism is S
  VARIANT 121: note = Ancestral polymorphism is E, Derived polymorphism is G
  VARIANT 88: note = Ancestral polymorphism is H, Derived polymorphism is Y
  VARIANT 70: note = Ancestral polymorphism is R, Derived polymorphism is H
MPAKTLIETKKLLAQLVETEMNRRLVLGHVCYHIIAARLNGYMATVTNLKNPVNKWRCGATPISYYYFIRLIGRKASHVALECALQSHPNMVILGEEVAASKLTIFDITKQICDVVQARAGKELFVYRKSMASMPKVFLLRISLLSFHHGHLHFEFLPPFIRKQLNFPSVLRQNSSSFLLEDVYRNPGPLQFEGPGVDSNPISLCVEDQDYMGRIKKLQEYLKKVVLMPLPLHIFLL

SEQ ID NO: 19059 - protein, 378 aa, Zea mays
  VARIANT 38: note = Ancestral polymorphism is A, Derived polymorphism is V
  VARIANT 45: note = Ancestral polymorphism is C, Derived polymorphism is F
MMMMGEGVSVPPWSHHVPVSGVDAGVGGDEMTPYLLAALRQYLPCNDAGAAEADDEEAAAMAAGVDGYGCDEFRMYEFKVRRCARARSHDWTECPFAHPGEKARRRDPRRYHYSGAACPDFRKGGCRRGDACDFAHGVFECWLHPARYRTQPCKDGTACRRRVCFFAHTPDQLRVLPPTPQQSSASPRGAGALPESYDGSPLRRQAFETYLTKSIVSSSPTSTLLSPPKTPPSESPPLSPDGAAAAFRRGSWPGAGSPVNDVLASLRQLRLGTASSSPSGGWGGYPASAAAYGSPTAGGLYSLPSTPTALATASGYMPNLEPLDVSFGGDEEPVERVESGRALRAKVFERLSREGAVSCYPAAGTGGPDVGWVSDLIN

SEQ ID NO: 19060 - protein, 222 aa, Zea mays
  VARIANT 208: note = Ancestral polymorphism is R, Derived polymorphism is W
  VARIANT 155: note = Ancestral polymorphism is T, Derived polymorphism is I
MAPRVQETLKEAIEINNSVPQGLSSSMFTKRPDIIFKWLGPHGSDCGIVNVNIPTNGAEIGGAFGGEKAAGGGREAGSDSWKQYMRRATWLPTDENIANGQSLLVHDQRKYRSMLIYTNSTVWMIGGFAFIDVDVEYMQIPDYIDIIKTALDLGTIQKKLKYVSYTSAFDFVPDVRLTFNNAMTYIPCGHVVHDMAIQLNMMFENRWRTIEKLVSTATKKDV

SEQ ID NO: 19061 - protein, 334 aa, Zea mays
  VARIANT 81..334: note = Derived polymorphism lacks residues 81 to 334
  VARIANT 137: note = Ancestral polymorphism is A, Derived polymorphism is T
  VARIANT 182..334: note = Ancestral polymorphism lacks residues 182 to 334
  VARIANT 210: note = Ancestral polymorphism is G, Derived polymorphism is S
MAVATESRGSEDRASAHANQEKRWVLSDFEVGKPLGRGKFGHVYLAREKRSSEIVALKVLFKSQLKQSQVEHQLRREVEIQSHLRHPNILRLYGYFYDQTRVYLILEYAAKGELYKELTRCKHFSERRTATYVASLARALIYLHGKHVIHRDIKPENLLVGVQVLALCSFLVSLWHRVCSASSGRLELYACFTSSSVSLEQGEIKIADFGWSVHTFNRRRTMCGTLDYLPPEMVEKAEHDYHVDIWSLGVLCYEFLYGVPPFEAKEHSETYRRIVKVDLKFPLKPFVSPAAKDLISQMLVKSSAQRLPLHKVLEHPWIVQNADPSGVYREGRSV

SEQ ID NO: 19062 - protein, 531 aa, Zea mays
  VARIANT 277: note = Ancestral polymorphism is Q, Derived polymorphism is L
  VARIANT 238..531: note = Derived polymorphism lacks residues 238 to 531
  VARIANT 224: note = Ancestral polymorphism is I, Derived polymorphism is N
  VARIANT 214..531: note = Derived polymorphism lacks residues 214 to 531
  VARIANT 170..531: note = Derived polymorphism lacks residues 170 to 531
MEAVGVTPAPVAAPEKKKLLDLKDPFPAAANSGAKASSASKWATKKKLVGGDAGYVLEDVPHLTDYMPQLPTYPNPLQDNPAYSVVKQYFVNPDDTVTQKIVVHKTSARGTHFRRAGPRQRVYFQSDEVNAAIVTCGGLCPGLNTVIRELVCGLYDMYGVSSVVGIEGGYKGFYSKNTVALTPKSVNDIHKRGGTVLGTSRGGHDTAKIVDCLQDRGINQVYIIGGDGTQKGASVIYEEVRRRGLKCSVVGVPKTIDNDIAVIDKSFGFDTAVEEAQRAINAAHVEAESAENGIGVVKLMGRNSGFIAMYATLASRDVDCCLIPESPFYLEGKGGLLEFVERRLKDNGHMVIVVAEGAGQDLIARSMNFVDTQDASGNKLLLDVGLWLSQKIKDHFKKKPSFPITLKYIDPTYMIRAVRSNASDNVYCTLLAHSALHGAMAGYTGFTVAPVNGRHAYIPFYRITEKQNKVVITDRMWARVLCSTNQPCFLSHEDVENMKHDDDEHHHMHNTQLLEGGSSPVSKCNGSAAAV

SEQ ID NO: 19063 - protein, 441 aa, Zea mays
  VARIANT 342..441: note = Derived polymorphism lacks residues 342 to 441
  VARIANT 356..441: note = Derived polymorphism lacks residues 356 to 441
MNREHSSSSSSKLINEKLEEHRISTAKHCPHCGEKIDSKPFHPLRPQLASVPYYHETLGGATCFDGINCCNCKKDWVGLPAGVKFDPTDQELIEHLEAKVKDEGSRSHPLIDEFIPTIDGEDGICYTHPEKLPGVTRDGLSKHFFHRPSKAYTTGTRKRRKIQTDCDVHKGETRWHKTGKTRPVMVSGRQKGCKKILVLYTNFGKHRKPEKTNWVMHQYHLGDLEEEKEGELVVCKIFYQTQPRQSSWSAASDRGAATAMVAATTAAAQEQHRRDSGSGSCSSRDHEAVSATSFPAGYTVTTAVEMQQHMKQPAADHFSFAPFRKTFDQEVGIGGDQVPSNQLGRSETHHAGRGQQPHGPVLATTAVPATAFLISRPSNPVSTIVPPAMQHASVVLDNDQFHVPAILLHHHDKFQETSIAHPQETEWPYPYWPSDNQDHHG

SEQ ID NO: 19064 - protein, 334 aa, Zea mays
  VARIANT 202: note = Ancestral polymorphism is G, Derived polymorphism is R
  VARIANT 150: note = Ancestral polymorphism is S, Derived polymorphism is L
MESPISRTNLNCISLADPNVQKSVALLKQACLDSGFFYVVDHGISQEFMDEVFAQSKKFFDLPHSEKMKLLRDEKNRGYTPMLDEILDPENQVNGDYKEGYYIGVEVPADDPEANRPFYGPNQWPSKEVLPKWREVMEQYHREALIVAKSVARIIALALDLDVDFFDRPEMLGESIATLRLLHYEGGQETGKVSDPAKGVYGAGAHSDYGLITLLATDDVVGLQICKDKNAQPQLWEYVAPLKGGFIVNLGDMLERWSNGVFRSTLHRVVLDGRERYSIAYFVEPSHDCVVECLPTCKSESNPPKFPPITCSAYLSQRYKDTHADLKSYDDSKA

SEQ ID NO: 19065 - protein, 142 aa, Zea mays
  VARIANT 79..142: note = Derived polymorphism lacks residues 79 to 142
MDGGGYSSISRRGFVRAGFDLDGDDGYYYDDVVVFHPSSFSSSSSSKADGPGAPYHTAGAPRPSARARLRALWRRVMREKKRILLCSTGCVPAPPPPREPYDAYSYAQNFDDGEAWVEPDDHSRSFSARFAVPSRAFQRVAA

SEQ ID NO: 19066 - protein, 410 aa, Zea mays
  VARIANT 82: note = Ancestral polymorphism is R, Derived polymorphism is C
  VARIANT 83: note = Ancestral polymorphism is I, Derived polymorphism is V
  VARIANT 89: note = Ancestral polymorphism is G, Derived polymorphism is R
  VARIANT 121: note = Ancestral polymorphism is G, Derived polymorphism is D
  VARIANT 132: note = Ancestral polymorphism is V, Derived polymorphism is E
  VARIANT 134: note = Ancestral polymorphism is V, Derived polymorphism is M
  VARIANT 135: note = Ancestral polymorphism is R, Derived polymorphism is H
  VARIANT 140: note = Ancestral polymorphism is G, Derived polymorphism is A
  VARIANT 165: note = Ancestral polymorphism is R, Derived polymorphism is C
  VARIANT 167: note = Ancestral polymorphism is L, Derived polymorphism is Q
  VARIANT 173: note = Ancestral polymorphism is G, Derived polymorphism is D
  VARIANT 387: note = Ancestral polymorphism is E, Derived polymorphism is A
MAPVTGQARCPAHPPRPRPRLPQPAVAAGVAATSSSCCGYRRRLHAPLRAPMAAADPPPRGEAAPALKRSASIDRIPADARRILHRLAGDLWGGDVDPGALAVSQLRGAMTNEVFRITWPGGEAEGNGPRKVLVRIYGRGVEVFFDRADEVRTFECMSRHGQGPRLLGRFANGRVEEFINARTLSAADLRDPEMSALIARKLREFHDLDMPGPRDVSLWQRLKRWLGEARDRCSEEESNQFQLNKLGDEISVLEKTLSGLQQSVGFCHNDLQYGNIMIYEETRQVTLIDYEYASFNPVAFDIANHFCEMAADYHTSTPHVLDFTKYPDTGEQRRFVEAYLSSAGKKPTDGEVEELLGLIAKYTLASHLFWGLWGIISAHVNENIDFAYKEYARQRLDQYWQTKPRILGPK

SEQ ID NO: 19067 - protein, 432 aa, Zea mays
  VARIANT 413: note = Ancestral polymorphism is P, Derived polymorphism is R
  VARIANT 168: note = Ancestral polymorphism is P, Derived polymorphism is L
  VARIANT 105..432: note = Derived polymorphism lacks residues 105 to 432
  VARIANT 96..432: note = Derived polymorphism lacks residues 96 to 432
  VARIANT 92: note = Ancestral polymorphism is G, Derived polymorphism is D
  VARIANT 50: note = Ancestral polymorphism is T, Derived polymorphism is M
  VARIANT 39: note = Ancestral polymorphism is G, Derived polymorphism is R
  VARIANT 33: note = Ancestral polymorphism is D, Derived polymorphism is Y
  VARIANT 8: note = Ancestral polymorphism is G, Derived polymorphism is D
MGKLLGKGAFGKVHYARDLECDQGVAIKIMDKDRVLTAGLSEQVKREITTMRLVEHKNIVRLHEVMATRNKIYIIMEYAKGGELMDKVKRSGRLTEADAHRYFEQLMDALDHCHSRGVYHRDLKPENLLLDENGDLKVSDFGLSAFSKSRRTDGLLHTVCGTPVYIAPEVIKKTGYDGAKSDIWSCGVVLFVLAAGYLPFQGPNLMEIYRKIHDRDFRCPSRFSHKLKRLLYKILNPNPSMRPSIQEIKESTWFRKGPREISVVNEKVLSDNGTTTNAALVLASRRKEIAHEDMKSLVATNLNAFEIIALSAGLDLSGLFIKECRKETRFTSDKPALAIISKLEDVAKALNLRIRKKDNNTVSIQRRKEGGNGVLQFDTQIFEITPSCHLVQMKQTSGDLFEYEKLLEESIRPRLKDIVSAWHGDDLQQKQK

SEQ ID NO: 19068 - protein, 724 aa, Zea mays
  VARIANT 536: note = Ancestral polymorphism is P, Derived polymorphism is S
MRLLLVGALLLCATAAVESKPPLDTLGIPPQDEAYYRGGVIKCRDGSGRFSREQLNDDFCDCPDGTDEPGTSACPEAKFYCKNAGHTPVTIFSSRVNDGICDCCDGSDEYDSNITCKNTCWEAGKAAREKLKKKVATYKSGVVIRNQEVERAKEAYAKDEAELAKLKGEEKILQGLVDKLKEQKRLIEKAEEEERLRKEKEEKRIKEAEKQAADEKGTPDASPDVDSKETHDHVQEDENKVGISFCFSVMLIIHQTTVAEEHDVHATDHDNHATDHDNHAAESGASVEQQGSVNKDDISVEAGTLDELLHKESAVPTLEKQLILGRYVDFMSKVYEACFAEFQDHSSDNPEGLSREELGRMVASRWTGESVSEVSKDDKKGHEDEQEIPEPAKEALEDELEIPEPAEENYDGYHSEVEDDRHKYEDEEFDHESEDEYVDDHDEHVESYKSDDDQKDLTEPGHASWLDKIQQTVQNVFQKFNFFRTPVDLSEASRVRKEYDDANSKLSKIQSKISNLAEKLKHDFDVIFPLQKLYQSIVLFFHRLAIVDILAKTRSSIPFMISALRPRKESILTRSVHIRKHHRLKGTVPPTWGMLLVLLSLLKSHNFLFVVSEYFYSGFKKYCSLGNDSPYSFCCIYKRWDKFEESYRVMHFSGGDKCWNGPDRSLKVRLRCGLSNELNDVDEPSRCEYVAVLSTPALCVEEKLKELQNKLDAMSSKQPGHDEL

SEQ ID NO: 19069 - protein, 105 aa, Zea mays
  VARIANT 57: note = Ancestral polymorphism is R, Derived polymorphism is S
  VARIANT 76: note = Ancestral polymorphism is I, Derived polymorphism is T
MNHLFTLRHAWGGSEDTRDLGQGLHGVQAGAERWVSRSDRLRHEPSYKFLSFNSGPRSCIGKDVSLSNMKITAASTIHNFKVELVRRGHEVTPQSSVIYSTLRTG

SEQ ID NO: 19070 - protein, 511 aa, Zea mays
  VARIANT 66: note = Ancestral polymorphism is R, Derived polymorphism is P
  VARIANT 102: note = Ancestral polymorphism is G, Derived polymorphism is S
  VARIANT 132..511: note = Derived polymorphism lacks residues 132 to 511
  VARIANT 141: note = Ancestral polymorphism is S, Derived polymorphism is W
  VARIANT 296: note = Ancestral polymorphism is D, Derived polymorphism is E
MEMVPWLLGFLGRYPELMVSLACFLLLFRRLNQRDGLPTNWPVVGALPAITVNAGRMHEWVTEFLRAAGLSYVMKGPWGSPVDVIMTADPANVAHVFTSNFGNYPKGQEFAALFDVLGDGIFNADGESWAFQRRKAHALLSDARFRAGVAASTARKLRDALVPLLDGIAASGAVVDLQDVFVRLTFDLTAMFVFGIDPGCLAPDFPYVPFAAAMDTVEEVLFYRHVAPVPWLMLQKYLRTGHSKKMWNARRVLDASIAEFISLRRERAAEAEAEADLLTSYLACHDEIGKSGAELERFLRDTTLNLMVAGRDTTSSALTWFFWLLTKHPDVEAKVLEELRAHPPLSGAGGHRTAAELKQLVYLHAALSESLRLYPPVPFEHKAAARTDTLPSGARVGPSRRVIVSFYSMGRMEAVWGKDCSEFRPERWLTAAGRFRHEPSYKFVAFNVGPRTCLGRDLAYSQMKAVVAAVLPRFRVEVDAGAVVRPKLSIILHMKDGLKVRVHKREEDGLC

SEQ ID NO: 19071 - protein, 103 aa, Zea mays
  VARIANT 60: note = Ancestral polymorphism is A, Derived polymorphism is T
  VARIANT 54: note = Ancestral polymorphism is G, Derived polymorphism is D
  VARIANT 48: note = Ancestral polymorphism is T, Derived polymorphism is K
  VARIANT 44: note = Ancestral polymorphism is A, Derived polymorphism is T
  VARIANT 28: note = Ancestral polymorphism is P, Derived polymorphism is R
  VARIANT 20: note = Ancestral polymorphism is A, Derived polymorphism is V
  VARIANT 16: note = Ancestral polymorphism is R, Derived polymorphism is L
  VARIANT 8: note = Ancestral polymorphism is A, Derived polymorphism is T
MALGAHQALLHIRLCRALTAVMWSPWAPAPPSLPACSEAPHCRALSLKQLVCDGSSLTVALPWLPVATLGEAKPDDILAIDPRCSSAVVEVTRTGGNFLPIYQ

SEQ ID NO: 19072 - protein, 467 aa, Zea mays
  VARIANT 171: note = Ancestral polymorphism is S, Derived polymorphism is C
MMLKDLAAIQHQQQQLAADENMSNLTSASGDLQASVSSHPAPPPAKKKRSLPGNPDPDAEVIALSPRTLMATNRYVCEVCGKGFQRDQNLQLHRRGHNLPWKLKQRNPKEAVRKKAYVCPEPGCVHHDPARALGDLTGIKKHFSRKHGEKKWKCDRCAKRYAVHSDWKAHSKVCGTREYRCDCGTHFSRRDSFITHRAFCDALAEESARAVTAAAAVVVGQQQAAGGGDGSAGLHLPPDVLDPSQTLGGGHGMSLQELCLKREQQQQFAPSSWLTAHHQQELPGSARLLEQHEYIGSSTPESTAGLSGFVGLSPSAAGEAAASAHMSATALLQKAAQMGATLSRPSNQEQMASTHSHSSTTNAGTGSASAAAAAAINVPGTGAGAFGFGAPHHFGAEERTTTSADRDACGNAAAVSVVGANDGFTRDFLGLRAFSHGDILTMAGFDPCMSSAAYEQGHHQSSKQWHV

SEQ ID NO: 19073 - protein, 120 aa, Zea mays
  VARIANT 62: note = Ancestral polymorphism is V, Derived polymorphism is D
  VARIANT 29: note = Ancestral polymorphism is L, Derived polymorphism is V
  VARIANT 17: note = Ancestral polymorphism is G, Derived polymorphism is E
  VARIANT 10: note = Ancestral polymorphism is G, Derived polymorphism is R
MQAVGIRRRGLTIDPAGEEEAPAARVGRLVRESPVVIFARRGCCMAHVMRRLLAAVGAHATVIELGSAEEEEEELAAAEGGGVPALFVGGDPVGGLEGLMRLHLSGRLVPRLRELGALCA

SEQ ID NO: 19074 - protein, 354 aa, Zea mays
  VARIANT 230..354: note = Derived polymorphism lacks residues 230 to 354
  VARIANT 224..354: note = Derived polymorphism lacks residues 224 to 354
MSKVAGITTPNEVIHTSVWAGQKRLGQLAKWKTAEEVAALVRSLPVEEQPKQIVVTRKGMLDPLEVHLPDFPNIVIKGSELQLPFQACLKIEKFGDLILKATEPQMVLYNIYDDWLKSISSYTTFSHIVLILRALHVNNEKAKMLLKPDKTIITETHHIWPSLNDEQWLKVECALRDLILSDYAKKNNVNTSALTQSKMRDIILGAEIAPPSQQRQQIAEIEKQSRETTQLTAVTTRTTNVHGDELIITTTSPYEQQAFASKTDWRVREISATNLYLRVNHIYVNSDDIKGLVAESAVDASSDVEIHGELELGALTSSLEHPGGALGELKHARRRHPRPIPWLEEEGPQIRVLE

SEQ ID NO: 19075 - protein, 639 aa, Zea mays
  VARIANT 321: note = Ancestral polymorphism is E, Derived polymorphism is V
MTDGHHFNNILLGGRGGTNPGQFKVHSGGLAWKRQGGGKTIEIDKADVTAVTWMKVPRAYQLGVRIKAGLFYRFIGFREQDVSNLTNFIQKNMGVTPDEKQLSVSGQNWGGIDIDGNMLTFMVGSKQAFEVSLPDVAQTQMQGKTDVLLELHVDDTTGANEKDSLMDLSFHVPTSNTQFVGDESRPPAHILWETILKFADVGSSEEPVVTFEGIAILTPRGRYSVELHLSFLRLQGQANDFKIQYSSIVRLFLLPKSNNPHTFVVITLDPPIRKGQTLYPHIVIQFETEAVVERDLALSKELLVEKYKDRLEESYKGLIHEVFTKVLRGLSGAKVTRPGSFRSCQDGYAVKSSLKAEDGLLYPLEKGFFFLPKPPTLILHEEIEFVEFERHGAGGASISSHYFDLLVKLKNDQEHLFRNIQRNEYHNLFNFINGKNIKIMNLGGDGQGASGVVTDVLRDTDDDAVDPHLERIKNQAGDEESDEEDEDFVADKDDSGSPTDDSGDEESDASDSGGEKEKSSKKEASSSKPVQKRKHKGRDDEGQEKKKPKKKKDPNAPKRAMTPFMYFSMAERGNMKSSNPDLPTTEIAKKLGEMWQKMSGEEKQPYIQQAQVDKKRYEKESAVYRGEATVDVDSGNESD

SEQ ID NO: 19076 - protein, 305 aa, Zea mays
  VARIANT 261..305: note = Derived polymorphism lacks residues 261 to 305
  VARIANT 268..305: note = Derived polymorphism lacks residues 268 to 305
MSAEKPAPVRVLYCGVCGLPAEYCEFGPDFERCKPWLRAHAPGVYPDDLVAASSSPGGGDKDVDKVGDRLQGVGISDGSTSAAGDASASKPQEAKRLPGGKLKKKEKQEVVIEKIVRNKRKCVTVVKGLELFGVKLSDASKKLGKKFATGASVVKGPTEKEQIDVQGDISYDIVEFITDTWPDVIHLYSLLCFTSFICFHVCKISDTVSAQTIWCHSTQQYLSRPFSSLKMEGRFLLLDAIWFIRHETNGFTNIIQRLTSQVAFCLPSSPASMYEIKSIQLPIYYDCVCCITSKSLDTERKRIIG

SEQ ID NO: 19077 - protein, 144 aa, Zea mays
  VARIANT 105..144: note = Derived polymorphism lacks residues 105 to 144
  VARIANT 73..144: note = Derived polymorphism lacks residues 73 to 144
  VARIANT 71: note = Ancestral polymorphism is S, Derived polymorphism is F
  VARIANT 49..144: note = Derived polymorphism lacks residues 49 to 144
  VARIANT 47: note = Ancestral polymorphism is C, Derived polymorphism is Y
MHHERLRRSNAPTLERLQRHSNATSASAAPPNNSNATPALAAVELYCSQVRVFLSRGRGATTPCACRTRISVQGIDAVLFAPDDAKATQTVDPNRKPPTIVTHKKKIKLRRDNCSSVMVNGDCSSVSALTYEKLNGSCTNLLVE

SEQ ID NO: 19078 - protein, 226 aa, Zea mays
  VARIANT 27..226: note = Derived polymorphism lacks residues 27 to 226
  VARIANT 28..226: note = Derived polymorphism lacks residues 28 to 226
  VARIANT 40: note = Ancestral polymorphism is L, Derived polymorphism is F
  VARIANT 60: note = Ancestral polymorphism is T, Derived polymorphism is I
  VARIANT 82..226: note = Derived polymorphism lacks residues 82 to 226
  VARIANT 94..226: note = Derived polymorphism lacks residues 94 to 226
  VARIANT 148: note = Ancestral polymorphism is D, Derived polymorphism is Y
  VARIANT 162: note = Ancestral polymorphism is D, Derived polymorphism is H
  VARIANT 174: note = Ancestral polymorphism is L, Derived polymorphism is P
  VARIANT 185: note = Ancestral polymorphism is K, Derived polymorphism is E
MERYAPTAKDLASRDVVSRSMTMEIREGRGVGPLKDHIYFHLNHLPPEVLKERLPGISEIAAIFAGVDVTKEPIPVLPTVHYNMGGIPMNYHGEVVDIKGDNPDVVIPGLMAAGEAAYASVHGANRLGANSLLDIVVFGRACANRVADISKPSEKQKPLEKDAGEKTIAWLDKLRNANGSLPTSEIRLNMQRVMQNNAVVFRTQETLEEGIAGALCVVPFTTIMST

SEQ ID NO: 19079 - protein, 280 aa, Zea mays
  VARIANT 185: note = Ancestral polymorphism is S, Derived polymorphism is N
  VARIANT 181: note = Ancestral polymorphism is P, Derived polymorphism is S
  VARIANT 170..280: note = Derived polymorphism lacks residues 170 to 280
  VARIANT 161: note = Ancestral polymorphism is A, Derived polymorphism is V
  VARIANT 155..280: note = Derived polymorphism lacks residues 155 to 280
  VARIANT 85: note = Ancestral polymorphism is R, Derived polymorphism is W
  VARIANT 72: note = Ancestral polymorphism is M, Derived polymorphism is I
MAPRPAANHQATAEQGAKHLGRPSGAPSARAPRPPPAAPERPTGRRAEQSFNSVPDRVFLIQVAASKTKIYMVLELVNGGELLDRILYYVSDSPPVASLLLQRQLTSRRPVRESSRSRRQGGSSSTWSFPLLYSTHSLITPRRPNSSPGANSLCRMPAGSAEQRIVLYLELYASCVEYITPLRDSMSSVFPSAHLAFASIDLNAHTVFAITTALAILQTVCLRNLSLLSYLSGSDTPMCVLPLHQEGRSAIVGDHPVHSHHNDRRRMCMRGIIHLSQPDD

SEQ ID NO: 19080 - protein, 311 aa, Zea mays
  VARIANT 167: note = Ancestral polymorphism is R, Derived polymorphism is I
  VARIANT 173: note = Ancestral polymorphism is S, Derived polymorphism is I
MAAPTQTLVLAGIILLNFVLAAAALYRRIRGRRRPRQHVPPPPPLEPAAAEEAEAEEEEEEGGGGERRQSQRRRRRARRKRQQQEEGAASEGGGGDGADGAAAKATGKEELLPRRPQFPLASVAGVLQRRIHARYDDLARASEAQCLTIEQGAILLGECSSKILHSRSLQFSSVGTKHCIPFLDRLEVNEFLNCLVDARNELLQRYENVQRSFKIKKAMLSNHRNYRTSYDRLFEQVRRLETESDSLKKDAAIYNFVQERLQKSAPYKMIMELSAMELEAQEISFEELLAREKEDTAFWQRNGKMRSVSSK

SEQ ID NO: 19081 - protein, 284 aa, Zea mays
  VARIANT 115..284: note = Derived polymorphism lacks residues 115 to 284
  VARIANT 46: note = Ancestral polymorphism is S, Derived polymorphism is F
  VARIANT 37: note = Ancestral polymorphism is A, Derived polymorphism is T
MDLAADLPPTRGRGGPGAGPVALASALLRRENHRRRALACGAVLASALLLVATPRFRHTPALHLFADMRNLLGVPNTLNVLTAYPLLLAGVPGLVLCLCGSGCFGVSLRWEASGWFLFYAGNVAAAFGSAYYHLKPDDDRLIWDRLPMMISSSSLLSILVIERVDERVGLSCLVSLLSLILVSSACERVLDDMRLWVILNFVPCIAIPAMLFLFPPKYTHSRFWFLATGLYLLARFEGLADRKVYSVNRYFISGHSLEHLCFALVTVMLTVMLTFRNIKIARDS

SEQ ID NO: 19082 - protein, 582 aa, Zea mays
  VARIANT 348: note = Ancestral polymorphism is A, Derived polymorphism is G
  VARIANT 275: note = Ancestral polymorphism is T, Derived polymorphism is I
MARATTSTVAALCFLLSCVSATPSTLAASSAIIHDIIRGLADTTAARVRTDAEATARASTDFGTNATADDAARPAAVFYPSCAADIAALLRASSASASPFPVSARGRGHSTRGQATAPGGVVVDMASLAVAAGRDETATTNASSTSASARLAVSVDGRYIDAGGEQLWVDVLHAALAHGLTPRSWTDYLRLTVGGTLSNAGISGQAFRHGPQISNVLELDVVTGTGDMVTCSKEKDADLFDAVLGGLGQFGIITRARIPLAPAPARARWLRLLYTGAADLTADQERLIADDERRGGALAGLMDYVEGSVVTDLQQGLIGSWRSQPPPSSSSFYSATDAARIAALAEEAGGVLYFLEGAVYYGGASDTTAADVDKRVDVMLRELRYARGFAYVQDVSYEQFLDRVSAGERRLRGEGLWDVPHPWLNLFLPRSRILDFAAGVFHGVLLPTRTAGGGGGGPVLVYPMNRGKWDGATSAVLPYDDGDGDGDEVFYTVGILRSAVADGDLRRMEEQNAEVARFCEAAGIPCTQYLPSYATQADWAARHFGPAGSGRWDTFLRRKRKYDPMAILSRGQRIFSSPLLAS

SEQ ID NO: 19083 - protein, 504 aa, Zea mays
  VARIANT 49: note = Ancestral polymorphism is R, Derived polymorphism is C
MSGKFTTLLVETMVSHGYTTKESRESFTSWLWTYWDQAYGMFGIIIPTRGMSVEMVACIGIEAISILEKMHSKGYVHGDVKPENFLLGPPGTPEEKKLFLVDLGLATKWKDVGTGHHVEYDQRPDIFRGTVRYASVHAHLGRTGSRRDDLESLAYTLIFLLRGRLPWQGYQGENKGFLVCKKKMATSPESLCGICPQPFRDFVEYVVNLKFGEEPNYAKCISLFDGIVGPNPDIRPINTDGAQKLIYQVGQKRGRLIVDENDDEQPKKKIRMGMPATQWISVYNARRPMKQRYHYNVADNRLLQHIQKGNEDGLFISSVASSSNLWALIMDAGTGFTSQEWIMEQWERNFYITALAGANNGSSLVIMSRGTQYAQQSYKVSDTFPFKWINKKWKEGFYVTAMATAGSRWAVVMSRNAGFTSQVVELDFLYPSEGIHMRWDNGYRITATAATWDQAAFILSIPRRKPSDETQETLRTSAFPSQHVKDKWSKNLYLASICYGRSVS

SEQ ID NO: 19084 - protein, 843 aa, Zea mays
  VARIANT 65..843: note = Derived polymorphism lacks residues 65 to 843
MPTTAPPVDAEPPECPVCLSPFDAASVVPRVLPCGHSLCGSCIAALPPASAAAGASSLRCPLCSQCVPYARALGPSSLPKNLALLTLLPSPSHALSAATLVTAPLPHPHPLHAAHSRLLSRFRHAVLPESASPLGSEPSPVHLAFGSLGSDLGAPWFCARGRPVSLLPIETQPVPPTKQEAEFYRPSHATRVLAAVDALSDATKEELAGLIASSARLARMVSRLYGVWMSPHAPPLWMVSERHPRTVSQLLEEEIINREETVVRAGFLVMEACEVIMGLHSEGLVLGCLGLDCFCLDRFGHCMLDLNQALALCRGVQAGASSNSVRAFIAPEVAAVLGDTLRTEGRDFDGLVGCTSDIWSLGCVFVALLTRDEQLVPVAGWNSEGLYDDWEKEVVTRLDATLLGTILEPLAAVIASCLRYDPKSRPEIADVWKCIRGLLTKFGDVTLAPDDDVAAQKSFRCLLLGELSSMFVDSGAVESDDKTQLSRGADGNSSNQDHGSNDGFLNNSGNDLSGIDGPQSVGVFKSSTLLAHRDCVTGLAVGGGFLFSSSYDKTINVWSLQDFSHVHCLKGHEHKITAIVVVDNDSHSLCISGDSGSGIFVWRVDSTLKEEPLNKWYEHNDWLYRGVNCLAVSGTGYLYTGSRDKTIKAWSLEDYSLRCTMTGHKSTVSCLAVASGILYSGSWDGTIRLWWLTDHTPLSVLEDDAAGSIAPVLSISAGTNFVASSYENGYFKVWKNDVLVKSEKLQNGAVYAVKLSGKWLYTGGWDKVINIQELLDDESEVELRDVASITCDSIITSILPWDERLIVGLSNREIKKLAEKLSVWQSAAAFGGQKLSEAETNRA

SEQ ID NO: 19085 - protein, 250 aa, Zea mays
  VARIANT 127: note = Ancestral polymorphism is L, Derived polymorphism is S
MEPGLGKRLMTVLHAVYHMMRRGLCRKRLMMDLHLLLGRGKLAGKALRDLLTAASHHQHHHHMVVPRPPSRAPPTAAAGLSLPSDPQPQVDVQSFNSCTAAPSCSSGNNNGGGVARPAAAGGLGRALLPFRIRGRRGASAANGCGDDGLVLAQVARALETMHDAADDVAVHPSPLAAAAGATPSPMLALSLGRSPAGARRLRVTDSPFPLDPPEGLDARADSTFDAFITKFYETLRLQQADATPDNRARR

SEQ ID NO: 19086 - protein, 70 aa, Zea mays
  VARIANT 14: note = Ancestral polymorphism is A, Derived polymorphism is T
  VARIANT 32: note = Ancestral polymorphism is A, Derived polymorphism is V
  VARIANT 65: note = Ancestral polymorphism is R, Derived polymorphism is W
METLLKASAYILGATSSSIVYKVMLADGTALAVRRIGESGGTEKLKDFEAQVCAVARFRHPNILRLCGFY

SEQ ID NO: 19087 - protein, 198 aa, Zea mays
  VARIANT 4: note = Ancestral polymorphism is R, Derived polymorphism is M
  VARIANT 20: note = Ancestral polymorphism is W, Derived polymorphism is L
  VARIANT 31: note = Ancestral polymorphism is G, Derived polymorphism is E
  VARIANT 61..198: note = Derived polymorphism lacks residues 61 to 198
  VARIANT 83: note = Ancestral polymorphism is L, Derived polymorphism is P
  VARIANT 109..198: note = Derived polymorphism lacks residues 109 to 198
  VARIANT 125..198: note = Derived polymorphism lacks residues 125 to 198
  VARIANT 134: note = Ancestral polymorphism is S, Derived polymorphism is L
  VARIANT 138: note = Ancestral polymorphism is P, Derived polymorphism is S
  VARIANT 160: note = Ancestral polymorphism is P, Derived polymorphism is S
  VARIANT 169: note = Ancestral polymorphism is W, Derived polymorphism is C
  VARIANT 194..198: note = Derived polymorphism lacks residues 194 to 198
MMLRFLKARKFEADKAMLMWSEMLKWMKEFGTDTILEVVTASQFWTASKTWEILISVCCSWLMEMDCSTREVGQKRGRLLADLEEDEQPKKKGFKNFSKTARELVHRMQKIDSDYYLEVLGSNYQSRLLEVIDSSELPEFLGGSCTCSDKGGCLGSNKGPWNDRYILKWQGLLSDTSNAESGSDVDDFGASFVQFMRK

SEQ ID NO: 19088 - protein, 274 aa, Zea mays
  VARIANT 250: note = Ancestral polymorphism is V, Derived polymorphism is D
  VARIANT 174: note = Ancestral polymorphism is S, Derived polymorphism is P
  VARIANT 163..274: note = Derived polymorphism lacks residues 163 to 274
  VARIANT 69: note = Ancestral polymorphism is R, Derived polymorphism is H
  VARIANT 64: note = Ancestral polymorphism is H, Derived polymorphism is Y
  VARIANT 51: note = Ancestral polymorphism is R, Derived polymorphism is H
  VARIANT 49: note = Ancestral polymorphism is A, Derived polymorphism is V
  VARIANT 18: note = Ancestral polymorphism is A, Derived polymorphism is T
MEVATATEASAPAASGGAAGQGHPFPWLDAAISEPYYFLHLLAFFSYFAARSAALSADDGGELHDRLLRREIQAVLVFLVLFVVKIVKEETWEAVIADSLLYAKGLLLAVTLVIDWWLAFAYFLGFLVIYAVAQQPPYDGLGHSNHLTPLQLESLLTEEPTSRFWLVEFRTSFSAKCVQASSILPELSIVYSNKNISFGTIDLGHFPNAAAKFGISMWDHLPTYILFDKVTEVSRFPEITSESKVFVPKVTKVIFITFCSHGLSYFSLFIDQST

SEQ ID NO: 19089 - protein, 138 aa, Zea mays
  VARIANT 28: note = Ancestral polymorphism is Q, Derived polymorphism is K
MASMQKSREQRAQAAAQKAADELHASRQDRVPEEAPVSPRGGGGILGSLQEGKANARGVADAAMGKASETKDAAADKAGGVRDAAADRTGNNKAGAAESEEDVMLRVKAADQMTGQAFNDVGTMGEEGTGVPRRRRSG

SEQ ID NO: 19090 - protein, 561 aa, Zea mays
  VARIANT 275: note = Ancestral polymorphism is R, Derived polymorphism is W
  VARIANT 29: note = Ancestral polymorphism is P, Derived polymorphism is L
MEEQNSWLRTKFSNTVYARVDPRRVPVAPLSKDVERKLHKFFKMKKTVSMPVDRDDGDTGTAFKHCASLPLVRSQPQLDREKVNKPERASLEIPSSSQMISESCKTPKARSLVKTPSSMMLLSYLNKSPSNQGHSSHKAYGSRPRSKSPLPSIVPSEVFREAKSSSQRFASPPPQRGGSAKSIYGKSFGRQVSDMGQSPRWRSTPVVSGKHKSQKDNAWTRKYSGGRRVSAVNPADDRRAQMVRMNQAVQTTVDWTLDPSKLLVGHRFASGAYSRLYRGYYDDNPVAIKFIRQPDDDDNGKMAAMLEKQYNSEINSLSHLYHKNVIKLVAAYKCPPVFYIITEFLPGGSIRSYLNNPENHPIPLERTISIALDVARGLEYIHSQGIVHRDIKPENILFDENLCVKIADFGIACQEALCDVLVEDEGTYRWMAPEMIKQKAYNRKVDVYSFGLLLWEMVSGRIPYENLTPYQVAYAVANRKLTPTISPECPPALRSLIEECCALRPDKRPDFWQIVKVLEQFHSVLLQGGCLDIPKSGPGTCQDPKKRLMRWIQKLKPKHSA

SEQ ID NO: 19091 - protein, 152 aa, Zea mays
  VARIANT 85: note = Ancestral polymorphism is T, Derived polymorphism is I
  VARIANT 83: note = Ancestral polymorphism is R, Derived polymorphism is Q
  VARIANT 80..152: note = Derived polymorphism lacks residues 80 to 152
  VARIANT 79: note = Ancestral polymorphism is R, Derived polymorphism is Q
  VARIANT 74: note = Ancestral polymorphism is A, Derived polymorphism is V
  VARIANT 69..152: note = Derived polymorphism lacks residues 69 to 152
  VARIANT 54: note = Ancestral polymorphism is D, Derived polymorphism is N
  VARIANT 48: note = Ancestral polymorphism is L, Derived polymorphism is I
  VARIANT 45: note = Ancestral polymorphism is M, Derived polymorphism is I
  VARIANT 43: note = Ancestral polymorphism is I, Derived polymorphism is T
MTEGPTIQSDKALVLVSNKLGAGNPHAAHLSVYVSALPPHQEIGMLSLSPTMTDVYLLLGARAYWLLRRGHAMALLGARRDGRHTHLQRGARVCCACLRAVEKRGQSGSEPSARYYIHPLPHANVLQILQLLLENGIRVNELTRIEVALVVP

SEQ ID NO: 19092 - protein, 142 aa, Zea mays
  VARIANT 38: note = Ancestral polymorphism is G, Derived polymorphism is R
  VARIANT 22: note = Ancestral polymorphism is F, Derived polymorphism is L
MARLGAGAVLALLVAVAAVAAFLAVPASAKSGELSAMGLLAAKGGSGAGPQKCSGAVGECDVDEAEELGLSGGGLGSDDAVRRTLAQRKPTNRYISYAALRADQVPCNKRGRSYYSNCEAQKAANPYRRGCSAITRCARNMN

SEQ ID NO: 19093 - protein, 330 aa, Zea mays
  VARIANT 48: note = Ancestral polymorphism is T, Derived polymorphism is I
  VARIANT 131: note = Ancestral polymorphism is V, Derived polymorphism is I
  VARIANT 144: note = Ancestral polymorphism is P, Derived polymorphism is L
  VARIANT 164: note = Ancestral polymorphism is G, Derived polymorphism is E
  VARIANT 168: note = Ancestral polymorphism is I, Derived polymorphism is V
MASAAPAPKPGVLLLRRTDADFAAALRARFRVHDLHASGAPLGAFLATAAAEPEPPRAALVMAGGDVLVDAAFLDAVPSLGCVVTTSAGVDHVDLAQCARRGVAVAGAGEAFSVDVADHAVGLLVAVLRRVAAADRYVRAGLWPAQGDYPLTTKLSGKRVGILGLGSVGSLVAKRLQAFGCAVSYHSRARKASVAYRYFPDARALAAGSDALVVACALNDATRRVVGRHVLDALGPGGVLVNVARGGVVDEQELVAALRDGRIAGAGLDVFQDEPHLPPGLGGMDNVVLTAHQAAFTEESSADLRELMIGNLEAFFSGKPLLTPVMTRPQ

SEQ ID NO: 19094 - protein, 172 aa, Zea mays
  VARIANT 117: note = Ancestral polymorphism is A, Derived polymorphism is S
  VARIANT 92: note = Ancestral polymorphism is P, Derived polymorphism is A
  VARIANT 91: note = Ancestral polymorphism is T, Derived polymorphism is N
  VARIANT 64: note = Ancestral polymorphism is D, Derived polymorphism is G
  VARIANT 58..172: note = Derived polymorphism lacks residues 58 to 172
  VARIANT 52..172: note = Derived polymorphism lacks residues 52 to 172
  VARIANT 43: note = Ancestral polymorphism is L, Derived polymorphism is S
  VARIANT 31..172: note = Derived polymorphism lacks residues 31 to 172
  VARIANT 17: note = Ancestral polymorphism is T, Derived polymorphism is I
  VARIANT 15: note = Ancestral polymorphism is G, Derived polymorphism is R
  VARIANT 8: note = Ancestral polymorphism is G, Derived polymorphism is S
MQGKDMIGRARIGTGKTLAFGIPIMDKILSYNEKNGNPLAIILAPTRELARQVEKEFRESAPLDTLSVYGGVPINQQMRALKYGVDIVVGTPGRVIDLLRRGVLNLSQIQFVVLDEADQMLAVGFDEDVEVIMEQLPQNRQSMLFSATMPSWIRKISNKYLKDPVIIDLLVL

SEQ ID NO: 19095 - protein, 393 aa, Zea mays
  VARIANT 370..393: note = Derived polymorphism lacks residues 370 to 393
MAPAPSSSKAATCKPARASWHSGTSHRPPQAGASRHSAARSTTPAARSTAPSARPPGAPAPRPPPAHPPSPRPQLEQGQAAKHQPPALRSPSPVPVQFARQAVSDQAGQPWPLDVYVHSLQNLGANTPRPAANVCVTISDLKTEERKQKLSRYGKKKIKRNFGKKIKYECGKALADSQPRLAHLQGLHFWILVSTTRNIQRQHEWLPKGWVMEVRAGGEKANKMYKFYVHSITGLRLLSKQDVLLYINEAKVSGCDTNGQCDTTSEDNILSKVDFRPSGLPEGWVKELVYRKTMEGLIKRDPYYTDPASSYTFRTLKSALSFLETGKVSERAFIQRTSVHDLYSFEISADMVIVLLVFSLSSENLHDILCSSCLHFGHYHAEIKGSEFCFLAT

SEQ ID NO: 19096 - protein, 266 aa, Zea mays
  VARIANT 137..266: note = Derived polymorphism lacks residues 137 to 266
  VARIANT 119: note = Ancestral polymorphism is P, Derived polymorphism is L
  VARIANT 111: note = Ancestral polymorphism is K, Derived polymorphism is R
  VARIANT 110: note = Ancestral polymorphism is A, Derived polymorphism is V
  VARIANT 87: note = Ancestral polymorphism is P, Derived polymorphism is L
  VARIANT 82: note = Ancestral polymorphism is L, Derived polymorphism is M
  VARIANT 76: note = Ancestral polymorphism is I, Derived polymorphism is F
  VARIANT 74..266: note = Derived polymorphism lacks residues 74 to 266
  VARIANT 69..266: note = Derived polymorphism lacks residues 69 to 266
  VARIANT 60: note = Ancestral polymorphism is G, Derived polymorphism is E
  VARIANT 59: note = Ancestral polymorphism is G, Derived polymorphism is V
  VARIANT 52: note = Ancestral polymorphism is G, Derived polymorphism is A
  VARIANT 51: note = Ancestral polymorphism is K, Derived polymorphism is N
  VARIANT 48..266: note = Derived polymorphism lacks residues 48 to 266
  VARIANT 43: note = Ancestral polymorphism is D, Derived polymorphism is Y
  VARIANT 36: note = Ancestral polymorphism is C, Derived polymorphism is Y
  VARIANT 33: note = Ancestral polymorphism is A, Derived polymorphism is V
  VARIANT 17: note = Ancestral polymorphism is S, Derived polymorphism is I
MSSNDVKKVVDGAVRASKEIMDEEMDEDVIVKVVDCSNQSEVDIELKQFIKGYSDGSKGGDDHLLMLKLKEWPRPIVLEAFLLCQRPEFIVNFPLVDFIHPRWGLLNLAAKLPPDALQPELGMKLLIAHGSHQELGKGDSMTNLMINMCDVVHMLMHATEVHYQCPKRFKLCKVRSVQFGQKGIPYLNTYDGRTIRYPDPLIKANDTIKIDLETNKIMDFIKFDVRNVVMVTGGRNTGRVGVIKHREKHKGSFETIHVLLGVFCYV

SEQ ID NO: 19097 - protein, 226 aa, Zea mays
  VARIANT 37: note = Ancestral polymorphism is R, Derived polymorphism is K
  VARIANT 38: note = Ancestral polymorphism is P, Derived polymorphism is L
  VARIANT 39..226: note = Derived polymorphism lacks residues 39 to 226
  VARIANT 48: note = Ancestral polymorphism is P, Derived polymorphism is H
  VARIANT 63: note = Ancestral polymorphism is F, Derived polymorphism is S
  VARIANT 68: note = Ancestral polymorphism is A, Derived polymorphism is V
  VARIANT 73: note = Ancestral polymorphism is S, Derived polymorphism is C
  VARIANT 74: note = Ancestral polymorphism is G, Derived polymorphism is R
  VARIANT 79: note = Ancestral polymorphism is A, Derived polymorphism is V
  VARIANT 93: note = Ancestral polymorphism is L, Derived polymorphism is V
  VARIANT 98: note = Ancestral polymorphism is T, Derived polymorphism is A
  VARIANT 101..226: note = Derived polymorphism lacks residues 101 to 226
  VARIANT 104: note = Ancestral polymorphism is E, Derived polymorphism is K
  VARIANT 113: note = Ancestral polymorphism is S, Derived polymorphism is L
  VARIANT 114: note = Ancestral polymorphism is R, Derived polymorphism is M
  VARIANT 129: note = Ancestral polymorphism is F, Derived polymorphism is S
  VARIANT 143: note = Ancestral polymorphism is G, Derived polymorphism is S
MIALSCVYDGGDEEKEMDAAREIGWRRKFTKRGRVIRPGIIRMNGKCPLTPLEVGLMLRGMGSSNKTAIFLASGKIYKAEKNMASLLEMLPLLQTKETLASEEELAPFKNFSSRMAAVDYSICAQSEVFVTTQGGNFPYFLMGHRRYLYGGHSKTIKPDKRRLAVLFNNPRIGWTALKRHLLNMRAHSDVKGIEMKRPNESIYTFRCPDCMCRLNRTEHSKSKQSR

SEQ ID NO: 19098 - protein, 242 aa, Zea mays
  VARIANT 12: note = Ancestral polymorphism is G, Derived polymorphism is E
  VARIANT 16: note = Ancestral polymorphism is V, Derived polymorphism is A
  VARIANT 23: note = Ancestral polymorphism is G, Derived polymorphism is E
  VARIANT 25: note = Ancestral polymorphism is H, Derived polymorphism is P
  VARIANT 43: note = Ancestral polymorphism is R, Derived polymorphism is L
  VARIANT 61: note = Ancestral polymorphism is N, Derived polymorphism is D
  VARIANT 77: note = Ancestral polymorphism is G, Derived polymorphism is R
  VARIANT 88: note = Ancestral polymorphism is R, Derived polymorphism is C
  VARIANT 98: note = Ancestral polymorphism is P, Derived polymorphism is L
  VARIANT 129: note = Ancestral polymorphism is R, Derived polymorphism is C
  VARIANT 153..242: note = Derived polymorphism lacks residues 153 to 242
MEESLCAVEKRGRVHVITLTGAEEHRLSPALLSALRSAVAAARRASPGALVLAGEGKFFSNGYDLAWARAGPAPAPGHRLSEMRAAFRGLVADLLALPVPTVAAVTGHAAGAGCALALAHDAVAMRASRGFLYMSEVDAGIKIVDFVGELVRQKVPDAAARRDLVMKGEKMTAAQAARRGIVDAAVDGGVEDVVAAAVAMAEELAARDWDGENLAAIRKDAWPVLWSKVKDYGGDVLARPRL

SEQ ID NO: 19099 - protein, 213 aa, Zea mays
  VARIANT 188..213: note = Derived polymorphism lacks residues 188 to 213
  VARIANT 184: note = Ancestral polymorphism is C, Derived polymorphism is Y
MENRDESQQATQGGRGSGVGAGRGVPRQGFQYSGPNQLRAGYGGGRHQSRGRTWAWPGQGRGAHLPAGGRGEERPQTDGGGSCFPQPPTGNTAGHGSSSGTIVPAGVSDQAGLATILQQALTALQGMNAEKAVGEPRAADHKQASANAGPLLPSASAKEEKKITVNKEKEGTKEEGKLNSKGYCHRCYGKGHVMSECTAELFCEVCGTDTISS

SEQ ID NO: 19100 - protein, 342 aa, Zea mays
  VARIANT 19: note = Ancestral polymorphism is W, Derived polymorphism is L
MGARATMGCSPLLPFQALWLTAAVVAALALAAGAQPSPSLSPGFYDATCPGLQPIVRRGVARAVRAEPRMGASLLRLFFHDCFVNGCDASVLLDDVPGNFTGEKNAGPNANSLRGYEVIDAIKAQVEASCKATVSCADILALAARDAVNLLGGPRWAVPLGRRDARDASAGAANANLPPPDASLPALLSAFGAKGLDARDLTALSGAHTVGRARCAVFRAHIYNDTATTDASFAAGLRGAVCPYTGGDANLAPLEPQAPDAFDNGYFRDLVARRVLLRSDQALYGSGGDGGNTTDALVRAYAANGTAFAADFAAAMVRMGNLGPPAASAAAAEVRLNCRRVN

SEQ ID NO: 19101 - protein, 515 aa, Zea mays
  VARIANT 198: note = Ancestral polymorphism is P, Derived polymorphism is L
MVRMAGKGGSSNGGGGGRESKKPALLLGRYEVGKLLGQGNFAKVYHARSVRTGEEVAIKVMEKEKILKSGLMAHIKREIAVLRRVRHPHIVQLYEVMATKLRIYFVMEYVRGGELFARVARGRLREDDARRYFQQLVSSVAFCHARGVYHRDIKPENLLLDDAGELKVTDFGLSAVAEQMRHDGLFHTFCGTPAYVAPEVLSRRGYDAAKADLWSCGVVLFVLAAGYLPFRDRNLVAMYRKIHRGEFRCPRWFSPGLTRLLRRVLDTSPPRRATAAEIMGDEWFKVGFRRFSFRVEDDRSFTRFDLDDDASTSPPEPDTPRADAAAAGREKPRRVAAGLTSCASAPSLLQLEARGGSSSSSSSSSSSRRRSSLNAFDIISFSRGFDLSGLFEGGGAPEQPPHPAAARFVSAAPAERVLAALEAAASAAGMAVRGRDDSSVSIEGTREGEHGALAVAAEIYELTPELLVVEVRRTSGGAADYEEFFRARLRPSLRDLVCDEDEPTLLQSDERSRSL

SEQ ID NO: 19102 - protein, 507 aa, Zea mays
  VARIANT 195: note = Ancestral polymorphism is L, Derived polymorphism is S
  VARIANT 185: note = Ancestral polymorphism is R, Derived polymorphism is C
  VARIANT 182: note = Ancestral polymorphism is D, Derived polymorphism is Y
  VARIANT 174..507: note = Derived polymorphism lacks residues 174 to 507
MAAAVASLYRRVLPSPPAVDFASPEGKRLFAEALAAGTMEGFFPLVSVFQTQSEPAFCGLASLAVVLNALAIDPGRRWKGPWRWFDESMLDCCEPLDKVKAEGITFGKVACLAHCSGADVQSFRTNRVTIHDLRRHLIRCVSSQDCHLIASYHRRPFGQTGTGHFSPIGGYHAGQDMVLILDVARFKYPPHWVPLQLLWEAMNTTDDSTGLLRGFMLISRKVAAPSLLYTVSCRDENWKRMSKYCVEDLPSLLKAGNLDDVPALLSRLIESLPADAESLIKWVVEVRRKEEGGPSLNKEEKERLFLKENVLKQVRDTRLFTIVHDLQYANKPCYNCSSSSEDDSLTRIAAVVCCQGAAMLSGNLVPRDAFCCRETSFECVQANGDGLKTVISGSVVCEGSEQGVDMLLPMSSPGASSCNSNLKSNAVKYPSSVDVLTVLLLALHPNTWLGIKDEKLKAEFQTLISTDSLPDDLKREILHLRRQLYYLKACKEEECEDAEQPSPKQQC

SEQ ID NO: 19103 - protein, 113 aa, Zea mays
  VARIANT 92..113: note = Derived polymorphism lacks residues 92 to 113
  VARIANT 74..113: note = Derived polymorphism lacks residues 74 to 113
  VARIANT 70: note = Ancestral polymorphism is D, Derived polymorphism is Y
  VARIANT 3..113: note = Derived polymorphism lacks residues 3 to 113
MLCLSKELSSVQNTPLHLSVLGGSPSKRSTTRTALPQDSSISVVVPIQRRAGGSDAGDDPAEVYKYMLVDVTCQRYTVSTGTHFIFFMFFSWRKYLRQHFHRLFSIWGLFHAT

SEQ ID NO: 19104 - protein, 587 aa, Zea mays
  VARIANT 301: note = Ancestral polymorphism is P, Derived polymorphism is L
MPTASSAHRSLLLCLCLALLSNPVAASPSPRGLRFSAKDIAAVEAALPRHGSRASSSSKTTFFEVDRPLRPPRGSSGPCSTLLLSHSFAFTLTKPPVTAAYSPPPCLSGSDAPPVSLAVLEWRAECRGAQYDRTFGVWLGGAELLRGSTAEPRPGGVVWSVSKDVTRYAALLAAGNATLAVYLGNLIDDTYDGVYHANLTLHLYFRRGVRPSAAAAAADAVVPVSRSLPLNDGLWFVVQNDTDVQSARVSVPRNAYRAVLEVYVSSHDADEFWYMNTPEQNGPFREVTVLLDGAVVGAVWPFPVIYTGGINPLIWRPITSIGSFNMPTYDIELTPFLGSLLDGEEHELGFAVTNAQRSWYVDANLHLWLDPKSSRTSGGLVAYHAPKLAGSIVSRSADGVDGEYAATASRNITATGWVSSSRGNVTTTFAQRLSFSNTNVVSGQGSAQAINQTTDALTAVSGGPAPAQVHQSFPLYIFLGGDGSGTSSQRLMRRVEIGFDETRSRGGGGAGGEGAASTTTSTLRNSQVAAAEVTLRDDAVVGASWRMHQTYEYGASDGGCYLRNVSSVGYDVLFDHRDASCAGTLGR

SEQ ID NO: 19105 - protein, 1395 aa, Zea mays
  VARIANT 57..1395: note = Derived polymorphism lacks residues 57 to 1395
  VARIANT 251..1395: note = Derived polymorphism lacks residues 251 to 1395
MPLVRFEVRNEVGLGDPGLYGGGAAAAAAATAAAGEEEPKALLEGVAVAGLVGILRQLGDLAEFAADVFHDLHEQVIATSARGRKVLTRVQNIEAALPSLEKAVKNQKSHIHFAYVPGSDWHTQLQNEQNHLLATDLPRFMMDSFDNAGAGACVKRYSDPSYFKKAWDTMRADKNANVQREKRSQKIKRKGSRLREPYHGQAMPRHRGTEFQRSLTAGQLVNRCCTSHTLRYNNFVSVIIFYGCSLLIFEWHIQNSIFNSVFSSRQFASPSNDGQGISEHKSTPDARSNPDNMSRSSSLSSKTQLSSVEQAIDTKPSAVSHENGHGKSLDTKLHKPGGLPSPVLLNSTTVDDHSDHLKQGSPPDGMVARSPYVKWDEKTAIIMSTSSIYCDDVVMDEVEDAEPTCISSVQKETDHKVMDTLHQQDALLKKTKSLLVPSVLNHHDDIPGEADNYMDALNTLESETETESEFQTKNRVPAPSFKAEAPQVGAIDNIVPQCLDSSAADFIDTCQESDIICTSERAIDFPSLSNADSLEVSQLELSDYTSVSPYKESSVITNIHESGAEGARGDPCEIIEPLQVHSAILANDGSPVCNEIPKSKPDDDLGYFQEIPQPGFSTCMVIPSNKESAVANKNLEGDAESDDDLIDGTADNVVSGPKIANMVVDEVGFKMAPANRSSPGDPSDDSCVIPESRPQDYAVKSYEGVGDCGVTEVSKLCSEPLNKPSDNICATQDVPTNTSTMSAGASEVSSSWSEPVTELIDDRCATQGVPANASTTSTVVPSVKLWTNAGLFGLEPSKPPVFGNGPREDTPPGFKEAQPVHSTEFTEVHCSKPTESAAVDVPNGNTSITSSFVEKLVGIRPGSANLNSSGANQSAARIPDPIHSHTDGHSDFSSSFEHNNMTGKHTSISELLEFEGSADTGTKIYSTDMRNNAVSASSFSSIAQRFLANTLQRRTSKYTDLPMSSERANADTSAKSESTLNPVVEPSEAVFAEETKFENKTENGMDGLSKTSIFSSRHYSEKSSPPLEYMKISFHPMSAFEMSKLNLDFCDGNIHEISDDMMLPTFQLLSESSIPQPGSGSESEDDTFGRSYSYSSYDDLSPRLYSNSEAWDQDDGTGLEEHELYDDSNQIGSSTAPLSSYMGFEQMNLSDMKSDISLANIGDQNVIGTLQSCTVEELPNFDTLMSRSDDQNGETPIPHNLGNMTPDEDQLPPPPPLPPMQWRMTRQTTSLEEETCITTKDMLRKTSSLPHIHTSAQEEHCPPTAPLDLQGHAGEVGVQKTGGVREITNPPSIIDIKSSLLQQIRDKSEQLKLNGHERSKKAVGGDIKSLDEREELLQQIRSKTFNLRRTNASKADGSSQSTASSNVAAILEKANAIRQAVASDEGGDDDTWSDI

SEQ ID NO: 19106 - protein, 112 aa, Zea mays
  VARIANT 28: note = Ancestral polymorphism is T, Derived polymorphism is S
  VARIANT 31..112: note = Derived polymorphism lacks residues 31 to 112
  VARIANT 47: note = Ancestral polymorphism is I, Derived polymorphism is T
  VARIANT 80: note = Ancestral polymorphism is D, Derived polymorphism is Y
  VARIANT 99: note = Ancestral polymorphism is P, Derived polymorphism is H
MVATKKTKKSTDNINNKLQLVMKSGKYTLGYKTVLRTLRNSKSKLVIIANNCPPLRKSEIEYYAMLAKVTVHHFHGNNVDLGTACGKYFRVCCLSIIDPGDSDIIKTTPGEQ

SEQ ID NO: 19107 - protein, 126 aa, Zea mays
  VARIANT 89: note = Ancestral polymorphism is R, Derived polymorphism is G
  VARIANT 86: note = Ancestral polymorphism is G, Derived polymorphism is R
  VARIANT 84: note = Ancestral polymorphism is P, Derived polymorphism is S
  VARIANT 82: note = Ancestral polymorphism is K, Derived polymorphism is N
  VARIANT 50: note = Ancestral polymorphism is Q, Derived polymorphism is R
  VARIANT 45..126: note = Derived polymorphism lacks residues 45 to 126
  VARIANT 38: note = Ancestral polymorphism is A, Derived polymorphism is V
  VARIANT 35: note = Ancestral polymorphism is S, Derived polymorphism is L
  VARIANT 10: note = Ancestral polymorphism is R, Derived polymorphism is C
  VARIANT 9: note = Ancestral polymorphism is Q, Derived polymorphism is L
  VARIANT 4..126: note = Derived polymorphism lacks residues 4 to 126
MGSQAIEAQRAGTEVRLPLGLLPLADMEEVGRQVSYAAEVTAYIEDRRMQRITRVKTKELLIWVTLSDMFIDGDDPSRITFKTPTGLGRTYPVSAFAKEGATDTEAKPKDAPATTVAANGEAAASK

SEQ ID NO: 19108 - protein, 399 aa, Zea mays
  VARIANT 5..399: note = Derived polymorphism lacks residues 5 to 399
  VARIANT 11..399: note = Derived polymorphism lacks residues 11 to 399
  VARIANT 29..399: note = Derived polymorphism lacks residues 29 to 399
  VARIANT 69: note = Ancestral polymorphism is V, Derived polymorphism is G
  VARIANT 72: note = Ancestral polymorphism is P, Derived polymorphism is L
  VARIANT 80: note = Ancestral polymorphism is S, Derived polymorphism is Y
  VARIANT 128: note = Ancestral polymorphism is G, Derived polymorphism is C
  VARIANT 169..399: note = Derived polymorphism lacks residues 169 to 399
  VARIANT 204: note = Ancestral polymorphism is S, Derived polymorphism is F
  VARIANT 207: note = Ancestral polymorphism is E, Derived polymorphism is K
  VARIANT 252: note = Ancestral polymorphism is N, Derived polymorphism is H
  VARIANT 271..399: note = Derived polymorphism lacks residues 271 to 399
  VARIANT 320..399: note = Derived polymorphism lacks residues 320 to 399
MHGSQLRVAYQGVPGCDAIPCDQFEVAFQAVELWIADRIVLPVENSLGGSIHRNYDLLLRHRLHIVGEVQLPIHHCLLASAGNVAAMHHGSMYGPRSYKGRQQGSKFGGSTTSWSSAGRRFGTIDLSGNQQRGSMPFGSHNGSLEFMNEQNHGPRATKPKIQGTENTSGDERSEKIVPLIDSELYNRSDFITEYKDVKFFVIKSYTEDHVHRSIKYKVWASTANGNRKLDSAYHAAKEKEEHYPIFLFFSVNGSGQFCGVAEMIGPVDFDRSVDYWQQDKWSGQFPLKWHIIKDVSNNLLRHIILENNDNKPVTNSKDTQEVQLGWHDAGTYDKNIIEWPKCSGANGSLRFKFELKHGANADLVNALKLIPPSTTSEPHPRSMPVAPSSPFHLSAPIRA

SEQ ID NO: 19109 - protein, 125 aa, Zea mays
  VARIANT 98: note = Ancestral polymorphism is D, Derived polymorphism is N
  VARIANT 59: note = Ancestral polymorphism is G, Derived polymorphism is E
  VARIANT 52: note = Ancestral polymorphism is P, Derived polymorphism is S
  VARIANT 45..125: note = Derived polymorphism lacks residues 45 to 125
  VARIANT 33: note = Ancestral polymorphism is S, Derived polymorphism is I
  VARIANT 27: note = Ancestral polymorphism is R, Derived polymorphism is C
  VARIANT 5..125: note = Derived polymorphism lacks residues 5 to 125
  VARIANT 2: note = Ancestral polymorphism is R, Derived polymorphism is C
MRKIYASYLLQFEKPRMPPVRVVGVIRGSEKPSIFVPANEPNSGQWFYVDVPMIARACGLPENTVYIEDINEDVSPTNPYPVPKDVNTLIRHSVMPDDHLKYTFTWYTFNPKLIANLQLYYILIC

SEQ ID NO: 19110 - protein, 580 aa, Zea mays
  VARIANT 4: note = Ancestral polymorphism is R, Derived polymorphism is W
MGVRLPVAWSAVLVLLVRAAVAREYAAIFNFGDSLVDAGNLVVDGIPDYLATARLPYGMTHFGYPTGRCSDGRLVVDFIAAQELGVPLLPPSKAKNATFHRGANFAITGATSLDTPFFVERGLGKTVWNSGSLHTQIQWFQDMKPKLCGQEQECRDLFRRSLFIVGEFGGNDYNSPLFAFRPLAEAHDMVPHVVESIGRGVERLIAEGAAELVVPGVLPIGCFPVYLSIFRRQPAGGYGARSGCVKELNTLSWVHNAALRRKVEELRARHPGVRIVYADYYTPAIQFVLHAEKYGMLKQTPRACCGAPGVGDFGDSYTDTGNKVILYGPAAADLWINKPPFGMTFFGHPAGRLSDGRLVIDFIAQALGLPLLPPSLAKDQSFKQGANFAVAGATVLKTSTTSPALYPQLAVAGGAVPPPNNISLADELGWFDAMKPALCGSPQACKDYFAKALFVVGELGWNDYGVMVKLINDGATTVVVSGISPMGCAPGNLVLLASQDPADYEPDTGCLKGMNELSRDHNAQLSQALTTLGGRYPGARVTYADLYGPVIAFATAPARFGFDSALRACCGGGGGNIAQV

SEQ ID NO: 19111 - protein, 257 aa, Zea mays
  VARIANT 60..257: note = Derived polymorphism lacks residues 60 to 257
MQHVILCLQISLLLSSFSYSMQAQYTSIFSFGDSYTDTGNKALGLPLLPPSLAKDQSFKQGANFAVAGATALKTSTTSSALYPQLAVAGSAVPPPNNISLADELGWFDAMKPALCSSPQACKDYFAKALFVVGELGWNDYGVMVKLINDGATTVVVSGISPMGCAPGNLVLLASQDPADYEPDTGCLKGMNELSRDHNAQLSQALTTLGGRYPGARVTYADLYGPVIAFAAAPARFGFDSALRDCCGGGGGKPILFY

SEQ ID NO: 19112 - protein, 940 aa, Zea mays
  VARIANT 745..940: note = Derived polymorphism lacks residues 745 to 940
MAMAMARFLSWLFTCFAALAVLEATVPARSWRAPSPTPRHEARRFEQKTDRFWEYQEQSNTWVQVRAPFDLMSCINGTCTKVGSIGRLAREPGRHGLPPVQSQEEEEEDTRRVQGDGAEEDPVLPVRRRISLTRMSESSVWVTGQSGSIYERFWNGVVWVIAPHELPASAGYATATFIVNTTILALSEAGTLYQLQLNEHAQPIWTEMAFNSSQQSANLGLKTQSQAMRIRNGIVSNDGRKLFLSIMNGSLLEVTEIQPLRWNYHGRPPGADVSYISDAGNLRPGTLFTVSSTGDLYEFDKETKPSWKKHIWSEELAKNISLKSSAGFALHGLSGSNSVSLFLISKDGLLVERRLHRRKWKWDKHGAPTGQRLSSIAEVQKDELNDATSMFLTTTTGKVYEYQFPKYTGGAQSNKIRGQWINHMSPEHAKVARNVPGVHVQVGRMVFPLDDGRLGELHFPGMGGTDFGPSAQSTIRRKLSNKYEWSILDAPETEGWNAEYCTEEHGPTNCISGAKNIAADTESNDLSNNPPSRRRKVEEKQHYLNVNRYQQSDETESYNFLSRTIDLNFHMRVMHADRSLFLIADNGLTFEYLNSNGVWLWLRHEHVTAMKGTLGSYNGSLYLVDVHGNLHIRERNGDELLWINCTAMKKGRQVASGSPWDGIPGLLRRVTTDDALFFVNKRGRLLQFTVALRKFKWKDCHSPPDTKIAFIVDQEVFRRNIIFVVGRNGRLYQYNRITELWHRHYQSPHLFLSCSPGTAMRPSPLSLAGSLFMVSEHGGLVEYHFSPQDGWEWVEHGTPHRGVTLVGAPGPCFDGSQLFVVGSDGHVYRRHMEGRTWRWTSHGHPPSEPAAVDEQSCATPDTGAGAHYADGFRGSCDGKVAAVRPVPFSEDAVVFELRDGRLAELRRPPSADGCGGWEWARIIGTPASACMTSYWTAVAT

SEQ ID NO: 19113 - protein, 365 aa, Zea mays
  VARIANT 32: note = Ancestral polymorphism is S, Derived polymorphism is R
MYHPQCELLTMAHETPDLDAGQPHLTVSGVASIPAELSFHLLHSLDAAAAVNPVTAPPQSTIDYFLGGADPHQQAMQYEPLPPAAGGHHQYTMDMFRDYCDGHYPTAEPYIRGTMTGALVFGATDDDDSAAAYMPGGHFETSPPPPRATGRGRKRGRALGGGFHAVLANGVEKKEKQRRLRLTEKYTALMHLIPNVTKTDRATVISDAIEYIQELGRTVEELTLLVEKKRRRRELQGDVVDAAPAAVVAAAGEAESSEGEVAPPPPAVPRQPIRSTYIQRRSKDTSVDVRIVEEDVNIKLTKRRRDGCLAAASRALDDLRLDLVHLSGGKIGDCQIYMFNTKIHKGSSVFASAVAGRLMEVVDEY

SEQ ID NO: 19114 - protein, 295 aa, Zea mays
  VARIANT 2: note = Ancestral polymorphism is K, Derived polymorphism is Q
  VARIANT 18: note = Ancestral polymorphism is S, Derived polymorphism is C
  VARIANT 33: note = Ancestral polymorphism is D, Derived polymorphism is N
  VARIANT 179..295: note = Derived polymorphism lacks residues 179 to 295
MQHVILCLQISLLLSSFSYSMQAQYTSIFSFGDSYTDTGNKVILYGPAAADLWINKPPFGMTFFGHPAGRLSDGRLVIDFIAQALGLPLLPPSLAKDQSFKQGANFAVAGATALKTSTTRPALYPQLAVAGGAVPPPNNISLADELGWFDAMKPALCGSPQACKDYFTKALFVVGELGWNDYGVMVKLINDGATAVVVSGISPMGCAPGNLVLLASQDPADYEPDTGCLKGMNELSRDHNAQLSQALTTLGGRYPGARVTYADLYGPVIAFAAAPTRFGFDSALRDCCGGGGGKI

SEQ ID NO: 19115 - protein, 675 aa, Zea mays
  VARIANT 492..675: note = Derived polymorphism lacks residues 492 to 675
  VARIANT 491..675: note = Derived polymorphism lacks residues 491 to 675
MSHRQPAPMPDTLSDAFAAAVLLSSTDKPDTLPPGRLSPVSPLPHSSSKHGHQHPHPTPSSSSGSSGSVSRSLLAPASSLASRRSHSGEIPLPSDAPPRGTARPGHRRTGSGPLIFTSGACSSSATSPLTNALPAGNICPSGRLAKPLPSSCSAATPPPPPRASRHDVLGSGTANYGHGSIVRSRAATDDDAVLRRAMSAADPEELKRAGNDQYRKGCFEEALRLYDRALALCPDNAACRGNRAAALIGLHRLGEAVKECEEALRIDPSYGRAHHRLASLHIRLGHIEDALKHLSLAIPQPDLLELHKLQTVEKHFGRCLDARKAGDWKSVLRESDAAIAAGADSSALLLAARAEALFRLNLLDEADVAISSASKLNYTSSCSPDTKFCGFIANAYLFYVHAQVDMALGRFDHAVSSIDKARIIDPGNTEVITMHNKVKSVARARSLGNELFNSGKFSEACVAYGEGLKQHPVNKVLYCNRAACRFKLEQWEKSIEDCNEALKIQPNYTKALLRRAASYGKMERWAESVKDYEILRKELPSDTEVAEAYFHAQIALKSSRGEEVSNMKFGGEVEAIIGMEQFQLATSLSGVSVIHFMAASNQQCCKISPFVNTLCTRYPSVNFLKVDVNESPAVARAENVRTVPTFKIYKNGIRVKEMICPSQQLLEYSVRHYGI

SEQ ID NO: 19116 - protein, 253 aa, Zea mays
  VARIANT 234..253: note = Derived polymorphism lacks residues 234 to 253
  VARIANT 178: note = Ancestral polymorphism is H, Derived polymorphism is P
  VARIANT 157: note = Ancestral polymorphism is T, Derived polymorphism is M
  VARIANT 155: note = Ancestral polymorphism is G, Derived polymorphism is D
  VARIANT 154: note = Ancestral polymorphism is V, Derived polymorphism is I
  VARIANT 118: note = Ancestral polymorphism is H, Derived polymorphism is Y
  VARIANT 107: note = Ancestral polymorphism is R, Derived polymorphism is C
  VARIANT 106: note = Ancestral polymorphism is R, Derived polymorphism is W
  VARIANT 76: note = Ancestral polymorphism is A, Derived polymorphism is T
  VARIANT 66: note = Ancestral polymorphism is G, Derived polymorphism is D
  VARIANT 64: note = Ancestral polymorphism is R, Derived polymorphism is Q
  VARIANT 62: note = Ancestral polymorphism is R, Derived polymorphism is W
  VARIANT 42: note = Ancestral polymorphism is A, Derived polymorphism is V
  VARIANT 32: note = Ancestral polymorphism is P, Derived polymorphism is L
  VARIANT 29: note = Ancestral polymorphism is V, Derived polymorphism is M
MVLYETLRLYSAVPLIARWATTGADLCGVKVPKGTLLLTPIAMLHRDEEVWGADASAFNPFRFQDDMGRVVTHPNALLSFSLGPRSCIRQDFAMLEAKVTHALILWCFAFRVAPEYVHALADFLTLQPSKGLPVVLKFRYHHISKGLPTPLWFVGPTFAVLIGLVFKEGVYYGNWKLHLDVSYPWASSWAFGHSETTSIYLHKLLSGLMDNITKVESACFEPDLTISLFFLTNQDAIRESLPLTAEQISCFLF

SEQ ID NO: 19117 - protein, 305 aa, Zea mays
  VARIANT 62: note = Ancestral polymorphism is A, Derived polymorphism is T
MPPHKIETGHQDVVHDVAMDYYGKRLATSSSDNTIKIIGVSGTSHQQLATLSGHQGPVWQVAWAHPKFGSMLASCSYDGRVIIWKEGSKPDEWALVHTFAEHKSSVNSIAWAPHELGLCLACGSSDGNISVFTARSDGGWDTTRIDQAHPVGVTSVSWAPAMAPGALISAGSSGQFEYVQKLASGGCDNTVKVWKLNNGSWRMDCFPALQMHKDWVRDVAWAPNLGLPKSTIASASQDGTVVIWTAAKEGEQWEGRLLYDFRTPVWRLSWSLTGNILAVSDGNNNVTLWKEAVDGEWQQVTTVEP

SEQ ID NO: 19118 - protein, 323 aa, Zea mays
  VARIANT 19: note = Ancestral polymorphism is D, Derived polymorphism is H
  VARIANT 35: note = Ancestral polymorphism is M, Derived polymorphism is K
MARNINSDYIDFSHLGGFDMGINFDEFEENVKKLMEDFLDNALLLTFPIHGRIPIKYLDSAHDKAVEFIEDVHAKFYGPFTDDEVPNNDQSSRYVITESSPTSIEKELVGPNTELSTPPACFITMENSSTGCDTDAHKTQSESFSTKSTDILIHTTDFCNALLLEDSSTNYEMTVCLQPYQATLPGTQANRPEVHMVSTISYSANSPVESTIHGTCTSHDSSTSASSCADDPSMSTDSMVKSVDMDGQKHMKNDKIKVHLAPQPENASFKKMLLRNLSRKLRWSKAQADTHQTMAPGSQGAEDPGYPLVSPSDDDLEDSWEIL

SEQ ID NO: 19119 - protein, 985 aa, Zea mays
  VARIANT 685..985: note = Derived polymorphism lacks residues 685 to 985
  VARIANT 388..985: note = Derived polymorphism lacks residues 388 to 985
MPASRIPFKRCTAAVPGVGKPGPAASMPPAKRRRDRVVPSRSRDSMPPPAPHVEEGDNRHGEVYNVELLMAEPKVDSFGPVETALWTQARTAPTDADLYRACRNINKRGSCGGAASGSVLTSVSNAASDACAGGNGTIVRVSNAALEGGAGSNGGLEGRPAVVECKPKREGSDKKEDFYWPEDFVLGDVVWARSGKKSPMWPALVIDPLQHAPEVVLNSCVPGALCVMFFGYSANGHGRDYGWVKQGMIFPFVDYLDRFQGQPLYKLRPTKFRAAIEEAFLAERGFFDLDMDGACSPRKFVDKQSDPNGFQEEAASNNEQECQSESQVVGKSALCCDSCGNRLPSKVSKKRKQGGEQVLCRHCEKLLQSKQYCGICKKIWHHTDGGNWVCCDECQIWVHVECDLTCNNMEDLENADYFCPDCKSKCKTVPATEKMNTSHSSECASTSKGKSTPMIAVFCNGEEALYVPEKHMILCQCKACKERMMSLNEWEKHTGSRKKNWKMSIRQKSTGEPLINLLDDIPCGTSKSSKPGIKKGELLQLQANAYSPVCAKWTTERCAVCRWVEDWDYNKIIICNRCQIAVHQECYGARAVQDLTIWLCRACEFSQQKRECCLCPVKGGALKPTDVDGLWVHVTCAWFQPKVSFPVEETMEPAMGIMSIPAEYFKKTCVICKQMHGACTQCYKCSTYYHAMCASRAGYRMELQHYERSGRHITKMVSYCDFHSTPDPDNVLIVKTPEGVFSTKFFVQNGEKQTAARLARKENYQEKVLPPIVSDCLVAKCLTYEMLKYKKEPGEAIAHRIMGPRHHSQDFIDGLNAYMGHKDDQSFSTFKERLGYLQKTENLRVSCGRSGIHGWGLFAARNIQEGQMVIEYRGEQVRQRVADLREARYHREKKDCYLFKISEDVVIDATGKGNIARLINHSCMPSCYARIVTVSGDRSQIILIAKRDVSAGEELTYNYLFDPDESEDCKVPCLCKAPNCRGYMN

SEQ ID NO: 19120 - protein, 129 aa, Zea mays
  VARIANT 32: note = Ancestral polymorphism is C, Derived polymorphism is Y
  VARIANT 52: note = Ancestral polymorphism is K, Derived polymorphism is N
  VARIANT 66..129: note = Derived polymorphism lacks residues 66 to 129
  VARIANT 67: note = Ancestral polymorphism is P, Derived polymorphism is S
  VARIANT 78: note = Ancestral polymorphism is G, Derived polymorphism is D
  VARIANT 86: note = Ancestral polymorphism is P, Derived polymorphism is R
  VARIANT 101: note = Ancestral polymorphism is C, Derived polymorphism is R
  VARIANT 123..129: note = Derived polymorphism lacks residues 123 to 129
MDALTRLHRSLVGGDDEDQPEDSILADTEDLCSLSPLQVKQYPPSETSECSKDFMALVCIDLILYWPFACSEDLRLRGMFGGRTHPHDLVFYCLRKTYQIRSNVYIWKHIGSWEHSLCYGPSKTAKDDV

SEQ ID NO: 19121 - protein, 150 aa, Zea mays
  VARIANT 3: note = Ancestral polymorphism is L, Derived polymorphism is V
  VARIANT 12: note = Ancestral polymorphism is W, Derived polymorphism is C
  VARIANT 18: note = Ancestral polymorphism is E, Derived polymorphism is K
  VARIANT 21: note = Ancestral polymorphism is R, Derived polymorphism is W
  VARIANT 22: note = Ancestral polymorphism is L, Derived polymorphism is V
  VARIANT 62..150: note = Derived polymorphism lacks residues 62 to 150
  VARIANT 66: note = Ancestral polymorphism is A, Derived polymorphism is T
  VARIANT 69: note = Ancestral polymorphism is S, Derived polymorphism is T
  VARIANT 73: note = Ancestral polymorphism is L, Derived polymorphism is V
  VARIANT 83: note = Ancestral polymorphism is E, Derived polymorphism is V
MVLIGKLPLPKWLPSDPEDVRLTIAILGACKLLNVRPGIWITDMHVMRCTLCNRNGCRGNKQILDARHTELFLEKAYWDETLEYESLGEHFQDEEVAAAFGCRRQREAIRFSVRCICSQHGLGREAREDPMTRHCASTTAAAIHTNLQGN

SEQ ID NO: 19122 - protein, 172 aa, Zea mays
  VARIANT 37: note = Ancestral polymorphism is K, Derived polymorphism is E
  VARIANT 42: note = Ancestral polymorphism is M, Derived polymorphism is V
MGNMLPSCLVVQQGTAAGALPAMNPKRRLISLNLLVKGIHRVKKMPAGPGKAPEIDSKKSSSSEALETARSNKAARSTNNPKGAVLRSRLHGRRSGAGLGKKAGKQGVVRVKVVLTKEEAARLLSLTVGGGQKHTTTAAQIVAEMRKMEARRRVAAGASWRPALASIPEESS

SEQ ID NO: 19123 - protein, 126 aa, Zea mays
  VARIANT 28: note = Ancestral polymorphism is A, Derived polymorphism is V
MSGARRAPALAAALLLLLVASPPASAAATLQCAQVAQLMAPCTPYLTGAPGMTPYGVCCNSLAVLSQLAAARADRVAACACAKAAAAGLPAAVDFARAAGLPAACGLSISFTISPDMDCNQVTEEP

SEQ ID NO: 19124 - protein, 330 aa, Zea mays
  VARIANT 10: note = Ancestral polymorphism is R, Derived polymorphism is Q
MAALPFSTRRPFSSPCFILCFLLGFVAGLFPFAHRHLHLDLDLRHLPLADPPPAAPTQRALVRPPPTTTLIVVTPTRARPLQAYYLHRLAHTLRLVPQPLLWLVVDRGAATRETAALLRGCGLMYRHLPSQSHRDAPGARRTRPEHPAARGLRQRNAALDHIEHHRIHGLVYFADEDNVYSLDLFDQLRGIRSFGTWPVAMLGVGKSKTLVEGPVCDNSQVVGWHTNERTKRQRRFHVNTSGFAFNSSMLWDADKRARQAWNYIRLLDTVRDGFQATTFIEQLVEDETHMEGIPTGCSKIMNVNLRLEDKHLVYPKEWQMTENLDVLIPL

SEQ ID NO: 19125 - protein, 70 aa, Zea mays
  VARIANT 27: note = Ancestral polymorphism is E, Derived polymorphism is K
MQLKTQDLNDAIVTPKVCSMKCLQHSEVSICESLQAKTNDSYSRSKRLLNIKHQQQPLEQLKMLYWKLSQ

SEQ ID NO: 19126 - protein, 395 aa, Zea mays
  VARIANT 185: note = Ancestral polymorphism is Y, Derived polymorphism is H
MKDSQDIQSTTELQSSAQGTNEVQSQQPNPMTTDAPAGNSGSLSIASNDSKKVSREDIELVQNLIERCLQLYMNKGEVVRTLSTRARIEPGFTTLVWQKLEEENSEFFRAYYIRLKLKRQIILFNHLLQHQYNLMKYPAPPNVPLAPIQNGIHHMPAYALVMLYPGMHLACTVDRQAFTVQSLFYHFIAVSNLPMGYPVLPQPIMPAPGQPHMDPMACGLSNGHVVNGIPAPGGYHPMRMNSGNDMVVDNGAPEAPHAGATGSVMSSEMAVSPSSAASSNHAPFMPPEIPGMAMDVPGLDSTFGSDVGNGPLQLGPDGSSRDSIRSLGQLWNFSLSDLTADLTSLGADLDVLENYTGTPFLPSDSDILLDSPDQDDIVEYFADAINGSQSDEERS

SEQ ID NO: 19127 - protein, 639 aa, Zea mays
  VARIANT 475..639: note = Derived polymorphism lacks residues 475 to 639
MPWRRASLGVVTSSLLVRLPVALSRLAGRRRQTRSSSSTRRPGPGHAMPEKEAQAAAFCGEAVIAEFESLTRDAAAVQRDTLRRILADNACAEYLRCRGLAGRTDAASFRACVPLATHADIEPYIARIADGDTSPVLTAKPITSISLSSGTTQGKRKYLPFNQELVKSTMQIYRTSYAFRNRAFPVEDGKALQFIYGSRQFTTKGGLTATTATTNVYRSEEFMPTMRAIQSQVCSPEAVIFGADFAQSLYCHLLCGLLYADEVRIVSATFAHSIVLAFQTFERVWEELCADIRAGALSPARVAAPAVRGAVEALLAGPDPARADEVARRCAGLSNWYGVIPALFPNARYVHGIMTGTMEHYVKKLRHYAGGLPLVAAEYGASEGWVGANVEPETPPESATFTVLPNIAYFEFIPLKAATGHGGGTAGDTCYAEAEPEPVGLTEVTVGEHYEVVVTTFAGLYRYRLGDVVQVAGFYNSTPKLKFVCRRNLLLSINIDKSSEQDLQLAVDSAAKVLAAEKLEVVDYSSHAEVSRDPGHYVVFWELNADAGDDVLQSCCDELDRAFADPGYVGSRRARGIGPLELRVLQRGTFQKVLRHYLSLGAPVSQFKSPRCVGRANNSGVLQILSANVVKAFFSAAYD

SEQ ID NO: 19128 - protein, 188 aa, Zea mays
  VARIANT 154: note = Ancestral polymorphism is W, Derived polymorphism is L
  VARIANT 151: note = Ancestral polymorphism is R, Derived polymorphism is W
MSFTSTEPVLHVASVDEPVLHVPRAGSEINVAGPSVGSETNVAGLTLDREACEVQSPPSGTSVHGSGKKRKKSQVASVLDDYLEHKKNQTDNIVEAFLEKKTRGEESMDRCIHIFEAMEDLTDEEKAIAGEVFENELYWEMFLKLTIHNVRLIWLRRKIRYASHLSKPIGKSQYGLCNVFPTRSLVQV

SEQ ID NO: 19129 - protein, 278 aa, Zea mays
  VARIANT 29..278: note = Derived polymorphism lacks residues 29 to 278
  VARIANT 167..278: note = Derived polymorphism lacks residues 167 to 278
  VARIANT 187..278: note = Derived polymorphism lacks residues 187 to 278
  VARIANT 241: note = Ancestral polymorphism is R, Derived polymorphism is G
MEAASCCRVFSTQWCRFPLRRLSAPPWPQPFCTESNGGLVTPSASKWMSRGPVMAAKKAAEGGKQEDGKYKHIVDLTETTFGLRANSVQREPELQKLWDDNQVLKSVSERNTGTAFVLHDGPPYANGDLHMGHALNKILRTTVGVDIQMFEILLCVGSKADLVPVRSVDGDSQGLERLFGALSAHMWPGMILKSGNRITAPFLVEKQESKDDESNYDLEYDVLSHGFDDHWKFVGETSTSRRFERSNEADGAQKHTHQVVKASIDSSTSNPLPSNTPT

SEQ ID NO: 19130 - protein, 672 aa, Zea mays
  VARIANT 326..672: note = Derived polymorphism lacks residues 326 to 672
MPTPPLRGAGLLLRICLFLCLSLRPRLASSEPDADKAALLAFLSGVGRGATARARINWSTTHLACSADGPGPGWTGVTCSADGARVVALHLPGLGLSGAVPPGTLGRLTALQLLSLRSNDLSGPLPADLLRLPALEGLHLHRNAFSGALPAALAGLTALQVLDLSFNAFDGAVPGALANLTRLVALDLSNNSLSGRVPDLGLPALRFLNLSNNRLDGTVPASLLRFPDAAFAGNSLTRPAPAQAPPVVVAPPPGLAAPPPARRRPRLSEAAILAIAVGGCVLGFAVAALLLLAFCNSSREGRDEETVGGGAAAGKGGEKKGRESPESKAVIGKAGDGNRMVFFEAPSLAFDLEDLLRASAEVLGKGAFGTAYRAVLEDATTVVVKRLKEVNAGRRDFEQQMELLGRIRHDNVVELRAYYYSKDEKLLVYDYYSRGSVSNMLHGKRGEDRTPLDWETRLKIALGAARGVAHIHTENNGRFVHGNIKASNVFINKHERGCVSDHGLASLMNPVTVRSRSLGYCAPEVADTRKASQSSDVYSFGVFVLELLTGKSPVQITGGNGGDVVHLVRWVQSVVREEWTAEVFDGELLRYPNIEEEMVEMLQVAMACVSRSPERRPRMADVVRTIEEVRRSGSGTATGTGTRPSTEASTPATAAEAAQSRAEEGGSSAVAQ

SEQ ID NO: 19131 - protein, 325 aa, Zea mays
  VARIANT 122: note = Ancestral polymorphism is R, Derived polymorphism is W
MWPMEEEEVFVTVRRTEHVDVTSRAVVVAAGRAAVAGPRTVRVFCDDYDATDSSGDEAEEEEEKKAARRRVKRYVQEIHLERAAKEEEEATAAASLGAVLPGPKRKRKPDGEASEPRFRGVRRRPWGKYAAEIRDPWRRVRVWLGTFDTAEEAAKVYDSAAVQLRGRDATTNFQQQVDPERLSQPAASKSAATSTYDSGEESVTAVASPTSVLRSFPPSADAGGTRSKAAARNPETGDSTIVFGCPFSLASELPALYTEFDLLADLPLDFLADAPEVEALSLPPFSACTPEEEEECPSDAVRWRQVDELFQDITDLFQIDPLPVA

SEQ ID NO: 19132 - protein, 247 aa, Zea mays
  VARIANT 194: note = Ancestral polymorphism is S, Derived polymorphism is R
MGPEQEEAVLETIWDLHDKVSDAIHALSRAHFLRAVRRRSSASAPGLVDVKGGGLGLGARGGDEVVALAALAEEARSLHAIRAALEDLEDQFECFLAVQTQQQTERDFAMARLEQSRIMLAIRLKEHHGRNHKVIDEASAFVRDVYQDVWPSLSATKAERRADSSGNPAKGPSFLARMVSSSLAVAGSGFSLKRLALALGLVAVLQSSGVGDRRYRRTTSERSSSWLGSSSPRGGRTGRLDVSLARG

SEQ ID NO: 19133 - protein, 118 aa, Zea mays
  VARIANT 56..118: note = Derived polymorphism lacks residues 56 to 118
  VARIANT 37: note = Ancestral polymorphism is G, Derived polymorphism is E
  VARIANT 28: note = Ancestral polymorphism is E, Derived polymorphism is Q
MEEVEVLNLSGALFITCFQGHKQGVTHQNSMQEKLLGIFRKRDKDTKPHKKRPEDRVLRATEGRFRNGILNVKHLLAPPKPSGKDMSEPKMRKDKHKGKVKQKEETLKKAHFCNQACY

SEQ ID NO: 19134 - protein, 335 aa, Zea mays
  VARIANT 175: note = Ancestral polymorphism is D, Derived polymorphism is E
MVAAGTYSDDTSGGGCGSMEFWPEFLASSGGREFVAGGVGGMAGVLAGHPLDTLRIRLQQPPAAGAPRRRDAHPSAPRLLRGILRAEGPCALYRGMAAPLASVAFQNAMVFQVYAVLSRSLGPATSEPPSYASVALAGVSTGALQTLILSPVELVKIRLQLEAASGHGPVEMVREILRREGLRGVYRGLAVTALRDAPAHGVYFWTYERARERLHPGCRRSSSSQDQDGDEGLGTMLVAGGLAGVASWVCCYPLDVVKSRLQAQGAASASAPRYRGVVDCFQRSVREEGLPVLWRGLGTAVARAFVVNGAIFSAYELALRFIASGGGPRLVMEDK

SEQ ID NO: 19135 - protein, 545 aa, Zea mays
  VARIANT 318: note = Ancestral polymorphism is A, Derived polymorphism is T
  VARIANT 251..545: note = Derived polymorphism lacks residues 251 to 545
MSSEPPPAPSAAAAEGLAADLSAATLSKKQQKKDARKAEKAEKAAQRQQQQQPADAEDPFAANYGDVPVEEIQSKAISGRLWSQIGDLDDSSAGRSVLIRGSLQAIRPVSKKMAFVVLRQSMSTVQCVLVASADAGVSTQMVRFATALSKESIVDVEGVVSLPKEPLKATTQQVEIQVRKIYCINRAIPTLPINLEDAARSEADFEKAELAGEKLVRVGQDTRLNYRAIDLRTPSNQAIFRIQCQVENKFREFLLSKDFVGIHTPKLISGSSEGGAAVFKLLYNGQPACLAQSPQLHKQMALCGGFERVFEVGPVFRAENSNTHRHLCEFVGLDAEMEIKEHYFEVCDIIDGLFVSIFKHLTENCNKELETINRQYPFEPLKYLDKTLKLTYEEGVQMLKEAGTEIEPMGDLNTEAEKKLGRLVREKYDTDFFIMYRYPLAVRPFYTMPCYDNPAYSNSFDVFIRGEEIISGAQRIHTPELLTKRATECGIDVSTISTYIEVFSYGAPPHGGFGVGLERVVMLFCALNNIRKTSMFPRDPQRLVP

SEQ ID NO: 19136 - protein, 348 aa, Zea mays
  VARIANT 212: note = Ancestral polymorphism is Y, Derived polymorphism is H
MDSFSFLKYLRGGVLTGAHRAPAAATTIAASACEYGDDASSFFDLEFAVPGDESATSDVEEERVELSFAAGDEGVVAPVAAVAPAAEAEPEAAPPPSLPRPATRFRVLLLKLRKPKGGLAAADAAGTSAAPVASRFLVKLRVDDATPLASLFTRDNSSRASDAVADRPATAAAAAAEPQQQEQEVAASITAEERRFAKEVVLRYLSKIRPLYVKVSRRYGERLRFGGAASEGEEETDAEADPSPSQAPPPSVPAGVVACGVRAPRASVPAGLKQACKRLGKSRSASSAVAVAPSPAAAALSGPQPQRRDDSLLQVQDGIQSAIAHCKRSFNACNGTGTGPPQRCNSSP

SEQ ID NO: 19137 - protein, 224 aa, Zea mays
  VARIANT 43: note = Ancestral polymorphism is S, Derived polymorphism is N
  VARIANT 57: note = Ancestral polymorphism is R, Derived polymorphism is H
  VARIANT 71: note = Ancestral polymorphism is E, Derived polymorphism is K
  VARIANT 86: note = Ancestral polymorphism is R, Derived polymorphism is Q
  VARIANT 98..224: note = Derived polymorphism lacks residues 98 to 224
  VARIANT 113: note = Ancestral polymorphism is P, Derived polymorphism is L
METAERSIQAYRTSIEFFPRQSTTSGDRRFALHLRCYVSVNVSTGNGRPSLVFMYRHRDTDRSCLALPDDEDGVRGVLHGLLRSTRPLQHLGLTDCEWESILSQQNMSWLVDPVLRARYAAVEILQVVELHVCYDAVQMLMMTCKESSDGGAVGGDAEAECSVCLVALRESEAVELPACAHAFHRRCISEWFGQNSMCPLCRDDVAKYLEPELQRHFANFDYVM

SEQ ID NO: 19138 - protein, 1122 aa, Zea mays
  VARIANT 236..1122: note = Derived polymorphism lacks residues 236 to 1122
  VARIANT 860..1122: note = Derived polymorphism lacks residues 860 to 1122
MIPREQPPGMFRPPNAFGAPPPFLPQPPPLQWQWQQPPPPPPSPSPSPAVTFWQRDNVRDHVRKLQQTIELSTALIKELEEIAAAGNPGDGATETRKSASSSAELPWGSGDSSEDKRLGFVELARSMGISQDTHESMATDAANYLCHQLQHLLGPISSATSQSGPWEERSAMVRLTQKLQKSKRNKRWRQRRRKHVAELFQKERADYDRVDREADEWRAKQIAKDIAKRRVESMQQIARKKTNEERKRLESELELALMVEKLQELRSIRVQKMKKQGHFLPEEDDKYLERVKAAVEEEERQAASAARTDAVKDAILTAEESRKPLQYTNSQEGGSEQPKSGPSEDEDQGDGGMSERNDQASQKTEHEDEGHRFEGKGHGHHDPVSNLPFEFYHYYHGSDYDMGTLIEVRRMWDSFIRPGGRVGKTSLMNQYVNNRFSNQYKATIGADFLTKEVQIDDRLFTLQVCLLRHRLPSYYSTIRLGQERFQSLGVAFYRGADCCVLVYDVNVSKSFEKLNNWREEFLIQASPSDPENFPFVVLGNKIDVDGGNSRTVSEKKAKAWCASKGNIPYFETSAKEGFNVEAAFECIARNAVKNEPEEDMYLPDTIDVGGAGRQQRSSVSVKTMDVSPFLALLLVTLLSLLFFLSTWRKKQPSPPSGVGDGRPLPPSPRGLPILGHLPLLGPLPHRKLWAMAQAHGPVMLLRFGRVPTVVASSAAAAQEVMKTRDLAFASRPRMRMAERLVYGRDVAFVPYGEHWRQSRRVCVLHLLSQRRVSSFRHAREQEVAAMLARVRAAAGGRDGAVVNLTAHIISYTNGIISRATYGDKGGRYYDGPDGGEKLAKLFADFEELLGTVTVGEFVPWLAWVDALMGLDAKATRTSAELDAFLERVITDHRRQRRRGGQCDGDDHRDFVDKMFAAATDTTYTTLVWAMAELINHTHEMRRVQDEIRAAVGIDDDHVTEDHLEELRYLRCVIKETLRLHMPLPLLIPRETTVDTELLGYHVPAGTRVIVNAWAIARDAAAWERADEFVPERFAGGDDLKAADYLLLGQDFRFVPFGAGRRGCPGVGFSVPTMELALASLLYHFDWELPARGPSRLEMDELNGLSVRLKANLCLVAKPWCRQ

SEQ ID NO: 19139 - protein, 534 aa, Zea mays
  VARIANT 420..534: note = Derived polymorphism lacks residues 420 to 534
  VARIANT 438..534: note = Derived polymorphism lacks residues 438 to 534
MALEPVALLLTVLVAAPLTVLLLLLFLVAGNKRPARAASPTPRHRLRLPLPPSPRGLPLLGHLHLLGSLPHRALASLARAHGPVLLLRLGRVPTVVVSSAAAAEEVMRARDLAFANRPASAMAVRLLYGRDVAFAPYGEYWRQARRVCVVHLLSARHVGSFRRVREQEAAALVARVARDSAGGAAVGLSDLLTEYANAVVSRAAFGDESARGLLGEFDSGRRQRKVLTDFQKLVGTTPVGELLPWLGWVDAVTGLEGKIRRTFEALDGLLEKVIDDHRRRPRSGEEGGDRDFVDVLLDVHNKDQEHGIQLETNEIKAIILDMFAAGTDTIATAMEWAMAELVTHPRAMRRAQDEVRAAAAGSTGVNEDHVAQLDYLKAVLKETLRLHAPLPLLVPREPAADTEILGYHVPARTRVLVNAWAIGRDPATWERAEEFVPERFLGGAAAADVGFKGQHFELLPFGAGRRMCPGIAFAEGSAEMALASLLYHFDWEAASRGQNGKGTLSLDMTEMNGLAVHINSGLPLVAKPWIPFKN

SEQ ID NO: 19140 - protein, 166 aa, Zea mays
  VARIANT 157..166: note = Derived polymorphism lacks residues 157 to 166
  VARIANT 124: note = Ancestral polymorphism is C, Derived polymorphism is Y
  VARIANT 114..166: note = Derived polymorphism lacks residues 114 to 166
  VARIANT 100..166: note = Derived polymorphism lacks residues 100 to 166
  VARIANT 66..166: note = Derived polymorphism lacks residues 66 to 166
  VARIANT 40: note = Ancestral polymorphism is P, Derived polymorphism is S
  VARIANT 38..166: note = Derived polymorphism lacks residues 38 to 166
  VARIANT 22: note = Ancestral polymorphism is D, Derived polymorphism is V
MEEEVTGSGGGIGRKMAAGEVDLKEKSGTAWSHSYLNQKPWHPLSYPNLRRKWIAEQVHANHARRQEEVQREFAQEQEFFRQTALFSKKDKEKIMPQVVRTPGTGANVNRAHAQHGTCLVHCLCFGVLLMSKLMVVGVREAVAVGQRVGMREEAGEWYKRRRRGRP

SEQ ID NO: 19141 - protein, 178 aa, Zea mays
  VARIANT 9: note = Ancestral polymorphism is S, Derived polymorphism is W
MTTQGGNRSTTTLVAAVAVVLAVAAASSLAGVASAEKAGGFVVTGRVYCDPCRAGFETNVSRSVAGATVEVVCRHFGASKETLKAEATTDDSGWYKLEIDQDHQEEICEVVLARSPDPGCAEIEEFRDRARVPLTSNNGIKQQGVRYANPIAFFRKDPLKECGALLEKYDLKDASETP

SEQ ID NO: 19142 - protein, 225 aa, Zea mays
  VARIANT 25: note = Ancestral polymorphism is G, Derived polymorphism is V
MRRLWRWYQQCLAAHPVRTQVVSSGILWGLGDIGAQTVTYYSASPDRRGHDSSPPDPEDKDNKDNKEFKVDWKRVGITSSFGFAFVGPVGHYWYEYLDRIIRRRFQPNTFKFVASKVAADGFLFGPLDLLLFFSYVGLGQGRSIEQVKEDVKRDFIPALVLGGTIWPAVQIANFRFVPVRYQLLYVNLFCLLDSCFLSWIEQQGDASWKRWFTSFQKIEDQKGKV

SEQ ID NO: 19143 - protein, 521 aa, Zea mays
  VARIANT 267: note = Ancestral polymorphism is T, Derived polymorphism is S
  VARIANT 196: note = Ancestral polymorphism is S, Derived polymorphism is F
  VARIANT 37: note = Ancestral polymorphism is V, Derived polymorphism is G
MAAAPYDREDGLQPSAPPHAVDAYDPSYVPDSVKTFVVHLYRHIRDKNVYEIHQMYEGGFQRLSDRLFRDAPWPSAEAVAPYCDGDPVFLLLYRELWYRHAHARLSPLTAAHRAESWTNYCDLFRVVLHGVVNMQLPNQWLWDMVDEFVYQFQSCCQYRAKLKTKTEDELNQLKQFDKAWNVYGVLNYLQALVEKSMITQILEREKEGLEQFTATDGYDYEGGSNVLKVLGYYSMIGLLRIHCLLGDYHTGLKCLGPIDLNQQGVYSIVIGSHISTIYHYGFANLMMRRYVEATREFNKILLYILKYKQYHQKSPQYDQILKKNEQMYALLVICLSLCPQNKLIDENVSTQLKEKYNDKMTKMQRYDDEAYAAYDELFSYACPKFITPSPPVLDQPLTNYNQDAYRLQLKLFLYEVKQQQLLSGIRSYLKLYSTITISKLAQYMEVDEATLRSILMTYKHKMHAVDSDGKMVSSADFDFYIVEDVIHVVESKPTKRHGDYFLRQILKFEEMIGGLDKVQLD

SEQ ID NO: 19144 - protein, 299 aa, Zea mays
  VARIANT 70..299: note = Derived polymorphism lacks residues 70 to 299
  VARIANT 123: note = Ancestral polymorphism is A, Derived polymorphism is V
MAAFFGAAPPPALASFRHEEEQHQDAAEEVYHVDDVDEGSGDGRGHGGAGQGKLCARGHWRPAEDAKLKELVAQFGPQNWNLIAERLDGRSGKSCRLRWFNQLDPRINRRAFSEEEEERLLAAHRAYGNKWALIARLFPGRTDNAVKNHWHVLMARRQREHSGALRRRKPSSTSPSPAPAPAPHLAPVVVLHHHHHYAGGSPPMPPLHAADAHTQYTAAAADTRAHSGGESDETASTCTTDLSLASAAPCFYQSGYDVAPRAAAFAPSARSAFSAPPATARSDDKVSLPFFDFLGVGAA

SEQ ID NO: 19145 - protein, 162 aa, Zea mays
  VARIANT 8: note = Ancestral polymorphism is A, Derived polymorphism is T
  VARIANT 13: note = Ancestral polymorphism is A, Derived polymorphism is V
  VARIANT 15: note = Ancestral polymorphism is R, Derived polymorphism is C
  VARIANT 33: note = Ancestral polymorphism is F, Derived polymorphism is L
  VARIANT 41: note = Ancestral polymorphism is V, Derived polymorphism is A
  VARIANT 48: note = Ancestral polymorphism is R, Derived polymorphism is H
  VARIANT 51: note = Ancestral polymorphism is A, Derived polymorphism is V
  VARIANT 53: note = Ancestral polymorphism is C, Derived polymorphism is Y
  VARIANT 58: note = Ancestral polymorphism is P, Derived polymorphism is S
  VARIANT 59: note = Ancestral polymorphism is P, Derived polymorphism is L
  VARIANT 70: note = Ancestral polymorphism is A, Derived polymorphism is V
  VARIANT 74: note = Ancestral polymorphism is A, Derived polymorphism is V
  VARIANT 92: note = Ancestral polymorphism is I, Derived polymorphism is N
  VARIANT 99: note = Ancestral polymorphism is D, Derived polymorphism is G
MGAVEPPAWMSAAARRWLENAGATAEDTPGRAFNALPLSGVRVSLAERGRALCSLRVPPHLTDAEGNWHAGAIAAAADDVCAAAIMSVEGIIKVSVHYDISYFTPAKLHDEVEMDGRVVEHKGRMTAVVVEIRKKKSGELVAIGRQWMTASRPKGAAAHSKI

SEQ ID NO: 19146 - protein, 130 aa, Zea mays
  VARIANT 29: note = Ancestral polymorphism is P, Derived polymorphism is S
  VARIANT 24..130: note = Derived polymorphism lacks residues 24 to 130
  VARIANT 6: note = Ancestral polymorphism is V, Derived polymorphism is M
MVRVSVLNDALKSMYNAEKIGKRQVMIRPSSKVIIKFLTVMQRHGYIGEFEYVDDHRAGKIVVELNGRLNKCGVISPRFDVGVKEIEGWTARLLPSRQFGYIVLTTSAGIMDHEEARRKNVGGKVLGFFY

SEQ ID NO: 19147 - protein, 875 aa, Zea mays
  VARIANT 357..875: note = Derived polymorphism lacks residues 357 to 875
  VARIANT 326..875: note = Derived polymorphism lacks residues 326 to 875
  VARIANT 321..875: note = Derived polymorphism lacks residues 321 to 875
  VARIANT 303..875: note = Derived polymorphism lacks residues 303 to 875
  VARIANT 32: note = Ancestral polymorphism is R, Derived polymorphism is K
MAALTQSAIDVVLGQLSKVVKDEVQLIGGVHRDMKFIKDEMDSMNGFLTHLNKMESEHDDQVRAWMKQVRETAYVAEDCVERYVRDMERLGVSQGGCAAYAAMALLALSKPKTFWELHQLGKQITELRTRVHEVGERRVRYDVKVPDKRNRRLVRNEAASGQDEERRECFVRSLEEELQQEDKKRARDQGPDPLGRPSLVLRAHAKMGGLLALPLRLGGGGGDTIAQLPGLVSSESARVRRILKRCCPPRPDHPRPTLTDAEAEKFRCTKKMFVCALYVYPYLTNAELKQLKVGVEAPGVEAQEARNQVMVFCYSMLSTQQKSCLQYLTAFKHETEISRTSMVRRWVAEGLVGKEPGEGSTATLQEAGERCFRELRLRGFIRPARWGDNGTVKSCVMDGPVQDFVDGITRSENFLSDLPAHLQRQLEIRSIVRYGRPSMSAPAAAPAPLRSVLLSSCCGGGVTRTSRYDDEQDYAASTATLLKHRMDALVDFVKELPKLYRLNVLDLGGCKGLRRRHLVAFTELECLRYLSLRDTDVPGLVPDRHMNRFEQLETLDIRGTRIPPRDTKRIYLPKLKHLLAGRFTMASAEKEMLVTVDVPDRIGSMRGMETLSRVRVSVDGAELERVAKLRQLRKLGVVVHANTATAAVLGRVLYMLAGSLRSLSVWVVDANADAVARTRTRTRIAATSTQQGSGGEGILHISSLHEIARSLALENLHIKGKVSLPSWIGTAPKLTNVTLSDTEMDGGDALRRLATVVNLCCLKLSRNAFTEQALHFKDVQFQALRFLVVEGDAFTRLAFSAGDAAPKLERIVWSIGGTRAAQKNEELIVGIQHLPSLKRIELRASFREHNLLEWMRQQRQTTTSSAAKYRIYYSV

SEQ ID NO: 19148 - protein, 246 aa, Zea mays
  VARIANT 155: note = Ancestral polymorphism is G, Derived polymorphism is D
  VARIANT 154: note = Ancestral polymorphism is S, Derived polymorphism is F
  VARIANT 139: note = Ancestral polymorphism is I, Derived polymorphism is S
  VARIANT 134: note = Ancestral polymorphism is V, Derived polymorphism is G
  VARIANT 129: note = Ancestral polymorphism is P, Derived polymorphism is R
  VARIANT 111: note = Ancestral polymorphism is T, Derived polymorphism is A
  VARIANT 91: note = Ancestral polymorphism is V, Derived polymorphism is A
  VARIANT 72: note = Ancestral polymorphism is T, Derived polymorphism is I
  VARIANT 54: note = Ancestral polymorphism is P, Derived polymorphism is S
  VARIANT 19..246: note = Derived polymorphism lacks residues 19 to 246
MDWIIHLDTDELIHPVGAREYSLRRLLLDVPNNVDMVNFPNYESSIDRDDIMDSFTEVSMFKKYYDHLAKGTYFGLYKEATRGNPNYFLMVMGNQLQGEIKLEEAAILHYAYTKFSDLTSRRDRCGCKPTKEDVKRCIILEFDCLAIIRGLKESDVFTNAVTSAKAQSKTKPSNMGGSRKQGGHPTERNCWSVHTGRWSREVTGNRKKDPGNGGRPGTGTGRSNATEVVPWFARALGTRHCFVMTT

SEQ ID NO: 19149 - protein, 510 aa, Zea mays
  VARIANT 440..510: note = Derived polymorphism lacks residues 440 to 510
  VARIANT 437: note = Ancestral polymorphism is R, Derived polymorphism is S
  VARIANT 364: note = Ancestral polymorphism is T, Derived polymorphism is R
  VARIANT 347: note = Ancestral polymorphism is A, Derived polymorphism is V
  VARIANT 319: note = Ancestral polymorphism is N, Derived polymorphism is K
  VARIANT 89: note = Ancestral polymorphism is C, Derived polymorphism is R
MSTHAASRRSSSSSAVAKRPAIAEGATKAAGPGPTAAQAKKRTALVNITNVAAPGARVAAVGKVAPPVTGAYLISGGSRQRFEITCPFCSNSNLMQKLNPATSGAPLKKPSLANARTIRGSAAKSASIKPAPPVSRHDSSSEQKHNVLVPTTVHVPSRAPALVPYSSFVSPGRSRDSVSTDETMSTCDSMKSPDFEYIDNGGCSMLASLQRRADEHLRTSEDRDVEENKWKKNGPAPMEIDSICEVDSNLEDPQLCAALASDIYMHLREAEMKKRPSTDFMKTIQKDVNPSMRAILIDWLVEVAEEYRLAPDTLYLTVNYIDRYLSGNEINRQRLQLLGVACMLIAAKYEEICAPQVEEFCYITDNTYFRDEDPALHLEFLANYIAELSLLEYSLLSYPPSLIAASAIFLARFVLQPTKYPWLLPDENDTVLVADTRYIWKQNSTLAHYTQYKPSELSECVKTLHRLSSVGPGSNLPAIREKYSQHKYKFVAKKQCPPQIPAEFFRDAAC

SEQ ID NO: 19150 - protein, 611 aa, Zea mays
  VARIANT 331..611: note = Derived polymorphism lacks residues 331 to 611
  VARIANT 323..611: note = Derived polymorphism lacks residues 323 to 611
MVMKMEHEDNGAIGGTDGTWTEDDRALGAAVLGADAFAYLTKGGGAISEGLVATSLPGDLQNKLQELVESESPGTSWNYAIFWQLSRTKSGDLVLGWGDGCCREPRDGELGAAASAGSEDSKQRMRKRALQRLHIAFGVADEEDYSPGIDQVTDTEMFFLASMYFAFPRHAGGPGQAFAAGIPIWVPNSERKVVPANYCYRGFLANAAGFRTIVLVPFESGVLELGSTQHIAESSGTVQTVRSVFAGTSGNKSAVQRHEAERSPGLAKIFGKDLNLGRPSVGLAVGVSNSKVDERTWEQRSAVGGTSLLPSVQKGLQNFSWSQARGLNSHQQKFGNGVLIVSNNEGAHRNNGAVDSPSAAQFQLQKAPQLQKLSVVQKTPQLVNQQPMQAQVPRQIDFSAGSSSKPGVLVTRAGVLDGESAEVDGLCKEEGPPPVMEDRRPRKRGRKPANGREEPLNHVEAERQRREKLNQRFYALRAVVPNISKMDKASLLGDAITYITDLQKKLKEMETERERLLESGMVDPRERAPRPEVDIQVVQDEVLVRVMSPMENHPVKKVFQAFEEAEVRVGESKVTSNNNGTAVHSFIIKCPGTEQQTREKVIAAMSRAMSS

SEQ ID NO: 19151 - protein, 537 aa, Zea mays
  VARIANT 416..537: note = Derived polymorphism lacks residues 416 to 537
MAAITAPPAPHPASTSCRRRAPLIRFAASSSPSSRFRPSSSSSFPGAAGSSSGGGGEILHVSPLPPPAAPPGAPVYVTLPADVVGPGGRVARRRAMGASLAALAAAGVAGIAVELWWGVIERHRPGEYDWAGYLELAAMARRHGLRVRAILAFHQCGAGPHDPPWIPLPQWVLEEMDKVPDLSYTNRYQKRNREYISLGCDILPVLKGRSPMQAYSDFMRSFRNTFEDYLGAIVTEVQVGMGPGGELRYPSCPTEKLNQPGSSSELGEFQCYDKFMQASLSARAQIFGLQEWGNDGSTGTDGSQKNLEEASFFRLDGGYWDTPYGHFFLEWYSGMLLLHGERLCMIADAIFSGTGVTISGKVAGIHWHYYTCSHPSELTAGYYNTLLRDGYLPIAQMFAKYKAALCCSCFDLRDTERTDSESSPEGTLRQLAGAAKMCGLPLNGENSMTRLDDASLNQVIRSSRLYSGRTSGTSFSFNYVRMNKSLFEFHNWNRFTKFVRQMSDARTFLARLYVRRGQQCLSSMSVVWVVSRACVYT

SEQ ID NO: 19152 - protein, 192 aa, Zea mays
  VARIANT 125: note = Ancestral polymorphism is T, Derived polymorphism is I
  VARIANT 107: note = Ancestral polymorphism is R, Derived polymorphism is H
  VARIANT 93..192: note = Derived polymorphism lacks residues 93 to 192
  VARIANT 86: note = Ancestral polymorphism is D, Derived polymorphism is N
  VARIANT 72: note = Ancestral polymorphism is Y, Derived polymorphism is H
  VARIANT 62: note = Ancestral polymorphism is T, Derived polymorphism is M
  VARIANT 51: note = Ancestral polymorphism is G, Derived polymorphism is S
MEGAAAVETAAAANGKACCHAAKGPGYATPLEAMEKGPREKLVYVTCVYNGTGINKPDYLATVDLDPSSPTYSQVIHRLPVIHIGDELHHSGWNSCSSCHGDPSAKRRFLILPSLLSDRVYVVDTATDPRAPSLHKVVESEDIAENTGLGFPHTSHCLASGDIMISCLGDKEGNAAGNGFLLLDSEFNVKGR

SEQ ID NO: 19153 - protein, 189 aa, Zea mays
  VARIANT 118: note = Ancestral polymorphism is E, Derived polymorphism is D
  VARIANT 60: note = Ancestral polymorphism is D, Derived polymorphism is G
  VARIANT 43: note = Ancestral polymorphism is C, Derived polymorphism is F
MQFFSTCDISGMFSENILTGQPFDLCTRIQEYLLIPLQRRVECYRFSMFRTEQSLLPLPDNEAPVTGAAYSFTGATASLTNRILTSSKKITLVRHGLSSWNAESNVQATAEIIWKNKDEALVFLDSLKEAHLFFLEGMTNADAKKQYPELYTKWREDPANFHVNGIYPIRKLWGMIARQTCEQILLTPG

SEQ ID NO: 19154 - protein, 582 aa, Zea mays
  VARIANT 118: note = Ancestral polymorphism is I, Derived polymorphism is T
  VARIANT 34: note = Ancestral polymorphism is P, Derived polymorphism is A
MFGVAGYVDLLSRCGEARAIVRIQAALLTSGQLPRSVELHDALIRALSRSARPHLALPLYAHLLRAGLLPTPHTLPSLLKSMALSPAVPGAAVLALTVHTHAVKLGLDRFVLVSNALIRVHAGFLGSLADGLLLLRTAAAVDASTFNTLITAYARAGRLADARALFDEMPARNAVSWSAMVNGYVQAGDGREALRIFARMQAEDVRPDDTVLVGVLAACAQHGALEQGKWVHGYLKAHGIKINLFFGTALVDMYSKCGEVQLAMDVFERMQYKNVLAWTTMIKGLAMHGRGSEAVMLFAQMESSGIRPDDIAFIGVLCACTHAGLVDKGRELFDSMVRKYGIKPKIEHYGCMVDLLARNGFLYEAKEMIQKMPMEPDALIWGALMAGCRFHKNVEFAEYVAKHWILLEPDKSGAYVLLSNIYAASGRHASAREIRHLMREKGVDKTPGCSTVEVNGVIHQFIVGDLSHPRIKDILSKWYEIDTRIRLEEGYIPDMKEVLLDIEEEEKEGALSRHSEKLAIAFALISISDNMPIRIFKNLRVCHDCHHVTKLISKVYGREIVVRDRTRFHLFKEGTCSCKDYW

SEQ ID NO: 19155 - protein, 188 aa, Zea mays
  VARIANT 20: note = Ancestral polymorphism is P, Derived polymorphism is S
  VARIANT 26: note = Ancestral polymorphism is Y, Derived polymorphism is D
  VARIANT 38: note = Ancestral polymorphism is A, Derived polymorphism is T
  VARIANT 40: note = Ancestral polymorphism is A, Derived polymorphism is T
  VARIANT 56..188: note = Derived polymorphism lacks residues 56 to 188
  VARIANT 87: note = Ancestral polymorphism is L, Derived polymorphism is Q
  VARIANT 88: note = Ancestral polymorphism is L, Derived polymorphism is R
  VARIANT 123: note = Ancestral polymorphism is D, Derived polymorphism is N
  VARIANT 147: note = Ancestral polymorphism is T, Derived polymorphism is M
  VARIANT 164: note = Ancestral polymorphism is R, Derived polymorphism is W
MEFVNSWTKTARGVTELTVSPLPRGDFGNGIVLTNALATTRGLLSAPMSRATGLVQEAVRMVTDDYMRSAMDYFEATWARPSLACTLLITTWSHLEFHDADFRCAILEGEQHLDPAVVVVAYNHDDLLHLEGADGILDGGSYVRRAMQGANPEPSLVYSTTMGRSVDEPQKSDSLASGESCLQAGIEP

SEQ ID NO: 19156 - protein, 336 aa, Zea mays
  VARIANT 268: note = Ancestral polymorphism is R, Derived polymorphism is C
MGADYYKVLGVDRGAGDDDLKKAYRKLAMRWHPDKNTTNKKEAETKFKDISVAYEVLSDPKKRAIYDQLGEEGLKGQPPPGAGGSGAFPFFPGGAHSTAPHFNHRSADDIFKEFFGSPGMGGMRAEPGFQRSMFGNDIFSSRFGAEGSTSMQQPPRKAAAIENPLPVSLADLYKGVTKKMKISREAIDASGRISNAEDILTIEVRPGWKKGTKITFPDKGNEAPNMKAADIVFILDEKPHDVFTRDGNDLVVTEKISLVEALIGYTARVTTLDGRSLSLPINSIIHPSYEEVVPREGMPIPKDPSKKGNLRIKFNIMFPSRLTSDQKAGLKRILGS

SEQ ID NO: 19157 - protein, 387 aa, Zea mays
  VARIANT 287: note = Ancestral polymorphism is S, Derived polymorphism is I
  VARIANT 285..387: note = Derived polymorphism lacks residues 285 to 387
  VARIANT 78: note = Ancestral polymorphism is P, Derived polymorphism is L
  VARIANT 71: note = Ancestral polymorphism is V, Derived polymorphism is M
  VARIANT 62: note = Ancestral polymorphism is M, Derived polymorphism is T
  VARIANT 60: note = Ancestral polymorphism is P, Derived polymorphism is T
  VARIANT 59: note = Ancestral polymorphism is M, Derived polymorphism is I
MRVLAVDDDPTCLKVLENLLFRCQYHGTSLDNNGTGSHGPELLREKKDQFDLVISNVHMPDMDGFKLLELVGLEMDLPGISLVCDGGYFNAIMSFPQNYPNSPPSVRFTSEMWHPNVYPDGRVCISILHPPSEDPNGYELASSPSPLCPTGTKQPMELEHPMDDFHSPAANSPNCFDPSTQSACTQPVVAANSDRVRKPEGRGAWLTRNGRQDTAGGSLQPHAWWPVWEGAHCSSSDDFRNFSGQEGKGNDRKVRRVRGVQIWMRAEKRSRKIFVKEAKDTLKLWYSNRKKVLAWQVKQKQLAHEKCEFYTLLWRSRRVLNMAHATRRFLNMAHATFGQRGHIKHAAINAPVQGTAADVAMCAMLEIDRNTRLKELGWALLMWVVYA

SEQ ID NO: 19158 - protein, 391 aa, Zea mays
  VARIANT 132: note = Ancestral polymorphism is A, Derived polymorphism is T
  VARIANT 64: note = Ancestral polymorphism is L, Derived polymorphism is R
  VARIANT 31: note = Ancestral polymorphism is R, Derived polymorphism is W
MAAVAEEEVIVVGAGQSGLAVAACLSLRGVRALVLERDDCVGSLWRKRAYDRLHLHLTKKYCALPHAPHPAEAPAYLHRDDFARYLDGYAARFAVRPRLRREVRSARYDPASARWEVEAVDLGTGQAERYAARFLVVASGENAEKFLPEVPGLEAFPGQVMHAVEYRSAEGMRGKAVLVVGSGNSGMEIAYDLAAAGAVTSIVVRGELHLVTKEIWNVAMTLYPYLPVWVIDKLVLLMCAVVFGDTSRHGLRRPAIGPFTMKLTTPGYPVVDVGTYAKIRSGEIRVLPAAVKSVRGNVVEFGDGSRHPFDAIVFATGYRSTVRRWLKSEDGLVGDDGMAARSYPEHWKGDHGLYCAGMVRRGIYGSCEDAELIAADISKLLHPKQEQGNGV

SEQ ID NO: 19159 - protein, 174 aa, Zea mays
  VARIANT 159: note = Ancestral polymorphism is V, Derived polymorphism is I
MDGGSCGLEGASVVTSTTSAGIQLLPEKHCTDEACGAMAGSNGPEGVPVVTSADDPPTHADIPFLCNSVDETCEATGDGSAPLDAQICTGFSKLISLEVKKGLQKCATFPPSSSQPQQEDCSCSHVGDGLTGAPTFWRSVSLPHFFPPTKLQHYCLVVVTAKPSVASIVRPASP

SEQ ID NO: 19160 - protein, 87 aa, Zea mays
  VARIANT 7: note = Ancestral polymorphism is L, Derived polymorphism is M
MTQKQTLFKGQSKKKTIPPNRHGKAPHVRKGKRAVKPTKFTKDMDAEKELTKFINQCNEIKAANLASKEGGDLNIVKADGEESKSKK

SEQ ID NO: 19161 - protein, 877 aa, Zea mays
  VARIANT 437: note = Ancestral polymorphism is P, Derived polymorphism is L
MEAGFLWKEIGDQAGAARMSGGNKNRSLDWDLNDWRWDANLFLATPAAAAPSESISRELSRGQGEIDFGVVVDKRRRLSPEEDGSGGCSNSAVADGDNSHVVCVQRGRNTEETRPRKGANSSTTPSCQVDGCQADLSGARDYHKRHKVCEAHTRTTVVCINNVEHRFCQQCSRFHLLHEFDDGKKSCRSRLAQHNGRRRKVQPQPAVNGNSMNEDQSLSSTLFLLLKQLSGLESGSSSEQINHPNSLVNLLKNLAAIASTHAYQDVLKNATSISSNDGNNAANGSIMHEQTIRSIPVRRESLAEEPAVKRRVQDFDLNDSCIEEAESRTDKIVFKLFGKEPKDFPVDLREQILNWLSHYPTDMESYIRPGCVILTIYLHLPNWMWDEFNDDPASWIENLISLSNDGFWRTGWLYARVQDCLTLSCNGSLMFASPWQPVIGDKHQRLCVTPIAVDCSSSVKFSVKGFNIVQPTTKLLCVFDEKYLIQEETQMLLEDSTMQQGPQCLTFSCSFPCTSGRGFIEIEDYDQSSLSVPFVVTDKDVCSEIRMLEHGLDLVSFDQTSKRIDDLMIYRSRALHFLHEIGWLLQRSHVRATSEQRQYCPDRFPVARFRWLLSFAVDQEWCAVLRKLLNTMFQGDIDVLSPIEFALGENLLHTAVKKRSKPLVEFLLRYTTTNIAPVGGGDGAPVQFLFTPAMTELSNITPLHIAATISDAIGVLDALTDDPQQLGIKAWKNARDATGFTPEEYAAKRGNISYIQMVQDKIDRRVTRAHVSVTIPSTIDTVGKHGSRMKPADQITFGVEKKQLSINQTLSCRQCVQQAQQLAFHPRTNRFLSNRTAMLSLVSIAAVCVCVGLIMKSLPQVGCMKPFLWDNIRWGPN

SEQ ID NO: 19162 - protein, 375 aa, Zea mays
  VARIANT 37: note = Ancestral polymorphism is T, Derived polymorphism is I
  VARIANT 46: note = Ancestral polymorphism is I, Derived polymorphism is T
  VARIANT 81: note = Ancestral polymorphism is A, Derived polymorphism is V
  VARIANT 92: note = Ancestral polymorphism is W, Derived polymorphism is C
  VARIANT 144: note = Ancestral polymorphism is K, Derived polymorphism is N
MDAAVRKAAGAGIARAPALVLALVAAGAFLISYNFFTMLFHGGGGIGAAVTAGTRDPVVAMPAWMRAAADTEARRRPFHVALTATDAPYSRWQCRVMYFWYKRMQARPGGEAMGGFTRVLHSGKPDGLMDEIPTFVVDPLPAGKDHGYVVLNRPWAFVQWLQKAKIEEEYILMAEPDHIFVKPLPNLAHDDDPAAFPFFYITPSEHEKIIRKYYAKERGPVTDIDPIGNSPVIIKKTILEKIAPTWMNVSIQMKEDEETDKVFGWVLEMYAYAVASALHGVHHILRKDFMIQPPFDTKLQNTFIIHFTYGCDYSLKGELTYGKVGEWRFDKRSFPDRPPPRNLTLPPPGVPESVVTLVKMVNEASANLPRWDDGI

SEQ ID NO: 19163 - protein, 254 aa, Zea mays
  VARIANT 42: note = Ancestral polymorphism is R, Derived polymorphism is W
  VARIANT 49: note = Ancestral polymorphism is M, Derived polymorphism is L
  VARIANT 55: note = Ancestral polymorphism is G, Derived polymorphism is D
  VARIANT 97: note = Ancestral polymorphism is E, Derived polymorphism is D
MTRGENQESQTGNVSAASAAAPGPKPASAGAGKGAEGQSVVRRLQSELMALMMGGDPGVSAFPEGDNMLHWVGTIAGSAGTAYEGTSYRLALAFTAEYPYKPPKVRFDTPCFHPNVDVHGNICLDILQDKWSSAYDVRTILLSIQSLLGGNGSLLIARFLRLFGRSMDLVRRLRFSPTDYDLFRAEQRLAAQHAGGGALGEPGRVQEDGGEALQGRRVEDSTRRRCRLRFFKHRSHLDRLTWMVLLGWVPSLVL

SEQ ID NO: 19164 - protein, 183 aa, Zea mays
  VARIANT 42: note = Ancestral polymorphism is R, Derived polymorphism is W
  VARIANT 49: note = Ancestral polymorphism is M, Derived polymorphism is L
  VARIANT 55: note = Ancestral polymorphism is G, Derived polymorphism is D
  VARIANT 97: note = Ancestral polymorphism is E, Derived polymorphism is D
MTRGENQESQTGNVSAASAAAPGPKPASAGAGKGAEGQSVVRRLQSELMALMMGGDPGVSAFPEGDNMLHWVGTIAGSAGTAYEGTSYRLALAFTAEYPYKPPKVRFDTPCFHPNVDVHGNICLDILQDKWSSAYDVRTILLSIQSLLGEPNNDSPLNTQAAALWANQEEFRKMVEKLYKAAA

SEQ ID NO: 19165 - protein, 244 aa, Zea mays
  VARIANT 146: note = Ancestral polymorphism is R, Derived polymorphism is M
MEQLDYKFHEKYTALKKRKLLDEGLERKREAELNELYDAMKDWVSELRKDNAELNEKLVEKQDELEKARQEFLEDIRTRDAEILKLKQLLDEKAEKNNSAATGFPCLAPEAVLENSTPLSPKRKTPFSHGKQLECSRRHTRISGNRTTEIRSAHMLSLLLQSLVRMKISVNDGTEIFSVSVSHEASGYSFILTWLETSDEWSYKLSSLGTLERIAVDWMRQDIRFSMKMCRMFFERISSIITKG

SEQ ID NO: 19166 - protein, 66 aa, Zea mays
  VARIANT 10: note = Ancestral polymorphism is L, Derived polymorphism is P
  VARIANT 26: note = Ancestral polymorphism is A, Derived polymorphism is T
MKNLRRRLLLTWQILLMTLLIMPSCARLFLSYSWTALQSQMKSLSSLALVEYVTPVKVSNTITRIL

SEQ ID NO: 19167 - protein, 318 aa, Zea mays
  VARIANT 43: note = Ancestral polymorphism is V, Derived polymorphism is E
  VARIANT 263..318: note = Derived polymorphism lacks residues 263 to 318
MAVLWKGSSSSPCDWPEATVTTVSDADDDAAAAAELRRGPWTVEEDAVLAGHVAAHGEGRWNELACAAGLRRTGKSCRLRWLNYLRPGVRRGGFTPREQLLVLDLHSRWGNRWSRIAAHLPGRTDNEVKNYWRTRVQKHARQLGCAVGSRQFNDAVRNLWVPRLLERIHADDSAAAAAADADADASRCCYSASPSHDELSSSHPAHRNAAPITGDDCARAPSPDVSSVVTGSSWSREASPTSQLFKSSSSTVEGCSTSTETEQCQNGCSSSATSVDMFDESWSELLARAIHDDDAEFGSGETGDSWWSLEDIWEQPLY

SEQ ID NO: 19168 - protein, 229 aa, Zea mays
  VARIANT 8: note = Ancestral polymorphism is S, Derived polymorphism is L
MIVPAAHSFCAIFFASDMSECGWMIQEDVEATAGSPSRASAVGTVNWGTATLVGVFAGLLYGGSREASASVSKDAEVMLKMGSTTDKREQYRLMRDAMEKRFIRVAKGSLVGGVRLGMFTATFFGIQNLLIDTRGVHDVFNIAAAGSATAAAFGLILPGSMMWRARNVLVGSALGAGICYPLGWVQLKLAEKANLEIANSKPSSDLTEGKENQSRVGAAIERLEGSLKK

SEQ ID NO: 19169 - protein, 203 aa, Zea mays
  VARIANT 107..203: note = Derived polymorphism lacks residues 107 to 203
  VARIANT 98: note = Ancestral polymorphism is P, Derived polymorphism is L
  VARIANT 94: note = Ancestral polymorphism is I, Derived polymorphism is L
  VARIANT 86: note = Ancestral polymorphism is E, Derived polymorphism is K
  VARIANT 81: note = Ancestral polymorphism is N, Derived polymorphism is K
  VARIANT 58: note = Ancestral polymorphism is A, Derived polymorphism is T
  VARIANT 14: note = Ancestral polymorphism is C, Derived polymorphism is F
MQNLLLLLSQVRLFLDRQDYVRAQILSRKISTRVFDADPSKEKKKPKEGDNIVQDAPADIPSLLELKRIYYELMIRYYLHNNDYLEICRCYKALYDIPATKEDPTKWIPILRKICWYLVLAPHDPMQSSLLNATLEDKNLSEIPNFRLLLKQLVTMEEAEKHLSDMVNSKSLTAKIDRPMGVVSFRVVQDCNSTLNSWATNLK

SEQ ID NO: 19170 - protein, 91 aa, Zea mays
  VARIANT 29: note = Ancestral polymorphism is K, Derived polymorphism is R
  VARIANT 18..91: note = Derived polymorphism lacks residues 18 to 91
  VARIANT 17: note = Ancestral polymorphism is T, Derived polymorphism is I
  VARIANT 12: note = Ancestral polymorphism is D, Derived polymorphism is Y
  VARIANT 2: note = Ancestral polymorphism is S, Derived polymorphism is F
MSEAPKDSMEVDLVQKTEKVKVTGELSSKGVETARQTSQVEAADNTFVSEVVRLEKAGNIDAELIVHVNQIGEGAEAASVSEESSQQVGDI

SEQ ID NO: 19171 - protein, 343 aa, Zea mays
  VARIANT 37: note = Ancestral polymorphism is A, Derived polymorphism is V
MRGQTETGRWRGGDGVAAWWVAVVALQLGHSLSRARAGLLESNPGLAYNFYQSSCPSAESIVRSVTWAQVAADPALPARLLRLHFHDCFVKGCDASILLDNAQSEKTAAPNLSVGGYEAIDAIKAQVEKACPGVVSCADIVALAARDAVSYQFGASLWQVETGRRDGGAPSLASDALGALPSPFAGFGGLLAGFASRGLNLTDLVALSGAHTIGVASCSSVTPRLYQGNATSVDPLLDSAYARALMSSCPNPSPASATVGLDGGSPARFDSGFYARVRQGQGTLASDAALAQNAAAAQLMADLSTPASFYAAFSMSMKKMGRVDVLTGTNGQIRKQCRQINTS

SEQ ID NO: 19172 - protein, 183 aa, Zea mays
  VARIANT 29: note = Ancestral polymorphism is L, Derived polymorphism is H
MAALLLLPLVLAASLGLGNADPAPATIVHKDGTTCTLCASCDNPCNPSYYYPPPSPPPAPVTTPCPPTTPSYPSPSGGGGGPVIYSSPPPPAASGGGGGLGGGGFYYPPPTGGGGGSGGGASQQGGGVYPTAPPPPNPFLPYFPFYFYSPPPPLHSGARAVTAASLLPVLLLTSMLLLLCQTP

SEQ ID NO: 19173 - protein, 172 aa, Zea mays
  VARIANT 40: note = Ancestral polymorphism is S, Derived polymorphism is N
  VARIANT 53: note = Ancestral polymorphism is A, Derived polymorphism is V
MDDRTYKGGIKAYWKRRGYYRMDGDAARRRQPLPTVELGNGVSQAQAQAQPPAGDGSGRRRRCRGWRVRRGQLGRRLLRALSPRRWLMRLRDAYVSAMLRLASSPAVGYGAGAPFCATATHGAAAAAAFARPAQLKEYDEKVLVEIYRSILARGGPLAGAPAAATLRLPTAV

SEQ ID NO: 19174 - protein, 171 aa, Zea mays
  VARIANT 9: note = Ancestral polymorphism is G, Derived polymorphism is S
  VARIANT 40: note = Ancestral polymorphism is G, Derived polymorphism is S
MDDRTYKGGIKAYWKRRGYYRMDGDAARRRQPLPTVELGGGVAQAQAQAQPPTGDGSGRRRRRGWRVRRGQLGRRLLRALSPRRWLMRLRDAYVSAMLRLASSPAVGYGAGAPFCATATHGAAAAAAFARPAQLKEYDEKVLVEIYRSILARGGPLAGAPAAATLRLPTAV

SEQ ID NO: 19175 - protein, 262 aa, Zea mays
  VARIANT 74: note = Ancestral polymorphism is L, Derived polymorphism is R
  VARIANT 97: note = Ancestral polymorphism is P, Derived polymorphism is L
  VARIANT 120: note = Ancestral polymorphism is A, Derived polymorphism is T
MANLFLKQAKQYVATRPVYPPELFDFIASKTPRRDMAWDVGTGNGQAAASLAKLYKHVVGTDTSAQQLAYATRLSNTRYVHTPADLPLEGIHATVAPPASVDLVTVAQAFHWLDLPRFYAQARSVLRPGHGVLAAWCYTEPRVNAAVDAVFWRLYHGSQGFWAPNRRMVDDEYRSADFPFDPVEGEKHTGPFQFSTHRRMDLDDYLMYITSWSAYQTAKDNGVELLDAPTVQEFAAAWGGDAKEVKTVTYPIFLRIGKVRSE

SEQ ID NO: 19176 - protein, 760 aa, Zea mays
  VARIANT 140..760: note = Derived polymorphism lacks residues 140 to 760
  VARIANT 269..760: note = Derived polymorphism lacks residues 269 to 760
  VARIANT 421..760: note = Derived polymorphism lacks residues 421 to 760
MDRSLLPPPAPSPPAPSPALPDGESPALPGAILPHPSLAAAVQPAVPFSTSRTSSLTPRAAATLQASGRLLLHQDLVRSSHSSGRGKALRWRDSSPSSDSLDVGSPSSFKDILLAGTVSASVSVTSGDIVSHGAQARTLQASVQNSSGDGGRFVRRSSPLRSLVQPMRQKPLCSVDAAEGPLPDVSRGRRRRLESDIAVDAGDGVCTEPHFAPTRIIPWSPSFNQRTEVLDRAIVLTVTVAINEAVEEAILDSFARRLALVHDSLSMCRLGPACLLLILPSLEMADRAFDGGRIVNLSPTTKIHVMRWSRTLNSSAAASLPFQVEIDVSGIPAHAWELETVHALLNEWCWIADLHPDCERQREVFKVTAWCSSPGSIPKEFKLEIVDPVTTDGGMLRRSLVYPIRVSVKVLDRPDMLQSLQPSPPPAEDDPDQGRRRRRRRSRRSSFGINAPGKGSTTAVLPRVSVHQRLGPRVQACGKEGVRVPRLAVHKRLGPLGIFNADKGAVKKMKRVWIPKRKLESSVSVWSPKTSSALVSPLPVAVDDAFLEATSSTVVTEDTLVGSPEVIPVDGGICSEAAIISDAPARFPMVESVLQDVNVLSEGVGLPLVESDFQNIHLMESSLSRKHLMSPSLLVYSRKRHQKLQLIDSIDENGNVGAAADAIISPASATGLAADGTYHVGQGPVIIGVMFEREIGHLSALFLTMEEGFLALVSSLWESQSNITTAGTCCLVSVMHDKTLFIANLGDSGALLGKKVGRAE

SEQ ID NO: 19177 - protein, 441 aa, Zea mays
  VARIANT 355..441: note = Derived polymorphism lacks residues 355 to 441
  VARIANT 57..441: note = Derived polymorphism lacks residues 57 to 441
  VARIANT 33: note = Ancestral polymorphism is A, Derived polymorphism is V
  VARIANT 28: note = Ancestral polymorphism is T, Derived polymorphism is I
MGPACDLLSPRRASGFASLLAALAVAATASSPAGQFLVFGELIETTSTTIPDTLSPRFGTADNTFTEWEFQPAYYYQLAATYLREKRYAIECSSSMANLTTEVNGVPESVMPSVYVGQYVRLFEQGDTVSLLPLSDTEYTSYALSEAERFQDSYEIIALFRKAYESFQSLGATRMASACSSGMAIEYYAAGDFSNAKQLFDSVAGLYRQEGWTSLLWENLGYLRECSMKLNSPKDFISYSLEMAALPLFSGSGEENRENKIKSGPAGSPTISRRENIQQEVINVLERKQSSEGTYDGFNNAIEEVTHLDIDQISPLRMVLTASVAFHDQSVKPGSPLLVSVSLLSHLPSPVVVDQLEVQFNQSDCNFVMHSAQEDSLPSYSNLHGQVIQDTSSLTLQDHYGIELICFTLSINLRSCWPDNVISVTLGALSSDKLLHTIFTA

SEQ ID NO: 19178 - protein, 225 aa, Zea mays
  VARIANT 172: note = Ancestral polymorphism is A, Derived polymorphism is V
  VARIANT 130: note = Ancestral polymorphism is V, Derived polymorphism is E
  VARIANT 38: note = Ancestral polymorphism is D, Derived polymorphism is E
MSCSDDMAAFYDAWVGREEQIVAELTAALALQPRRRGDALALLVDGAVAHVAAYYEHKSRLADRDVVAALDPRWLNPIERTFLWAWGWKPALMFRFVESVGVGLRLEQRRALEELRGATAAAEREVDLQVAAVQESLAGPRVLAALRRQPLRNGEAEDAVAVVGRSLRVLLVAADALRDRTLRGVVGLLATDQAGAVVVAMLRFHLGVRRAGRDWSSGHGAQRRT

SEQ ID NO: 19179 - protein, 237 aa, Zea mays
  VARIANT 40: note = Ancestral polymorphism is P, Derived polymorphism is T
MMLLLDEELNHWNSHLRRRGRAGDSRDDGVVVNIDLVKLPGGRRASSRGIVAAAKPAGKNKEKRKNGKGRNNVAEAEQQLEEEDANVSTTTPRTQSHCASAAQSEEQAQASASGLTSEEDLLALSEEMVVSALLAPGSPKLLEVGPDGSCVDGDGGLSGDSGRGSGGPSGDVAQELHLDDDAIMDWDSMGLDIPTADDTWNPLVWDYDQTSLVPEPEGEGRRQRDEMMSDLFFLDNL

SEQ ID NO: 19180 - protein, 496 aa, Zea mays
  VARIANT 76: note = Ancestral polymorphism is R, Derived polymorphism is W
  VARIANT 191..496: note = Derived polymorphism lacks residues 191 to 496
MEKISVGVRFRHPNLVAANISPDSSGGGIDHEWRIDDSHISLLHRAAGPVLGASFAFDHVFDGAATNERIYGTVVRELVGAIGGGFSGTAFTYGQTSCGKTFTMNDSDADPGIIRRAVRDVFDTVRQDGGGLAFPRYGVCGAKSDGKHSATCDFEESGLSACGYLGAEDIISFGGSCERLDLRDLNGGIFCDLAGEVGSLSCCHNDGGCARFIKKTKSDGWPAGLERPSSAANQIENFVDDSTIGESNHGSEVGFTYTVNGNLSHSVVTNDSDSDEVNGMVNGCNGMGKEIDEVSAAIGQDWTRKNMDKCTIAYTEKELRIGIERGVKPKIRWLSRGPLGEAAVSNGFLVTKIQMKKCKLTGEITVFEEFSITIPPKSALLFPCQRAISIDALGCQVQHLIVLDGTWAKAQKMYHENPWLQLLPHVKLESDRVSLYSEVRHEPKAGCLSTIESIVVAMRKLGEDSKGLDDLLDVFESMIADQRRCKDENVKQKLKS

SEQ ID NO: 19181 - protein, 143 aa, Zea mays
  VARIANT 7: note = Ancestral polymorphism is C, Derived polymorphism is Y
MGRAPCCGKVGLKKGRWTREEDEILARYIEEHGEGSWRSLPKNAGLLRCGKSCRLRWINYLRAGLKRGNITEEEEDVIVKLHATLGNRTINLCMTNSIIEEVCSEATELHKSELEKQVLQDAETIKMIALLFHQQDMKTRAQE

SEQ ID NO: 19182 - protein, 557 aa, Zea mays
  VARIANT 70..557: note = Derived polymorphism lacks residues 70 to 557
  VARIANT 172: note = Ancestral polymorphism is G, Derived polymorphism is V
  VARIANT 197: note = Ancestral polymorphism is I, Derived polymorphism is S
MAEAGADSSNAAVDGGGGSVQNDYPTIDPTSFDVVLCGTGLPESVLAAACAAAGKTVLHVDPSPFYGSLYSSIQLSSLASFLSREATPPTSTVAAAASDWHTVVDLHRRIVYSEVETSGAAPEPARRFTIDLVGPRVLYCADEAVDLLLRSGGSHHVEFKSVEGGSLLYWEGCLYPVPDSRQAIFKDTTLKLKEKNILFRFFKLVQAHIAAASASADETGQGDAPARILEEDLDLPFVEFLKKQGLPPKMRAVVLYAIAMADYNQDGADPCEKLITTREGIDTIALYSSSIGRFANAEGTFIYPMYGHGELPQAFCRCAAVKGAIYVLRMPVVALLMDEEKKHFVGARLVSGQDILCQQLIIDPSYKTILDVPFDGSDSHFPRKVVRGVCIISKSVKQGSSNVLVIFPPKSLEEQQVTAVRLLQLSSNLAVCPPGMFMSYLSTPCTDVSVGKQCIKKAIDALYSPQASDGSEDHLETASESTEDVKPTLIWSCVYVQEITQGTAGPLLSCPMPDEYLDYRNILGSTKKLFASIYADEEFLPKKSAPVYANDDSDSAE

SEQ ID NO: 19183 - protein, 520 aa, Zea mays
  VARIANT 58: note = Ancestral polymorphism is P, Derived polymorphism is Q
MARLRCVFVVFVLLSSALRLPGDAIASRGHHGPAAHDYRDALVKSILFFEGQRSGKLPPSQRVSWRRDSGLSDGHSAKVDLVGGYHDAGDNVKFGFPMAFSMTMLAWSVVEFGGLMKSELQHARDAVRWGADYLLKATAHPDTIYVQASGVVAFLFLLLFLIERVMVGDATKDHACWERPEDMDTPRTVYKVDRGTPGSDVAAETAAALAAASLVFRKSDPAYASRLVARAKRVFEFADKHRGSYSTGLAADVCPYYCSYSGYQDELLWGAAWLHRATKSPSYLSYIQTNGQVLGADESDNTFGWDNKHAGARVLISKSFLVQRLGALHEYKGHADGFICSMVPGTATDQTQYTRGGLLFRLSDSNMQYVTSSSFLLLTYAKYLAFAKQTVRCGGVAVTPQRLRAIARRQVDYLLGSNPMGMSYMVGYGAKYPRRIHHRASSLPSVAAHPARIGCSQGFTALYAGGANPNLLVGAVVGGPDMQDRFPDERNDHEHSEPATYINAPLVGALAYLAHSYGQL

SEQ ID NO: 19184 - protein, 137 aa, Zea mays
  VARIANT 77: note = Ancestral polymorphism is V, Derived polymorphism is M
  VARIANT 83: note = Ancestral polymorphism is A, Derived polymorphism is T
  VARIANT 113..137: note = Derived polymorphism lacks residues 113 to 137
MLPPASPHTQSPTSPASPDLTPERLAPHLPCANRPHSRSVYLPPLSIQSLRAAAPPPGAPSFSYLAVFSNCPLVAAVLTFAIAQSIKVLTTWYALSPLFISTRYKGNRWDAKQLVGSGGMPSSHSATVTALVVTVGL

SEQ ID NO: 19185 - protein, 140 aa, Zea mays
  VARIANT 126..140: note = Derived polymorphism lacks residues 126 to 140
  VARIANT 53: note = Ancestral polymorphism is S, Derived polymorphism is R
MEFMNAINLANGSDTDKDKSTYPATVEDSAIEESKSDLESEPSIKPLLAKGKSRIVFHLTSSMAEAQIFLMNENGDRLATLSQNNLSTDIKVFTSSFSIKVALENLKISDDSLLSSHPYFWVCDMRNPGGRSFVEVFRVV

SEQ ID NO: 19186 - protein, 446 aa, Zea mays
  VARIANT 32: note = Ancestral polymorphism is P, Derived polymorphism is L
  VARIANT 72..446: note = Derived polymorphism lacks residues 72 to 446
  VARIANT 107..446: note = Derived polymorphism lacks residues 107 to 446
  VARIANT 134..446: note = Derived polymorphism lacks residues 134 to 446
  VARIANT 183..446: note = Derived polymorphism lacks residues 183 to 446
MLAASTKVGSRLASPHASLSAGAAAAALASSPVLGSGMLPGAGFGETGSHHAADAPPALPCSSSGDSREYYQWKRLVNQRQSTLDGGKVPAALGHHVFGAGCSSRNQHIYRYFSSSHQGSIWAGSKVLHDLPGYVKIVEVGPRDGLQNEKDIVPTPVKVELIRRLATSGLPVVEATSFVSPKWVPQLADAKDVMEAVRTMGGVRFPVLTPNLKVNTLLFVRTTHQGFEAAIAAGAKEIAIFASASEGFSKSNINCTIKESIARYNDVALAAKEKEIPVRGYVSCVVGCPVDGPVPPSNVAYVAKELYDMGCYEVSLGDTIGVGTPGTVVPMLEAAISVVPVEKLAVHFHDTYGQSLSNILISLQMGVSVVDSSVAGLGGCPYAKGASGNVATEDVVYMLNGLGVKTGVDLGKVMAAGEFICRHLGRQSGSKAATALSKVTANASKL

SEQ ID NO: 19187 - protein, 216 aa, Zea mays
  VARIANT 121: note = Ancestral polymorphism is R, Derived polymorphism is C
  VARIANT 120: note = Ancestral polymorphism is R, Derived polymorphism is W
  VARIANT 62: note = Ancestral polymorphism is S, Derived polymorphism is L
  VARIANT 48: note = Ancestral polymorphism is L, Derived polymorphism is S
  VARIANT 46..216: note = Derived polymorphism lacks residues 46 to 216
  VARIANT 36: note = Ancestral polymorphism is P, Derived polymorphism is L
  VARIANT 29: note = Ancestral polymorphism is P, Derived polymorphism is L
  VARIANT 17: note = Ancestral polymorphism is R, Derived polymorphism is Q
  VARIANT 16: note = Ancestral polymorphism is G, Derived polymorphism is S
MEKSRVLVVGGTGYIGRRLVRASLAQGHPTLVLLRPEIGLDIDKLQMLLSFKAQGARVVEASLEDHAGLLAAVGTFLTDPPHAPRFSTPPPRQLSPTAVAAYRPAPGRPYGRSPQPGRSRRLRGFAPLPARVAGKGERARFRSDVLPFAQMAEEVNWSLSLPASKIPSGAFNAMFDATRSLCFDARLVELYSVEAVRASPQPSGTAVDRPSSSGDW

SEQ ID NO: 19188 - protein, 230 aa, Zea mays
  VARIANT 23..230: note = Derived polymorphism lacks residues 23 to 230
  VARIANT 36: note = Ancestral polymorphism is S, Derived polymorphism is L
  VARIANT 56: note = Ancestral polymorphism is R, Derived polymorphism is L
  VARIANT 62: note = Ancestral polymorphism is G, Derived polymorphism is E
  VARIANT 67: note = Ancestral polymorphism is P, Derived polymorphism is S
  VARIANT 139..230: note = Derived polymorphism lacks residues 139 to 230
MCGGAIIFDYIPARRRVSTADFWPGSEADAEDIHASHSTDPQRAPPPRAKAKPGRRKNQYRGIRQRPWGKWAAEIRDPVKGVRVWLGTYPTAEAAARAYDRAARRIRGAKAKVNFPSDTSSSVTVPTAVSRSAAAAAAQAPAVLPLPKVEAQTQVSDEVKELSEELMAYENYMNFLGIPYMEGGTTAASATTAAASAAAGVAEESQVPAPAGLWSFEDYYYPPSLSLFTE

SEQ ID NO: 19189 - protein, 137 aa, Zea mays
  VARIANT 31: note = Ancestral polymorphism is G, Derived polymorphism is S
  VARIANT 29: note = Ancestral polymorphism is P, Derived polymorphism is T
MLDVYGRMGRSWPWIVTLLNEMHAVGVETDGFTASTVIAACCRDGLVDEAVASTIELYIEYQKERVHMVDDARLAFELSTDLSKEGIEVCMVPSADRPDDAKFVVPLLESDFDFAIAKLVPGCPWRLPQKIHLQVNL

SEQ ID NO: 19190 - protein, 245 aa, Zea mays
  VARIANT 25: note = Ancestral polymorphism is G, Derived polymorphism is S
  VARIANT 34: note = Ancestral polymorphism is G, Derived polymorphism is R
MPFMHASTPPPPPPPAPLPPKQKHGSGKQRPRPGRVIRSMRAAFRSFPAMQAPTCRGMPSLHHLPGLQGSGVRSHFHGAMHATGTLYGHRRARITIALHESPGSPPCVLLDVGVPTAKFIQDVSAAGMVRVTLECEKQHHTVDVGARRLLDEPVWTAEVNGESVGHASRREATERDDCVMRMLHSTSMGAGVLPSDMSHPSDGELTYMRAHFDRLVGSKDSETYYMHNPEGGTAGPELTIFFIRT

SEQ ID NO: 19191 - protein, 112 aa, Zea mays
  VARIANT 13..112: note = Derived polymorphism lacks residues 13 to 112
  VARIANT 52..112: note = Derived polymorphism lacks residues 52 to 112
MKTQKISKHISKRFTTPVWIKHKEPREVNMFVDLLLLEAISAAISIVMFSTQRDFISPQKKDTSLGSFLDLVWKLSCKGNFAIYLLFLAHMIDVILNSFSTLLSEKPFAVQG

SEQ ID NO: 19192 - protein, 195 aa, Zea mays
  VARIANT 72: note = Ancestral polymorphism is G, Derived polymorphism is W
  VARIANT 62: note = Ancestral polymorphism is D, Derived polymorphism is E
MASGTPYTAVGVIFLSVFLVAAASAGRTAAPAAAPSSKYSLEEACEQTAGHEDLCVETLSADPSSKTADTTGLARLAIQAAQRNASETATYLSSIYDDDSLENKTAQLQQCLENCGERYESAVEQLSDATSALDTGAYSESEELVVASQAEVRLCQRGCQAVPNHRNILSARNRNVDQLCSIALAITKLIHGPPS

SEQ ID NO: 19193 - protein, 428 aa, Zea mays
  VARIANT 112..428: note = Ancestral polymorphism lacks residues 112 to 428
MPPAPPPPSHSLLRDPDLAWRHGSEWQRAATAVAPTRALSNHHGALRRQAHGRSLTAATSRASGHWTGSCSAPASDRPLLNKQKRPWRCRRAATFSTKKSRTYAAPFQSIWWTAGFTVLAEVVYRLWQHHLFRSSQGELNIFVCWSGSMRWNSDDGLLCGGRWRCRVLFDRLGEEVLCELVGVDGGVEGVARGGAGGGGGCGEERGVEIRVGLVHIRVEAMLGIRGSESHGCVAGRLRLACCGSSRERGSGETEMGEVGFYYGKSEVVKAAVVVALRDAETSACRPSAGWYRFSNRTTPGGTDVGAVVRRWWWQRIRQADKTRRRWKEGRKRANKIVDPGSMVMKIQKSNFGQQNEIWIIPNKIVDPGSMMARTQKNKATAHHLGLLKALKMQMEVQKRLHEQLEDIESYDEDLDFEVDDGAEDEPKA

SEQ ID NO: 19194 - protein, 426 aa, Zea mays
  VARIANT 29: note = Ancestral polymorphism is A, Derived polymorphism is T
  VARIANT 37: note = Ancestral polymorphism is G, Derived polymorphism is R
  VARIANT 114: note = Ancestral polymorphism is R, Derived polymorphism is C
  VARIANT 161..426: note = Derived polymorphism lacks residues 161 to 426
  VARIANT 217: note = Ancestral polymorphism is G, Derived polymorphism is E
  VARIANT 309: note = Ancestral polymorphism is L, Derived polymorphism is R
  VARIANT 327..426: note = Derived polymorphism lacks residues 327 to 426
MECFHEGLSTGIKGLHDEIAARDGFHASADNIFLTDGASPAVHMILQLLIRSEKDGSLCPIPQYPLYSASIALHGGSLVPYFLDEETGWALEVDELKKQLEEARSIEQGIKGLRDEIAAHDGFHASADNIFLTDGASPTVHMILQLLIRSEKDGILCPIPQYPLYSASIALHGGSLVPYFLDEETGWVLEVDELKKQLEEARSKGISVRALVVINPGNPTGQTGPTVPDAMVVQEPFVYIPEETIRDALKVILDARNQPMLIHCKRGKASLLRSSWFSSASCFHDTTTVVFGFPDADARSVFLSASHWLRRRVLEEAAQVVPVFGVRQVELCEEHEFIVLACDGICSILWVIRDCMSSQQLVDFIREHIDTLASEYLLPIKEPLLELERPPIFSAQDWLRKSGVHWSYFVEAAPFCAVIHSNLRER

SEQ ID NO: 19195 - protein, 92 aa, Zea mays
  VARIANT 61: note = Ancestral polymorphism is T, Derived polymorphism is K
MASFNQESRAGTQREEAPLQGKYGGISPKKALINKDHERAYFDSADWVLGKQQGVSSNSPTTVPAAEPLKPKLQRTAYHQLPPRRPAYTSSE

SEQ ID NO: 19196 - protein, 324 aa, Zea mays
  VARIANT 18: note = Ancestral polymorphism is V, Derived polymorphism is L
  VARIANT 30: note = Ancestral polymorphism is E, Derived polymorphism is K
  VARIANT 57: note = Ancestral polymorphism is P, Derived polymorphism is L
  VARIANT 119: note = Ancestral polymorphism is R, Derived polymorphism is G
  VARIANT 128: note = Ancestral polymorphism is P, Derived polymorphism is L
  VARIANT 182..324: note = Derived polymorphism lacks residues 182 to 324
  VARIANT 207: note = Ancestral polymorphism is S, Derived polymorphism is F
  VARIANT 278: note = Ancestral polymorphism is N, Derived polymorphism is I
MLLLQFHFIGDGATLESVLDLVKAMYLNVESFPCVRLLNLSGEIGCSNPGSEKVIAPIVRLRKGSDQLVQPSTILLSLDQMSDFFLRVSNDPELHQKVAGVFVESNGVNNDLQELSPDRKFPKDDFALYSNHSHDWNPVGSGIMWNKYNFHVFLLSEESTNTLQKTTKAQTHDSASCLKEQSCLPLGGHRLCIIFRDRSLGSDSPISGLIALLIAIDALSHIHGLSKLKKQLVFAVFNGEAWGYLGSRKFLHELDEGAASVNGISSLMIDQVSARKIITGRDNLRLQLIMEILDHGDFSVIFELANFDHGDFIRSKLYIVLAFF

SEQ ID NO: 19197 - protein, 388 aa, Zea mays
  VARIANT 377..388: note = Derived polymorphism lacks residues 377 to 388
  VARIANT 374..388: note = Derived polymorphism lacks residues 374 to 388
  VARIANT 343: note = Ancestral polymorphism is M, Derived polymorphism is T
  VARIANT 293..388: note = Derived polymorphism lacks residues 293 to 388
  VARIANT 274..388: note = Derived polymorphism lacks residues 274 to 388
  VARIANT 1: note = Ancestral polymorphism is M, Derived polymorphism is L
MDDDIDSSCSTPFASAPSSPGRPHAIGGGSGGGGYFFSAPASPIHHLLSTSCSASATPSTGGRGCVGDAEFEFGRPGGPMISADELFHNGQIRPLTLPPLPDLDPGSDDDEDCDRAPTRGHDLTPRSASVHRRARSMSPLRSASPRLKLINALVPAPDLSPALDATGEAAPPVTASPRSESRGEARDFARVRNTCFEQYSSSTKQSSGNKFQSISSGRVAPWLETGDAVASMYSESRGEARDFARVQNTCFEQARQAYLVGNKALAKELSMKGQAYNVQMKAAHEKAREAIYRQRNPVSSQRGGDHLIDLHGLHVNEAIHILKGELTALKSVGRAAGERMQVMVCIGTGHHTKGSRTARLPIAVEQFLLDKGLQYMQPQAGLLRVMVY

SEQ ID NO: 19198 - protein, 144 aa, Zea mays
  VARIANT 43: note = Ancestral polymorphism is P, Derived polymorphism is A
  VARIANT 84: note = Ancestral polymorphism is A, Derived polymorphism is G
  VARIANT 106: note = Ancestral polymorphism is K, Derived polymorphism is N
MGNLVSQCVANGAGARPLVVEPDGSRTLVDKNTGVAELMIDAPGHVVARATDVARERRVRAMAADELLRAGVVYLLVPAGRAGARLGDREVEAIARLVCGKKNSTKSSPGGGKRVFPDVNGEGNHDHGFGPRQWQPALQTIYEA

SEQ ID NO: 19199 - protein, 122 aa, Zea mays
  VARIANT 50: note = Ancestral polymorphism is R, Derived polymorphism is Q
  VARIANT 68: note = Ancestral polymorphism is G, Derived polymorphism is C
  VARIANT 101: note = Ancestral polymorphism is P, Derived polymorphism is T
MAKSKNHTAHNQSYKAHKNGIKKPKRHRQTSTKGMRQSGHWLIPESCSCRLHWLFRIDDIHNVFVHVGPVDQSIILLELHGVYIEVELNLNIKRSPAEMDPKFLRNLRYSRKGNKKSGEAEE

SEQ ID NO: 19200 - protein, 165 aa, Zea mays
  VARIANT 97: note = Ancestral polymorphism is H, Derived polymorphism is Y
METAAVAASSAGRRIMVAVDEGEESLHALNWCLANVVSPAGGDTLVLVHARRPRPVYAAMDSAGYMMTSDVLASVERHANAVSAAAVDKAKRVCADHPHVKVETTVESGDPRDVICDAANKMAADLLVMGSHGYGFIQRAFLGSVSNHCAQNCKCPVLIVKRPKE

SEQ ID NO: 19201 - protein, 90 aa, Zea mays
  VARIANT 18: note = Ancestral polymorphism is S, Derived polymorphism is T
  VARIANT 19: note = Ancestral polymorphism is Y, Derived polymorphism is C
  VARIANT 31: note = Ancestral polymorphism is H, Derived polymorphism is Y
  VARIANT 57: note = Ancestral polymorphism is G, Derived polymorphism is E
MKMKMIMIMEQEEEACSSYCSSPLRQCRICYDEEDERRSAMESPCACSGSLKYAHRGCVQRWCDEKGSTVCEICLQFPTLFRQGQCFRKD

SEQ ID NO: 19202 - protein, 174 aa, Zea mays
  VARIANT 82: note = Ancestral polymorphism is T, Derived polymorphism is M
MHVCPAGPSFSSTDTACILPHSPLIRFSRDSVAVPRQQNEPEDEEEQVAAALIGASDPEYAECARAAGRSASCCRSVAVTFTIVLLLRHLVTVVTLGAANQQQFAFSLLTVYMLRASGILLPFYVAMRLICVIQQGQRQYRLHLLQEQRRHALRRLVWLQGQGQHQQPHVILVR

SEQ ID NO: 19203 - protein, 515 aa, Zea mays
  VARIANT 218: note = Ancestral polymorphism is P, Derived polymorphism is L
MAPPAPSVGPRLLLRRLLSTATEAAAETPAPTAPSSAAAAKPAKQDPRLLYRRLSALGSAGEGSVSRVLNKWVREGGATRSDDLVKHVKELRKYKRHAHALELMDWMVNARGMNMSHTNHAIRLELIYKVRGLEAAENYFANLPDPAKNHRTYGSLLSCYCSAKMEEKATNLYRQMDELGIWSSTLPINNLMSLYMKLDQYRKVVSLFEEMKLKNVKPNSLTCCILMTSYAALNKIDDIEELLKEMVEKDVTLGWSAYSTLASIYVNAGQFGKAESALKKLEGLISAHDDRQPFDFLLSLYASLGNLSEVNRVWNVIKSKFSKVTNTSYLGMLHALYKLNDIDRMKQIYMEWESNYETFDVKLTNMMIRSHLKVGMTEEAEMLVEKVKENGAEFDTKTCELFLDHYMGTEDMNSALNWLENMTKLSKKAEKLDQDRIYKFQKYFEEHKDADGAERFCNCLRTLGCIDGKAYESLLRTYLAAGKKSCSLRQQIKNDKVEICYDIGKLLKRLGDKGR

SEQ ID NO: 19204 - protein, 127 aa, Zea mays
  VARIANT 49: note = Ancestral polymorphism is N, Derived polymorphism is T
  VARIANT 105: note = Ancestral polymorphism is R, Derived polymorphism is S
MWAGCITTKELGTVMRSLGQNPTEAELQDMINEVDADGNGTIDFPEFLNLMARKMKDTDSEEELKEAFRVFDKDQNGFISAAELRHVMTNLGEKLTDEEVDEMIREADVDGDGQINYEEFVKVMMAK

SEQ ID NO: 19205 - protein, 414 aa, Zea mays
  VARIANT 40: note = Ancestral polymorphism is G, Derived polymorphism is D
MPAAIAAPASLAMKEFSYEEVEAATGGFAAKNLVGKGSHGSVYRARLKEEGGRTAVVAVKRPSHAQGEAKLGNEIAVLSAAPRHPGVIGIVGVSSSPAGAAAPGPRLPPLLVMEFMPNGSLHDLLHRSPRPPPWPRRVEIALDVARAVRALHAAAPRVIHRDVKSANVLLGRDGRARLADFSLAVSVQDDDEGEGSASAGPAPAPAPAGTIGYLDPCYTEAGRLGPASDVFSFGVVLLELVSGRRVMDVDSCPSSIVSWAAPLIGAGRAREVLDGRVAAPPTACADRVLAVAARCVSDSAELRPAMDEVVSELRGALESAGWRRHRDGGVVERVCRRVASWGQRARRRSKRRVRATATKVECAEHSGGGVALAVAPDRDGSSRNNGMVSGAAAHSKAEEDALARFESELDLVFR

SEQ ID NO: 19206 - protein, 608 aa, Zea mays
  VARIANT 250..608: note = Derived polymorphism lacks residues 250 to 608
  VARIANT 302..608: note = Derived polymorphism lacks residues 302 to 608
  VARIANT 406: note = Ancestral polymorphism is C, Derived polymorphism is R
MATGQLFSKTTQALFYNYKQLPIQRMLDFDFLCGRETPSVAGIINPGSDGFQKLFFGQEEIAIPVHPTVEAACNAHPTADVFINFASFRSAAASSMSALKQPTIRVVAIIAEGVPESDAKQLISYARANNKVIIGPATVGGIQAGAFKIGDTAGTIDNIIQCKLYRPGSVGFVSKSGGMSNEMYSTIARVTDGIYEGIAIGGDVFPGSTLSDHILRFNNIPQVKMMVVLGELGGKDEYSLVEALKQGKVQKPVVAWVSGTCARLFKSEVQFGHAGAKSGGELESAQAKNQALKEAGAIVPTSYEALESAIKETFDKLFEEGKISPVTEITPPLIPEDLKTAIKSGKVRAPTHIISTISDDRGDEPCYAGVPMSTIIEQGYGVGDVISLLWFKRSLPRYCTQFIEICVMLCADHGPCVSGAHNSIVTARAGKDLVSSLVSGLLTIGPRFGGAIDDAARYFKDACDRSLTPYEFVEGMKKKGIRVPGIGHRIKSRDNRDKRVQLLQKYAHTHFPSVKYMEYAVQVETYTLSKANNLVMNVDGAIGSLFLDLLSGSGMFTKQEIDEIVEIGYLNGLFVLARSIGLIGHTFDQKRLKQPLYRHPWEDVLYTK

SEQ ID NO: 19207 - protein, 214 aa, Zea mays
  VARIANT 71: note = Ancestral polymorphism is S, Derived polymorphism is N
MFGRGFFGSESRSNDLTTRLTVHFGSAMIDTTVTRDAAVADEWVRTVRAANPRGAPLIVGLDCEWKPNYRSWTTSKVAILQLCAGDRCLVLQLFYVDRIPASIRSFLADPDVFFVGIGVGEDAAKLATDYGLTCASPVELESRCNDYLGYYTGGPRLGLKGYAREVLGLVMEKPRGVTMSNWEKHDLEDAQIRYACIDAYVSYKLGEKVLVLTD

SEQ ID NO: 19208 - protein, 270 aa, Zea mays
  VARIANT 9..270: note = Derived polymorphism lacks residues 9 to 270
  VARIANT 14: note = Ancestral polymorphism is D, Derived polymorphism is Y
  VARIANT 20..270: note = Derived polymorphism lacks residues 20 to 270
  VARIANT 23: note = Ancestral polymorphism is P, Derived polymorphism is R
  VARIANT 77..270: note = Derived polymorphism lacks residues 77 to 270
  VARIANT 182: note = Ancestral polymorphism is R, Derived polymorphism is W
MEVKEVCVQDMLVDLEKGKCLLPIEDNSGMKVNSIAGHASTMRPSSWDDLVALKDDKSHHICCFSSHRQDSSVKSGEPMKAEGEIKVGILDKSTADKENKKWYKKPPRPPRSQTTSPLDPADQKLISALSELAVLKKARIERMKALKKMKNSKPASSIGNLVALIITVILCFFILWQGFFSRHGVSISFHRPSISSVRMHGGLISIQFYIKNVTTVSPHSSSAAQVRHPFLCGPACYIAPSSILKLIAASQCHNYEIGKYNTYMFIWITF

SEQ ID NO: 19209 - protein, 410 aa, Zea mays
  VARIANT 165..410: note = Derived polymorphism lacks residues 165 to 410
  VARIANT 143..410: note = Derived polymorphism lacks residues 143 to 410
MAASGAANDAAAATGLRLRYDVIVVGAGIMGSCAAHAAASRGAHTLLLERFDLLHQLGSSHGDSRIIRDAYVKAQYPPMVRLARRLWAEAEAESGYRVLTPAPHLSMGPRGNAALLAAVKSAGAEEVDLSQMWGGAFQAPEGWLTAVSEHGGGVLNATKSVAMFQALAVKMGAVVRDNAEVVDIRKEPEGGVVVKTSSGEEFRGAKCVVTVGAWTSKLLRSVAGVEIPIQPLHTLTLYWRIKPGRERGLMAKAGFPTFSSYGDTPVYGTPSLELPGLIKISCDGGPPCDPDNRDWASGDREITERVARWIQEFMPGHVDSAGAPVVRQSCICSMTPDKDFVIDWLGGEFGEDMVVGAGFSGHGFKMGPAVGRLLAEMAIDGEARTAVEAGVELGHFKINRFNVQDQQVKG

SEQ ID NO: 19210 - protein, 613 aa, Zea mays
  VARIANT 545..613: note = Derived polymorphism lacks residues 545 to 613
  VARIANT 481..613: note = Derived polymorphism lacks residues 481 to 613
  VARIANT 93..613: note = Derived polymorphism lacks residues 93 to 613
MDCHGSGKGNEKAILDSGESSGAAGGLSKTYVVTKEGKRIELKGTIKDPWSHGTKRGNVKPCFNAPRDVKNILLEEVALSKKKKRDTTENRLYIQKALVEHDYRTTIARLNEEEQLEMAMRESLRDVGLTYDGSSRGSGIVIGAASGTRVSNSVAGNYGQTSGSRSGSSTKQSSLRSFYPGPSSSKAPFDIDLARSRAPSQPQVDIMLCRDSKLKLWKALSKWFHANDIPGRKADCPYFRAAMKLAQQLGEVPLPKGKDIDGQLLDMNYNDLEAHMESFKEDWSRYGQKNATLSGFLPKMIQAYNDISAKLKKSERGKGGLLKRTAEVISKRIRYLLNETLMLAGAALDPQELYRSNLAKKSSCQLAVTLAIKKLATSTKEAAAAIDQFSRFIEKKGLFGDPEAKWSALNGKPDAADFQSLQEKDSDPCSMLMDVALYDDQNPIMDWLNNSMSDSAPTLDEYDDSDLDWSTPSRFVTESLQMGIEEVAEFKRDLYMGKKAVKTNRECNGMEKMLKVPQKTMKLILHKNKAAQFMLSQVTVVPMMKVMAIMMLVPMEVVALGLLMVLPKVRDMGNQLLCVQDQQEKGSQLSRALLNYKCVVWLQRKDLDMAMLH

SEQ ID NO: 19211 - protein, 173 aa, Zea mays
  VARIANT 40: note = Ancestral polymorphism is G, Derived polymorphism is R
MAARSARDAATAAGEGRARAWGAGARLAPPAAAIGEGEKGRHGRENKGGRGATAGEGEGRVREALHGRENEETLGTTMEVSHRGRRPSLEPRGNPSIARDSGIQSMNRTRCDKALDETNAAVPSDSADDARIGSNCSAELSLELEPPRTSASNTELGIGFGENVSCSGTGSTR

SEQ ID NO: 19212 - protein, 166 aa, Zea mays
  VARIANT 3..166: note = Derived polymorphism lacks residues 3 to 166
MDWLCNSRSGSTPILDEYDDNELESPILSRVLMDELGMDFNTRDGKKKRKARLVDIEEEMEDDVESDSSEGSPINVELCDSSSNDDTGDGFGDEWEFRGPSGGGACEVGPSGGGACEVGPSGDGSRDGAMHEQAAPNPPLRPRSTRLKKVPVKELYKVRQTSGLCI

SEQ ID NO: 19213 - protein, 427 aa, Zea mays
  VARIANT 276: note = Ancestral polymorphism is V, Derived polymorphism is D
MASPSSPETPCHTSIPVRLFSSLLPEVGRASEKKAMAAESFLFTSESVNEGHPDKLCDQVSDAVLDACLAQDPDSKVACETCTKTNMVMVFGEITTKASVDYEKIVRDTCREIGFTSDDVGLDADRCKVLVNIEQQSPDIAQGVHGHFTKRPEEIGAGDQGHMFGYATDETPELMPLSHVLATKLGARLTEVRKDGTCAWLRPDGKTQVTVEYVNEGGAMVPVRVHTVLISTQHDETVTNDEIAADLKEHVIKPVIPERYLDEKTIFHLNPSGRFVIGGPHGDAGLTGRKIIIDTYGGWGAHGGGAFSGKDPTKVDRSGAYVARQAAKSIVASGLARRCLVQVSYAIGVPEPLSVFVDSYGTGTIPDKEILKIVKENFDFRPGMITINLDLKKGGNRFIKTAAYGHFGRDDADFTWEVVKPLKKASA

SEQ ID NO: 19214 - protein, 92 aa, Zea mays
  VARIANT 2: note = Ancestral polymorphism is R, Derived polymorphism is T
MRSTLLEIGMSYSRASSLQLLGKEESNGKWCRSTKRGGTEDNLRMVERSRGRTTQQSPPSCPRTTSMSGQGVASKAWRGDGLSQPRREGTFP

SEQ ID NO: 19215 - protein, 187 aa, Zea mays
  VARIANT 159..187: note = Derived polymorphism lacks residues 159 to 187
  VARIANT 158..187: note = Derived polymorphism lacks residues 158 to 187
  VARIANT 97..187: note = Derived polymorphism lacks residues 97 to 187
  VARIANT 89..187: note = Derived polymorphism lacks residues 89 to 187
  VARIANT 26: note = Ancestral polymorphism is E, Derived polymorphism is K
MVGGGRRGGAAEEVKLNTGNVFAALESLEKKKNGDKGKVAGRRTVRGPWNPGQTGERVRRLRGVHLRHLARGRPEDHTHPRRRDGGGAQGRRRWWLQEGGFQHRAIGIERPATARIFVFVAGGTRQSRRVRLLLLLHEEAVGGPGHLHLPGREGLLQRRVQERVHYGPFGSNYLEPKEIWAFLIVVT

SEQ ID NO: 19216 - protein, 315 aa, Zea mays
  VARIANT 61: note = Ancestral polymorphism is R, Derived polymorphism is P
MEKEIPFSGIMSSSPVDNPDFYNWNRVKIRYCDGASFAGEAFDKVNGFYFRGQRVWDATVRHLLSIGMAAADQVLLAGCSAGGLAVILHCDQFQAFFPRSNNAAAAGGTTTTTTVKCLADAGLFLDAIDVSGGRSLRSYYSDIVAMQGVGPNLPPACTARLDTASCFFPQNVIDGVNTPIFLLNAAYDAWQIQESLAPSGADPSGAWRACKSNHSACDATQMKFLQGFRDQMVASVLGGRFAGSRSNNGLFINSCFAHCQSELPATWSWSHAAGASPAIQSRGIAKSVGDWYFGRAQVKAIDCPYPCDGTCRNII

SEQ ID NO: 19217 - protein, 146 aa, Zea mays
  VARIANT 2: note = Ancestral polymorphism is L, Derived polymorphism is P
  VARIANT 5: note = Ancestral polymorphism is R, Derived polymorphism is H
  VARIANT 8: note = Ancestral polymorphism is M, Derived polymorphism is I
  VARIANT 30: note = Ancestral polymorphism is R, Derived polymorphism is C
  VARIANT 35: note = Ancestral polymorphism is A, Derived polymorphism is E
  VARIANT 95: note = Ancestral polymorphism is N, Derived polymorphism is I
  VARIANT 114: note = Ancestral polymorphism is G, Derived polymorphism is R
MLLGRGVMLCVLLFSSLWRLRARAYATISCVRSAALPVAASWLRLRNTHVLLLMVVLFALFLRKLSGARFIPDRSAMDMDMAHYLLTEPRKDKENVAGMVASPSKEAYRRLLAGKLFNNRTQILAFRNKLPEPENMSITNVASSNL

SEQ ID NO: 19218 - protein, 476 aa, Zea mays
  VARIANT 364: note = Ancestral polymorphism is R, Derived polymorphism is G
  VARIANT 285: note = Ancestral polymorphism is P, Derived polymorphism is L
  VARIANT 191: note = Ancestral polymorphism is P, Derived polymorphism is L
MSTPRRGGQHHGDKRTVTRAASRNSDGHGAGDLSFGSTAGPRFAVAPPRPWAPPPEHAAVFAQPPDDPSTLTMLWGPPGEVPVAGFAAAPEGRPDAFAGSASCLPLARQVGGQQGARNFVVSPLSFHAALALVAAGARGETQRELLRFLDSESLGELHRAAATALVARLSDLPQASFACGVWVDRSRALTPEFMDTAASRYAAVAESVDFLKNSEAARQQVNDFVKGATKGLIGDVLPPGSVDSSTALVLANAIYFKGAWARPFDPSRTIFAPFHLPDGGTVRVPFMTTSGFEDQRQRVAVFPGFKALKLPYKNDDGAQQDAFYMLLLLPDGETLTLNDLYDKVVSSPGFIRKHTPVDEVRVGGFMVPKFKFTFEFEASHDIQKLGVNRAFQRGDFSGMVSGGNGLIISGVYHKATVEVDEAGTVAAAATAEFMFMCARMHPPPVDFVADRPFLFAIVERSGVVLFLGHVVNPLVG

SEQ ID NO: 19219 - protein, 590 aa, Zea mays
  VARIANT 317..590: note = Derived polymorphism lacks residues 317 to 590
  VARIANT 310: note = Ancestral polymorphism is D, Derived polymorphism is Y
MASRDLRRLLDGVALVAREATRGTSLRDVLRSALLATTDLAGLTRGTPRRPPHPPGAGPLPATESSRPSSVVYFSHDEATASPQDHALERPPPAQEAPHPARTQETVRTGTTASVAAEPAAVAADRPEPAAPPPDPSPLPQQAPPLASAAPGEKRRRLRERKVPSTPFTRALGYGLGAGLAWGTVQESARRVMYGTPVDTEGKRSALSPFLSDQNAERVALALCRMRGAALKVGQMLSIQDESLVPPPVLAALDIVRQGADVMPRKQLNSVLDAELGPDWSSRLRSFDYEPLAAASIGQVHRAVLKDGSDVVMKIQYPGVADSIESDIENVRLLLTYTNLIPKGLFLDRAMKVAKQELARECDYVLEASNQKRYKELLCDSDGYNVPKVIDQLSSRKVLTSEFVPVFLPLPLPTLTVQPKRETDPNWSNFLYDDATRKFNLIDFGAARDFAKHFVDDYLRMVVACANRDRTGVLEMSRRLGFLTGEEPEVMLDAHVQAAFIVGVPFSKPGGHDFRANNITHSVSNLGATMLKHRLTPPPDEVYSLHRKLSGAFLACIKIGAVVPCREILFQVYEQYNFSDGHSDVESSAG

SEQ ID NO: 19220 - protein, 307 aa, Zea mays; identical to SEQ ID NO: 9244
  VARIANT 92: note = Ancestral polymorphism is N, Derived polymorphism is K
  VARIANT 81: note = Ancestral polymorphism is S, Derived polymorphism is C
  VARIANT 66: note = Ancestral polymorphism is R, Derived polymorphism is W

SEQ ID NO: 19221 - protein, 437 aa, Zea mays
  VARIANT 411..437: note = Derived polymorphism lacks residues 411 to 437
  VARIANT 387..437: note = Derived polymorphism lacks residues 387 to 437
  VARIANT 364: note = Ancestral polymorphism is T, Derived polymorphism is I
  VARIANT 243: note = Ancestral polymorphism is S, Derived polymorphism is F
  VARIANT 202: note = Ancestral polymorphism is T, Derived polymorphism is I
  VARIANT 201: note = Ancestral polymorphism is P, Derived polymorphism is L
  VARIANT 177: note = Ancestral polymorphism is K, Derived polymorphism is N
MGTLWPLLYLLDSLSSQYRAAAVASCLPNLPIAAPPRNATSGTVPGAGGRPGSRVHGAPPGGLVLVSKDPDNIRDIATGMVVNPRPFIEVRSAAPNHIENALRDVHKRATQMLAQQAVGNQLQLLIVILPEVSGSYGKLKRVCETDIGIVSQCCLPKHASRPNKQYLENVALKINVKVGGRNTVLERAFAHNGIPFVSEVPTIIFGVDVTHPHQERTLHHPLLLLVVASMDWPEITKYRGLVSAQPHQEIIEDLFTVSKDPQMGNNVNGGMIRELLIAFRKKTNRKPERIIFYRHVDGVSEGQFNHVLLHEMDAIRKACASLEEGYLPPVTFVVVQKRHHTRLFPEVHGRRDMTDKSGNILLGTVVDQKICHPTEFDFYLCSHAGIQLCKCSGEFEFHLDYEGASSTTRGQVASLLEVEQPLGVVLKRKVQSLRQRY

SEQ ID NO: 19222 - protein, 257 aa, Zea mays
  VARIANT 231..257: note = Derived polymorphism lacks residues 231 to 257
  VARIANT 25: note = Ancestral polymorphism is H, Derived polymorphism is R
MRLDLGSKGVACKTFPASANTSSSHQESHNVDAKSRVEDVWKKMNGGFPNKMPKPAMTKLSSTATEKKNKPTNNWMTVLGLSPSKACNSSQGSKNGLKWTQHETREDAKKLAAKALAAAKNAAAVASGRGKVEITEVRDFAVKDIEIKKLVDPNSKEAIEKAKAAGAAPSAVDSILEQIRKKQKLSVLDKTKKDWGEYKEENRGLEEELDAYKKSSNQYLDKQSFLQRTDYREFERERDARLSMMAKRRTDMREDDV

SEQ ID NO: 19223 - protein, 499 aa, Zea mays
  VARIANT 281..499: note = Derived polymorphism lacks residues 281 to 499
MMLAILARRRAAEAVLRRPQAALSAWRAYAAAGEESDVVVVGGGPGGYVAAIKAAQLGLKTTCIEKRGTLGGTCLNVGCIPSKALLHSSHMYHEAKSSFAHHGVKFSNLEVDLPAMMAQKDKAVAGLTKGIEGLFKKNKVTYVKGFGKLSSPSEVSVDLIDGGSTVVKGKNIIIATGSDVKSLPGITIDEKKVVSSTGALCLSEIPKKLVVIGAGYIGLEMGSVWNRLGSEVTVVEFAPDIVPSMDGEVRKQFQRMLEKQKFKFMLKTKVVGCDTSGDGVKLTLEPAAGGEQNILEADVVLVSAGRTPFTSGIGLETLGVETDKAGRILVDKRFMTNVKGVYAIGDAIPGPMLAHKAEEDGVACVEFIAGKEGHVDYDTVPGVVYTHPEVASVGKTEEQVTALGIPYRVGKFPLLANSRAKAIDDAEGVVKVIAEKETDKILGVHIMAPNAGEIIHEAVIALQYGASSEDVARTCHAHPTVSEALKEACLQTFDKAIHI

SEQ ID NO: 19224 - protein, 438 aa, Zea mays
  VARIANT 24: note = Ancestral polymorphism is I, Derived polymorphism is M
MGVIGGTPPASCPTTRHCAEWARIYLKYCLCSQKEGAALALGLISVVSWGLAEVPQIMTNYRHKSTEGLSVAFLMTWIVGDLFNLAGCFLEPATDIDSSVFDLISNTSFLTKLPTQFYMALLYTITTLILTGQTIYYSHIYHHLKLKNSRAASKPQKHQYRDASLREKLLGAKGSAASRNNESDTTVLIPSSPIPVNMKLVDQYHGSSSNADYYYMSARSLSRSPVPTAGIWSGSNRQSSRSPPQMNDQRGSLIGEIAPEHSAPSTVTKNALSVAPWMGLLLGTCLLHILIGNKHREMASGTVIPIGRRLLLFVDDHGNSSLSQSSGSEIGSFLGWAMAMIYMGGRLPQILLNMQRGHVEASGLNPLMFTFALLGNSTYVGSILVNSLDWSKLRPNLPWLVESGGCVLLDSCIILQFLYFHYRKRREPSDEHDNADKA

SEQ ID NO: 19225 - protein, 55 aa, Zea mays
  VARIANT 40: note = Ancestral polymorphism is G, Derived polymorphism is S
  VARIANT 11: note = Ancestral polymorphism is K, Derived polymorphism is N
MGDLETLNLGKNHLSGQLTDMFSQLPKLSTLDLSFNRFSGSLPKSFQHLKDLKTL

SEQ ID NO: 19226 - protein, 453 aa, Zea mays
  VARIANT 32: note = Ancestral polymorphism is A, Derived polymorphism is P
MACSTAARRHRRPLFTILVALSLLQVSAMIVPLDEQEGDRVGLLPGQPRSPAVSQFSGYVTVNERSGRALFYWFFEAQTSPAEKPLVLWLNGGPGCSSVGYGAASELGPLLVNSNGTGLEFNKFAWNKEANLLFLESPVGVGFSYTNTSSDLENLDDRFVGHYVPQLAEVVYEHNKHLEAKQRIHLKGFIAGNAETDDYYDYTGMVEFAWSHTVISDQLYERVKTACDFRLSPTSTECGHVMDLLYHTYDEIDIYNVYAPKCNTDDGSAPLPSSSSSADDSSASSKQQSKRRLRMYSGYDPCYSSYVETYFNRMDVQKSLHANTSGRIRDRRWSLCSDPVFDIYDMEVFSVLPIYSKLVKAGLKIWVYSGDVDGRVPVIGSRYWVEALGLPIKSQWQPWYLKDQVAGRYVEYEGLTMATVRGAGHAVPQDKPAEALVLIKAFLSGTQLPAKNN

SEQ ID NO: 19227 - protein, 296 aa, Zea mays
  VARIANT 17: note = Ancestral polymorphism is E, Derived polymorphism is D
  VARIANT 43: note = Ancestral polymorphism is S, Derived polymorphism is F
  VARIANT 58: note = Ancestral polymorphism is R, Derived polymorphism is W
MGKDGIQYAVVDAFTAEPFKGNPAAVCLLEDAAKAADERWMQSVAAEFNISETAFLLREKSSAAGAVPLFQLRWFTPVAEVELCGHATLASAHFLFTSVLAEHEKLVEFSTKSGILTAKKVPAPQSTGVSGEGKLFIELDFPTIDLVDCHPSELPAIPDTLNGASIVSVHKSTTAGDLIVELSSGKEVADIIPNIHEIEKCSGRGIIVTGPAPAGSGYDFFTRFFCPKFGIDEDPVCGSAHCVLAPYWGGKLGKHKLIAFQASPRSGILYLELEATGRRVRIQGEAVSVMTGTLLA

SEQ ID NO: 19228 - protein, 165 aa, Zea mays
  VARIANT 6: note = Ancestral polymorphism is R, Derived polymorphism is I
  VARIANT 9: note = Ancestral polymorphism is A, Derived polymorphism is V
  VARIANT 41..165: note = Derived polymorphism lacks residues 41 to 165
  VARIANT 114: note = Ancestral polymorphism is G, Derived polymorphism is R
MSQTNRELAMLITNKLGFTPEFLGRVKLVTSFASLLCVGLYNYFLKEVPLRKIFLVTTIIGSALGMTQVLLASFMPVLVLAGKLCLPGMEATLFATLMSISNAGSVTGGLVGAGLTRIFGVTRDTFGNLPLLIVVCNLSSLLPLPLLGLLPEESGDTDNGETKNI

SEQ ID NO: 19229 - protein, 91 aa, Zea mays
  VARIANT 33: note = Ancestral polymorphism is G, Derived polymorphism is R
MASIVLLLSELLGGESASVLAAERYMGGHRSLREFRPAVTEAPPKRAQRLAEGQRAAAGTERAREEGKQRKDDDSFEDLALPRVAVDIMWP

SEQ ID NO: 19230 - protein, 368 aa, Zea mays
  VARIANT 85: note = Ancestral polymorphism is G, Derived polymorphism is R
  VARIANT 151..368: note = Ancestral polymorphism lacks residues 151 to 368
  VARIANT 154: note = Ancestral polymorphism is S, Derived polymorphism is F
MMLTRASMGVMDAAAVDEVVRRLVEGGRGGRQVQMSEAEIRQLCVEAKQVLLSQPNLLRIHAPVKICGQPPFVHLTSACACSRSGRQRHVLFNLGRILLDAVPLVPFPDGRGKNDVQCCCLLVLEICSLIRSVFTPELPISCLEWMIKNDRVHSSGDIHGQFVDLLRLFDLGGYPPTSTYIFLGDYVDRGKQSLETICLLLAYKLKYPDNIYLLRGNHEDAKINRVYGFYDECKRRFNVRLWKIFCDCFNCLPMAALIDDKILCMHGGLSPELTSLDQIKDIERPTEIPDYGLLCDLLWSDPSHDTEGWGESDRGVSCTFGADKLVEFLEKNDLDLVCRAHQILKPNETGAPHSRKPLPSKAPKGENV

SEQ ID NO: 19231 - protein, 723 aa, Zea mays
  VARIANT 75..723: note = Derived polymorphism lacks residues 75 to 723
  VARIANT 40: note = Ancestral polymorphism is S, Derived polymorphism is R
MAAKVRTELDVGADGVAVITIYNPPVNSLSIDVLHSLKESYEEALRRNDVKAIVVTGKGGKFSGGFDISSFGGVQGGQTMQPKVGYIAIDILTDTVEAATKPSVAAIDGLALGGGLEVAMACHARIATPTAQLGLPELQLGIIPGFGGTQRLPRLVGLTKSLEMMLLSKPIKGGEAHQLGLVDALVSPNDLVNTARQWALDIYECRRPWIKSLYKTDKLEPLGEAREILKFARAQAQKQAANLHHPLVCIDVIEEGIVAGPRAGLWKEATSFQELLFSDTCKSLVHVFFSQRATSKIPGATDLGLMPRKITKVAILGGGLMGSGIATAMVLSNYPVLLKEVNEKFLTAGINRIQANLQSRVKKGKMTEERYEKAMSLVTGVLDYERFKDVDLVIEAVIENVKLKQQIFSDLEKYCPSHCILATNTSTIDLNLIGEKTKAQDRIAGAHFFSPAHVMPLLEIVRTQHTSPQVVVDLLDVGKKIKKTPIVVGNCTGFAVNRMFFPYTQSALFYVDLGMDVYKIDRACTKFGMPMGPFRLADLVGFGVAVATGMQYLENFPERVYKSMLLPLMMEGNRAGEATQKGFYKYEGKRKATPDPEIMKYIEKSRSMAGVTPDPELMKLSEKDIVEMVFFPVINEACRVLDEGIAVKASDLDIASIFGMGFPPYRGGVMHWADSIGAKYIHGKLEEWTKRYGGFFKPCSYLAERAAKGIPLSAPTKKVQARL

SEQ ID NO: 19232 - protein, 526 aa, Zea mays
  VARIANT 233: note = Ancestral polymorphism is S, Derived polymorphism is R
  VARIANT 244: note = Ancestral polymorphism is R, Derived polymorphism is I
MATSSNASTEVSGSGGSFPVANNPAIAGQVLAAACMVPPDDDEKKPLWRYAEIIERTGKGLGENVRIRCRLCNHVWNGSYSRVKAHLLKIPGFVVKFCRVVTVHVLDQLKAEVAAASAVADRTMPRDIPLPVEGKEKKRRRGVSAIESSFNLDVRQAFMFAANNPIGGYVPPSYKLRTSILMQERTHVERMLQPVKETWSSKGWISEVIGDANMIKNFIMNHSMRLAMFNEQSNLKFLAIADTRFASAIVMLKRFIIIKDALSVMVVSEKWSTYREDNPRQAQFVKEKIVNDLWWDKVRYFLSFAEPVYTMIRAAGTDKPCLHLMYEMWDTMIEKVNSVIYRHEIKESHEESIFYSAVHDILVSRWRKSNTPLHCLAHSLNPKYYTDAWINEVPNGQAPHNDEEISEMRNACFRSYFSGEELKIKLQYANFSLFGTGFNSFDSIEDRGYMEPKLWWRIHGHSAPELKSGPSAMWDVGADTFEADFEGGAGFLEQADLSLDEPELEEKLFEDLGALDLAKDAEPNEE

SEQ ID NO: 19233 - protein, 191 aa, Zea mays
  VARIANT 122: note = Ancestral polymorphism is D, Derived polymorphism is G
  VARIANT 126: note = Ancestral polymorphism is E, Derived polymorphism is K
  VARIANT 131: note = Ancestral polymorphism is M, Derived polymorphism is V
  VARIANT 141: note = Ancestral polymorphism is R, Derived polymorphism is W
  VARIANT 144: note = Ancestral polymorphism is K, Derived polymorphism is M
MDLLLAPRSPAVGATCIFVSVSFLAVEQQQQLQGHGTDGRPSRIDRGPAADIVDAGGGDRWWEADGRSASGDSGRQVLPSRARRRLGDEGGGVQDLPGGLGHLHGGPLRLLWQPQARLNPTGTILEIGPGVETSPSAPSMRCYKVIKGLKLIERCLLLKFVASQTTDKPFRTGHRRRLELAFWFKHQVVFM

SEQ ID NO: 19234 - protein, 420 aa, Zea mays
  VARIANT 322..420: note = Derived polymorphism lacks residues 322 to 420
MISPVLLAIVLKKVSLTGTGGRYQGRIRLRALEAFVDLVQRRFAHLAAVTLQMGIMPFLCVMVAEACASLPPLSYVAPRLVAACRVLVFLSNLLLMALGCGILLLFHSNALLVLTICSAMALGVAAVQIRYLCRGVADAGAADDAEAEEYHSKLEQLLELSAGMTVMMFLVLEFVALESLLRNTRQGQAVKRGQTFLGVALLVSFMASTLGVSLMNVWTTPHVISGCVVLTAEFMRVLNFSFHALPIAAVVVLITLDVLPHAWKLAVWLPFFPLVIVLLVLLARYSREAMKQQEPAARGRGKQGPEATGSSTASDPSSSGEKKPDDPKPASLELTKVAFTGFLAVAVPSVTSASFCVPSAFFVLFSAATVLLGLLWRLLTHEAEPPSCVLQAANHASFSAHMSIFLAGIAFWVMAAFALH

SEQ ID NO: 19235 - protein, 218 aa, Zea mays
  VARIANT 89: note = Ancestral polymorphism is G, Derived polymorphism is R
  VARIANT 138..218: note = Derived polymorphism lacks residues 138 to 218
  VARIANT 193: note = Ancestral polymorphism is P, Derived polymorphism is L
MAPAFPTTLLHQASTSFRFPAGAAGCIRPHCLAPLAAPTTLSLAATPAVPRRLLLPVAAGIWDLISGGAGAAAAASLAVRRGMQLFRQGDVAGSLAEFDKAIEMDPRQKQYLWQRGLSLYYLDRCVGLDSRPVMREAYALLRSGADPEKLVAKFSSGTDGEVFYSSLYAGLYYESQKDADMAKSHIVAACKSPYGSRSGDYMASLALVHCQCRNWKVV

SEQ ID NO: 19236 - protein, 169 aa, Zea mays
  VARIANT 32: note = Ancestral polymorphism is G, Derived polymorphism is S
  VARIANT 65: note = Ancestral polymorphism is R, Derived polymorphism is K
  VARIANT 90: note = Ancestral polymorphism is P, Derived polymorphism is A
  VARIANT 124: note = Ancestral polymorphism is I, Derived polymorphism is S
MGQAPCGVQERGGEQPPLMGGLSLPGARLKAGHLQGHHTQAQREEHPLQIFQTCAGASSDEIEHRDASAKIPQEDLDIPFVEFLKKQGLAPKMRVIVLYAIAMVDYDQDGVVPCEKLTTTREGIQAIVLYSSFIGRFANANGAFIYPTYGHAELPQAFYRCATVRVPYM

SEQ ID NO: 19237 - protein, 105 aa, Zea mays
  VARIANT 58..105: note = Derived polymorphism lacks residues 58 to 105
MALARARDHQKLVCAVLLIFALQIPLLLSSCSAHAIAVVDPATAGRRLLSVRTVQAAQSVEAKETVVRHPRSMERRARSNSSGSAPFMNAVSKHQVPSGANPDSN

SEQ ID NO: 19238 - protein, 506 aa, Zea mays
  VARIANT 26: note = Ancestral polymorphism is R, Derived polymorphism is C
MGPPQPARPGVINIEACARPIAVDHRISLPYYFRIAGSLLRQANIYRNESNFLDLYVILLRYSSLLCETIPRHRDYHAFKLREKAFFDKLVDVIKELETLKPVVQRQIADHNRGGTVESNMNSLNGDNGTTHRIEQHTPSSYTPQPFVGSTNGASQKSFHAGRQVASLLSVQKQYMNLPYPKEETLARHSILGPNGLNGRWNGPVTGIKVQYPSNFELTQNDITSLVPSILNQDDPQGPSTAPPPPDSPSNDNDDMKSVLSLDDGRWSVSADEHTSFTSANLEEELLQLNIKQPSPPPVLAEVQRPISPSRVADPTPGLPTSGTARFQNLHVPIKLMDCFLRVAESNTKRSLETCGVLAGTLKNRTFYVTTLIIPKQKSTSVTCEATNEEELFEVQDMGSLFTLGWIHTHPTQSCFLSSVDLHNHYSYQVMLPEAIAIVMAPTDTTRKHGIFHLTDPGGMGVIHDCQERGFHPHKAPLDGSPIYKQCSHVYMDTDIKFDMIDLRER

SEQ ID NO: 19239 - protein, 406 aa, Zea mays
  VARIANT 189..406: note = Derived polymorphism lacks residues 189 to 406
  VARIANT 239: note = Ancestral polymorphism is I, Derived polymorphism is T
  VARIANT 347: note = Ancestral polymorphism is E, Derived polymorphism is Q
MAARRVALLFAILLLHQTVSSLAGKSYYEILQVPKGASEEQIKRAYRKLALKYHPDKNPNNEEAGRRFAEINDAYEVLTDRKKRKADDWHGEEDLAKYMGRAMKVDVEYVFSNGGSPKQEEEQILKGDDVTVELEASLEDLYMGGSLKIWREKNVIKPAPGVRRCRCRNVVRKREVAPGVILNLSHQECDTCPNVKYVREGAFINVDIEKGMQDGQEILFYEDGEPKIDGVPGDLKVATFLFSTYYVKERSAWHQLFLTNSIDEQIKIRTARHERYRRDGNDLHTTVEISLAEALGGFEKKVTHLDNHEVEIGTKEITRPEEVRKFQGEGMPLYRSNEKGDLYVVFEVVFPEDLADDQKTELNSIFTGTPSISALGLVAKSKGRQRSMAGVMFLLALLLRFIGSQR

SEQ ID NO: 19240 - protein, 339 aa, Zea mays
  VARIANT 104: note = Ancestral polymorphism is C, Derived polymorphism is F
  VARIANT 236: note = Ancestral polymorphism is L, Derived polymorphism is F
MVLLRVCRHFGHLRFASFLSMAAPQQSAPLSGSAPKRLRAMATDAAAVPNPPASSGCPAMKAEFAKHAEYLNTLNDKRERLVKASRDITMNSKKVIFQVHRVHCLHIPIICFRITKVNRDEVLSKAENDLAAVVNQYIAKLVKELQGTDFWKLRRAYTFGVSTNLTILHLFIDCRVKCTPCTSIMRIQVQEYVEAATLCRFCKTGTLLSLAEINDSLLALSGQSVEPLQLNVLDYLLGVADLSGELMRLAIGRISDGEVEYAKTICAFVRDIYRELTLVVPLMDDNSEMKKKMEVMLQSVVKIENACFSVHVRGSEYIPLLESSADPGYSYFGAPDFDQ

SEQ ID NO: 19241 - protein, 18 aa, Zea mays
  VARIANT 6: note = Ancestral polymorphism is V, Derived polymorphism is L
MTLFFVCCSPDCGHRWRE

SEQ ID NO: 19242 - protein, 286 aa, Zea mays
  VARIANT 195: note = Ancestral polymorphism is S, Derived polymorphism is F
  VARIANT 144: note = Ancestral polymorphism is A, Derived polymorphism is S
  VARIANT 139: note = Ancestral polymorphism is L, Derived polymorphism is P
  VARIANT 133: note = Ancestral polymorphism is G, Derived polymorphism is R
  VARIANT 123: note = Ancestral polymorphism is G, Derived polymorphism is D
  VARIANT 106: note = Ancestral polymorphism is G, Derived polymorphism is R
  VARIANT 49: note = Ancestral polymorphism is R, Derived polymorphism is H
  VARIANT 32: note = Ancestral polymorphism is R, Derived polymorphism is C
MRKGILMGAAASVEEVDIQGLGMQERKNLIERLVRTAEEDNERFLLKLRDRMERVGIDNPTIEVHFENLNIDAEAYVGNRGVPAMTNFFSNKVMDVLSAMHIVSSGKRPVSILHDISGVIRPDRMSLLLGPPGSGKTSLLLALAGKLDSNLKVSGRVTYNGHDMDGFVPQRTSTYIGQHDVHVGKMTVRETLAFFARCQGVGTRYDMLTELSRREKESNIKPDPDVDVYMKAISVEGQESVVTDYILKILGLEICADTMVGDSMIRGISGGQKKHVTTGICNLQLN

SEQ ID NO: 19243 - protein, 799 aa, Zea mays
  VARIANT 536..799: note = Derived polymorphism lacks residues 536 to 799
MGSAAAADVVIPACAAVGIAFALWQWFLVSRVKMSAYAAPGNGGHHGGPVFRMEDDEEDVGMGGAGDRDEEEEETAGDGTVAVARCAEIQSAISVGANSFLFTQYKYLAAFTVVFAVVIFLFLGSVHRFSTDSRPCQYTSGRTCKPALANAVFSSVAFLLGAATSVVSGYLGMRIATYANGRTTLEARRGVGAAFATAFRSGAVMGFLLASLGLLVLYITIKVFGLYYGDDWESLYESITGYGLGGSSMALFGRVGGGIYTKAADVGADLVGKVERNIPEDDPRNPAVIADNVGDNVGDIAGMGSDLFGSYAESTCAALFVASISSFGADHNFAAVAYPLLISSAGLLVCLVTTLFATDLFKVKTVRGVAPALKLQLIISTVLMTVAALVVSLAALPAKFTMFDFGEAKQVKNWHLFLCVAIGLWAGLAIGFTTEYFTSNAYSPVRDVADSCRTGAATNVIFGLALGYKSVIVPVFAIAVSIYVGFTLASIYGIAVAALGMLSTVATGLAIDAYGPISDNAGGIAEMAGMSRRIRQRTDALDAAGNTTAAIGKVRAYIFNASASHEYYRIHSISLQGFAIGSAALVSLALFGAFVSRAGVEDVNVLNPKVFVGLLVGAMLPYWFSAMTMKSVGSAALKMVEEVRRQFITIPGLMEGRAAPDYARCVRISTDASLKEMMPPGALVLLAPLVAGTFFGVSTLAGLLAGALVSGVQIAISASNSGGAWDNAKKYIEAGASDHAKSLGPKGSDAHKAAVIGDTIGDPLKDTSGPSLNILIKLMAVESLVFAPFFAAHGGLIFK

SEQ ID NO: 19244 - protein, 125 aa, Zea mays
  VARIANT 37: note = Ancestral polymorphism is A, Derived polymorphism is E
MTAHQTCCDDAVAAGTAPAARRRRLKLTRPSASLLMARKLRKKAAGSKRPRAAASRKRAMAIRRKMEALRLLVPLCGRDNGSVTGGAVERLDELLMHAAGYILRLQMQVRVMQLMVHALNDRPED

SEQ ID NO: 19245 - protein, 136 aa, Zea mays
  VARIANT 82..136: note = Derived polymorphism lacks residues 82 to 136
MPPPSPQRYCSVPNDVALLSSLNPIPYGCGISATSSKFPRFSRLSPTTMPGTLYGGEFDDVKPLKQSRVGFRGQAWFHINFWARPRSSSSSNNKTIKRFFAEVHYKPTLITSPSSSSSSLAITAVSIVEICIIIGK

SEQ ID NO: 19246 - protein, 372 aa, Zea mays
  VARIANT 219: note = Ancestral polymorphism is S, Derived polymorphism is R
  VARIANT 274: note = Ancestral polymorphism is K, Derived polymorphism is N
MSARLRVAELRAELQRRGLDVSGTKPALVRRLDAAICEAEKAVVAAAPTSVANGYDVAVDGKRNGGNNKRKRSGDGGEEGNGDTCTDVTKLEGMSYRELQGLAKARGVAANGGKKDVIQRLLSATADPAAVADGGPQGEKEVIKGGDEEVEVKKEKMVTATKKGAAVLDQHIPDHIKVNYHVLQVGDEIYDATLNQTNVGDNNNKFYIIQVLESDAGGSFMVYNRWGRVGVRGQDKLHGPFPTRDQAIYEFEGKFHNKTNNHWSDRKNFKCYAKKYTWLEMDYGETEKEIEKGSITDQIKETKLETRIAQFISLICNISMMKQRMVEIGYNAEKLPLGKLRKATILKGYHVLKRISDVISKADRRHLEQLTG

SEQ ID NO: 19247 - protein, 676 aa, Zea mays
  VARIANT 53: note = Ancestral polymorphism is R, Derived polymorphism is H
MPLVTYRYQALKESLAAAITSSPHAADPRRPHALAVVSGLAANGYLASLLVARYARLGEPDAARGVFDAAASSPYATPPKPLLYNAMLRGYLSLGLPREAVALLRAMLASGSCAPDRHTYHLAATACARAPDLGLGRRFEAAAAACGLAASDLLVATALIGMHAEAGDMGAARRVFDGMPCRDAVAWNAVIGGYARAGHLSEAVELFGMMRSAVGACPTEATLVSLVSGYAVFGSWKGHGMMHAAVIKSGFQRSLFVSNALLEMYTELGCLSEALLVFRQMEVKDSVTWSSMIGGLVRSNKPGYAVRLFHWMLSKSEVLVTRSILLNVILACSELGDWREGKWIEENFVMCNGSEFKRDPSVVTRLIYMYAKCGQLGSSETLLHESTEVRCDVVAWNALIKACGELGLVEKAIGFAIQMHRTGIYPDNVTFLEILHMISLIPSLKKGMEVHAHIVKRGFQNERAIANSLIYMYGRCGSLSLSVNAFTGIMDKDAISWASMMQVYAWSGLAPEVVKLFEMMKKTKVQPNHYTLIAVLTAYKNTGLVEEGMGLLKCMKEQYGLEPFIEHVSCVVDMLCRTGRLSDAYHLIQSSHSEHARNPKLWGTLLSGSRYWGDLVIGEAAARHLSSLDPGSNANYKMLADIYVSTGRRDRAEDVLRMSMSKELDLRPGCSWTEGG

SEQ ID NO: 19248 - protein, 828 aa, Zea mays
  VARIANT 66: note = Ancestral polymorphism is S, Derived polymorphism is T
MARWLQSAGLQHLAASSAAGGAGAGDLRVGGLSGGGGGGLLPSLLMQGYGPQTIEEKQKLYTLLRSLNVNGGLASASISEPYTSTGQSFAGGAPVDGFYSPELRGEFGAGLLDLHAMDDSELLSENAASEPFEPSPFMPKEMDDDDYDVIAENQQGLVDNQSAFTNEKENTVVSARESNVAKIKVVVRKRPLNKKEVSRKEEDIIDVHNSQFLTVHEPKLKVDLTAYVEKHDFCFDTVLGENVTNDEVYRETVEPIIPLIFQRTKATCFAYGQTGSGKTYTMQPLPLRAAHDMVCLLHQPMYRNQHFKLWLSYFEIYGGKLFDLLSERRQLLMREDGKKQVCIVGLQEFEVSDVQIVKEYIEKGNAARSTGTTGANEESSRSHAILQLSVKKHIPVTETRRQRDRDAIEAKNTKHVGKMSFIDLAGSERGADTTDNDKQTRIEGAEINKSLLALKECIRALDNDQIHIPFRGSKLTEVLRDSFVGNSRTVMISCVSPSSGSCEHTLNTLRYADRVKSLSKGGNTKKEQFAVQSVSSGKESTYTSYPLSCEAEETMEQTQEIRPVDSSRKGVDSFTSNSSIEPEKNSYCMIPSYPHKGKEETSTRSGLNDRERGDLKYNQAGFNSKTHSLQESINSQEEVKVTKVSPPRRKANRDEKSERQVNYMKKESGPEISRTGVKQQQQLKQLQRPSSTSSSQVLSKQSEKEDMEINTILEEEALIAAHRKEIESTMEIVREEMNLLAEVDQPGSLIDNYVAQLSFLLSRKASGLFKPPKMETFRFVVDREKPRILETAIDCDSLGSWPPTSPFRDLRVKGWEMEMWADEVRIHY

SEQ ID NO: 19249 - protein, 84 aa, Zea mays
  VARIANT 69: note = Ancestral polymorphism is V, Derived polymorphism is M
  VARIANT 68: note = Ancestral polymorphism is A, Derived polymorphism is V
  VARIANT 58: note = Ancestral polymorphism is A, Derived polymorphism is V
  VARIANT 55: note = Ancestral polymorphism is A, Derived polymorphism is V
  VARIANT 54: note = Ancestral polymorphism is R, Derived polymorphism is T
  VARIANT 52: note = Ancestral polymorphism is D, Derived polymorphism is N
  VARIANT 48: note = Ancestral polymorphism is A, Derived polymorphism is T
  VARIANT 15: note = Ancestral polymorphism is A, Derived polymorphism is T
MLEVWREACVNAFKTMDRELGVQARVDCGFSGTTAVCAIKQGEDLVVANLGDSTAVLVTVSETGYLKAMQLTTDQKPNVPRESS

SEQ ID NO: 19250 - protein, 341 aa, Zea mays
  VARIANT 205: note = Ancestral polymorphism is H, Derived polymorphism is D
MATSSTGCLVLLCLASPLLLLPSAVVLGHPWGVGGGGLSPQFYDHSCPMAEKIVQSVVAQAVAKETRMAASLVRLHFHDCFVKGCDASVLLDNSSSIVSEKGSNPNRNSIRGFEVVDQIKAALEAACPGTVSCADILALAARDSTALVGGPYWDVALGRRDSLGASIQGSNNDIPAPNNTLPTIITKFKRQGLNVADVVALSGGHTIGMSRCTSFRQRLYNQTGNGMADSTLDVSYAARLRQSCPRSGADSTLFPLDVVAPAKFDNFYYKNLLAGRGLLSSDEVLLTKSAETASLVKAYAADAGLFFRHFAQSMVSMGNISPLTGSQGEIRKNCRRLNSGH

SEQ ID NO: 19251 - protein, 353 aa, Zea mays
  VARIANT 23: note = Ancestral polymorphism is A, Derived polymorphism is S
  VARIANT 52: note = Ancestral polymorphism is D, Derived polymorphism is G
  VARIANT 250: note = Ancestral polymorphism is T, Derived polymorphism is M
MASINTVLGAIFVASFYFCGSLAFFPPGPGHHHEGAHHPPIGSAPIPGLSTDYYRLTCPQADETVAPILKKAIAKEPRVAASLLRLLFHDCFVQGCDASVLLDDAEEVVSEKNAIPNKDSIRGFEVIDEIKAALEEACPQTVSCADTVALAARGSTVLSGGPYWELPLGRRDSRTANMKLANKNLPPPNATLHRLIKFFRRQGLDKVDLVALSGSHTIGSARCVSFKQRLYNQHRDNRPDSTLETSFYHTLASACPRAGGDGEIRPLDLVSPSRFDNSYYKLVLEGKGLLNSDEVLWTGRDPEIAGLVKSYAEDEALFFEHYVSSVTKMGNINPLTGHDGEIRKNCRRVNQEI

SEQ ID NO: 19252 - protein, 456 aa, Zea mays
  VARIANT 238..456: note = Derived polymorphism lacks residues 238 to 456
  VARIANT 341: note = Ancestral polymorphism is G, Derived polymorphism is V
  VARIANT 375: note = Ancestral polymorphism is G, Derived polymorphism is R
MVIKHMMHGPCGSLNPNCPCTKGHKSCKNHYPRPFSDTTLQGKDSYPIYRRRDDDCKEKACGSITAVKYPFKYIYKGHDRVFVVMRVTSKADDDVDEIKQYRDARLHEEVRGILYRDFPEWYTWQSDKGKVWQRRERDTGGQVGRIVSAHLAKGERYYLCVLLNHVTGASSYVDLRIVDGVTQPTFREAVERRGLLESNNTLDECLTKRALFHMPLALRRLFATILVHFEPSDVAVLWQKHKDSMSKDYQHRSQNKTHVEQMSMGKDIKTSPLPPIIDTYDDAIGTAREIYEEESIEPTAGDVALKDSLNEKQRVAYDKIMSVVDTDQGRLFFVDGPSGTVKAYLYRVLLATLRNQGKIVVATATSSVVASIMPGGRTAHSHFKIPLTIDDGAVCSFTKQSGTSEMLWKASLIIWDEASMTKRQAVEALDNSMREIMGHPGLPFGGKTIVFGGDFR

SEQ ID NO: 19253 - protein, 341 aa, Zea mays
  VARIANT 67: note = Ancestral polymorphism is R, Derived polymorphism is L
MVAANGTGQPQLVVDEHKTILEEVPREENGTLSAANYAGHENVAAEYYKQQVEMLEGFSEMDAFTYRAFLPVMSKEEQEKVVRSESLAIWLSNIANMVLFAAKVYASNQGMQVGIAWLVIRGIKELAEVSFPQDDKQTEKTTLKTLFPYELFVKLYSKVELHPFGLHNLGNRPIYAGNALCTVKYTDEDPCMMSIRSTSFSPTADAMSETKVAPITQVDLSFLSEGSSPVYFYTMPTFKKMKTQSCRRRLQQLESQLMEANRIKEEGNTGSIRWKENILDQENELQNIKQENDDLQTKESAASEKIKELSSQLTNAKYGMINSNTKEIMRRGALKRTMNLL

SEQ ID NO: 19254 - protein, 172 aa, Zea mays
  VARIANT 135: note = Ancestral polymorphism is G, Derived polymorphism is R
  VARIANT 16: note = Ancestral polymorphism is N, Derived polymorphism is Y
MITYGFAAVISTRVSNELGARNIANAKKALTVSLALSLMLGVAFLLLLGLGHDLLVRLFTTSEVVVSAFASMTPLLIGSVVLDSTQGVLCGVARGCGWQHLVAWTNLVAFYVIGLPLAILFGFTLGFQTKGLWMGQICGLLCQNCVLFFITLRTNWQELDLTMFNKDNDFVC

SEQ ID NO: 19255 - protein, 357 aa, Zea mays
  VARIANT 74..357: note = Derived polymorphism lacks residues 74 to 357
  VARIANT 281: note = Ancestral polymorphism is D, Derived polymorphism is G
MSGRGRAQMNTAVQGDLSNGRCVMNVDSERDTTEPTTEIGTTRKRAKWSHEMKLFLIGLLKDHDVPGFRTHNAWSKEAWTNIVCRLNAKFGCSFTLNQVKQKEQDLKKDYRVVKELQEESGFGWDNERNMVTAPPNVWASFAARKNNTDALTWQDKSFPYFDDLFSLYDGRYAEGRTRHGMDHYANKAKNAPAPSTQQAPATDTYQSPSPTWATQCDSGLQFHFDEEADVIPMQHMKTPPSSTPTPIEAESRRGKKQKTKTGSPEEGFYERYLKLKREEIDRFAAIEEKKLEDPYSINKCIIVLEGLNDLHMGDILLASDIFQNKNNREVFLSFQGDALRLAWVKREIGRLQAEQNC

SEQ ID NO: 19256 - protein, 179 aa, Zea mays
  VARIANT 32..179: note = Derived polymorphism lacks residues 32 to 179
  VARIANT 60: note = Ancestral polymorphism is A, Derived polymorphism is V
  VARIANT 79: note = Ancestral polymorphism is R, Derived polymorphism is H
  VARIANT 92: note = Ancestral polymorphism is D, Derived polymorphism is N
  VARIANT 102: note = Ancestral polymorphism is R, Derived polymorphism is Q
  VARIANT 123: note = Ancestral polymorphism is A, Derived polymorphism is T
MRSTCSSATTPSSRARSTTSTPSPPKGHHRLQIWRPPPTPARPRAYARMDSTAFLGFVVARRKEWDALRAEVSAALKLRVDPNKFLMDVITDFFPVDHREVRNPADLAWACVLILEATVPALANPDPDIGPAHPLVLCNAIRGYEGQWCTFEVFVVVVVLLAVTCLSNFTKSSKKSKKG

SEQ ID NO: 19257 - protein, 108 aa, Zea mays
  VARIANT 64: note = Ancestral polymorphism is Y, Derived polymorphism is C
  VARIANT 58: note = Ancestral polymorphism is V, Derived polymorphism is M
  VARIANT 56: note = Ancestral polymorphism is R, Derived polymorphism is C
  VARIANT 14: note = Ancestral polymorphism is L, Derived polymorphism is P
MARPTRALLLPLLLLLVLARASGDVPAAASLGWDLRVVGAGEDEEFGFPGGDSVACRVLQGGGYLSYGALRRDNVPCSVRGASYYNCRPGGQANPYSRGCSAITRCRG

SEQ ID NO: 19258 - protein, 250 aa, Zea mays
  VARIANT 17: note = Ancestral polymorphism is N, Derived polymorphism is T
MATAAAAAAMEEPDVVNGRDVVSWVASGVVLWSTAFLLVRALFPKRSYDFCNRAVSTMHAVAAVCLACLSVDDWSCPVCPLAAASSPRQMKALAVTLAYMVYDAACCHLNGDTRLDNAVHHLVSIVGIGAGLAYQRCGTEMVASMLVTEMSSPLLHLREMLKELGVRDTELNLLVDVLFAATFSAARMGVGPYLTYVTVTADNPILIKAMATGLQLVSAYWFLRILRMVRYKLAGKKKPTPAKLAAAAAN

SEQ ID NO: 19259 - protein, 133 aa, Zea mays
  VARIANT 54: note = Ancestral polymorphism is T, Derived polymorphism is I
MEQNERKDKVSGGRTTGTRGAGPREMLVDSQPGGRSGKQEMQVQVGRFGLSRTTVWTLHGERGDVSVDGSSSRGGNSSSSTTNAGAPTSTAVASDNDVDHHDYIVVDDLFGDNADDEDVGATLLEPEDAELFL

SEQ ID NO: 19260 - protein, 102 aa, Zea mays
  VARIANT 37: note = Ancestral polymorphism is V, Derived polymorphism is M
  VARIANT 67: note = Ancestral polymorphism is E, Derived polymorphism is K
MDARQVLRECHGDVATVPDDDSIDQSDGRIHDYEGKVTLATDVNEYVTSAANNNEENLDITSVQQSEVTRADFLDVTSNTEYNLTATPDYATSSALLQDSAS

SEQ ID NO: 19261 - protein, 76 aa, Zea mays
  VARIANT 1: note = Ancestral polymorphism is M, Derived polymorphism is I
  VARIANT 32: note = Ancestral polymorphism is E, Derived polymorphism is K
  VARIANT 36: note = Ancestral polymorphism is T, Derived polymorphism is I
  VARIANT 37: note = Ancestral polymorphism is A, Derived polymorphism is T
MEDVHLSPKNTHAHALLGKYYEKKGLIAEAWEAFKTTTSIDPDHAMNLRSSEAKLFIKMALFRLVVWHVMMASNHQ

SEQ ID NO: 19262 - protein, 287 aa, Zea mays
  VARIANT 206..287: note = Derived polymorphism lacks residues 206 to 287
MDTLSGPRTVSCCISDIGLAVEPSQTPELATPIHPGSSFSSMNLQNPGSVSRNIGPGHASPIQDGTDATDYLLTDDLPEDLYSMLYPGTDQFYDSMFLEQAGQEGIAFPTNQAYYMMGMESYALPTNLNGTLNAELQSDQENNTTNLANGNTDTGVTIQSRRATTSPANISLAAGKIKMQVGINRMVTSSSVSINQTMRFTDNSGRRLDLKTDDVEHQKKTTNSAISAKQSRAANPEGHSSQGYLKGFKNTFRCSSAGFKAYISFAFFVVGVAAAAVLHHHRSCANL

SEQ ID NO: 19263 - protein, 271 aa, Zea mays
  VARIANT 133: note = Ancestral polymorphism is S, Derived polymorphism is F
MRLVGLTGGIASGKSTVSNLFKDAGVPVVDADIVARMRSGRLLACSAIEQTTEEDMSALEGGGVSADYSRRAMQGAQLLLEQRVAGAQQGGGRGGHNDGEGAATLEKGCRCWGRVPARQCVSYWYSLLAPHISWGIMWEMAKLWMKGYKVIILDIPLLFETKIDRWTNPVTVVWVNPETQIQRLMSRDGCSEEQAQNRVNAQLALDWKRSEADIVINNSGSLDDTRLQFQDVLRKVSEPLTWKERLRSRDGLISVVVCTAVGVLLARKNLL

SEQ ID NO: 19264 - protein, 430 aa, Zea mays
  VARIANT 201: note = Ancestral polymorphism is Y, Derived polymorphism is N
  VARIANT 166..430: note = Derived polymorphism lacks residues 166 to 430
  VARIANT 165: note = Ancestral polymorphism is P, Derived polymorphism is A
MARAPGVRTPALSKRPSPAAPSRQRAVKNAGARSAPVASLPCWLWLLRPSHPIGLSPPLPSRSSQPSPDASSPPGVQSLPVLTRSLDRTPPGGALPPCFSGLLLAARRPAAPSWWFRGAPVGRDRPCGHPALSLRRGVPGSRGRLHSVCGIYCKMEVLRDMHLPPGFGFHPSDTELVSHYLKRKILGQKIEYDPIPEVDIYKHEPWDLPAKCNLPIEDNKWHFFASRDRKYPTGSRSNRATLAGYWKSTGKDRAIKLKKRTLGTKKTLVFHEGRPPSGRRTEWIMHEYYIDENECKVSPDMKDAFVLCRVTKRSDWELDNEVGNRYPHLEQLDAAAASVASTVKPEDAVATVICPEESNRAATPVGSDELSNDVGQEPITPDSSPPNGGKELEVWLEELLDPSPSFNLVADTRSADVSLTDQYAESSVSF

SEQ ID NO: 19265 - protein, 192 aa, Zea mays
  VARIANT 129..192: note = Derived polymorphism lacks residues 129 to 192
  VARIANT 107: note = Ancestral polymorphism is K, Derived polymorphism is N
  VARIANT 106: note = Ancestral polymorphism is G, Derived polymorphism is S
  VARIANT 105: note = Ancestral polymorphism is S, Derived polymorphism is N
  VARIANT 99: note = Ancestral polymorphism is E, Derived polymorphism is D
  VARIANT 91..192: note = Derived polymorphism lacks residues 91 to 192
  VARIANT 90: note = Ancestral polymorphism is C, Derived polymorphism is Y
  VARIANT 67: note = Ancestral polymorphism is S, Derived polymorphism is L
  VARIANT 59..192: note = Derived polymorphism lacks residues 59 to 192
  VARIANT 57: note = Ancestral polymorphism is A, Derived polymorphism is V
  VARIANT 46: note = Ancestral polymorphism is K, Derived polymorphism is Q
  VARIANT 42: note = Ancestral polymorphism is H, Derived polymorphism is D
  VARIANT 31: note = Ancestral polymorphism is G, Derived polymorphism is D
  VARIANT 27..192: note = Derived polymorphism lacks residues 27 to 192
  VARIANT 24: note = Ancestral polymorphism is E, Derived polymorphism is K
MEDNQEIGAYMFRRTVPAVHMAPEDVRWMVGQLAQHECIGLHNYVKAITDSSDHMPAVKVANHSPNSLVVSKMKLLLPNYPLCTSLIRLCYHFVGAWRERIIVCSGKYGLAHGLVKAFMDCGAKAVISSSIEPPDSQTIVYHGMDVNGSLENGKFVIGDEEADESEPEPVSPVSDWEDNDVEKGGNHDMDDE

SEQ ID NO: 19266 - protein, 344 aa, Zea mays
  VARIANT 99: note = Ancestral polymorphism is Q, Derived polymorphism is H
  VARIANT 290..344: note = Derived polymorphism lacks residues 290 to 344
  VARIANT 324: note = Ancestral polymorphism is N, Derived polymorphism is I
MLSSSSSTHSATSPFPGLASANPNPRSRLLRLRAASPVSSAVLSASGRQPMSTVRASFAAGAAGRRAAAVGELATERLVEVAQRAADAAGEVLRKYFRQRVEIIDKEDHSPVTIADREAEEAMVSVILKSFPTHAIFGEENGWRCAENSADFVWVLDPIDGTKSFITGKPLFGTLIALLHNGKPVHLFSFVIGVIDQPILRERWIGVDGKQTTLNGQEISVRSCNLLAQAYLYTTSPHLFEADAEDAFIRVRNKVKVPLYGCDCYAYALLASGFVDIVVESGLKPYDFLSLVPVIEGAGGSITDWRGDKLHWPVTAESRPTSFNVVAAGDARVHKEALDALRWR

SEQ ID NO: 19267 - protein, 149 aa, Zea mays
  VARIANT 137..149: note = Derived polymorphism lacks residues 137 to 149
  VARIANT 129..149: note = Derived polymorphism lacks residues 129 to 149
  VARIANT 52: note = Ancestral polymorphism is L, Derived polymorphism is I
  VARIANT 38: note = Ancestral polymorphism is L, Derived polymorphism is F
  VARIANT 32: note = Ancestral polymorphism is P, Derived polymorphism is L
  VARIANT 31..149: note = Derived polymorphism lacks residues 31 to 149
MAWGEDEAISPDMASAGLHISERIGRDAATQLDLEEALEASRYASHPYSRPLFFSLGTNPGRVPSGSNLGEGSRTQATSLLCCPWYHDWDLSEILGAPKGSTTINVFSECTKAESFLPFGSGSRACVGQKFVVLAISMLIASLLRSYEV

SEQ ID NO: 19268 - protein, 100 aa, Zea mays
  VARIANT 2: note = Ancestral polymorphism is L, Derived polymorphism is V
MLLARAVVMEHRKKSNYLVALVLASLLLSAMAGGHRKKLLNKDDASESMETLESTQQLQEDDEMAVVVHERILRQAKMNDYGSYDSSPTMAKPHFKDIPN

SEQ ID NO: 19269 - protein, 367 aa, Zea mays
  VARIANT 319: note = Ancestral polymorphism is R, Derived polymorphism is C
  VARIANT 273..367: note = Derived polymorphism lacks residues 273 to 367
  VARIANT 240..367: note = Derived polymorphism lacks residues 240 to 367
  VARIANT 165..367: note = Derived polymorphism lacks residues 165 to 367
  VARIANT 143..367: note = Derived polymorphism lacks residues 143 to 367
  VARIANT 138..367: note = Derived polymorphism lacks residues 138 to 367
  VARIANT 125..367: note = Derived polymorphism lacks residues 125 to 367
MLGLAGDPALARLEMGRSVSYDDEPVPVRPAPASLPISRSRSDGGAVPASATKPPLGGRSPGSSEATPEGEEEEEADPRCLIRNVDDGSEFVVKEGSELREVGTGRQLTMEEFVDLCVGRSPIVQELMRRENVASSGSSTPVQRSNSDSSNEATRHRRRRRHSSWLRGIRNVAGSVVASSRDRRSSDDKDTCSEKGGRRSSSTTDDSQDSAGAVRHGPVRVKVRQYGKSYKEFSGLFMNQEIQAHDGSIWSIRFSPDGRYLASAGEDCVIHVWEVSEFDRKHEENGACNPFVAMVCNGSPEPTLAVASSVDGSNREKKRRARFLEGRRSVSSDRLMLLEHVFALSEKPIRTFMGHSEDVPHDQFSLL

SEQ ID NO: 19270 - protein, 280 aa, Zea mays
  VARIANT 50: note = Ancestral polymorphism is L, Derived polymorphism is V
MDVGAKEEEMGQVWWGHRAWSLLSAVRARAPLVQCITNLVSMDIAANVLLAAGASPAMVHSLREVPDFTPRCDAVYVNVGTLSEDWLPSMRAAASAGRPWVLDPVAAAASGFRMKACLELLSLCPAVVRGNASEILALASRSTAASSNFKGVDSSHCSVDAIEAAKALALSSSAVVAVSGAVDFVTDGKQVISVSNGVPMMQKITATGCAVTALIAAFVAMEPSDAIVAAACALAIFGLVGEIGMESAKGPASLRMHLIDALYCLNEETVTSRVRISLRP

SEQ ID NO: 19271 - protein, 383 aa, Zea mays
  VARIANT 90..383: note = Derived polymorphism lacks residues 90 to 383
MSMLTKYSIAMWIMDPSVQWQSSFTKVSEASVNRNRSTIIVPAGSSGEEGWEAFRNVLLEINNEASRLYVLPNHPNQQHMEPPERLPGLSDDVGAGFIAGHGSQSASGPEVDVERLVDLPPQEEISGMGMSKVIRADQKRFFFDLGSNNRGHYLRISEVAGVDRSSIILPLSGLKQFHEMVGHFVDIMKDRLEGMTGANVCHVVCGNVRSRTINSSGGDNNVSFLFIFFLSSVVRIDLFGTFCFFGGIISSVLFVGWGSPNIEMDEHTFLTNRERAVDYLNSLDKVFVNDQFLNWDPENRIKVRIISARAYHSLFMHNMCIRPTDEELESFGTPDFTIYNAGQFPCNRYTHYMTSSTSVDGRDTCLIGMHASSRMAGIDRTIL

SEQ ID NO: 19272 - protein, 1175 aa, Zea mays
  VARIANT 515..1175: note = Derived polymorphism lacks residues 515 to 1175
  VARIANT 518..1175: note = Derived polymorphism lacks residues 518 to 1175
  VARIANT 523..1175: note = Derived polymorphism lacks residues 523 to 1175
MISYLSLQHLVRLRWEELSAAERNEFANMTINLISDVVGPHEVWALKSQTAALVAEVVRREGVDLWITLLPSIVSLSNNGPTEAELVAMILRWLPEDITIHNEDLEGDRRRSLLRGLTESLSQILPLLYSVSLPLHLYHLLEKHFGAALSEHAKQQMDLAKQHAGTVTAVLNAVNAYAEWVPVTDLAKYGLIHGCGSLLSYSDFRLHACEFFKVICQRKRPVDVAVAEYDAAMCNIFQVLMNISQQFLTRSGMQPSSIDESEYEFASCVCETMVALGSSNMQCILADGARTFQFLQQMLEYYQHYKITLHFQSLLFWLVVLREPSKSKSIARVSGDNSAAGNSASTGDLSTEKKKGVSVFVTDEIYSTILDVSFKRMLKNNGSATSGLLEIWSEELEGKSDFCNYRTKLLDLIKVIASQRSVIAAAIVVQRINVVFGDANQATKSPQVGLAAYRSSPKPLLMGKHLDVYLPLQNEIWLQDLDAMEGAQLGLEAVVNAIFDGSVDCGKTDLDTKSQLHKIFEGLLQQLLSLKWTEPNLAVIHGHYLDALGPFLKHHPDAVASVVNKLFELLTSLPITFQDPSNNSRLARLQICSSFIRISRAADKALLPHMKNIADTMAYLQGEGRLLRGEHNHLCEAFLVMSSSAGIQQQQEVLAWLLEPLNKMWTQVEWQTAYLSDPSGLTNMFADSQFMWSIYHTVTFFEKALKRSGTKKSSATPQAPTTTVPGYLHPMSSHLAWIVPPLLRLLRCIHVLWSEPFAQSQTAEIKAAKSMTVAEQASLLGETGKLTKGQVAPADGLLDVQRDGESKENNIKNWLRGIRDSGYNVLGLAATLGEAFFRCIEGSSVTLAIMENVQVMEFRHLRQLIHLVIIPFVKYCPADLWLWLVNLLQPLFVHCQQALNYSWSSLLHEGRAKVPDSIGNLSGSELKVEVMEEKLLRDLTREVCSVLWALSSPGLNNGLPSLEQLGPSNRMDSVLKNLESFASSSLTGFLMLHIGTALPALRISVEVFTWTDSDAVTKVIPFCGALIHLAVASNQAELRQFVAKDLFSSIIHGLSVESNSVISAELVGLCREIYVYLSDRDPAPRQVLLSLPHIKQEDLLAFNDSLSKTASPKEQKQHMRSLLLLATGNKLRALAAQKTTNVITNVTTRNRSSTAHHGSSAEEDGHIGLATLSSI

SEQ ID NO: 19273 - protein, 290 aa, Zea mays
  VARIANT 64..290: note = Derived polymorphism lacks residues 64 to 290
MVARNGCLCRLSYKDWRLLIGKKERTTNEQKNKEDILNQVKKRFLYPARMEKWVLRTIGDRWRQHKSNLKSIYFDVHKSKEANYKNVPEGVIPDQWIALVNNWMTLKAQDISEANRINCAKKKAIHTTGTKSFARNREELREQDPEKKNPHRVVLYIHTHRANSSKNINAHVGDLKDLLVQQPDLADTSQGKVAWKGDALTRILGEEKPGRVHGLGLVPNPDKVLDCSKSGRLKHLNITSLDPTSSEDVVSLRLQVEKLVNHVQNLEQKTKDLEQQQNQHVTFSQPLHYK

SEQ ID NO: 19274 - protein, 138 aa, Zea mays
  VARIANT 69: note = Ancestral polymorphism is L, Derived polymorphism is F
  VARIANT 61..138: note = Derived polymorphism lacks residues 61 to 138
  VARIANT 54: note = Ancestral polymorphism is A, Derived polymorphism is T
  VARIANT 51..138: note = Derived polymorphism lacks residues 51 to 138
MADAEDIQPLVCDNGTGMVKAGFAGDDAPRAVFPSIVGRPRHIGVMVGMGQKDAYVGDEVQSKRGILTLKYLSLHITLFSTLQQSVQQSEHLFRFCKPIMTKPKVALKPQTLSPQPEAQAPHDPQTPEQQQSGTGVGV

SEQ ID NO: 19275 - protein, 493 aa, Zea mays
  VARIANT 427: note = Ancestral polymorphism is T, Derived polymorphism is M
  VARIANT 404: note = Ancestral polymorphism is A, Derived polymorphism is V
  VARIANT 383: note = Ancestral polymorphism is A, Derived polymorphism is V
  VARIANT 357: note = Ancestral polymorphism is T, Derived polymorphism is I
  VARIANT 323: note = Ancestral polymorphism is P, Derived polymorphism is S
  VARIANT 311: note = Ancestral polymorphism is V, Derived polymorphism is D
  VARIANT 290: note = Ancestral polymorphism is A, Derived polymorphism is V
  VARIANT 283: note = Ancestral polymorphism is P, Derived polymorphism is T
  VARIANT 278..493: note = Derived polymorphism lacks residues 278 to 493
  VARIANT 272: note = Ancestral polymorphism is T, Derived polymorphism is M
  VARIANT 256: note = Ancestral polymorphism is T, Derived polymorphism is I
  VARIANT 208: note = Ancestral polymorphism is W, Derived polymorphism is R
MWRKMATCIQKIASEEFGLSQGNRREVKDTWWWNEDVQKAINEKKDCYKRLHHDKCADNIEKYRIAKMSAKRAVIRARGQAYDDLYQRLDIKQGEKDIYRMAKIRERKTRYVNQVKCIKDEANQLLVKHEEIKTRWKEYFNKLFNGGNESSTIELDEPFNDNDKGFLRRIQEYEVKEALKRMKVGKAMGPDGIPIEVWRCLGDIAIVWLTKLFNTIFRTNRMPDEWRWSTLVPVFKNKGDVQSCTNYRGIKLMSHTMKLWERVIEHRLRKMTSVTQNQFGFMPGRSTMEAIFLLRQLMERFREQKKDLHMDFIDLEKAYDKVPRSVMWWDLEKHKVSTKYINLIKDMYTNVVTSVRTNDDDTNDFPINIGLHQGSALSPYLFALVIDEVTRDIQGEIPWCMLFADDVVLIEESRSGFSQKLELWRQTLDAKGFRLSRSKTEYMKCDFSAMGYEDGDVSLDEQVVPKKDTFRYLGSMLQKEGDIDEDVSHRIKA

SEQ ID NO: 19276 - protein, 191 aa, Zea mays
  VARIANT 137: note = Ancestral polymorphism is L, Derived polymorphism is H
  VARIANT 110: note = Ancestral polymorphism is G, Derived polymorphism is E
  VARIANT 104: note = Ancestral polymorphism is C, Derived polymorphism is S
  VARIANT 62: note = Ancestral polymorphism is P, Derived polymorphism is L
  VARIANT 57..191: note = Derived polymorphism lacks residues 57 to 191
  VARIANT 49..191: note = Derived polymorphism lacks residues 49 to 191
  VARIANT 29: note = Ancestral polymorphism is R, Derived polymorphism is C
MKEQANAPDDLPPQLLFAHQVPIKWPKNRDVVWKANIPHTHLAKEKSDQNWMVEAGEKIKFPGGGTHFHHGADKYISNIANMLNFKDNNINNEGMLRTVLDVGCGVASFGGYLLSSNVIAMSLAPNDVLQNQIQFALERGIPAYLGVLGTKRLPYPSRSFELAHCSRCRIDWLQRDGILLLELDRWSLGAC

SEQ ID NO: 19277 - protein, 198 aa, Zea mays
  VARIANT 1: note = Ancestral polymorphism is M, Derived polymorphism is V
  VARIANT 22: note = Ancestral polymorphism is C, Derived polymorphism is Y
  VARIANT 85: note = Ancestral polymorphism is G, Derived polymorphism is S
  VARIANT 91: note = Ancestral polymorphism is Q, Derived polymorphism is H
  VARIANT 124..198: note = Derived polymorphism lacks residues 124 to 198
  VARIANT 131..198: note = Derived polymorphism lacks residues 131 to 198
  VARIANT 153: note = Ancestral polymorphism is D, Derived polymorphism is G
MFGDSVLLCHTPLHNSGNLRIYITSGNREVCSEFKDFEFRSKSSSSFTDIAPSSRHLKSSEDLLILAKFARMLLSGNGNLEVPDGDPQSRQCPKLRMDEGLWDRLIEELKVGCESPLSSVDWILEELLKSKLQKWLSVKLRGFNGTDSISKHDQGIIHLISALGYELALSSVLSVGVGLNFRDSNGWTALHWASYFGR

SEQ ID NO: 19278 - protein, 499 aa, Zea mays
  VARIANT 42..499: note = Derived polymorphism lacks residues 42 to 499
  VARIANT 74: note = Ancestral polymorphism is G, Derived polymorphism is S
  VARIANT 99..499: note = Derived polymorphism lacks residues 99 to 499
MEPPHAEQAVAAVAAGGEGGTASPGTGLEGPVLRRGLDGGGEGEDGELGAGQEANARLPERPGEADCGYYLRTGACGFGERCRYNHPRDRGGTEVRAGGRFSPASASRSLAFSIFPDLIRVRFGGGAKNGAAQDFPERQGQPVCEYYLKTGTCKFGSNCKYHHPKQDGSVQSVILNNNGFPLRLGEKECSYYMKTGQCKFGSTCKFHHPEFGGIPVTPGIYPPLQSPSVPSPHTYAPNWQMGRSPAVPGSYIPGSYTPMMISSGMVPLQGWSPYPASVNPVASGGAQQTVQAGPLYGIGHHGSSTAIAYGGTYLPYSSSAGQSSNNHQEHGFPERPGQPECQYYMRTGDCKFGTTCKYNHPRDWSTPKSNYMFSHLCLPLRPGAQPCAYYAQNGYCRYGVACKYDHSMGTLGYSSSALPLSDMPIAPYPISFSVATLAPSSSSPEYISTKDPSINHVVSPVAGPAPVGAILPKGVFHHDTIMQTQTPTSAGSSSPGGGR

SEQ ID NO: 19279 - protein, 107 aa, Zea mays
  VARIANT 25: note = Ancestral polymorphism is A, Derived polymorphism is T
  VARIANT 26: note = Ancestral polymorphism is V, Derived polymorphism is A
MSGVWVFKNGVVRLVENGAAGGEAAVRRRKALVHTPSGQVVRSYAELEPELRALGWERYYEDPALYQFHKRGSLDLISLPADFASFSSVHMYDIVVKNRDSFRVVNV

SEQ ID NO: 19280 - protein, 513 aa, Zea mays
  VARIANT 273: note = Ancestral polymorphism is P, Derived polymorphism is L
  VARIANT 294: note = Ancestral polymorphism is V, Derived polymorphism is A
  VARIANT 302: note = Ancestral polymorphism is Q, Derived polymorphism is L
MARYFRSSNLASRIFDRQLISPLPGATVNTIRQFYENLVPSYTIYDIDCPDYSFRKFTDDGKYLVAFSRNHQDLIVYRPIWFTYSCNEECETHELPPKAKKFDSFFKQLYSIPLASSNEYICKDFFLYMECHRFGLFATSTAQSNESTATEGAIHGVPLIEKITFHLVRLEDGVILDEKAFCNDFINLAHSIGAYMYEDLLCIVSLRYQTIHILQIRDSGNLVEVRNIGAFCREDDELFLHSHIQTGYGGSFLPGIKQRLLSYIFCKTWNEVPDQTLRVQHLKKKFYFHFQDYVDLIIWKVQFLDRHHLFVKFGSVDGGVSRSTDQNLAFFAVYNMETTDIVSLHQNSSEDIYALFEQFYDHFHANPQASSHGKFISSHSNDIHALDQLRVIKNKASSSSQFVKKMMTSLPYTCQSQSPSPYFDLSLFRYDEKVQILVLLTAEQKESRPSCFTHFSRLHFRFSRLICSQLLSTSISGDRKGITVALVVFVSLVNLQHCWWQSFGHMCSSRYAD

SEQ ID NO: 19281 - protein, 216 aa, Zea mays
  VARIANT 10: note = Ancestral polymorphism is P, Derived polymorphism is L
  VARIANT 16..216: note = Derived polymorphism lacks residues 16 to 216
  VARIANT 17: note = Ancestral polymorphism is G, Derived polymorphism is S
  VARIANT 69: note = Ancestral polymorphism is R, Derived polymorphism is Q
  VARIANT 174: note = Ancestral polymorphism is E, Derived polymorphism is K
  VARIANT 177: note = Ancestral polymorphism is R, Derived polymorphism is W
  VARIANT 196: note = Ancestral polymorphism is T, Derived polymorphism is M
  VARIANT 197: note = Ancestral polymorphism is A, Derived polymorphism is V
  VARIANT 201: note = Ancestral polymorphism is E, Derived polymorphism is D
MSVEVPHFHPGVLLDQGGFGFGLGNAALLDNALVPPLDDRAGRRTPSDEMDDELYGVAGCNSHVTASLRCPSQSGATAVWSSSKKSYDICTSADGPVTVPAHDTYHLVGAGLSDAGGLHYPLAACSGANASTAVVASELSLTLCSNSNSIASSNNTLNATEQCSSRASRSALTELQWARSRMALHFAAVVARSRYTAVLQDLLNDVAATCWTVSLM

SEQ ID NO: 19282 - protein, 167 aa, Zea mays
  VARIANT 88: note = Ancestral polymorphism is S, Derived polymorphism is F
MEASNKLAVLLLWLVMAATTAVHPSYSENSPQDYLTPQNSARAAVGVGPVIWSTKLQQFAEKYAAQRASDCRLQHSGGPYGENIFWGSAGFDWKAADAVRSWVDEKQWYKYATNSCAAGKVCGHYTQVVWRATTSIGCARVVCRDNRGVFIICNYEPRGNIAGMKPY

SEQ ID NO: 19283 - protein, 249 aa, Zea mays
  VARIANT 161: note = Ancestral polymorphism is N, Derived polymorphism is K
MVENGKAQAANFPFCTINPKVGVVAIPDPCLQVLSKLSKSQQTVPTSIELVYIVGLVKGARKGEGLGNQFLSNIREVDSVLRANTILHEVVRCFEDDDIFHVNGKVDPRSDIDVINLELIFSDLEQIEKRLDKLSKSKTKDTQVKVKDQALMEGKPTRSVNLAYLQSGMTAPQAAGVIHSDFQKGFIRVEAVSYDDFVAAGSLGVAWEKGLVHLTFSVLKHLVKKETFRKHPVKKFWQHFHFILIAVPP

SEQ ID NO: 19284 - protein, 122 aa, Zea mays
  VARIANT 38..122: note = Derived polymorphism lacks residues 38 to 122
MADGEPGHKLSPADSRAVTLAFFRALGADARLPASADQPDAYSALVRAILSSVAVSASPTPRISCTITVSHAVTNTYNTLHGGAVAAVAEAVGMACARQPPGIERCSSASLASRTSLQPDAM

SEQ ID NO: 19285 - protein, 1007 aa, Zea mays
  VARIANT 293: note = Ancestral polymorphism is S, Derived polymorphism is R
MALGVLVVEEGRQQQEAPPPLAVEALRDKIVEKVKANRVTLIVGDTGCGKSSLVPQFLLEENMEPILCTQPRRFAVVAIARAIANSRNWQLGEEVGYHIGHSNMSDLNSKRSKIVFKTAGVVLEQMCDRGIAALKYKVIILDEVHERSVESDLVLASIKQFLMKKSDLRLVLMSATADITRYKEYFRDLGRGERVEVIAIPCSPHTSIFQRKVLYLEQIADILKINSQLLSSKYCSGPDASADAEINYDVYELIHKLLLHIHQNEPDISKSILVFLPTYYALEQQWIRLLPFSSTFKVHILHRSIGTDEALQTMEISKSCRKVILATNIAESSVTIPGVAYVIDSCRSLQVYWDPIRKADAAGLVWISKSQAEQRKGRTGRTCDGQIYRLVTGTFYSSLNDHEYPAILRCSLREQVLMVCCAEPRSISDPSSLLQRVLNPPDPDAIEEALESLVQIHALEKTASGRYEPTFYGCLLNSLPLSFDSSVLALKFCELGAIHEGILISIMLDIQPLPILHTFGYRELCQKYIDNYFKGNGSVQIGKKEATTIGNLCAFQFWERVFKDKHRLEYLKYVAKTQEPEESHTFLTKPEEEWCAVHNLLPAAFKNISEIYDVVVMQLHRFRPSFLVKINPPKFLQPSEFNHTCLHREILDLEEDVDSLSLETENAHSDSQKRCAATPYVSPTDFETSTIVEMLKTLVKMKTQHAENKISYKGRLGSNVKPTLGTQACVFFANGSCNLGDVCRFSHSSLAPKPVCKFYLTLQGCRNGRSCPYSHDSGSLVSAPVTSGICSQESRGTSLCDTRLLPADGDGHILVVNDKTLQFSSKLSQFYDAGKIVASTPGLQSAESYSVPKGLKILENLADPSSLITGLEHELPVPWAKLKRVFWFDGFGNDESATEQALLQKFFASIAIKILSEQLSGLQVILIMKNTRYIQLQVERLARECFFFLSESFLSDEANLGWFSDTSTHTRRMQVAAPVTYVFNLHPPSSTQFGDYPAELREALRRD

SEQ ID NO: 19286 - protein, 583 aa, Zea mays
  VARIANT 213..583: note = Derived polymorphism lacks residues 213 to 583
MSSTTPAIASPASEQAKSKKKKHRSKDDPSAAAADPPSLAEAEEKTDGYLIKPQSLVPSLDTSTWPLLLKNYDRLNVRTGHYTPLPSGHSPLKRPLAEHLRYGIINLDKPSNPSSHEVVAWIKRILRVEKTGHSGTLDPKVTGNLIVCIDRATRLVKSQQGAGKEYVCVARFHAAVPDTARVARALEALTGAVFQRPPLISAVKRQLRVRTIYESKLLEHDPERHLAVFWISCEAGTYVRTLCVHLGLLLGVGAHMQELRRVRSGILGEQDNMVTMHDVMDAMWSLDNYKDESYLRRVVMPLEVLLTSYKRLVVKDSAVNAICYGAKLMIPGLLRFENDIETGEEVVLMTTKGEAIAIGIAEMTTAVMATCDHGAVSKIKRVVMDRDTYPRKWGLGPVALKKKKLVAEGLLDKHGKPNEKTPTEWLRNVVLPTGGDVSIASIAAAPEPEKVKVEPDTAVTEEVKEKKKKRQKDDAEDTDASVPAKKIKVEEATEAVEGEKSEKKKKKKKDKGESEPAEVVEGKEEVATGDEKGSEKKKKKKKSKEASDAAKPESAQIGDGTGTEKSEKKKEKKKKSRDTEEAQ

SEQ ID NO: 19287 - protein, 277 aa, Zea mays
  VARIANT 64: note = Ancestral polymorphism is K, Derived polymorphism is N
  VARIANT 144: note = Ancestral polymorphism is G, Derived polymorphism is S
  VARIANT 224: note = Ancestral polymorphism is A, Derived polymorphism is D
MRSFAPVFLSAVVAWLELAGTAQGGNFYQDTEMTWGDGRGKVVDGGRGLDLTLDRTSGSGFQSKSEYLFGKIDMQIKLGDAHDEIDFEFLGNVSGEPYTLHTNVFTRGQGQREQQFRLWFDPTTAFHTYSILWNPQHVIFAVDGTPVRDFKNHEARGVAFPRTQPMRLYASLWNADDWATQGGRVKADWSKAPFVASFRGFSADACVWDGGRQRCPEGTMEAAAVAGAGSGRGWWNQQLSDMSYRRMRWVQRKFMIYNYCADAKRFPQGVPAECKLR

SEQ ID NO: 19288 - protein, 1130 aa, Zea mays
  VARIANT 65..1130: note = Derived polymorphism lacks residues 65 to 1130
MAKPMKYDDEEEISSSAEEEDQSDAAGSVSGEEGDDDDEDAAAPPAEEAEGEGQQEEEVDEEEIEAVTTGAGAEDEEDAGAVTAAEGDDESQSTEDDEPVARDKDDDDETDAVVGKREKARLKELQKMKKHKIQEILDTQNAAIDADMNNKGKGRLKYLLQQTEIFAHFAKGSQSNEKKPRGRVESICRGRHASKMTEEEEDEEYLKEEEDALAGAGGTRLVSQPSCIKGKMRDYQLAGLNWLIRLYENGINGILADEMGLGKTLQTISLLGYLHEFRGITGPHMVVAPKSTLGNWMKEIQRFCPILRAVKFLGNPEERNHIRDDLLQPGKFDVCVTSFEMAIKEKSALRRFSWRYIIIDEAHRIKNENSLLSKTMRIYNTNYRLLITGTPLQNNLHELWALLNFLLPEIFSSAETFDEWFQISGENDQQEVVQQLHKVLRPFLLRRLKSDVEKGLPPKKETILKVGMSQMQKQYYRALLQKDLEVINAGGERKRLLNIAMQLRKCCNHPYLFQGAEPGPPYTTGEHLVENAGKMVLLDKLLPKLKERDSRVLIFSQMTRLLDILEDYLMYRGYQYCRIDGNTGGEDRDASIEAFNKPGSEKFVFLLSTRAGGLGINLATADVVVLYDSDWNPQADLQAQDRAHRIGQKKEVQVFRFCTEYTIEEKVIERAYKKLALDALVIQQGRLAEQKTVNKDDLLQMVRFGAEMVFSSKDSTITDEDIDRIIAKGEETTAELDAKMKKFTEDAIKFKMDDNAELYDFDDEKDENKVDFKKLVSDNWIEPPRRERKRNYSESDYFKQALRQGAPAKPREPRIPRMPHLHDFQFFNNQRLNELYEKEVRYLMQANQKKDTIDGEDEDQLEPLTAEEQEEKEQLLEEGFASWTRRDFNTFIRACEKYGRNDIKSISSEMEGKTEEEVQRYAKVFKERYKELTDYDRIIKNIERGEARISRKDEIMKAIGKKLDRYKNPWLELKIQYGQNKGKFYNEECDRFMLCMVHKLGYGNWDELKAAFRMSPLFRFDWFVKSRTTQELARRCDTLIRLVEKENQEYDEQERQARKEKRLAKNTTPTKRAALRNSEGESAPLSSFKRRRQSLMDDYVGSVRDNSLSSSLLLTYVHLLKNVYRSAHQM

SEQ ID NO: 19289 - protein, 96 aa, Zea mays
  VARIANT 50: note = Ancestral polymorphism is G, Derived polymorphism is R
  VARIANT 11: note = Ancestral polymorphism is R, Derived polymorphism is L
MALALSGCSARAALTSLAPRARGYAASAASGAMRRAAAESAAAGEAKEAGRRTAAAEVSWVPDPVTGHYRPSNWAAAAADPADLRAAHLAPTYARA

SEQ ID NO: 19290 - protein, 122 aa, Zea mays
  VARIANT 58: note = Ancestral polymorphism is A, Derived polymorphism is S
  VARIANT 56: note = Ancestral polymorphism is E, Derived polymorphism is D
  VARIANT 20: note = Ancestral polymorphism is S, Derived polymorphism is C
  VARIANT 3: note = Ancestral polymorphism is D, Derived polymorphism is N
MSDEARRGPAGAAQAMLRASSEDRKPVGAGSPAAVAHKIQLKSADMKEEMRQDAFEIARIAFDKHSMEKDIAEYIKKEFDKNHGPTWHCIVGRNFGSYVTHETNYFVYFYIDSKAVLLFKSG

SEQ ID NO: 19291 - protein, 215 aa, Zea mays
  VARIANT 21: note = Ancestral polymorphism is G, Derived polymorphism is D
MGASGRVGGCRNLGGRRRAVGGMRGAGVAASNWNGKGSFLFTSSTAVYDCSDNGFCSEDSPCVPIGQSTRTDVLLKAENVVLEAGGCVLRLIFLDFHYKSDRGPHVYWLSKGTLDVRPDHILNLIHYEDAASLVISIMKKRLRSCIFVGCDNEPLSRLEIMDRVNRSRKFDTQFHGFTGTDGPLGKRMDNSKTRAKLGWQPKYPSFTEFLGLSNL

SEQ ID NO: 19292 - protein, 327 aa, Zea mays
  VARIANT 114: note = Ancestral polymorphism is G, Derived polymorphism is E
  VARIANT 189: note = Ancestral polymorphism is G, Derived polymorphism is C
MAEAAAEKLVCVTGAGGFIGSWLVKELLQRGYVVRGTARHPEDPKNAHLLALDGAQERLSLYHADVLDYMSLCRAFSLCHGVFHVASPVSNDPNLVPVAVEGTKNVLNAAADMGVQRVVFTSSYGAIHMNPNRSPDQTLDEGCWSDPEFCKQTQNWYCYAKMAAENTAMEEALKRGIQLLIVVPSVTIGRMLQPTLNISLANVAAYMMGTKKAYSNVIGGYVDVQDVALAHILVYEDLRTHGRYLCIGDMLHLSKYVQMMRELFPQYPITNKCKDENKPMVKPYKFSTKRLGALGMKFTTLKESLYNTVVSLQENGHIPILLHKSSL

SEQ ID NO: 19293 - protein, 157 aa, Zea mays
  VARIANT 10: note = Ancestral polymorphism is S, Derived polymorphism is F
MEPGTVVHSSGGRQGQLRSKRLASFVSSLSGVKLKSSHKKATISTLSVGLNKAVAVLGKVILFIRHDNVAPLYYLICDLERSYFILSVYGLHNDAIKDGDQVVLFEPYYRILDASCKDKHYQFKSIRVDFPEQILVNERVPAPHHVARASIHAHNKS

SEQ ID NO: 19294 - protein, 231 aa, Zea mays
  VARIANT 70..231: note = Derived polymorphism lacks residues 70 to 231
  VARIANT 91..231: note = Derived polymorphism lacks residues 91 to 231
  VARIANT 105..231: note = Derived polymorphism lacks residues 105 to 231
  VARIANT 108..231: note = Derived polymorphism lacks residues 108 to 231
MSSTVKHVVDAQQSGTGEKDAPFVVDGIEMANIEWNGGSDTMDEILVRIQQLEEAVVKRERAMAYTFNHQWRARSATSLGNFSYEVGKGGWGWSWMDRWIVARPWESRSMVHPENPKKAQAKKENTTNPLALKLQGSITLSNNINDRKTLKKKPLPSASLTDQKKPSPSPSSDQKKPVPKEQRAKAAGTPPKPKAKYMKGSQEKKPQPQQRVSPPLSQVRSTFLCTIMSSI

SEQ ID NO: 19295 - protein, 327 aa, Zea mays
  VARIANT 28: note = Ancestral polymorphism is L, Derived polymorphism is V
  VARIANT 175: note = Ancestral polymorphism is R, Derived polymorphism is G
  VARIANT 213: note = Ancestral polymorphism is A, Derived polymorphism is T
  VARIANT 260: note = Ancestral polymorphism is M, Derived polymorphism is T
MAEAAAEKLVCVTGAGGFIGSWLVKELLQRGYVVRGTARHPEDPKNAHLLALDGAQERLSLYHADVLDYMSLRRAFSLCDGVFHVASPVSNDPDLVPVAIEGTKNVLNAAADMGVQRVVFTSSYGAVHMNPNRDPDRTVDESCWSDLEFCKQTQNWYCYAKMVAEKTAMEEASKRGIQLLIVVPPGTIGRMLQPTLNLSLSIVATYMKGTKKAYSNAVGAYVDVRDVALAHILVYEDVSTHGRYLCIGHMLHQSEFLQMMRDLFPQYPITTKCKDENKPLIKPYKFSTQRLNALGMKFTTLKESLYNTVVSLQENGHIPVLLHKSSL

SEQ ID NO: 19296 - protein, 325 aa, Zea mays
  VARIANT 144..325: note = Derived polymorphism lacks residues 144 to 325
  VARIANT 286: note = Ancestral polymorphism is T, Derived polymorphism is I
MSFQDLEAGHVRGAPPGGGRRSGRAGGAGAGAGASQAVASGVFQINTAVATFQRLVNTLGTPKDTPDLRDRMCVRSPTRLPALPFAPQPVPIAVPLIPICFGIADSARSAFGPPGKLRFVPVATKKIADAKLAKDFQAVLKEFQKAQRLAAEREAAYAPFISQAGLPQSYNSSEVNNGADRLAEQRTQLLESRRQELVFLDNEIVFNEAIIEERDQGIQEIQHQITEVNEIFKDLAVLVHDQGAMIDMLVARYFRSGPAHSDNSTCSLKAWKAAGVPKSDRELIATNSFISYFCCAARNDSWYPGGDWRSACGVAVYVVMMKSDT

SEQ ID NO: 19297 - protein, 595 aa, Zea mays
  VARIANT 32: note = Ancestral polymorphism is A, Derived polymorphism is D
  VARIANT 218: note = Ancestral polymorphism is L, Derived polymorphism is R
  VARIANT 222: note = Ancestral polymorphism is L, Derived polymorphism is R
MASSSSTTATTSCCPLLLALLWVLMAAHRGHAAAVFTGLVFESPGEAEAFEDALLRQACFNVSFFLSAGGRREACVSRLDTARGGAGSGPVPVLRAALRDTLGEAVGAAGAVRGLASLSNHAREEVALRDCVELLGYSVDELGWALDAMAADDTDDGGGLELLDSPGRRSASSRAENDIHAWLSAALGNQDTCVAGFHGTDGRLLRRVEAAVAQLTQLVSNLLAMHKRLRSITPLRHGPPKSNSASSGAGDDELPPWVMDVEDEEELVAKRARRAGRTSSTRVDVVVAQDGSGRYRTVSEAVARAPSHSKRKYVIYVKRGEYHENVEVRKKKTNIVIVGEGMGETVISGSRSFSSGWTTFRSATFAVSGAGFIARDLTFRNTAGPAAHQAVALRVDSDRSAFFRVAVEGHQDTLYAHSLRQFYRDCRIAGTVDFVFGNGIVVVQRSLVATLPLAPGQTGSVTAQGRKDPNQNTGFSFHGCVLEAKYPTYLGRPWKPFSRVVVMESYLGSGIQARGWLEWAAAGSGDHSPGLATLFYGEYRNYGPGAGVAGRVKWPGYHVIMDAAVASRFTVRRFIDGLAWLPGTGITFTADLFRR

SEQ ID NO: 19298 - protein, 309 aa, Zea mays
  VARIANT 13: note = Ancestral polymorphism is R, Derived polymorphism is S
  VARIANT 125: note = Ancestral polymorphism is Y, Derived polymorphism is S
  VARIANT 151..309: note = Derived polymorphism lacks residues 151 to 309
  VARIANT 202..309: note = Derived polymorphism lacks residues 202 to 309
MDDPSSASNKHKRKRGRKPKASPPSLDRSSASPSVAPAPAGRRGRKPRRHEALAGVDATRPPSPPCRGEPKPVANGRDVVAVAECGPASWDEVVRVVPCMDAVVKVFCVRTEPNISLPWQRKRQYSSSSSVFIISGRRVLTNAYSVEHYTQVKLKKRGSDTKYLATVLAIGTECDIAHLTVNDDEFWEGVSPIEFGTIPVLQDAVTVVGYPIGGDTISVTSGVVSRIEILSYVHGSTELLGLQAATEYIHSLSRAQPARSLNGAGLCPASRSLSTHATTTSSTPQLKARHVKHPGRHYVKQNRRREELM

SEQ ID NO: 19299 - protein, 292 aa, Zea mays
  VARIANT 28..292: note = Derived polymorphism lacks residues 28 to 292
  VARIANT 49: note = Ancestral polymorphism is A, Derived polymorphism is E
  VARIANT 64: note = Ancestral polymorphism is T, Derived polymorphism is I
  VARIANT 78: note = Ancestral polymorphism is G, Derived polymorphism is A
  VARIANT 81: note = Ancestral polymorphism is M, Derived polymorphism is I
  VARIANT 84: note = Ancestral polymorphism is G, Derived polymorphism is V
  VARIANT 151: note = Ancestral polymorphism is G, Derived polymorphism is S
  VARIANT 195: note = Ancestral polymorphism is S, Derived polymorphism is I
  VARIANT 208: note = Ancestral polymorphism is A, Derived polymorphism is V
  VARIANT 214: note = Ancestral polymorphism is K, Derived polymorphism is M
  VARIANT 217: note = Ancestral polymorphism is G, Derived polymorphism is R
MFKMAPLVPQQNVMQSNNVKTVLGSGTQYANGFAVADIERSSLILCGKAFANSAIVKDALAAMTAPILSARGGLPVPGWIMSFGGSIVLLFALVEIMMSCTEIHNALLSIDCGAVISSKGSTVLFPTKASREQKLLTEPTGVIIVSSDSSGVIPSVCKLSPGQAAYHFLAGYHDGKFVPAYTRAPSPADPLALAISLFSHLKEDDTPAYLINAKHSGKYIGGNITSFHFKLCNGRSVQFDVGNVVMVTRNTGCVGVIKNWEKHKGIFEVIDVLLGAFFMLCLVFSYLLYRKT

SEQ ID NO: 19300 - protein, 116 aa, Zea mays
  VARIANT 100..116: note = Derived polymorphism lacks residues 100 to 116
  VARIANT 98: note = Ancestral polymorphism is N, Derived polymorphism is S
  VARIANT 93..116: note = Ancestral polymorphism lacks residues 93 to 116
  VARIANT 73..116: note = Derived polymorphism lacks residues 73 to 116
  VARIANT 67: note = Ancestral polymorphism is M, Derived polymorphism is R
  VARIANT 56: note = Ancestral polymorphism is S, Derived polymorphism is F
  VARIANT 54..116: note = Derived polymorphism lacks residues 54 to 116
  VARIANT 25: note = Ancestral polymorphism is R, Derived polymorphism is C
  VARIANT 24: note = Ancestral polymorphism is K, Derived polymorphism is E
  VARIANT 18..116: note = Derived polymorphism lacks residues 18 to 116
  VARIANT 9: note = Ancestral polymorphism is S, Derived polymorphism is L
  VARIANT 7: note = Ancestral polymorphism is S, Derived polymorphism is F
  VARIANT 6..116: note = Derived polymorphism lacks residues 6 to 116
MTSEAQSVSAIHEAREGEGSKSRKRKQSHVGAALEGYVEFKKSQTNKALDALKELSMRKCMKEMEAMDGFTDEEKSYAVEVFESEINREAFMSTMNHNVRRMWLKRKIRVLSESNT

SEQ ID NO: 19301 - protein, 152 aa, Zea mays
  VARIANT 68: note = Ancestral polymorphism is P, Derived polymorphism is A
  VARIANT 70: note = Ancestral polymorphism is N, Derived polymorphism is I
MSVTIDMGRQAVLHLALGAIMSVTIDMGFLVESQPEEELPERLFGAMRIAQMEMGTTGDITFSLKQYPENLISYFIHVIDIVVHLEPLKYIGGRPYREVVLMDSWWNLIVMGVWTDLLQRNALRWALAKVDKNIIIGTMMRRNNKYSNFSYT

SEQ ID NO: 19302 - protein, 378 aa, Zea mays
  VARIANT 9: note = Ancestral polymorphism is T, Derived polymorphism is M
  VARIANT 26: note = Ancestral polymorphism is C, Derived polymorphism is Y
  VARIANT 47: note = Ancestral polymorphism is T, Derived polymorphism is M
  VARIANT 70: note = Ancestral polymorphism is D, Derived polymorphism is G
MWQSRKRNTGGQVGRIVSAHPAEGDCFYLRLLLNHVTGATSYADLRMVDGDTLPSFREAAQRRGLLEADDTIDECLNEAALYQMPLALRRLFATILVYCEPNDVAELCFTKQSGTTKLLQKASLIIWDEASMTKRQAIEALDNNMRDIMGQPRLPFGGKTVVFGGDFRQVLPIVRKGGGTEEVNNDGDIRLPDEVCVPYTGNDRDLDRLIDHIICPDLNENMSNTSYITSRAILSTRNDWVDMINMRMIDRFQGEQMMYHSFNTAMVDPNNYYPSGFLKTLTPNGLPPHVLKLKVGCPIMLLRNIDPANGLCNDTRLVVRGFQKNSIYAKIVLGQHAGMQIFLPRIPLCPSDDEMFPFQFKRKQFPIRLSFAMTVNKA

SEQ ID NO: 19303 - protein, 271 aa, Zea mays
  VARIANT 1: note = Ancestral polymorphism is M, Derived polymorphism is I
  VARIANT 5: note = Ancestral polymorphism is R, Derived polymorphism is W
  VARIANT 10: note = Ancestral polymorphism is A, Derived polymorphism is T
  VARIANT 21..271: note = Derived polymorphism lacks residues 21 to 271
  VARIANT 58: note = Ancestral polymorphism is R, Derived polymorphism is Q
  VARIANT 226..271: note = Derived polymorphism lacks residues 226 to 271
  VARIANT 242: note = Ancestral polymorphism is P, Derived polymorphism is S
MKNFRLKLAAILLSSDLNKRKGCLLYKNNTNKSTEDNEIDSSDVEILEPSPNPNKRKRIPQISPEDDPVLLYFEEICAKEENDVTSTPTSVDRCDNDSLMSGLFTKDMPVTKADMIEFLCDYIMTIQGGTILEAKWIRSFKPYMIDLSVKTLQELLNVNQDMPTDCFDMAIRVLPHNEPKRLSIAKRKITKHYMDLRFCEMCGFDEETKSCKDPSAIELAETLTNWPQMNYYITLCKFVLMPWRYSTGYVLFMINHANKFVSVFNFTPTPE

SEQ ID NO: 19304 - protein, 228 aa, Zea mays
  VARIANT 45: note = Ancestral polymorphism is R, Derived polymorphism is H
  VARIANT 47: note = Ancestral polymorphism is A, Derived polymorphism is T
  VARIANT 51: note = Ancestral polymorphism is R, Derived polymorphism is H
MAAVGVGAADERWASLCNCVVNFLLEERYHLTALELLQELQEDGRSAHALRLRAFFSDPALFPPDLVARSSSAPPGADPQILLEEKIAAEEKLALTEYDLRLAKEDLSQLKLELQKQKESSPDDSNGLLLGASIREGYTRQQENWDVKISALGPLKDNERKDLNCAVKEYLLLAGYRLAVMTFIEEVPDQDLDVWPNSSACVPDALRRYYYQYLSSTAEAAEVLLTSI

SEQ ID NO: 19305 - protein, 135 aa, Zea mays
  VARIANT 51: note = Ancestral polymorphism is A, Derived polymorphism is V
  VARIANT 48: note = Ancestral polymorphism is S, Derived polymorphism is F
  VARIANT 46: note = Ancestral polymorphism is S, Derived polymorphism is Y
  VARIANT 24: note = Ancestral polymorphism is R, Derived polymorphism is L
MTLGDDSGGGCWDCAPLRNRRLVRHAASLYFVIDTVGIGFDFVRRYISFRVCAPALDEPAASLSSIAAGGAGGADSGRSPTWHGPRLQSAGSVVVLAFLSGLGLSDADITAVVAYDPKLLFSEVKCTLVSRLAEL

SEQ ID NO: 19306 - protein, 1391 aa, Zea mays
  VARIANT 192..1391: note = Derived polymorphism lacks residues 192 to 1391
  VARIANT 449..1391: note = Derived polymorphism lacks residues 449 to 1391
  VARIANT 463..1391: note = Derived polymorphism lacks residues 463 to 1391
MSSLTRDIVFLVLQFLDEEKFKETMHKFEQESGFFFNMKYFEAKGHAGDWDEVEKYLSGFTKIDDNNYSMKIFFEIRKQKYLEALDRHDGAKALDILVKDLKVFSTFNEESYKEITQLLTFENFRVDAVRRVTEAYKGRRLMVGVDDVDLFKGIGLKYLVMEQLLVEHRELRGRAVLVQIANPARSEGRDMQGVQDEARAISAWVNVRFGTPGYTSIVLIDGPVTSQEKAAYYAAVECCLLSAVRDRLNWIPYIYMVCRQESTALGDDAPKRSAIVLSEFIGCSPSLSGAIRVNPWSVESVAEAMNVALRMPEAEQRLRHEKHYKYVSTHSVAYWTRSFDSDLQHACKDHFSRRHWGIGFGMSFKVVALSPNFRRLSVEHIVPSYQRTENRLILLDYDSTVMSENSIDRTPSSEVISVLNRLCEDPKNRVFIVSGRGKDELSRWFTPLREAGHRGGARLLHKQWYPQILAGAGHWSRARRIMPVALAECSRAALAKSDQHAKAEATGVGENEQLSNYGDTKSARTVMLVELKKLIKANPLLQEKLVFPTLKASRLRTLINQSLNWQHQHCKNPRPNPDIKTLFTDHTCTLPNGAPASRVSVPLAAVPKAGAAYPPLTAHTPLQLPPPSPSLARWLTNTAVPSSVQSAVVAASSIPVPPNQVVSMLKRPTITDYQSAVPEQLMKRLRPGGHGIGEWDLLMVNLHFMRSVCVKHYFQSPLKFWIQMHAHHNFSLIICHSCVKNAVVKDPPMSINRVTWSPHGELIGVAFTKYLIRVYAYQPPNETRHVLEIVAHSGGVNDIAFSRPNKQLCVVTCGDDKLIKVWNMHGQKLFTFEGHKAPVYSICAHHKQSIQFIFSTSLDGKIKAWLYDNVGSRVDYEAPGKWCTTLLYSADGTRLFSCGTSKEGDSYLVQWNENDGSIKRTYSGFRKRSAGVAGVVQFDIAQNHILAAGEDNKIKFWDVDNNNMLICTDAEGGLPALPRLRFNKEGNLLAVTTVDNGFKILANADGLRNLRALGSRPPFEAFRLQYEDASMKVSGAPVVATISPNIGRMDHLDRNSPAKPSPMLVVRLLYTNSGVGLLALGSNAIQRLWKWSRNEQNPSGKATASVVPHHWQPNSGLVMTNDTSDTNPEEAIPCIALSKNDSYVMSACGGKVSLFTMMTFKVLTTFMPPPPASTFLAFHPQDNNIIAIGMEDSTIHIYDVRVDKVKTELKGHQKRITGLAFSTNLGVLVSSGADAQLCVWTNDTWEKKRTVSIQMLAGKAPSGNTRVQFSSDQNHLLVVQETQLAIYDASKMERIYQWIPQDTLSASISHASYSCNSQLVFSAFIDGNIGVFDAENLRLRCRIAQSVINRSILSAIDLIQGFRQLGCYSASGTVDLSLDCGCIMANSENIG

SEQ ID NO: 19307 - protein, 222 aa, Zea mays
  VARIANT 182: note = Ancestral polymorphism is S, Derived polymorphism is F
  VARIANT 170: note = Ancestral polymorphism is T, Derived polymorphism is I
  VARIANT 168..222: note = Derived polymorphism lacks residues 168 to 222
  VARIANT 165: note = Ancestral polymorphism is A, Derived polymorphism is T
  VARIANT 134: note = Ancestral polymorphism is P, Derived polymorphism is S
  VARIANT 131: note = Ancestral polymorphism is R, Derived polymorphism is K
  VARIANT 126: note = Ancestral polymorphism is L, Derived polymorphism is F
  VARIANT 116: note = Ancestral polymorphism is G, Derived polymorphism is C
  VARIANT 106: note = Ancestral polymorphism is P, Derived polymorphism is L
  VARIANT 90..222: note = Derived polymorphism lacks residues 90 to 222
  VARIANT 55: note = Ancestral polymorphism is D, Derived polymorphism is N
  VARIANT 54: note = Ancestral polymorphism is A, Derived polymorphism is V
  VARIANT 20: note = Ancestral polymorphism is S, Derived polymorphism is F
  VARIANT 15..222: note = Derived polymorphism lacks residues 15 to 222
  VARIANT 10: note = Ancestral polymorphism is G, Derived polymorphism is R
  VARIANT 8: note = Ancestral polymorphism is E, Derived polymorphism is V
MLLRNAKESGVDDLQLMEGSEAMEMEPELRCLKALLSPSTGIIDSHSLMLSLLADAKNLGTTISYNTSVTSGHVGSNGLELHVCESKELQNYHVGSHVNAQLVLLPKLVINSAEDGGIGVHVTLDLNGLVKFGPDVEWISDGGKDHVSCFLNKSLLVFTLFSFQALNQYTLTLDDSGFDSISAVNLTAIKKKKEAAKPADFHDPARESFEAELDRILRVQEQ

SEQ ID NO: 19308 - protein, 192 aa, Zea mays
  VARIANT 44..192: note = Derived polymorphism lacks residues 44 to 192
  VARIANT 71: note = Ancestral polymorphism is F, Derived polymorphism is L
MRATVQRRPSFSPRRIWRGIQEIIDEEMEEDVIVKAVDCSNQSEIWSLDSPEPEYHLPETDFKGIMFLEFFTRYGWQYLIIADEDHKAHFKLCKVRSIQFGQKGIPYLNTYDGRTIRYPDPLIKANDTIKIDLETNKIMDFIKFDVGNVVMVTGGRNTGRVGVIKNREKHKGSFETIMYFSLDLEYTYVCVV

SEQ ID NO: 19309 - protein, 49 aa, Zea mays
  VARIANT 46..49: note = Derived polymorphism lacks residues 46 to 49
  VARIANT 7..49: note = Derived polymorphism lacks residues 7 to 49
MTNTSAQEEAIRKLFYIITEVGVHILIGVFHILCKEMIDMLPEIIELFR

SEQ ID NO: 19310 - protein, 257 aa, Zea mays
  VARIANT 8..257: note = Derived polymorphism lacks residues 8 to 257
  VARIANT 66: note = Ancestral polymorphism is D, Derived polymorphism is A
  VARIANT 118..257: note = Derived polymorphism lacks residues 118 to 257
MPRGRRKQTVESNEEYLSEDHVGQKNSQKTLAHESYSKMEEESFVVGGHQSGEVSEMGPNSKNPTDMDADIEVEVEEENVEVKRRGKTKLLHVWNIPRGHRIVVHCNELDQPIGEEAGSIGKFLGMVARNGNLCSLSYKDWRLLIGKKERSTNEQKNKEDILKQVKSDLKELLAKHPEFADTSQGKIAWNGDALNKILGEEKPGHVHGLGLVPNPNKVLDGTTSRRLNQLHVTSLDLTASEDMLSLKLQMEKLVNHV

SEQ ID NO: 19311 - protein, 527 aa, Zea mays
  VARIANT 426: note = Ancestral polymorphism is E, Derived polymorphism is G
  VARIANT 413: note = Ancestral polymorphism is T, Derived polymorphism is M
  VARIANT 388: note = Ancestral polymorphism is Q, Derived polymorphism is R
  VARIANT 325: note = Ancestral polymorphism is A, Derived polymorphism is P
  VARIANT 310: note = Ancestral polymorphism is L, Derived polymorphism is S
  VARIANT 258: note = Ancestral polymorphism is A, Derived polymorphism is T
  VARIANT 239: note = Ancestral polymorphism is S, Derived polymorphism is Y
  VARIANT 218: note = Ancestral polymorphism is M, Derived polymorphism is I
  VARIANT 215: note = Ancestral polymorphism is L, Derived polymorphism is Q
  VARIANT 208: note = Ancestral polymorphism is A, Derived polymorphism is G
  VARIANT 186: note = Ancestral polymorphism is I, Derived polymorphism is T
  VARIANT 183..527: note = Derived polymorphism lacks residues 183 to 527
  VARIANT 162: note = Ancestral polymorphism is G, Derived polymorphism is R
  VARIANT 138: note = Ancestral polymorphism is G, Derived polymorphism is C
  VARIANT 84: note = Ancestral polymorphism is P, Derived polymorphism is S
  VARIANT 77..527: note = Derived polymorphism lacks residues 77 to 527
  VARIANT 57: note = Ancestral polymorphism is T, Derived polymorphism is I
MPTVPPPLPQPLLVRLVAYAFYDDHYRCNPPHDAIVRYAVQLFDIRGEPRPYFILEIVTGAHIPLYSMAEQDGNAGQRPPDSVPKGGSDEVVVFFVQIVSIANGTVNPGQNKIRMVIVLICVCSELSDLSICCEWEMGIIGSNSYSNRDSNEPAQLAAEYRGQGFQTLKLKVGKNLNSDIEVQKAIRLVHPDCSFILDANEGYTRNQAIEVLDRLNGMFYLVIYPFDQFSIFYTDIQFSKMLMNMFSTSERAMERQRARGLSWVGLEGSANGQWWISSIGKTLDEGISFHRVGSRQWQDYLLLHGQRMTSGHMLVMLMLLQCHVAWGALLATRPLLFACFYFTVYIIFHVMNVLSLHELDPVFKKFSFSESVASLFSSLGYKRPAVIQSMYIFKQPGIGGEVVPHQDNTFLYTEPRTCTGLWLALEDATINNGCLWAILGSHKKGLVRRMVRDENGTHFDRPSPVYDQKEFVPLEVKSGALVVIHGDLIHQSFENLSPASRHAFSLHVVDTEGCKWSEDNWLVHIHN

SEQ ID NO: 19312 - protein, 121 aa, Zea mays
  VARIANT 20: note = Ancestral polymorphism is S, Derived polymorphism is Y
  VARIANT 69: note = Ancestral polymorphism is N, Derived polymorphism is Y
  VARIANT 78: note = Ancestral polymorphism is C, Derived polymorphism is R
  VARIANT 80: note = Ancestral polymorphism is G, Derived polymorphism is E
MSPVEFEPSVSEDLVLEKKYENGQHDVRGTHHHRTSMKPEKPIDLLRKVDGDNMCADCGASEPDWASLYLGALLCIECSEVHRNLGVHISKVRSLTLDVRVWEPSVINLFQSLGNMFVNSI

SEQ ID NO: 19313 - protein, 486 aa, Zea mays
  VARIANT 165: note = Ancestral polymorphism is R, Derived polymorphism is T
MNTLLHVKFLKTMYRLVVNNLVAIVVFAATAGVVARTSPEEVQARAREIRPVHCLLALLLAAAVAKLRRVGRPKDVYLVEYGCFRPKPWFRAPFATCLEHAHLMPYLVDEESVSFAIRLLERSGLGEETCVPDAYHYMPPDRSLSASRDETELVIFSAVDEVFARTSVKAEEIDVLIVNCSIFTPTPVFADMVVNRYKLRPDVQNVNLSGMGCSAGLVSVGLAKNLLQTARPGTHVLIVSTEILSSQYYVGTERAMLLPNCLFRMGAAAMILSNSPERARYRLTRLVRTVTAARDADYRCVFQEEDDKGNTGIRLSKDLAATAGHALKSNIAAFGPLVLPASEQLLVALSFLKRKLLLLRGRAKVRLYRPDFRTAFEHICIHAGGRGVIDEVQHGLGLSDEDVEASRMTLHRFGNTSSSSVLYELAYIEAKGAMKKGDRIWMISFGAGFDCNSVAWECVKPPADADGPWVDTIHRYPVQLPEIVNK

SEQ ID NO: 19314 - protein, 152 aa, Zea mays
  VARIANT 4: note = Ancestral polymorphism is E, Derived polymorphism is D
  VARIANT 16: note = Ancestral polymorphism is C, Derived polymorphism is Y
  VARIANT 26: note = Ancestral polymorphism is Y, Derived polymorphism is F
  VARIANT 28: note = Ancestral polymorphism is T, Derived polymorphism is I
  VARIANT 97: note = Ancestral polymorphism is A, Derived polymorphism is V
MKVECLSGSPPMAISYVSKVPWTSPFHTLWRFMELLKTARPSVLKFAQILVPTLIPRFLMSCASWRVAGSSTCSCRDNHRMEDLQPTEACLKLNVSALNLRFGYMFLHCMEDLQYPVTRHYWTSISMYKQRRTANTSKICHVVEEPMVFFYL

SEQ ID NO: 19315 - protein, 299 aa, Zea mays
  VARIANT 114..299: note = Derived polymorphism lacks residues 114 to 299
MPGDVDDDGPYFFSAPASPVHYILRSPPSSTAAGAASPAASADADCCAAAAGDFEFAAHMADGPGPKGGAAMSSAEELFVAGRIRVGCLSPIRRQEAGREGGSGSGGGEEEEEEAERDRRSPRATRRTRSVSPTRSPRGAAFAEPSDTFASASSSSSSSSSSSSAKNSRRRISLRDLLSRTGGDCAGAADQASSSGTGSAEVTSRPGFWPPSIWPSPRSSSNNLPLPCPAPQPPGRRSASSDRAAAPGGGGGGSARRTTSLPYRQSLVLGCLGFGARSRSYGARQVHAPPLLFTLNTKS

SEQ ID NO: 19316 - protein, 64 aa, Zea mays
  VARIANT 16: note = Ancestral polymorphism is E, Derived polymorphism is D
  VARIANT 25: note = Ancestral polymorphism is G, Derived polymorphism is S
  VARIANT 33: note = Ancestral polymorphism is A, Derived polymorphism is V
  VARIANT 37: note = Ancestral polymorphism is G, Derived polymorphism is W
MKELSPHIASFMSILERHASYLMSGKELSKLVVFVKGTQFDLVEYLQRERQGSARLENFASAVL

SEQ ID NO: 19317 - protein, 277 aa, Zea mays
  VARIANT 214..277: note = Derived polymorphism lacks residues 214 to 277
  VARIANT 189: note = Ancestral polymorphism is L, Derived polymorphism is P
  VARIANT 188: note = Ancestral polymorphism is G, Derived polymorphism is V
  VARIANT 162: note = Ancestral polymorphism is G, Derived polymorphism is C
  VARIANT 153: note = Ancestral polymorphism is H, Derived polymorphism is Y
  VARIANT 104: note = Ancestral polymorphism is P, Derived polymorphism is S
  VARIANT 102: note = Ancestral polymorphism is P, Derived polymorphism is H
  VARIANT 84: note = Ancestral polymorphism is G, Derived polymorphism is R
  VARIANT 5: note = Ancestral polymorphism is R, Derived polymorphism is W
MLRRRREAHSPAMSRITTVSPLPPRSLSPRQAFGRIGVASLRCQRRTPPLPPQCFRLLAGLSSALNKRTKTMPMRGVDFKWYDGFFLSMLATSVYPTPPDNPLPTSSIFIIWIPSLPLFFLSTLSRYIGKNSFLSSVEDIRTTSLKIASAVIHCFNCLPATGGLHHCLHLPPPNVVFIFRLLMFLDNGLAAGMGLDLGWQQRYARFCGRIIVLSVLVLLLYPFLWVWTVIGTLWFSTARGCLPEEGQKWGFLIWLLFSYCGLACIAFVAIGKVIVIL

SEQ ID NO: 19318 - protein, 156 aa, Zea mays
  VARIANT 106: note = Ancestral polymorphism is V, Derived polymorphism is L
  VARIANT 100: note = Ancestral polymorphism is C, Derived polymorphism is Y
MPLLTHPSPRKERNGESVRKKKSPKADFVLPVETRRLEDRRAQHRTTARGKARSSRRQQEDVIDGDLCEQYPSLPADMQRKIADELDRTPTPAALLVVLCANCGLVRAFSLVAFSVFAGVGERTREGNDLYKEIIESVVIKLGDKQSERKCALVYG

SEQ ID NO: 19319 - protein, 172 aa, Zea mays
  VARIANT 160: note = Ancestral polymorphism is A, Derived polymorphism is T
  VARIANT 159: note = Ancestral polymorphism is G, Derived polymorphism is R
  VARIANT 154: note = Ancestral polymorphism is A, Derived polymorphism is T
  VARIANT 153: note = Ancestral polymorphism is R, Derived polymorphism is H
  VARIANT 142: note = Ancestral polymorphism is T, Derived polymorphism is M
  VARIANT 140: note = Ancestral polymorphism is A, Derived polymorphism is T
  VARIANT 128..172: note = Derived polymorphism lacks residues 128 to 172
  VARIANT 124: note = Ancestral polymorphism is P, Derived polymorphism is S
  VARIANT 120: note = Ancestral polymorphism is V, Derived polymorphism is M
  VARIANT 112: note = Ancestral polymorphism is V, Derived polymorphism is M
  VARIANT 99: note = Ancestral polymorphism is D, Derived polymorphism is A
  VARIANT 89: note = Ancestral polymorphism is E, Derived polymorphism is K
  VARIANT 85: note = Ancestral polymorphism is P, Derived polymorphism is S
  VARIANT 84: note = Ancestral polymorphism is A, Derived polymorphism is V
  VARIANT 67: note = Ancestral polymorphism is P, Derived polymorphism is L
  VARIANT 62: note = Ancestral polymorphism is L, Derived polymorphism is H
  VARIANT 60: note = Ancestral polymorphism is P, Derived polymorphism is S
  VARIANT 59: note = Ancestral polymorphism is A, Derived polymorphism is T
  VARIANT 28: note = Ancestral polymorphism is A, Derived polymorphism is V
MRTVRGHCVAAGRRRNPDGEPPRHLLTAPTQRHNPSPRPPPPKLGRRTAAGASIAIAVASALLAVSPAPSKAREAEAEAAVVVVSCLAKLPVTAKAFLDVSIARFLSLVMGMGYRRKEFMKVVPGYVQHGGVVSYLAEPAVTERLAAEAEAVRARCGARAVHAAAGAVSIPV

SEQ ID NO: 19320 - protein, 231 aa, Zea mays
  VARIANT 39: note = Ancestral polymorphism is R, Derived polymorphism is C
MAICSTKTPIPYKGTTIAMLFTPITELNPQKINVVIRVRVIRKLEFRGATNDGPLRHINLILADEQLTLLRISDVYTLQHTTYYTHFANTYYITHAGYNNSSIVKDIFIKDISDASLKITLWGDQASGFSIDNVCNQSNNKSIVIMFVGCLAKQFKGQSYLSGTTTTTWYFNPNIPEAQEYYINHKGLNAPPLYHDSYKITNGGFQLAPNAENLCLKPPLDTAAHHVVVQT

SEQ ID NO: 19321 - protein, 152 aa, Zea mays
  VARIANT 32: note = Ancestral polymorphism is G, Derived polymorphism is R
MAQLVDKAKGFVADKLANIQKPEAELADVTVGHVGRDGATLAGRVDVRNPYSHAIPVCEVTYTLRSAGRTVASGTVPDPGSLAGDGATTRLDVPVKVPYDFLVSLAKDAGRDWDIDYEMRVGLTVDLPVVGKLTLPLTKSGELKLPTLSSIF

SEQ ID NO: 19322 - protein, 117 aa, Zea mays
  VARIANT 37: note = Ancestral polymorphism is E, Derived polymorphism is K
  VARIANT 41: note = Ancestral polymorphism is S, Derived polymorphism is L
  VARIANT 69: note = Ancestral polymorphism is A, Derived polymorphism is P
  VARIANT 73: note = Ancestral polymorphism is G, Derived polymorphism is E
  VARIANT 75: note = Ancestral polymorphism is D, Derived polymorphism is V
  VARIANT 88: note = Ancestral polymorphism is Y, Derived polymorphism is H
  VARIANT 91: note = Ancestral polymorphism is P, Derived polymorphism is S
MIRQLEKQQRSNGDGVNNNLSKLREDLEYVRFFPKNEKYVSLFTGGNSQDIVQERNKWRKQIKENLMAAAANGKDLEETSSDELRQNYRLPINIVLWLITGSIISISKKQKPPQQTS

SEQ ID NO: 19323 - protein, 107 aa, Zea mays
  VARIANT 27: note = Ancestral polymorphism is N, Derived polymorphism is K
  VARIANT 79: note = Ancestral polymorphism is P, Derived polymorphism is L
MFNGSESATGPHTIVDGKEVVNFASAKYLGLIGNEKIIDSCISSLEKYGVGSCGPRGFYGTIDVHLDCESKIAKFLGTPDSILYSYGISTIFSVIPAFCKKEDIIVA

SEQ ID NO: 19324 - protein, 226 aa, Zea mays
  VARIANT 24: note = Ancestral polymorphism is R, Derived polymorphism is W
  VARIANT 40: note = Ancestral polymorphism is S, Derived polymorphism is F
  VARIANT 51: note = Ancestral polymorphism is I, Derived polymorphism is T
  VARIANT 52: note = Ancestral polymorphism is A, Derived polymorphism is G
  VARIANT 88: note = Ancestral polymorphism is R, Derived polymorphism is S
  VARIANT 98: note = Ancestral polymorphism is R, Derived polymorphism is S
  VARIANT 109: note = Ancestral polymorphism is I, Derived polymorphism is S
  VARIANT 112: note = Ancestral polymorphism is T, Derived polymorphism is K
MVLTKQAEEGTNDLISKFQDLPSRLQEMLMPDLACLSQHSKAYLSAANVGIADVVRLILGGRWATVAASAASVAMFLPLFMLTALVRRMGPYLPLLHRALLLAQAYLAIYFTTLALTAAATGLEPLRFMVDLVVVFSSTASLEDDDNEDTAKALGLAQIVVGLAAGVHHYAVFHRAAAWAAPCANWRVYAVYTACFAIVCTCAHVERRKKAYLAGTDRAAEEWKKS

SEQ ID NO: 19325 - protein, 166 aa, Zea mays
  VARIANT 78: note = Ancestral polymorphism is G, Derived polymorphism is E
  VARIANT 73: note = Ancestral polymorphism is G, Derived polymorphism is R
  VARIANT 41: note = Ancestral polymorphism is S, Derived polymorphism is F
MPLGKYYCDYCDKQFQDTPAARKRHLQGVQHQRARALWYDSIRHQDQHGGASSLLLPDGTLAKGICHHFVRTGACKYGDSCRYFHPKPNGVNPALAAPGLGSGPAPMVQQSDIIGNQPNFVVYQGVDINSSSGKILGGHASWGNLPPSLQPPPEGGYPPLPFIDWG

SEQ ID NO: 19326 - protein, 242 aa, Zea mays
  VARIANT 44: note = Ancestral polymorphism is R, Derived polymorphism is H
MSIQIVLSKNRIITNCQRFRLSFFLIKFKLMPWLEAGAIVLADRGVVFIDEFDKMNDQDRVAIHEVMEQKTVTIAKAGIHASLNARCSVIAAANPIYGTNIGLPDSLLSCFDLLFTVLDQMDPEIDRQISEHVARMHRYCTDDGGARSLDKEGYAEEDDGDANAAIFVKYDRMLHGQDRRRGKKSKQDRLTVKFLKKYIHYAKNLIQPRLTDEEFFGPSDDQAPKILGAGTLPKISGPSDGR

SEQ ID NO: 19327 - protein, 221 aa, Zea mays
  VARIANT 56: note = Ancestral polymorphism is C, Derived polymorphism is R
  VARIANT 176: note = Ancestral polymorphism is R, Derived polymorphism is C
  VARIANT 181..221: note = Derived polymorphism lacks residues 181 to 221
MENLCRLHGWMTGAGGRRCTGTGPERRGARTSGRRTRSSSPTADSAWHCSSFCFRRISDFAKTAWHWTVDHTGSCWGLVVGVVGAHTRSTEATNESNSAWHYSSFCFRRISDFTKTAWHWMVDCTGSRWGLVVGAESGRTTESNPFAARAVRIHLRKVRDSQAKACGIPYEKKKKRKRAQQATKPSTSLSTAAAGSGRATTAAAAAAPAQAGGSSAAPSST

SEQ ID NO: 19328 - protein, 113 aa, Zea mays
  VARIANT 68: note = Ancestral polymorphism is L, Derived polymorphism is P
  VARIANT 85..113: note = Derived polymorphism lacks residues 85 to 113
MWSCLLTEFCHRGGHWWWCPPPSSCGCLRSSPSGAVASDPQHSENDIEDIQKLQAGPPLDEMSIPYIPRNLLHAIEYLHSEGLVWNRGPQVKASGQWSRQQLNQMADWSLMLG

SEQ ID NO: 19329 - protein, 96 aa, Zea mays
  VARIANT 77..96: note = Derived polymorphism lacks residues 77 to 96
  VARIANT 78: note = Ancestral polymorphism is L, Derived polymorphism is H
MLRYAAGASEHFVVATTVGLDLSRAYSIVMLLAYVAYLFFQLRTHAQLFKPQEVDEDGGEAEEDKKVVIGFASALFWLAFKTVLIVILSEYVVGTI

SEQ ID NO: 19330 - protein, 261 aa, Zea mays
  VARIANT 11..261: note = Derived polymorphism lacks residues 11 to 261
  VARIANT 23: note = Ancestral polymorphism is G, Derived polymorphism is D
MSTPALATAAEGATRIILVHGTGHGGWCWYRVATLLRAAGHRVDAPDLAASGIDSRQLRDVPTFEDYTRPLLDALRALPPGERAVLVGHSFGGMSIALAAETFPEKVAAAVFVTAFLPDCTNPRSQVIEKVTVSDWMDTVTDAEHVPASVFLGPEFLRHKLYQLSPPEDYTLSQSLARVSSYYVPDLQSQTPFSEARYGAVSKVYVVCKQDQAMTEAYQHTMIAACPVAEVREIADADHMAMFSAPAELAGHLAHIANTYA

SEQ ID NO: 19331 - protein, 81 aa, Zea mays
  VARIANT 28..81: note = Derived polymorphism lacks residues 28 to 81
  VARIANT 17: note = Ancestral polymorphism is F, Derived polymorphism is S
  VARIANT 16: note = Ancestral polymorphism is I, Derived polymorphism is T
MVGALAWQATVIKEDIFVSWGWRSHGGLFFGPGFSSLVVFRVPMCIGLCVVCDLSSPTRFGFLHLTRRSTTKTNMELQRDS

SEQ ID NO: 19332 - protein, 591 aa, Zea mays
  VARIANT 10: note = Ancestral polymorphism is A, Derived polymorphism is T
MDGKKVQERAAWCVSDGGGNLVQDAVDYRGCRADKSSTGGWASAALAVGIELCERLSTMGIAVNLVTYLTATMHLPSAAAANVVTDFMGTSFLLCLLGGFLADSFLGRYLTIAIFAVVQAIGTGLLAVSTEVRQLRPPPCGPGAAGPCEQATGLQMGVLYVCLYLIALGTGGLKSSVSGFGTDQFDERDARERAAMGLFFDRFFFFVTFGTLLAVTVLVYVQDHVGRSCAYGICAGAMLVAVAVFLSGTRRYRYKRSSGSPIVHILQVLVAATRKRNIVMQPLTAAALYEDHPEHARIPHTAQFPCLDRAAVMAGDDDNEVGHDGRPTMNPWKLRSVSRVEEVKMVARLMPVWATTILFWTMYAQMITFSVEQATTMDRRMGGFEIPAASLTVFFVGAIMLTLAFYDRVFVPLCRSLMTGRQGFTNLEKIGIGLVLSTFGMAAAAICEKKRLAVAATSVAVGHGSLPISVFMLTPQFLLVGSGEAFIYTGQLDFFIMRSPKSMKTMSTGLFLTTLSLGFFLSSALVSLVKSCTRWLGDTINHSRLDYFYWLLAVLGVVNLVAYIVYAMWAAAPASSQAEQPQHAMAADEKC

SEQ ID NO: 19333 - protein, 425 aa, Zea mays
  VARIANT 38: note = Ancestral polymorphism is A, Derived polymorphism is E
  VARIANT 43..425: note = Derived polymorphism lacks residues 43 to 425
  VARIANT 48: note = Ancestral polymorphism is A, Derived polymorphism is T
  VARIANT 49: note = Ancestral polymorphism is P, Derived polymorphism is S
  VARIANT 51..425: note = Derived polymorphism lacks residues 51 to 425
  VARIANT 76..425: note = Derived polymorphism lacks residues 76 to 425
  VARIANT 80..425: note = Derived polymorphism lacks residues 80 to 425
  VARIANT 112..425: note = Derived polymorphism lacks residues 112 to 425
  VARIANT 216: note = Ancestral polymorphism is R, Derived polymorphism is W
  VARIANT 219: note = Ancestral polymorphism is R, Derived polymorphism is W
  VARIANT 308..425: note = Derived polymorphism lacks residues 308 to 425
  VARIANT 334..425: note = Derived polymorphism lacks residues 334 to 425
MFAAPPPRLASVLLTGLERRRVHKRQGRAPARPRATAAALDVWTSEPAPVQERRRKLLQMLGLAGDPALARLEMGRSVSYDDGPVPVRPAPASPPISRSRSDGGAVPASATKPPLGGRSPGSFEATPEGEEEEEADPRCLIRNLDDGSEFVVKEGSELREVGTGRQLTMEEFVDLCVGRSPIVQELMRRENVASSGSSTPVQRSNSDSSNGVTRHRRRRHSSWLRGIRNVTGSVVASSRDRRSSDDKDTCSEKGGRRSSSATDDSQDSAGAVRHDPVRVKVRQYGKSYKEFSGMFMNQEIQTHDGSIWSIRFSPDGRYLASAGEDCVIHVWEVSEFDRKREENGACNPFVAMVCNGSPEPTLAVASNVDGSNREKKRRARFLEGRRSVSSDRLMLPEHVFALSEKPIRTFMGHSEDVPHDQFSLL

SEQ ID NO: 19334 - protein, 145 aa, Zea mays
  VARIANT 12: note = Ancestral polymorphism is M, Derived polymorphism is T
  VARIANT 27: note = Ancestral polymorphism is V, Derived polymorphism is A
MAMAMAMSASKMMAVAAAALLALALAVSTAEARNIKTTTTAATEKKDDAVVQPQTFPPFDRLGGGASPASGGLPGTSSGGSSIPAFSMPGSGSSSLPGGSFLPGSSGSIGSMPLFSGGSPAFSGFGGMPGSPAAGSAVPVHGNEP

SEQ ID NO: 19335 - protein, 318 aa, Zea mays
  VARIANT 2: note = Ancestral polymorphism is A, Derived polymorphism is E
MAAASRGLLARLRVLSLSGGGSPWLRFPPSRLFSAEAFVSHSDDDDAGGEGGGGGRIIEARSGVMGPTSRRTGVIGVKCGMSAMWDKWGAKVPITVLWVDDNVVTQVKTAEKEGFFALQLGAGQKKEKHLTKPEVGHFRAQGVPLKRKLREFPVTEDALLPVGTSITVRHFVPGQFVDVTGITKGKGFAGVMKRYGFGGMPASHGTSLAHRSGGSTGQRDAPGRVFKNRKMPGRMGGVQRTVKNVWVYQIDPARNLLYLKGQVPGPQGSFIFVKDSIYKKPDTALLPFPTYFTREGEPEDLEPLIADLGDVDPFMAAD

SEQ ID NO: 19336 - protein, 242 aa, Zea mays
  VARIANT 13: note = Ancestral polymorphism is E, Derived polymorphism is D
MAPQRRRERAVGEARPSSSAPTPAGPGWVEVQRRRVGGGWTSRRISIYASRVYFLLLMLQIPLFRSFRVPCRAGTCTTPIQVTSSQLVSNEIFPPAVVKAMLYPGAIVSSLTKSKAFPSWSDLFDMYNLTEAKNASAVVDLQRLEILAGSYFCVAGGLLGIINPGRMTLFGTLLVIWGLVKEALFGKPVNSDPTESTYVYPTILIALICAFMSITYNVKKTAASSPVSLAKPLKSSAKSKLK

SEQ ID NO: 19337 - protein, 328 aa, Zea mays
  VARIANT 151: note = Ancestral polymorphism is K, Derived polymorphism is M
  VARIANT 276: note = Ancestral polymorphism is L, Derived polymorphism is Q
  VARIANT 286: note = Ancestral polymorphism is T, Derived polymorphism is S
MVQMSLQRSIAVYPRCSLSDSFHRVGGSRRRWASCRSQSSRFAYNARPSPIVLKTDHAIDPPEPKDLDASSSASRSGPYIGTCHPSGAVGVMGASSSSCLRFLEKFVSWSTGGGEEAPPFIICNDPLVKKELLPSGTQSTSGCSASIALGKLRQKRLFLEQSGACCIVMPCQFLHAWHDEISQGCSVPFIHVGDCVVKELKAANLKPVEYGSNVRVGVLFTDNKLATNCYLDKLESQGFEVLCPDKASMERTVLPSVAAFGKGDMEGARNLLRVSLQVLLVRAVNSIILASDDLVGILPDDDPLLKKCIDPLDALVREAIACARAPQP

SEQ ID NO: 19338 - protein, 159 aa, Zea mays
  VARIANT 153: note = Ancestral polymorphism is F, Derived polymorphism is S
  VARIANT 139: note = Ancestral polymorphism is G, Derived polymorphism is S
  VARIANT 138: note = Ancestral polymorphism is P, Derived polymorphism is S
  VARIANT 121: note = Ancestral polymorphism is D, Derived polymorphism is N
  VARIANT 79..159: note = Derived polymorphism lacks residues 79 to 159
  VARIANT 63: note = Ancestral polymorphism is T, Derived polymorphism is I
  VARIANT 16..159: note = Derived polymorphism lacks residues 16 to 159
MIPYLQLIGLSRSWVQQRPQPGIHQSIGRPWWSSGSMKPKVVHLDYVLVDLYSILFLIPLIHTEFGRRRQDNVEVLFPESQVVGSDNPSSVAYNNDLASASSAITDSATLVEKAIAKLPVDVRAHATDSKIKAKSQDPGWKFGWWLDPTKKHFIRCISV

SEQ ID NO: 19339 - protein, 745 aa, Zea mays
  VARIANT 553: note = Ancestral polymorphism is R, Derived polymorphism is W
MASQAARRGGAMRPPSSGVRTAAARPPAASFLLATAATAALVGGFYFWLVVSSFRLPDSGAVGCRPDGEGSWAVGMFYGSSPLALRPIELEGRSNGNSSAWPVANPVLTCGTATEAGYPSNFVADPFLYVEGDTLFIFFETKTTTSMQGDIGVARSFDQGATWEFLGIALDEAWHLSYPFVFKYENEIYMMPEGNKKKELRLYRATKFPLEWTLEKVLVNKPLIDASLVQFEGYWWLFASDFTRYGVEKNAELEIWYSNSPLGPWTEHKKNPIYKSDKSLGARNGGRLFIFEGSLYRPGQDCSGTYGRMVKLHKVEKLSKEEYKEVPVNLGIEEPKKGRNAWNGMRYHHMDAQQLASGGWIAVMDGDRVPSGDSTRRSLIGYLAFLLASALVVFVGFMKGAISCYVPPSLWVPLTRRTELSRIFYVHRFNQKVRRYSTSISRYISAAKTKLSEKTWSNVLFFCVVALFGAINVCIAVHFLCGGNGAEEAYTYQGQHSQFTMITMTYEARLWNLKVFIEHYSRCESVREIVVVWNKGNPPSSDAFDSTVPVRIRVEETNSLNNRFRVDPLIKTRAVLELDDDIMMTCTDLEKGFRVWREHPERMVGFYPRMIDGNPMQYRNERYARGKNGYNLILTGAAFMDKEFAFKTYWSEKAREGRDYVHKNFNCEDLLMNFLYANASSTTRTVEYVHPAWAIDTSKLSSVAISRDTQKHYDIRTHCLANFSSIYGPLPQKWEFGMREDRWDK

SEQ ID NO: 19340 - protein, 522 aa, Zea mays
  VARIANT 402: note = Ancestral polymorphism is A, Derived polymorphism is S
  VARIANT 406: note = Ancestral polymorphism is E, Derived polymorphism is V
MACAAYSIRSPLKLAVRHGSDVLSSNNLCNGFKSSVSYLNSQRWSSNCSAVTMRHVASHCHSIVKTPAMWPSKASATDAATASDERITVLVIGGGGREHALCYALNHSPSCAAVLCAPGNAGIAQSRDATCIPDLDISSSDDVISFCRKRGVGMVVVGPEAPLVAGLANDLVKVGIPTFGPSSEAAALEGSKDFMKKLCDKYNIPTAKYHTFTDAVEAKKYVKNEGAPIVVKADGLAAGKGVVVAMTLDEALEAIDSMLVEGSFGSAGSRVIIEEFLEGEEASFFALVDGENALPLESAQDHKRVGDGDVGPNTGGMGAYSPAPIVTDELKRIVMESIIIPTVKGMAAEGCKFVGVLYAGLMIEKKSGLPKLIEYNVRFGDPECQVLMMRLESDLAQVLLSACKGELSNVSLTWSPEMAMVVVMASQGYPGSYKKGTVIKNVDKAERVSPAVKIFHAGTAVDGDGNLVAVGGRVLGFTAKGKDIEEARARAYGAVDAIEWVEGFCRRDIGWRALRQKQVANQ

SEQ ID NO: 19341 - protein, 142 aa, Zea mays
  VARIANT 92: note = Ancestral polymorphism is A, Derived polymorphism is V
MCDVSNNHHREGARSSWFRLPLNNTQLRRILADSVRKVQKKPIIHTAKANELADDRWLSFSEASGALALKSQHRQTPVMASSKILRAAVVVVAVAVSSFAGAALAAEAPAPSPASGAAAVSSSLLAAALCPAVALLLGNLRH

SEQ ID NO: 19342 - protein, 231 aa, Zea mays
  VARIANT 90: note = Ancestral polymorphism is S, Derived polymorphism is P
  VARIANT 114: note = Ancestral polymorphism is T, Derived polymorphism is K
MVVSKKKLIKVGPWGGAGGHPWDDGGYSGIRSITMSYDRFMESISVEYDRDGMPVTGERHGGAAASHTTQARPPPNQSPPSVTISDTAPSAGWFLNRARVRTQIKLGYPDEYLTTVSGHYAPIAPGGSPVIRSLAFRTNQGAYGPFGVAEGTPFEFPVDGGVIVGFCGRSGWQLDAVGLYVAPLRPETVYDRVHKLGLTAYRAVWQRIGSQQQQQEPVKLLNGNAQITHKM

SEQ ID NO: 19343 - protein, 312 aa, Zea mays
  VARIANT 122: note = Ancestral polymorphism is P, Derived polymorphism is L
MEPQRVGDADGESRSAAAQSAPPPRAETHGTNQRSCGEVRALLQLGDPLGWLPLRRPIGMVAAARWIAKLSGPCLAQALQMYPDFKIKVVGHSLGGGTAALLTYVLREQKEFASTTCLAFAPGAAACMTWKLAESGVHFITTVINGADLVPTFSAALVDDLGSEVTASAWLNDFRHQIEQTRILSTFYRSASALGSRLPFMANAKARVAGAGAILRPVSTGTHVTFKASFVTPSSGSLVLMRRARSVAQAAWTRPALQLSSWTCIGPRRRNNISTSTVTSEEIITSTGGGSESTSLLTETTAGTTKTVTILV

SEQ ID NO: 19344 - protein, 141 aa, Zea mays
  VARIANT 123: note = Ancestral polymorphism is G, Derived polymorphism is R
  VARIANT 118: note = Ancestral polymorphism is A, Derived polymorphism is T
  VARIANT 45: note = Ancestral polymorphism is G, Derived polymorphism is R
  VARIANT 28..141: note = Derived polymorphism lacks residues 28 to 141
  VARIANT 20: note = Ancestral polymorphism is L, Derived polymorphism is R
MFGFQKVSFRIFLMQVQPTLIGRKQVLSNSGIASISVVLIALVIRGIDRCLDSKESTLVIALIDGVIGHYACCNGDTWSSELDILCKAEPRIITTFKVLVRQVTIGGVTIDGLLAATTRFSIRLAFVLIGFFTTQCAPDVF

SEQ ID NO: 19345 - protein, 72 aa, Zea mays
  VARIANT 61: note = Ancestral polymorphism is D, Derived polymorphism is N
  VARIANT 60: note = Ancestral polymorphism is G, Derived polymorphism is D
  VARIANT 51: note = Ancestral polymorphism is R, Derived polymorphism is Q
  VARIANT 49: note = Ancestral polymorphism is R, Derived polymorphism is H
MHPPHARRTRPASDAHLRNQRSDDEDAAAQDDELVVDLADLAPAPMATRKRMLLKFVIVGNSMVGKTSVMNQ

SEQ ID NO: 19346 - protein, 353 aa, Zea mays
  VARIANT 198: note = Ancestral polymorphism is D, Derived polymorphism is N
  VARIANT 127: note = Ancestral polymorphism is V, Derived polymorphism is A
  VARIANT 106: note = Ancestral polymorphism is M, Derived polymorphism is I
  VARIANT 105: note = Ancestral polymorphism is E, Derived polymorphism is Q
  VARIANT 100..353: note = Derived polymorphism lacks residues 100 to 353
MVDKLDQGLVPAELGPLDYKGLYNAVSKALFRAHVEGQLKREIMAEPDRFVEPDPELPLALLDQKEAGKKLLLITNSDFHYTNKMMNHAFNRFLPNDVGWRDLFEMVIVSARKPEFFQLSHPLYEVVTDDGLMRPCFKVNSGGLYSGGSAQMVEKSLDIHGDEILYVGDHIYTDVSQSKVHLRWRTALICRELEDEFNALVKSHDQKEKLVTLIQQKEIVGDLFNQLRLALQRRSNSRPAQTLAATCMDDQELTESMQKLLIVMQRLDEKIGPMLEADGELFNKRWGWLSRAGLWDKSHLTRQIEKYADIYTSRVSNFLHYTPFMYFQSQEQVNTQLHTLLTFGILLLLCLLV

SEQ ID NO: 19347 - protein, 139 aa, Zea mays; identical to SEQ ID NO: 6439
  VARIANT 7: note = Ancestral polymorphism is P, Derived polymorphism is S
  VARIANT 12: note = Ancestral polymorphism is P, Derived polymorphism is T
  VARIANT 22: note = Ancestral polymorphism is D, Derived polymorphism is E
  VARIANT 30: note = Ancestral polymorphism is H, Derived polymorphism is P
  VARIANT 36: note = Ancestral polymorphism is H, Derived polymorphism is Y
  VARIANT 46: note = Ancestral polymorphism is V, Derived polymorphism is D
  VARIANT 57: note = Ancestral polymorphism is A, Derived polymorphism is V

SEQ ID NO: 19348 - protein, 77 aa, Zea mays
  VARIANT 21: note = Ancestral polymorphism is A, Derived polymorphism is V
MPKLRLIFTVILVVSLLFSGVSSGQTAATQASDADLSEAVEVERRSGKVLTYVQDYDYGGSNPKHDPRRKPGSGHPP

SEQ ID NO: 19349 - protein, 109 aa, Zea mays
  VARIANT 100: note = Ancestral polymorphism is P, Derived polymorphism is L
  VARIANT 41: note = Ancestral polymorphism is D, Derived polymorphism is G
  VARIANT 31: note = Ancestral polymorphism is C, Derived polymorphism is Y
  VARIANT 13: note = Ancestral polymorphism is T, Derived polymorphism is I
  VARIANT 10: note = Ancestral polymorphism is G, Derived polymorphism is D
MGAYTVPGFGMVTGFLEEQLYRWLRAAELTCDRAALLVVQDPKVVISVLMKLAGGCPSLADKLNVDAFLEQARSYDKAASNPVGWYIRNAQTRELSHPLPVMRAREIDE

SEQ ID NO: 19350 - protein, 246 aa, Zea mays
  VARIANT 141..246: note = Derived polymorphism lacks residues 141 to 246
  VARIANT 216: note = Ancestral polymorphism is I, Derived polymorphism is S
  VARIANT 222: note = Ancestral polymorphism is P, Derived polymorphism is L
  VARIANT 226: note = Ancestral polymorphism is H, Derived polymorphism is Y
  VARIANT 238: note = Ancestral polymorphism is R, Derived polymorphism is S
MSLSSVKIGEEVWLTCLSHALTTETEEVMGLLLGDIELSSKVATALVWGASPQMRCERKKDRVELNPELLAAASAQAEKMTATIKRTTRVIGWYHSHPHITVLPSHVDVRTQAMFQLLDTGFVGLIFSCFSEDAQKVGKIQVTAFQSEGGQQHPLPLAIDPVIDLDSSCSSSDNVSASHSASVEGMEQDTGDSRVSKNNKAWRRSMDSTPIMTQIIPQIMNPEKAYSFRTILITHKKRMLIHMIQI

SEQ ID NO: 19351 - protein, 104 aa, Zea mays
  VARIANT 66: note = Ancestral polymorphism is D, Derived polymorphism is A
  VARIANT 79..104: note = Derived polymorphism lacks residues 79 to 104
MAGLQRSSETFRRPGSSGLVWDDKNFSGEIKPAVAPEDGGGTAHSRSAGHRHAGYKATGREPPALAPPSPRIAVCGFCRIFRGGGKAKGRGRGGDSAKVKGRLH

SEQ ID NO: 19352 - protein, 318 aa, Zea mays
  VARIANT 23: note = Ancestral polymorphism is T, Derived polymorphism is P
MAAALPQLDDEIVHGMAIGAVFTDYTGKINCLDFHRTEDLMITSSEDDSIRLYNITSATLLKTTYHRKHGADRVCFSHHPSSILCSSRYNLESIESLRYLSLYDNRCLRYFKGHKDRVVSLCMSPVNDSFMSGSLDHSVRIWDLRVNACQGILRLRGRPSVAYDQQGLVFAVAMEGGAINLFDSRSYDKGPFDTFLVGGDTAEVSDIKFSNDGKSMLLTTTNNHIYVLDAYVGDKRCGFSLEPSPNVTNEAAFTPDGQYVISGSGDGTLHAWNINTVQEVACWNSRIGPITALKWAPRRAMFATASTALTFWIPNRSN

SEQ ID NO: 19353 - protein, 400 aa, Zea mays
  VARIANT 87: note = Ancestral polymorphism is S, Derived polymorphism is F
MAAGGNGAGGDTRAAFARIYKTLKEELLTDPAFEFTEESRQWIDRVTIPLSLSLAVAVPSFLPFSVPVSWLDPCGVRRAVRGLPVPSVTVAQPGSMVDYNVLGGKCNRGLSVVDSYKLLKGADALGEEETFLACTLGWCIEWLQAFFLVLDDIMDDSHTRRGQPCWFRVPQVGLIAANDGIILRNHISRILRRHFKGKPYYADLLDLFNEVEFKTASGQLLDLITTHEGEKDLTKYNITVHGRIVQYKTAYYSFYLPVACALLLSGENLDNYGDVENILVEMGTYFQVQDDYLDCYGDPEFIGKIGTDIEDYKCSWLVVQALERADESQKRILFENYGKKDPACVAKVKNLYKELDLEAVFQEYENESYKKLIADIEAQPSIAVQKVLKSFLHKIYKRQK

SEQ ID NO: 19354 - protein, 198 aa, Zea mays
  VARIANT 137: note = Ancestral polymorphism is S, Derived polymorphism is L
  VARIANT 135: note = Ancestral polymorphism is S, Derived polymorphism is W
  VARIANT 60: note = Ancestral polymorphism is G, Derived polymorphism is S
  VARIANT 47: note = Ancestral polymorphism is P, Derived polymorphism is L
  VARIANT 43: note = Ancestral polymorphism is K, Derived polymorphism is N
  VARIANT 42: note = Ancestral polymorphism is P, Derived polymorphism is L
  VARIANT 39: note = Ancestral polymorphism is Y, Derived polymorphism is S
  VARIANT 32: note = Ancestral polymorphism is A, Derived polymorphism is V
  VARIANT 27: note = Ancestral polymorphism is S, Derived polymorphism is P
  VARIANT 25: note = Ancestral polymorphism is A, Derived polymorphism is V
  VARIANT 23: note = Ancestral polymorphism is A, Derived polymorphism is V
  VARIANT 6: note = Ancestral polymorphism is R, Derived polymorphism is H
MSPLPRIVLLLTVVVAAAAVVTVSVMSLSGAANDLLPKYGLPKGLIPDSVASYSFDEATGAFEIHLAGTCYVHFGSHLVYYERTITGKLSKGAISDLSGVQAKKLFLWVYVTGMVAHPDQGTIEFQAGFISESLSASMFDEVPTCGSSVGAQLRGAAGVIDDLGLLPVAQVAKQVKSLVKNPLNYGIAFVLMELDSQK

SEQ ID NO: 19355 - protein, 178 aa, Zea mays
  VARIANT 150: note = Ancestral polymorphism is S, Derived polymorphism is F
  VARIANT 138: note = Ancestral polymorphism is D, Derived polymorphism is N
  VARIANT 55..178: note = Derived polymorphism lacks residues 55 to 178
  VARIANT 52: note = Ancestral polymorphism is A, Derived polymorphism is V
  VARIANT 42: note = Ancestral polymorphism is A, Derived polymorphism is V
MRARQMIARSALDEVTYTGDFDRSPSTFRSSVSRDGRFPTVAGRYHLYVSYACPWASRCLAFLKLKGLDHAIGVTVMKPIFERTKESDEHLGWVFPAVADEEPGAEPNPLNGAWSVRELYEIASSNYAGKPTIPVLWDKQLKTVVNNESSEIIRMLNAEFNGIARNPGLDEFLFLFLL

SEQ ID NO: 19356 - protein, 338 aa, Zea mays
  VARIANT 71: note = Ancestral polymorphism is G, Derived polymorphism is R
  VARIANT 20: note = Ancestral polymorphism is A, Derived polymorphism is V
MVKDSAYYDVLGVSVDASSAEIKKAYYIKAKLVHPDKNPGNPDAALKFQELGEAYQVLSDPGKKEAYDKYGKEGIPQDNMVDPAAVFGMIFGSDYFEDYVGQLALASIASVEVDENSNSQEARAKVQEKIKELQREREQKLTQSLKDRLQPYVDERKDEFVSYASTEARRLSEAAFGEAMLHTIGYIYVRQAARELGKSRIYMGVPFIAEWVRDKGHHIKSQVNAASGAISLIQLQEGMKKMEGSENSEEQLMKSFEEKKDAMLSSLWKINVVDIESTLSRVCQAVLRDNTVSKDVLKLRAKALKKLGTIFQGAKSMYRRENSLRVETSTNQQANPSH

SEQ ID NO: 19357 - protein, 168 aa, Zea mays
  VARIANT 133: note = Ancestral polymorphism is H, Derived polymorphism is L
  VARIANT 122: note = Ancestral polymorphism is G, Derived polymorphism is V
  VARIANT 101: note = Ancestral polymorphism is D, Derived polymorphism is N
  VARIANT 91: note = Ancestral polymorphism is S, Derived polymorphism is F
  VARIANT 74: note = Ancestral polymorphism is P, Derived polymorphism is H
  VARIANT 53: note = Ancestral polymorphism is R, Derived polymorphism is W
  VARIANT 33: note = Ancestral polymorphism is E, Derived polymorphism is K
  VARIANT 29: note = Ancestral polymorphism is E, Derived polymorphism is K
  VARIANT 11: note = Ancestral polymorphism is P, Derived polymorphism is S
MPGPAPAVAPPLTIFYGGMVVVFEDFPAEKAAEVMCLAAGDDLPIARKASLQRFLAKRKDRLVERAPYARPSSPAEEPEKKTVKPASALASWLGLDSTEADCLTITLFCHRLVLRFCPPPTVRGYGPGGVRRLGERLDDGVRNGGATDGEQSRWDRQTRGVDTALVPL

SEQ ID NO: 19358 - protein, 213 aa, Zea mays
  VARIANT 68: note = Ancestral polymorphism is S, Derived polymorphism is L
MVGGGGHSSMDHPGAKDLERGELRRGAPEFADGDDGDGEESQYFSDAEDRSWPSHSRHDSTAYEDYVSLCVSARASSVDADADADGEAVRQHCRKSSCVSEGSLDDVDLEAGLSEIIKASPEKAEQNCRICHLGLESTAVESGAGITLGCSCKGDLSYAHKQCADTWFKIRGNKCSTCKYVISSDDPEDWDYRQLDNPRHLLHANQNIHPDED

SEQ ID NO: 19359 - protein, 238 aa, Zea mays
  VARIANT 16..238: note = Derived polymorphism lacks residues 16 to 238
  VARIANT 38: note = Ancestral polymorphism is D, Derived polymorphism is N
  VARIANT 40: note = Ancestral polymorphism is C, Derived polymorphism is Y
  VARIANT 52: note = Ancestral polymorphism is E, Derived polymorphism is K
  VARIANT 60: note = Ancestral polymorphism is C, Derived polymorphism is F
  VARIANT 62: note = Ancestral polymorphism is Q, Derived polymorphism is H
  VARIANT 69: note = Ancestral polymorphism is R, Derived polymorphism is H
  VARIANT 73: note = Ancestral polymorphism is D, Derived polymorphism is Y
  VARIANT 79: note = Ancestral polymorphism is G, Derived polymorphism is S
  VARIANT 84: note = Ancestral polymorphism is T, Derived polymorphism is I
  VARIANT 103: note = Ancestral polymorphism is R, Derived polymorphism is S
  VARIANT 104: note = Ancestral polymorphism is S, Derived polymorphism is N
  VARIANT 108: note = Ancestral polymorphism is Y, Derived polymorphism is C
  VARIANT 111..238: note = Derived polymorphism lacks residues 111 to 238
  VARIANT 117: note = Ancestral polymorphism is V, Derived polymorphism is A
  VARIANT 136: note = Ancestral polymorphism is T, Derived polymorphism is I
  VARIANT 137: note = Ancestral polymorphism is A, Derived polymorphism is S
  VARIANT 139: note = Ancestral polymorphism is A, Derived polymorphism is V
  VARIANT 173: note = Ancestral polymorphism is E, Derived polymorphism is K
  VARIANT 199..238: note = Derived polymorphism lacks residues 199 to 238
  VARIANT 206: note = Ancestral polymorphism is G, Derived polymorphism is C
  VARIANT 209: note = Ancestral polymorphism is D, Derived polymorphism is G
  VARIANT 214..238: note = Derived polymorphism lacks residues 214 to 238
  VARIANT 233: note = Ancestral polymorphism is G, Derived polymorphism is V
MDDGDAANSGKHVAGQVCQIYGDGVGTAADDDLFTACDVCGFPVCRPCYEYERKDGTQACPQCKTKYKRHKGDEPCYAGVPMSTIIEQGYGVGDVISLLWFKRSLPRYCTQFIEICVMLCADHGPCVSGAHNSIVTARAGKDLVSSLVSVDFSSLWRWKIRLDASVMLSKGNESLLIPDNAQVISSSVVDRCPHRSEIQSVAHAEGEDDCLILGTVDSYGHLIVSRLDIVADGNFTIL

SEQ ID NO: 19360 - protein, 209 aa, Zea mays
  VARIANT 1: note = Ancestral polymorphism is M, Derived polymorphism is I
  VARIANT 8..209: note = Derived polymorphism lacks residues 8 to 209
  VARIANT 29..209: note = Derived polymorphism lacks residues 29 to 209
  VARIANT 42..209: note = Derived polymorphism lacks residues 42 to 209
  VARIANT 80: note = Ancestral polymorphism is S, Derived polymorphism is L
MNQFVPDWSNMGDTSRPLGEEDDLIELLWCNSHVIMQSQRHWKVPPMLEKAAVVAAPLAPASVPREDEGGLWFPFTLADSLDKDIFSEFFCEAPTPADAAPTASSGGTGTEAGDKSRGVDVPAAEDDRRGGSGACAMSAGDPCDLIPPPKSTPASCSRQHTMMSLANGGDNAGGDLPGLGSMAVRRYGHGAAKSSAATGMYGCAARACA

SEQ ID NO: 19361 - protein, 209 aa, Zea mays
  VARIANT 1: note = Ancestral polymorphism is M, Derived polymorphism is I
  VARIANT 38: note = Ancestral polymorphism is S, Derived polymorphism is I
  VARIANT 46: note = Ancestral polymorphism is P, Derived polymorphism is S
  VARIANT 62: note = Ancestral polymorphism is S, Derived polymorphism is F
  VARIANT 80: note = Ancestral polymorphism is S, Derived polymorphism is L
MNQFVPDWSNMGDTSRPLGEEDDLIELLWCNSHAIMQSQRHWKVLPMLEKAAVVAAPLAPASVPQEDEGGLWFPFTLADSLDKDIFSEFFCEAPTPADAAPAASSGGTGTEAGDKSRGVDVPAAEDDRRGGSGACAMSAGDPCDLILPPKSTPASCSRQHTMMSLANGGDNAGGDLPGLGSMAVRRYGHGAAKSSAATGMYGCAARACA

SEQ ID NO: 19362 - protein, 155 aa, Zea mays
  VARIANT 2: note = Ancestral polymorphism is R, Derived polymorphism is W
  VARIANT 17: note = Ancestral polymorphism is L, Derived polymorphism is M
  VARIANT 20: note = Ancestral polymorphism is Y, Derived polymorphism is H
  VARIANT 37: note = Ancestral polymorphism is F, Derived polymorphism is I
  VARIANT 40: note = Ancestral polymorphism is D, Derived polymorphism is N
  VARIANT 43: note = Ancestral polymorphism is H, Derived polymorphism is N
  VARIANT 48: note = Ancestral polymorphism is G, Derived polymorphism is S
  VARIANT 50: note = Ancestral polymorphism is L, Derived polymorphism is F
  VARIANT 51: note = Ancestral polymorphism is P, Derived polymorphism is S
  VARIANT 54: note = Ancestral polymorphism is N, Derived polymorphism is S
  VARIANT 58: note = Ancestral polymorphism is D, Derived polymorphism is G
  VARIANT 69..155: note = Derived polymorphism lacks residues 69 to 155
  VARIANT 70..155: note = Derived polymorphism lacks residues 70 to 155
  VARIANT 73: note = Ancestral polymorphism is I, Derived polymorphism is T
  VARIANT 74: note = Ancestral polymorphism is V, Derived polymorphism is L
  VARIANT 83: note = Ancestral polymorphism is A, Derived polymorphism is E
  VARIANT 87: note = Ancestral polymorphism is L, Derived polymorphism is P
  VARIANT 89: note = Ancestral polymorphism is R, Derived polymorphism is I
  VARIANT 103: note = Ancestral polymorphism is E, Derived polymorphism is K
  VARIANT 119: note = Ancestral polymorphism is P, Derived polymorphism is S
MRHHLHIEESQVADMCLDLYKEYGTTMVGLKALGYGFDNDEFHATVHGTLPYHNLRPDPVLRTLLLSIRQRKIVFTNSDKAHAEEALCRLGLQGCFDGVICFETLNPCNGPSAFGMLFSDETSPDLADLNESDGFRPISPIICKSASPSLKPCKL

SEQ ID NO: 19363 - protein, 415 aa, Zea mays
  VARIANT 392: note = Ancestral polymorphism is N, Derived polymorphism is I
MEKGSAPAMALALAMLLACSSIAAVTAQETERIEGSAGDVLEDNPVGRLKVFVYDLPSKYNKKLLKKDPRCLNHMFAAEIFMHRFLLSSAVRTFNPEEADWFYTPVYTTCDLTPKGLPLPFKSPRMMRSAIQLIATNWPYWNRSEGADHFFVTPHDFGACFHYQEEKAIGRGILPLLQRATLVQTFGQKNHVCLKDGSITIPPYAPPQKMQTHLIPADTPRSIFVYFRGLFYDTGNDPEGGYYARGARASVWENFKNNPLFDISTDHPPTYYEDMQRSVFCLCPLGWAPWSPRLVEAVVFGCIPVIIADDIVLPFADAIPWEEIGVFVAEEDVPRLDSILTSIPTDVVLRKQRLLANPSMKQAMLFPQPAQAGDAFHQILNGLARKLPHGSNVFLKPGERALNWTAGPPGDLKPW

SEQ ID NO: 19364 - protein, 97 aa, Zea mays
  VARIANT 33: note = Ancestral polymorphism is P, Derived polymorphism is R
  VARIANT 42: note = Ancestral polymorphism is P, Derived polymorphism is R
  VARIANT 65..97: note = Derived polymorphism lacks residues 65 to 97
  VARIANT 77: note = Ancestral polymorphism is S, Derived polymorphism is N
MGVAAEVAAGGDGPNSGVGREAEVENLCRYELRNESWEVNLRAQKVSPELLEPTLGINFARDGIQEKEWLSMVVAHSDAWLLYVAFYLGARFGFNKK

SEQ ID NO: 19365 - protein, 375 aa, Zea mays
  VARIANT 212: note = Ancestral polymorphism is P, Derived polymorphism is L
MDSTSCLLDDASSGASTGKNKPAPVPAPAAVTGKPLQRVGSSGASAVMDAAEPGAEADSDGARRAPGGVGGKLPSSKYKGVVPQPNGRWGAQIYERHQRVWLGTFTGEAEAARAYDVAAQRFRGRDAVTNFRPLAESDLDPDAAAELRFLASRSKAEVVDMLRKHTYGEELAQNRRAFAAAAASLASPQLPPAKNTSPAAAREHLFDKTVTPSDVGKLNRLVIPKQHAERHFPLRRVQGGRAPILSFEDAAGKAWRFRYSYWNSSQSYVLTKGWSRFVKEKGLHAGDAVGFYRSAAAGRQLFIDCKLRPKAVRLFGVDLLTEPPRSAAAVAQPEPEQEEIAVSKNKRARDAIAASATPVHIAFKKQRVDVALTTT

SEQ ID NO: 19366 - protein, 155 aa, Zea mays
  VARIANT 23..155: note = Derived polymorphism lacks residues 23 to 155
  VARIANT 110: note = Ancestral polymorphism is D, Derived polymorphism is G
MDLDITVEFWSLQALRSFFSSYQTSSTGPKLDEHFVMSNNHAARAQYFFQQMEAANEERLREEFVRESRKLPPKQQSQTCDSNVITPRTEFMAVLSVALECYIHLRLNYDHEWKQNKVILSDANVPGERDLSGFNPNPLPVWPGRISDHASFADT

SEQ ID NO: 19367 - protein, 257 aa, Zea mays
  VARIANT 193: note = Ancestral polymorphism is R, Derived polymorphism is W
  VARIANT 22: note = Ancestral polymorphism is P, Derived polymorphism is R
MAATADPRAKPTAAAAHHLAVPWAHQASPAAHRMPPPVLAAAAGGGGCGARDRHRSSSAHRQVQAVGEDNPYDGGIEALRAKLMGHLRDAADRLRVPQPLWSLAASRPPYPRPPPPKAATASSPPPPGTDSEPELRAPPPLRPPTPAPPQAEAAVATATGRPWNLRERTRRRPASTRSWAASPPPPSSSSRRRRKRAPFSVSLKAEEIEEDIYALTGSRPRRRPRKRPRAVQRHVDSLFPGLWLTEITADAYRVPDE

SEQ ID NO: 19368 - protein, 250 aa, Zea mays
  VARIANT 69: note = Ancestral polymorphism is P, Derived polymorphism is S
  VARIANT 68: note = Ancestral polymorphism is V, Derived polymorphism is E
  VARIANT 66: note = Ancestral polymorphism is R, Derived polymorphism is C
  VARIANT 46: note = Ancestral polymorphism is D, Derived polymorphism is N
MGLGEGEYEPRVVHQFLDLAYRYVGDVLGDAQVYADHVGKAQIDANDVRLAIQAKVNFSFSQPPPREVPIVPYSQFGQISWLMFIFFYPRQIVAFSLGWFCTAESMKPNYFAARVVETRFRISFVFAGLVWSLLNSVNDAIIVGDKLVSCSSDTTIKVWNCFSDGACTRTLHRHSDYVICLAAAENNSNIVASGGLGGEVFIWDLDAALAPVAKSVDAKEDEVPNGNSGPALTTLCSMNSSSYYVDKRFL

SEQ ID NO: 19369 - protein, 754 aa, Zea mays
  VARIANT 69..754: note = Derived polymorphism lacks residues 69 to 754
MSDFVGSRYTKQEDFHVLLSKKDPGEPPEHKHVLWMAHWTKASSNNGSSNPLEGTTKGTTTKDSETLPYEFTESTVAKRLMVGVSHGSASMQHDRQFNSSVWGMARHISNELGPKNSEHVDGSFEKFVKKDAVNLRARAVVSETYSVHKLSELPLDFQHLGNSDDPSPDWSHFPMFEINRKIDSILNRKRRSAPLNLNASASHVLALSSQEYMMHSHQIADENLDMCRPAEGFASHLEDPAGLNSDPSGPKLKGQLLDTVSCSCSKDDTNSADCLIDEQHTSHYFANSKHELPSVSNEKKFKFAGNNHNRILASASHKHESVAEAMFCAPVLGSELQNEPITISNIGKKDGENFHEMYNCNSKAVPCSLLAHEHHRHLKTQRTESAGNLKVCTLPDQQTANELADKSNGDLLTYGPKPKKGSCNRRSLYLFEKLTIPSKSQSAYPKNSASSGKSSGFGVCMYGTNIGSQLFGAQNQSSSKTETLHSDALIGSKSSAGIASLSAQKDNGCPAPAPAPAPDEAKSEQLAAPSSNTKQGGESAYSKEDGSHNLNEGHDVSSKAAIGSKQPCMPGAGITNLDLILSQMSRMRNQIPSGGVTQPPIGAEPSDRWLKRLQLGVPDPDVLGSKTKRPKVGDSPPPPRQINRSFDVALPCNPGKQEEQSLNGGGKVQGRAPPIPEKSVNRWIGRWCQGGTPVFREGPGQGRQATKPAGRLSEELEGQFFPSTAAMAMMGRAMHKLRPCEQQQKGPFVVWKID

SEQ ID NO: 19370 - protein, 309 aa, Zea mays
  VARIANT 193: note = Ancestral polymorphism is R, Derived polymorphism is C
MASADLLRKEEEFYSSLFDSAKGDGVKSRSQVIERKIESLEDMATKVVPAAFYALLPFFRVCRSMLYTLQCYITQVSNRRSRRWLNDRLLIELVPRLHVEEIKGLFAPPPWGEELPLSAFCRTSVSDWEAFRSIDMDAEARLMQHMKRSSEKQRTHVDEDELIALNAWRRIGRQTREAIKKKFLPDLLQIYECYAYKSKDVVVMTYICMMPRFCLENNVQKSFCVSCLQEQVRAFIEGTGDSDVLVLNVQDPFQRLLLHGVCEFYNVTSMTTSSVRDGKPWKSTTIKKRHVTGLPPRITLVSFLRMRKN

SEQ ID NO: 19371 - protein, 68 aa, Zea mays
  VARIANT 46: note = Ancestral polymorphism is A, Derived polymorphism is V
  VARIANT 54: note = Ancestral polymorphism is G, Derived polymorphism is D
MPSFYKEQPPKVELKKQQPLPQPRSSMREALEKEDKEKAAAAKEKAAVPKNGNGNGGGAGSGNGGAPP

SEQ ID NO: 19372 - protein, 489 aa, Zea mays
  VARIANT 11: note = Ancestral polymorphism is P, Derived polymorphism is L
  VARIANT 132..489: note = Derived polymorphism lacks residues 132 to 489
  VARIANT 149..489: note = Derived polymorphism lacks residues 149 to 489
  VARIANT 234..489: note = Derived polymorphism lacks residues 234 to 489
  VARIANT 249..489: note = Derived polymorphism lacks residues 249 to 489
MDLEDQEAQKPLLVTAPGRIGDGSHLAESDAASSSSSIAVVVASTAVAVAGSFEFGISVGYSSPSQSGIMRDLSLSLAEYSVFGSILTIGAMLGAVVSGTVADRVGRRSAMAISDLLCIFGYLLITFSQNFWWLDIGRFSIGCGIGLLSYVVPVYISEITPKNLRGGFATVNQFMICCGASLAYVLGTFITWRTLAIIGVAPCLLQLVGLLVTPESPRWLARFGHPGAFEAALQKLRGKGTDISDEATGIKDFTEKLQQLPKSKMLDLFQKDYIRAVTVCIQVGVGLMVLQQFGGVNAICFYASEIFVSAGFSSGNTGMLAMVAVQIPMTGLGVILMDKAGRRPLLMVSAAGTCLGCLLVGLSFLAKEHHWGKDLNLVLALAGILIFGGSFSLGMGGIPWVIMSEIFPINMKGAAGSLVTLVSWLGSWIVSYAFNFLLVWNSYGTFFIFASICGLTVVFVEQLVPETKGRTLEEIQASMNSSLASPSDI

SEQ ID NO: 19373 - protein, 465 aa, Zea mays
  VARIANT 210: note = Ancestral polymorphism is K, Derived polymorphism is T
  VARIANT 130: note = Ancestral polymorphism is G, Derived polymorphism is R
MSSQPPHVLLVSFPLQGHVNPLLRLGARLAAKGLLVTFTTFRHAGIRALREDGACVAAAGRGRLRFDYLRDDGCGPRSPVPGDPSDMLRHVADAGPSALAGLLRRQADAGRPVACVVNNPFVPWALDVAGAAGIPCATLWIQSCAVLSLYYHFYRCPEGFPTEADTAAPVAVVPGLPTLAADELPLMVRPEHAGNLWGQTLRAQLAGFRKNNTVAWVLVNTFEGLERPVVEALRSHAPVTPVGPLLDHDHDHDGGGDDGCMAWLDAQPPGSVVYVAFGSLVTVGCGEMLALAEGLAATGRPFLWVVRDDSRRLLPDGALAACGGRGRVVAWCPQGRVLRHGAVGCFVTHCGWNSVAEALAAGVPMVGYPWWSDQFTNAKLLAEEYGVGVRLPAPATRDAVRACVHEVMGGPRAAVFRMAAKAWKDEAAAAVADGGSSDRNLHAFVQEIRRFHETRAGGSMINSNI

SEQ ID NO: 19374 - protein, 177 aa, Zea mays
  VARIANT 5: note = Ancestral polymorphism is L, Derived polymorphism is P
MGNYLSCTLAKAPGPRPGGKRARVILPDGGVRQVALPATAAELMMDAPGHFLVHVHARGAGLGLGARLAALPADEELQLGAVYATFPMKRLGTPLAAPDLARLAAAAAREAHRSAKVASAAVVAAQPPEDAPRLRLEEMVDDAAAAEIAVTKHWASGARSRRPTLETIDEESYLSSR

SEQ ID NO: 19375 - protein, 102 aa, Zea mays
  VARIANT 10: note = Ancestral polymorphism is P, Derived polymorphism is L
  VARIANT 33: note = Ancestral polymorphism is A, Derived polymorphism is V
  VARIANT 60: note = Ancestral polymorphism is G, Derived polymorphism is D
  VARIANT 73: note = Ancestral polymorphism is A, Derived polymorphism is V
  VARIANT 74: note = Ancestral polymorphism is V, Derived polymorphism is A
  VARIANT 78: note = Ancestral polymorphism is D, Derived polymorphism is G
  VARIANT 92: note = Ancestral polymorphism is A, Derived polymorphism is V
MAIFLALRSPELEVLGLTTTFGNVHTALATRNALHLVPPPTFLPLSPPTLLVCSTHSDRGSHLLLMCVLELEAVGRTDIPVAEGSHPTIKVAISVSLFMLPR

SEQ ID NO: 19376 - protein, 365 aa, Zea mays
  VARIANT 238: note = Ancestral polymorphism is C, Derived polymorphism is Y
MAAVEGTTKKKVIIDTDPGIGSPLTDPLFDGADDAMAIFVALRSPELEVLGLTTTFGNVHTALATRNALHLLEAVGRTDIPVAEGSHVTIKKATKLRIASFVHGSDGLGNQDFPPPATKPIDQSAAAFLVEQANLYPGQVTIVALGPLTNLALAVELDPSFPKKIGQIIILGGAYSVNGNVNPAAEANIFGDPDAADIVFTCGADILAVGLNVTHQVVLTGNSAAFKGFILSAQDVCCIKIKFIQMINADREKLEQCDSKYARYLCKIMGIYFDYHKDAYFIKGVYLHDPTTVIAAVNPSLLTYTEGVVRVQTVGITKGLTVFDNTKKRYGEITAWSGMPTVKVAVTVDAPAVVELMMQRLMTDD

SEQ ID NO: 19377 - protein, 127 aa, Zea mays
  VARIANT 45: note = Ancestral polymorphism is P, Derived polymorphism is R
MAAATGSSSGAAFAAPSAPGLSSPASSSVTSSNGDAHFGAAYTKPRHPGELIRFDAPWTQLAPLPIAAARVDGAWTPAAATMDGDQGLFGGGGGEQPLPYDGDFFGGLQERSLEHLSACYFPNIQRK

SEQ ID NO: 19378 - protein, 275 aa, Zea mays
  VARIANT 240..275: note = Derived polymorphism lacks residues 240 to 275
  VARIANT 94: note = Ancestral polymorphism is G, Derived polymorphism is D
  VARIANT 32: note = Ancestral polymorphism is A, Derived polymorphism is V
  VARIANT 17: note = Ancestral polymorphism is G, Derived polymorphism is R
  VARIANT 9: note = Ancestral polymorphism is V, Derived polymorphism is M
MAEARGRTVLLSIHQPGARIVKMFDSVLLLAVGFVLHHGTVDQLRALLGDAGLHLPPHVSVDALRRHASSSLQAPSSGDREGRCTLQRLFQLHGKQVADAPVAVTMMASRYANSRAREVAVLSQRFFKNVARTRQLFACRTVCMLVAGLALGSIFYDLGQDKVVERVGLFAFLLTFLLSSTTEALPIFLQERDILARETASGAYHVSSYAVANAVVFLPFQLALAVMFAAPVYWLAGLRRTATAFGYFLLVIWLILYTAYSVVVCFAAATPDFVG

SEQ ID NO: 19379 - protein, 193 aa, Zea mays
  VARIANT 81: note = Ancestral polymorphism is P, Derived polymorphism is H
  VARIANT 98: note = Ancestral polymorphism is T, Derived polymorphism is I
MSAVNITNVAVLDNPTAFINPFQFEISYECLVPLDDDLEWKLIYVGSAEDENYDQQLESVLVGPVNVGTYRFVLQADPPDPSKIREEDIIGVTVLLLTCSYMGQEFMRVGYYVNNDYGDEQLREEPPAKVLIDRVQRNILADKPRVTKFPINFHPEPSTGTGRQQQQQEPQTASPEKHAGSGEGNGSKPEADQ

SEQ ID NO: 19380 - protein, 111 aa, Zea mays
  VARIANT 25: note = Ancestral polymorphism is K, Derived polymorphism is N
  VARIANT 22: note = Ancestral polymorphism is S, Derived polymorphism is R
MAAAGGVSTDDVPILQAENLTSNVKSVYYSRTFLSIIGGVVAGIWGFTGLMGFVFYFLIMMVASIGLLAKSKFSVQAYFDSWTRISIEGVFGGLMSFVLFWTFAYDIVHIF

SEQ ID NO: 19381 - protein, 455 aa, Zea mays
  VARIANT 124..455: note = Derived polymorphism lacks residues 124 to 455
  VARIANT 233: note = Ancestral polymorphism is N, Derived polymorphism is I
  VARIANT 254..455: note = Derived polymorphism lacks residues 254 to 455
MEAKQRPRHGEERRPPATDNGGGGGEEYDPWTAWLYKPHTISVLLVGACLLIWASGALDPEGAAAHSSLTSIKRGVWAMIAAFLAYCTLQAPSTILIRPHPAVWRLVHGLAVVYLVALTFLLFQNRDDARQFMKHLHPDLGVELPERSYGADCRLYVPENPKNKFINIYETLFDEFVVAHILGWFGKAVMIRNQLLLWVLSIGFELMEVRSECTIGTTSKIFFIPVIFLARKNAYYDILQLTFRHMLPNFNECWWDSIILDILICNWFGIWAGMHTVRYFDGKTYEWVGLSRQRSIMGKVKRSLSQFTPAQWDKDQWHPFMGPLRFIQVLFLCVVFMTVELNTFFLKFCLWIPPRNPLVVYRLILWWLIAIPTIREYNSYLQDSKPAKKVGAFCWLSLAICIVELLICMKFGHGLFHDPMPTWLIIFWSLVGIALVVFLLSWSWRSHRRFRRKRL

SEQ ID NO: 19382 - protein, 51 aa, Zea mays
  VARIANT 17: note = Ancestral polymorphism is E, Derived polymorphism is D
  VARIANT 15: note = Ancestral polymorphism is A, Derived polymorphism is T
  VARIANT 13: note = Ancestral polymorphism is R, Derived polymorphism is Q
  VARIANT 11: note = Ancestral polymorphism is E, Derived polymorphism is D
  VARIANT 9: note = Ancestral polymorphism is S, Derived polymorphism is N
  VARIANT 8: note = Ancestral polymorphism is A, Derived polymorphism is S
  VARIANT 7: note = Ancestral polymorphism is E, Derived polymorphism is K
  VARIANT 6: note = Ancestral polymorphism is S, Derived polymorphism is F
  VARIANT 2: note = Ancestral polymorphism is Q, Derived polymorphism is R
MQSPASEANVERRAAQEESHLATSSEILATADKPAKCQETITILRQDRFSL

SEQ ID NO: 19383 - protein, 500 aa, Zea mays
  VARIANT 95: note = Ancestral polymorphism is S, Derived polymorphism is W
  VARIANT 169: note = Ancestral polymorphism is P, Derived polymorphism is T
  VARIANT 313..500: note = Derived polymorphism lacks residues 313 to 500
  VARIANT 319: note = Ancestral polymorphism is P, Derived polymorphism is L
  VARIANT 418..500: note = Derived polymorphism lacks residues 418 to 500
  VARIANT 424: note = Ancestral polymorphism is N, Derived polymorphism is Y
  VARIANT 426: note = Ancestral polymorphism is T, Derived polymorphism is A
MWKQFLSKLPRRSSASGDSGHCSSGAGIQRTSSCGSIPPGRPPASAIRRMSSAVFPSSVVAGIEPLVSFKDVPSSEKQSLFVSKLSLCCVVFDFSDPDRSSVEKDIKRQALLDLIEFVESTNARFSEAAVVACSRMCAVNLFRAFPASCRSGGSSGVGECDEDEPMFDTGWCHLHLVYELLLKFIGSSSLDAKIGKKHFDHSFIVKLLDLLHSEDPRERDCVKNILHRVYGKFMVHRPFIRRAASNVFYQFVFETDRHNGIAELLEVFGSVISGFALPLKEEHKTFLWRVLVPLHKPKSLGAYLQQLTYCVTQFIEKDPELASPVIIGLLRYWPITNCQKEVMFLSEIEEILEATSQAEFQKCMAPLFRRIAHCITSAHFQYPKCHMESDSFYITCSYRLHYKPNLIGALEQNIQNHWNQAVLNLAVNVKKMFSEMDGDHFSSCLARYKEEEERLVSLEAKRKLTWEKLESAAAFQPVTGQTAVLVGHQPSANMIANLIF

SEQ ID NO: 19384 - protein, 141 aa, Zea mays
  VARIANT 94: note = Ancestral polymorphism is K, Derived polymorphism is R
  VARIANT 126..141: note = Derived polymorphism lacks residues 126 to 141
MGNSLQLPCPCVCHRCHDDTTAVAGSAKRRRKRKQPQQQRPDDSGRNVRAAARPGHVVPVVEAAEDGGRDRETWPECSVEPGQGGGVRVRIVVRRQDIAQLVARFEQRVAEEERIAAGSGATMSPCRDAWRPRLSIIPENY

SEQ ID NO: 19385 - protein, 157 aa, Zea mays
  VARIANT 16: note = Ancestral polymorphism is A, Derived polymorphism is T
  VARIANT 25: note = Ancestral polymorphism is R, Derived polymorphism is L
  VARIANT 29: note = Ancestral polymorphism is N, Derived polymorphism is I
  VARIANT 84..157: note = Derived polymorphism lacks residues 84 to 157
MASRAARKPNASIRVACHLAAETPRGCKNSVIILHVPFGPVSAARENFWGQLLGRGRRRGRPLRGDSQGGREPRRHEPPRARRRAQRSGVGSGGAAEDWLLVVAGGNNAGCRADRAASTADLAIPGGTKGFFINKWSPKEELKHQDGVCFYILPLRI

SEQ ID NO: 19386 - protein, 358 aa, Zea mays
  VARIANT 39: note = Ancestral polymorphism is G, Derived polymorphism is V
  VARIANT 55: note = Ancestral polymorphism is C, Derived polymorphism is Y
  VARIANT 68: note = Ancestral polymorphism is R, Derived polymorphism is W
  VARIANT 294..358: note = Derived polymorphism lacks residues 294 to 358
  VARIANT 306: note = Ancestral polymorphism is P, Derived polymorphism is L
MATTATNRRVILKEYVEGYPREEHMELLQGAEVPLRLTGAEPAGSVLVRNLYLSCDPYMRPKMSRPLRESYTAAFVPGDTITGYGVARVVDSSDPRLAPGDLVWGITGWEDYSVVTPPATRLLSKISHHGVGEGAGVPLSYYTGILGMPGLTAYVGFHEICAPKKGETVFVSAASGAVGQLVGQFARLAGCHVVGSAGSREKVELLKTRFGFHDAFNYKEEPDLGAALKRCFPDGIDIYFENVGGAMLDAVLLNMRVHGRIAVCGLISQYNLADGEKDAVRNLAAVISKRLRLQGFIEPDHKHLYPQYEAWVLPYIRDGTLAYVEDVAEGLESAPKALIGLFHGRNVGKQLVRVADDE

SEQ ID NO: 19387 - protein, 656 aa, Zea mays
  VARIANT 198..656: note = Derived polymorphism lacks residues 198 to 656
  VARIANT 112: note = Ancestral polymorphism is V, Derived polymorphism is A
  VARIANT 52: note = Ancestral polymorphism is R, Derived polymorphism is H
MDNLITLVNKLQRACTALGDHGEESALPTLWDSLPAIAVVGGQVPVFPSMARFFVLVLIGSGAVTPASWGWISRVAGGGTAMSSGKSSVLESVVGKDFLPRGSGIVTRRPLVLQLHRIDGDREYAEFMHLPRKRFTDFAAVRKEIADETDRETGRSKQISPVPIHLSIFSPYVVNLTLIDLPGLTKVAVEGQPENIVQDIENMVRSYIEKPNCIILAVSPANQDLATSDAIKISREVDPKGERTFGVLTKIDLMDKGTDAVDILEGRSYRLQTPWVGVVNRSQQDINKNVDMIAARRREREYFATTPEYKHMASRMGSEYLGKMLSKHLEQVIKSRIPGIQSLITKTIAELETELNRLGKPIANDAGGKLYTIMEICRMFDSIYKEHLDGVYVPNNIFRRPGGEKVYHVFDNQFPVAIKRLQFDKQLSMENVKKLITEADGYQPHLIAPEQGYRRLIESCLISIRGPAEAAVDAVHAILKDLVRKAINETHELKQFPTLRVEVGNAAFESLDRMRDESKKNTLKLVDMECSYLTVDFFRKLPQDVERGGNPSHSIFDRYNDSYLRRIGQTVLSYVNMVCSTLRNSIPKSIVYCQVREAKRSLLDHFFTELGAREMKQLSKLLDEDPAVMERRTNLAKRLELYRSAQSEIDAVAWSK

SEQ ID NO: 19388 - protein, 289 aa, Zea mays
  VARIANT 29: note = Ancestral polymorphism is M, Derived polymorphism is I
MMNQHREEDALRGQAVKNQKAIWDKTLEMRFLLQKAFSTSNKLPQEPIRARFCNHDKQIEQAYDDLLNSSKQTLSSMMELQEAMLESNQATKGANEMPSASNGDNDEWSEVQRLQTRITTFRNTEIDKWQRKIQVTTGAAALKGKLHAFNQNISDQVAGYMRDPSRMINRMYLTNSAVSVFGKDVGEPGTAEEGHNMEGDPELIDDSEFYQQLLKEFLESCDKGASESAIYALKKQQVKKRKLVDRRASKSRKIRYHVHEKVTNFMAPEPMVLPPMAPKLFENLFGNAS

SEQ ID NO: 19389 - protein, 92 aa, Zea mays
  VARIANT 7: note = Ancestral polymorphism is K, Derived polymorphism is N
  VARIANT 9..92: note = Derived polymorphism lacks residues 9 to 92
  VARIANT 35: note = Ancestral polymorphism is S, Derived polymorphism is C
  VARIANT 55..92: note = Derived polymorphism lacks residues 55 to 92
MTKRTKKAGIVGKYGTRYGASLRKQIKKMEVSQHSKYFCEFCGKFAVKRKAVGIWGCKDCGKVKAGGAYTMNTASAVTVRSTIRRLREQTEA

SEQ ID NO: 19390 - protein, 548 aa, Zea mays
  VARIANT 458..548: note = Derived polymorphism lacks residues 458 to 548
  VARIANT 260: note = Ancestral polymorphism is N, Derived polymorphism is K
  VARIANT 36: note = Ancestral polymorphism is C, Derived polymorphism is Y
MSTSVAVGSLGESPSPRKALLLLPPLCAVLAVVAWCAARAVEWAWLRPRRLQRELRAQGVRGTAYRPPAGDAPLADRLGREARSRPPLPPGFHGIVPRALPLVHHGMKEHGKNSVTWFGPMPTVTLTEPELVRQVLSNKFGHFEKVNFGQLTRLLHNGLSSHEGDKWAKHRRIIKPAFHLEKLKLMLPAFAACCADMVSRWEGLVAAAAGEPCEVDVWPEMQRLTGDVISRAAFGSSYLEGRRIFELQGEQVRLGTLIANKIHIPGYMMLPTRINRRMKRIAAEIEGILRGMIANRESALRAGKAASDDLLGLLLESNMEQLRASNGGGRGTSSGGGGMTSDDVIGECKLFYFAGMETSAVLLTWTTVLLSMHQDWQDRAREEVRRVFGGGAGVPDYDGLSRLKIVTMVLHEVLRLYTPLPAIPRRTYKPTELGGVRYPAGVMLMLPTLYIHHDKDVWGPDADEFRPERFAEGVARASAGDAPAFFPFGGGPRTCIGQTFALLEAKMWLAVMLANFAFELSPSYSHTPFPVGLLRPEHGAQVKLRKLP

SEQ ID NO: 19391 - protein, 236 aa, Zea mays
  VARIANT 89: note = Ancestral polymorphism is A, Derived polymorphism is E
  VARIANT 56: note = Ancestral polymorphism is V, Derived polymorphism is M
  VARIANT 54: note = Ancestral polymorphism is C, Derived polymorphism is R
  VARIANT 44: note = Ancestral polymorphism is K, Derived polymorphism is M
  VARIANT 43: note = Ancestral polymorphism is W, Derived polymorphism is R
  VARIANT 30: note = Ancestral polymorphism is G, Derived polymorphism is C
  VARIANT 15: note = Ancestral polymorphism is G, Derived polymorphism is R
MSDSRKHPYPKNNTGGPFQQSAERAVLPFGPAAAIPLLPRGTWKLVFHNHHVNCPVSVCALVASMTMNENEPVVGWLAGWLAWHAGEFAAFLTGVNLIMEYVFSNVVVARSFTAYLGTAVGVDAPSKWRIPVLGLPQVFNQVDLVAVGVILLLSVCICYRYLSARTLGLNGAFSKVAKLELMMLVHPADCKSMLDAFIAGCDFHSRTTMSMYQHIRETVEEEKDAFGAERRKAIRC

SEQ ID NO: 19392 - protein, 926 aa, Zea mays
  VARIANT 773..926: note = Derived polymorphism lacks residues 773 to 926
MGEGRGRRDLTPRFLSTSQMAPPSANRSHQQLVVLPVLLLLLIRIPASAVAAADTSLSTLSYSHHCPNLPSALDLPGGEVSALGPDARVPVPEVSTGYFVGGDRIFGPDPSSQPRSFSLLPSSVARTTNASLLHVSATLTVSGGRRPFRDRGGRNLFEYDGRARHFRPRLPRFTGRRGSITFGLEGYYSTGSGDLCMVGTGSGRAADGSPVHFLPVVLRLGFPSPANVTRPFVTGRLENVDTISPIEPISLVAYTQEGYAYGESASCPPPPAGRLDALQVFENRNFSCAHLSSMLKSPFRLDYPSGSESTASSLGIHQSYMYVNRMHCNDDGAVRAYVAFTNQTELSRYYFMLGEKAVVVDGFWDQKSSRLCLKGCHVVKSGPSRADLAVGECGIGMSFWFPAVWSLQQRSFSAGLVWNASLKSGEAVAAGSSAITPNYRGNLSGLKYNYTKVDEAMKYYEKSGLNKNRKGKFPDSNSYQDLVFRFFVKRGGGSGYASPVTIGSMLFDGNSLVVQDPFSRHVTAEMKQRLLNVSYDIYYVGKWSLESFHRRHISAEGVYDTKTGSLCMIACRELNVSSDCEILVTAQFSSLDAKVAQHVKGAIKSLRKKTDPLFFETLDIASYGMYVEQVDASIWRMDIESTMTLISMTLACVFIAVQLFHVNKVPEALPAMSITMLVVLALGYMIPLVLNFDALFKNSNKQTVPLSGGGWLEVNEVMVRIITMVTFLLQLRLLQQAWSARSVDASKAESWAAEKKVLWICLPLYIIGGAITWVVHMRSNHSRRMLRQVVHLKPVEQHAFWEDLVSYCGLILDGFLLPQVILNVFSDSKVRALSPGFYIGSTLIRVLPHVYDVFRRQHFVPSLRPSYMYAGPRDDLFSLAWDIVIPCGALLLSALLFFQQWRGGAFFLCSKNRRTREYEMVSVASS

SEQ ID NO: 19393 - protein, 132 aa, Zea mays
  VARIANT 117: note = Ancestral polymorphism is P, Derived polymorphism is S
  VARIANT 115: note = Ancestral polymorphism is G, Derived polymorphism is E
  VARIANT 105: note = Ancestral polymorphism is G, Derived polymorphism is E
  VARIANT 100: note = Ancestral polymorphism is Y, Derived polymorphism is C
  VARIANT 77: note = Ancestral polymorphism is T, Derived polymorphism is I
  VARIANT 54: note = Ancestral polymorphism is M, Derived polymorphism is I
  VARIANT 20: note = Ancestral polymorphism is T, Derived polymorphism is I
  VARIANT 11: note = Ancestral polymorphism is S, Derived polymorphism is Y
MVQTAARKIASVKIIRNKQTGHSEGYGFIEFSSRGAAEHTLMNFNGQMMSNVEITFKLNWASASIGDKRGDSGSDHTIFVGDLAHGVTDSMLEDVFRAKYPSVRGANVVVDRMTGWPKGYGFVRFGDLNNAL

SEQ ID NO: 19394 - protein, 458 aa, Zea mays
  VARIANT 67: note = Ancestral polymorphism is L, Derived polymorphism is P
MASAPHDDAAKGRNAAPPEKRTSATITEADIRAEFAHHDGTVARVNNGTFGCCPASVLAARARWQRLFLSQPDAFYFDSLQPGLARSRAAVASAVGAGDASEVSLVDNATTAAAIIMQHVAWSFAEGAFARGDVVLMLHYTYSSVKKSIHAYVVRAGATVVEVPLPFPVASAVAVVAEFRAALALAQAGGRRVRLAVIDHITSMPSVLLPVKELVAICREEGVDKVFVDGAHAIGQVPIDVRDIGADFYTSNLHKWFFCPSAVAFLHIRKDDPVASQLHHPVVSSEYGNGLPMESAWIGVRDYSAQLVVPDAVDFMRRFEGGIETISKRNHEKVIEMGTMLAEAWGTFLGSPPEMCGSMAMVGLPGCLGIESDDDAMRVRDMLRNEFKVEVPIFNNSRSVEEGQEMAKGDQVTGYVRISHQVYNVTEEYEVLRDAVGKLVLDGFSCTKLRPSEKVISN

SEQ ID NO: 19395 - protein, 99 aa, Zea mays
  VARIANT 17: note = Ancestral polymorphism is A, Derived polymorphism is V
  VARIANT 32: note = Ancestral polymorphism is A, Derived polymorphism is V
  VARIANT 37: note = Ancestral polymorphism is A, Derived polymorphism is T
  VARIANT 40: note = Ancestral polymorphism is P, Derived polymorphism is L
  VARIANT 49: note = Ancestral polymorphism is T, Derived polymorphism is I
  VARIANT 61..99: note = Derived polymorphism lacks residues 61 to 99
  VARIANT 69: note = Ancestral polymorphism is T, Derived polymorphism is I
  VARIANT 87: note = Ancestral polymorphism is S, Derived polymorphism is L
  VARIANT 90: note = Ancestral polymorphism is P, Derived polymorphism is S
MSGGADEEFMVLRAAVVACCLRPHLSLSIGVAVSKPAGFPDHPHRGFETLTYMLEGAFTHQDFVGHKGIIRTWDVQWITTERGIVHLEMPAGDGVHKGL

SEQ ID NO: 19396 - protein, 230 aa, Zea mays
  VARIANT 165: note = Ancestral polymorphism is T, Derived polymorphism is I
  VARIANT 163: note = Ancestral polymorphism is Y, Derived polymorphism is N
  VARIANT 158: note = Ancestral polymorphism is C, Derived polymorphism is Y
  VARIANT 150..230: note = Derived polymorphism lacks residues 150 to 230
  VARIANT 142: note = Ancestral polymorphism is A, Derived polymorphism is V
  VARIANT 138: note = Ancestral polymorphism is E, Derived polymorphism is Q
  VARIANT 129: note = Ancestral polymorphism is N, Derived polymorphism is S
  VARIANT 128: note = Ancestral polymorphism is A, Derived polymorphism is S
  VARIANT 88: note = Ancestral polymorphism is K, Derived polymorphism is E
  VARIANT 49: note = Ancestral polymorphism is N, Derived polymorphism is K
  VARIANT 23: note = Ancestral polymorphism is G, Derived polymorphism is R
  VARIANT 18: note = Ancestral polymorphism is S, Derived polymorphism is F
MATTTSPTSASSAPSLSSTGGGGSSAMFLPRRRPTRFSLRMVIKFNIANPTIRCQKKLKIDDDKKLQRKIPLMSLTMSVMIIIVTLMKIQNLSKHPVDGFSAGLVDDNNVFEWHVTIIGPPDTLYLGANFSSVVQVTEENLAALFINCGQSDDEQEICARTIYCTNIDKKVTQADLKLFFESICGEVGHSLLETSFPLRSVCVAYMFAENDNSTSTVSLAHCNDCYRSFG

SEQ ID NO: 19397 - protein, 173 aa, Zea mays
  VARIANT 53: note = Ancestral polymorphism is K, Derived polymorphism is R
  VARIANT 17: note = Ancestral polymorphism is S, Derived polymorphism is Y
MYIEELHFGSLCYYASSTPETEPAGAGNAVARRSPYPIGEGTELAKLLRSASRVMFMHIVLDEFKLCKVRSVQFGQKGIPYLNTYDGRTIRYPDPLIKANDTIKIDLETNKIMDFFKFDVGNVVMVTGGRNTGRVGVIKNWEKHKGSFEVIDVLLGAFCMLCLVLFYLLYRKK

SEQ ID NO: 19398 - protein, 62 aa, Zea mays
  VARIANT 54..62: note = Derived polymorphism lacks residues 54 to 62
MGAGSGAARGHGGDVGQKTKAAATTGMRKVKEGMSQGFQWIKDKCHHGGGKKQQGSEAPRYY

SEQ ID NO: 19399 - protein, 494 aa, Zea mays
  VARIANT 260: note = Ancestral polymorphism is G, Derived polymorphism is R
MDALDPPPPLPITVPPAPAAHLRRALVPVSGAGCGAQAGGSEVRERDPHGIPVPVCIPVPIRARDAHGRGRVSGAGCEAQAGGGVYGEIAASPRRFPHRASARAKSGHPDSYTMPSLAQSSLPRNPNQESDSTLDESDRRKTRRPRGERGNKEEDGANVLTIVTLKNPEEISWDEAGAEYVVESIGVFTYKDKTIAHLKGVAAAKVPRSTLAATSLCQPGGGGEGDWDGACVDVAACVPGSAHLCQHVASTLTDLNGAFGWLAIHIDNLKVNFRCTFDGLRYGAAFNPLQCARMLLRRMAEKLPVLLRYQSLHVHTYFKNSRYHLQTWANLCLVIVASYFCRMRKESRTDRVISKLLRGIGMRKTSTPIKREFRRASLPSSPPHDGGSPPRKIATATQHSKLCIRLRSSCAKVEQEKLEKLARKGPSSGEQPSSTTGSATSDVKADAGPTESASASVSTDKNRNYAVLAGVVAALGGLGWYLLSKPKKSEVVVD

SEQ ID NO: 19400 - protein, 154 aa, Zea mays
  VARIANT 21..154: note = Derived polymorphism lacks residues 21 to 154
  VARIANT 28: note = Ancestral polymorphism is D, Derived polymorphism is N
  VARIANT 53..154: note = Derived polymorphism lacks residues 53 to 154
  VARIANT 80..154: note = Derived polymorphism lacks residues 80 to 154
  VARIANT 128: note = Ancestral polymorphism is P, Derived polymorphism is L
  VARIANT 140: note = Ancestral polymorphism is A, Derived polymorphism is T
MTSSRAKFNLPNPNLFYIESQIAAMEPDPVAAGASSSPPPSPAPATSPPWQTRDDDEPGAVDCADTGGDLNLAPPPSPQQATVENIAVGSEVEQEEPKKEVMAGVGETLRSFMEEFGDQGEDSIILSPRLKEISTHDRPAALRLLLSVFTLTDS

SEQ ID NO: 19401 - protein, 324 aa, Zea mays
  VARIANT 290: note = Ancestral polymorphism is G, Derived polymorphism is R
MASEYPIFCGREKWVPLQVDIMKILGGNVSEKQVSPDKQIRAALLRSRFADTILKAREKALDQTTKKDPEKLRREREELERVQREERARLQADAKAAEDVRKRAEAAAADEAAAEAKRQRELEREAARKALQEMEKIVDINEGSHFLKDLEMLGSVTGEQIPNLVGETSPGFQMGSNTLEKLGLYVKNDEDGDFTDEPVADVEEGEIARQDVVFTLEWEPIGVLPCGEKKDNFYYQASEWVKGKQVEEVVAIKNTEIVKHLSLPPVKLHCSMLAEDAIKAAVKDYEAKKGKKMAKAEEQDTPCPISNLAALSVFFPALHINKDW

SEQ ID NO: 19402 - protein, 354 aa, Zea mays
  VARIANT 279: note = Ancestral polymorphism is G, Derived polymorphism is S
MSRAAQTGGAGAGGGGAARLKASPRALFSCGIFSTCTHPALSPTATPNNNVVSGSGGGGSGTPCAEASTALPVTVEAAAAASSTPPPPQRQPHHQRAQRNVGPSSSSSSSSSSASQSFTQWRLPVHHPQQSQAPASASSSGGDALLGAEEKFAAGEVVAALRAVEREMEAAARPVPAGVVAGVVAAVREPLTAPARLAAKALLAVLLEEGNREAAVEAGAASAAVEAVAASGPAGATAERALAALELLCTAPGGAPAVRREALAAPVLARAVEGMAGRGRECAIGVLAAIYGAGGEDDRGASSSPPPPPEVVKAVVAAMQGECSARGRRKGAQLLRALQQAGRLGLAWDGVGDQ

SEQ ID NO: 19403 - protein, 199 aa, Zea mays
  VARIANT 79: note = Ancestral polymorphism is G, Derived polymorphism is A
  VARIANT 100: note = Ancestral polymorphism is D, Derived polymorphism is G
  VARIANT 147..199: note = Derived polymorphism lacks residues 147 to 199
MAEVEQQQDTPKLFNRWTFDDVQVNDISLNDYLAVNATKHAMYLPHTAGRYSKKRFRKAQCPIVERLTNSLMMHGRNNGKKVMAVRIIKHTLEIIHLLTDANPIQVVVDAIINSGPREDATRIGSAGVVRRQAVDISPLRRVNQAIYLLTTGARESAFRNIKTIAECLADELINAAKGSSNSYAIKKKDEIERVAKANR

SEQ ID NO: 19404 - protein, 88 aa, Zea mays
  VARIANT 74..88: note = Derived polymorphism lacks residues 74 to 88
  VARIANT 75..88: note = Derived polymorphism lacks residues 75 to 88
MARILSLKSLNAFPHAEEHLSKKTYSGAVVTILGLLIMITLFVHELQFYLTIYTVHQFLLIIIDEIMMSVDLKRGETLPIHVNMSFSS

SEQ ID NO: 19405 - protein, 451 aa, Zea mays
  VARIANT 326: note = Ancestral polymorphism is A, Derived polymorphism is V
MVSSRRNSGIILREGSVRDWSEFNNPSPSPKLLYSQSYVAMRGLLASVISLDFFLLSSKLKSVCAAMTSQRHGRSQERSKSKGLTCRRVAVHLLFFFMVGIFIGFMPLFSVDVYKKIVSENERLPFHDGVIEAEMMGTKVKELETVVVEKEVELIDEPQVQESPPVPAMLDDEADFAESSPALPAIEESDIPVKKLLIIVTITSVRPQQAYYLNRLAHVLKAVQAPLLWLVVEWPEQSYETAEILRSSGVMYRHLICRKNTTSVRKIAVCQRNNAIYHVKRHHLDGIMHFADEERSYSADVFEEMQKIRRFGSWPVAIHVGTKYRAVLEGPICKGNRVMGWHTVQTVQKKSSTRRFPIGFSAFAFNSTMLWDPQRWNRPPMDSVMVHSGGRGGLQESRFIEKLVKNERQVEGLPDNCSRVMVWNFNLEPPRVNYPTGWALYKNLEPDMPVT

SEQ ID NO: 19406 - protein, 161 aa, Zea mays
  VARIANT 41..161: note = Derived polymorphism lacks residues 41 to 161
  VARIANT 101..161: note = Derived polymorphism lacks residues 101 to 161
  VARIANT 108: note = Ancestral polymorphism is G, Derived polymorphism is D
  VARIANT 109: note = Ancestral polymorphism is S, Derived polymorphism is F
  VARIANT 116: note = Ancestral polymorphism is A, Derived polymorphism is P
MASLLAAAVSVQPAAVKGLASTPSPAGSSPSPGRRPAPPPWWPSTATRASTSTSTTSATPPGSRTSTASTRPRPTTTRSRCSTMLPIHSVDQFLFFVSPEQVLRDFRGFVHQERPAAQVLTAWRRLPIGLRGYVSASASPDLLLIKKGPQEPTQPGPRGKI

SEQ ID NO: 19407 - protein, 665 aa, Zea mays
  VARIANT 280..665: note = Derived polymorphism lacks residues 280 to 665
  VARIANT 31..665: note = Derived polymorphism lacks residues 31 to 665
  VARIANT 23..665: note = Derived polymorphism lacks residues 23 to 665
MTPYPHATANDPHDGKRKCEALWPIFRISHQRSHFIYGLYYKRKEISQELYEFLDPGYADFYDEDYDRDPKRIKTEIIDSELSVGSVSDKDSEQDYDDVFLKDLRTQCKAKNWKTSKITSEGCGIKNQAKTEDDIDLDKPLIALKQKSPKTSLAKDNVKMNALRFCPCATKEEDTTSQRDKILSSSLIKATMQDPVLEKLGRKFAELEQSKIVIVNNTAGALASCAKPDVLCEIKAKDTNYSEFGTSICSIKNPEHSSFKLQQKLVVGDDCVPQSCFMTRTTQLADVSDHPCEQTCSINNFDDITAAKATEVSSLGLTDETSNHQKTSENLTDSDVYTQSDLCGSTQMNCTSLEGVVQMQAEGQLDSIVCCGVRPKHMLLDMEIRHTETGIFTFDKTIDLAHPANFVAQDGRLESIVYDVLNNHAQRTASKNESSVGLPETAVTQSSLIDFTDNCFEDKRASVDKILPPNNLDWPLKDKLNSTTDYDICRPINDDEGSEEELVPQHQLYQSCSDKFNLSSAMPEISNAEESQKISIMSPTSQEKLCSALTGIDLCDGVQRFSKQQYMLSVSKKITISIIIILISVVESKIIIEDHDKTTISLPQPAHMQDRSMLSTDRRLKSRTFVSPTSKGVLKSTGSPPHQHTTPCIFQYKVASIFCYIRHVR

SEQ ID NO: 19408 - protein, 552 aa, Zea mays
  VARIANT 401: note = Ancestral polymorphism is N, Derived polymorphism is I
MARPFQKIGHGLERFSFRRRRSASSPPLPPLASDGTDASSMEAQAQAQVQAPPFSKRALSRSCGSKGSRLSVDLPPPLAGGPSDRGAAGTSSSSSLAVPPKPVRHEGPPSDADIVREKFSKLLLGEDMSGTGKGVTSALALSNAITNLAASVFGEQRRLQPMAAEQKSRWKKEIYWLLSVADHIVEFVPSQQVAENGTCMEIMVTQQRQDLKMNIPALRKLDAMLLVEQEYLDSFEGEQEFWYASKDADEPGKGNVPRQDDRWWLPTVRVPPSGLSYAYRKWLQNHKDLVAQVLKAAMAINANILMEMEVPESYMESLPKNGKSTLGDSAYKLITDDCFDAEELLRSVDLSDEHSIVDLKNRVEASVVIWQKKMTHKDSKLSWGHNARHEKRGMFEGRAENVLLLIKHRFPGIAQSALDISKIQCNKDVGLAILESYSRALESLAFTVMSRIEDVLGADLATRDDPKNAAGLMRIASLPCSDDTDKVVSDAKAEVERMRRMEPVPPAPMLYDFVGPRDQDLGPRVTKISSVATKRFSYLENLGGTRSPIARH

SEQ ID NO: 19409 - protein, 159 aa, Zea mays
  VARIANT 118: note = Ancestral polymorphism is A, Derived polymorphism is T
MANSNLPRRIIKETQRLLSEPAPGISASPSEENMRYFNVMILGPAQSPYEGVPLIYGGVFKLELFLPEEYPMAAPKVRFLTKIYHPNIDKLGRICLDILKDKWSPALQIRTVLLSIQALLSAPNPDDPLSDNIAKHWKSNEAEAVETAKEWTRLYTSGA

SEQ ID NO: 19410 - protein, 85 aa, Zea mays
  VARIANT 49: note = Ancestral polymorphism is A, Derived polymorphism is V
MRRPRRVHLLACLVVLAVILTSGPFVETSMARMMIRGVDPPRELLPALAVVVAAEADDGRRSAVKATAEGRGKREVPGGADPQHH

SEQ ID NO: 19411 - protein, 298 aa, Zea mays
  VARIANT 255: note = Ancestral polymorphism is L, Derived polymorphism is Q
  VARIANT 231: note = Ancestral polymorphism is A, Derived polymorphism is V
MPICAPSSDSSASASSGLGARVWVLHGLALGAAAAAAAVAYLYRRPTGFRSRAVGIIPARFASTRFEGKPLVPILGKPMIQRTWERVMLASSLDHVVVATDDERIAECCRGFGADVIMTSASCKNGSERCCEALKKLDKHYDIVVNIQGDEPLIEPEIIDGVVMSLQRAPDAVFSTAVTSLKPEDAFDTNRVKCVVDNLGYAIYFSRGLIPFNKSGNANPKYPYLLHLGIAGFDSKFLKIYPELPPTPLQMEEDLEQLKVLENGYRMKVIKVDHDAHGVDAPEDVEKIEALMRTRNIQ

SEQ ID NO: 19412 - protein, 522 aa, Zea mays
  VARIANT 155..522: note = Derived polymorphism lacks residues 155 to 522
  VARIANT 224..522: note = Derived polymorphism lacks residues 224 to 522
MGVHRAALFWFVPTVAGLSSALRVTADMDLRWPLLKPRDFQENRLLMSFVNFHEQEKISKEIVTHAIESCMKKQADNLLNSLDVISGRLSQLELYCYRLERSIGELRSDVMDYHNEANLNFRCVEKQVKEVQKSVQAVQEKQELAETQKEMTKLQIVHEDSAQKSEGTAPSVFMNRENEVALVPLHQVNAVQSPPVQFQSCSGLILQQLMPVQDQQRSNQTAVYCMRGQSHLEHRQAQMFEAAGQSLQTHTRKTQPPTVVEVSQVTSQAPEFYPHPQHQWQHQTGQQVFSQARQPQPHVLQQQYSNIQQGPAQMVQLQTSSPHAHSTPQVTVVYPPYGPHQSACGNAEARSGGIVVPPSYSTISSSHRKHHEAAPVYVQSNTVSVPLAEQHQQLHSLGNGSFVPQPSKVSPCGLASYTVQGNAQTYSPAYGSPSSNPATIVAVLNQQAHGSSPMVLHHLGPQSVLNHPIDIAEKVTRMGYSKDQVEGLALRMVAAGQPADHNPLHDRLSSVSHGVAPHAWSG

SEQ ID NO: 19413 - protein, 236 aa, Zea mays
  VARIANT 80: note = Ancestral polymorphism is T, Derived polymorphism is I
MAAATTTQRHDDDNNDVESQREHDDDGSSSRREQQEQRRPLLVKRRSLADDGGGMSPVQRAISQTYQSTAHLAKLLPTGTVLAFQLLSPVVTAQGHCVRANRAMAGALLALCALSCFALSFTDSFRDAATGAVRYGFATPWGIWAIDGGAPPDDPRAAAAYRVRFLDLVHAVVSVLIFAAVALLDQNLVACFYPVPSEDAKQVLTVLPVAIGVVGSMLFVTFPTTRHGIGFPLSQR

SEQ ID NO: 19414 - protein, 147 aa, Zea mays
  VARIANT 135..147: note = Derived polymorphism lacks residues 135 to 147
  VARIANT 139: note = Ancestral polymorphism is S, Derived polymorphism is L
MAKKSVWLKLEPCGLCCRDELIEYISAPVRLDGSGVAISSNRCDADNKRTVTWSLPSSATSASISARPPYSGNSFGSTCSDAMAAMVSRNWREHAASPARTTSFYSVSAARNRRFMAYGSLVEMKWKDLNQVMAQRLWSEYVQVYCL

SEQ ID NO: 19415 - protein, 551 aa, Zea mays
  VARIANT 32: note = Ancestral polymorphism is L, Derived polymorphism is P
MEAAAELALRLRAAANDRLARYEPLALVAAPLLALLVARTLHATASAVADRGLVAIAIAAVKSAFPPSFLLDIPYARVCPLLPGVSGYIAAEKKKVVDKMQSGGAKNNRRAELPTIGLAEQVIEELETLKAKDVDWQGKCSGTVYIAGSESEGHFQLINKAYSMFSHTNPLHQDVFKSVANMEAEVVAMTAALLGSKEKSSGGQICGNMTSGGTESILLAVKTSRDYMRSKKGITRPEMIIAESAHSAYDKAAQYFNIKVRRVPVNKEFLADVKGFKRCINGNTIMMVGSTPGFPHGLIDPIEELGELASRYDICLHVDLCLGGFVLPFAHKLGYPIPPFDFSVKGVTSISSDVHKYGLAPKGTSIVLYRNHEIRKHQFVAVTEWTGGLYVSPTIAGSRPGGLIAGAWAAMMSLGLNGYLDSTSRIMDVSKKIQRGIGEIPGLFVIGKPDMTVVAFGSDVVDIFEVNDIMSSKGWHLNALQRPNSLHICVTLQHTTVYDQFLKDLQDSVNTVKANPGPISGGKAPIYGAAGKMPDRGTVRELLVEFMDSSC

SEQ ID NO: 19416 - protein, 108 aa, Zea mays
  VARIANT 107: note = Ancestral polymorphism is R, Derived polymorphism is W
  VARIANT 94: note = Ancestral polymorphism is K, Derived polymorphism is N
  VARIANT 85..108: note = Derived polymorphism lacks residues 85 to 108
  VARIANT 84: note = Ancestral polymorphism is G, Derived polymorphism is V
  VARIANT 83: note = Ancestral polymorphism is M, Derived polymorphism is T
  VARIANT 70: note = Ancestral polymorphism is T, Derived polymorphism is I
  VARIANT 65..108: note = Derived polymorphism lacks residues 65 to 108
  VARIANT 62: note = Ancestral polymorphism is S, Derived polymorphism is P
  VARIANT 58: note = Ancestral polymorphism is A, Derived polymorphism is V
  VARIANT 56: note = Ancestral polymorphism is T, Derived polymorphism is M
  VARIANT 46..108: note = Derived polymorphism lacks residues 46 to 108
  VARIANT 45: note = Ancestral polymorphism is R, Derived polymorphism is H
  VARIANT 38: note = Ancestral polymorphism is S, Derived polymorphism is I
  VARIANT 37: note = Ancestral polymorphism is P, Derived polymorphism is A
  VARIANT 36: note = Ancestral polymorphism is N, Derived polymorphism is Y
  VARIANT 31: note = Ancestral polymorphism is P, Derived polymorphism is S
  VARIANT 21: note = Ancestral polymorphism is P, Derived polymorphism is L
  VARIANT 20..108: note = Derived polymorphism lacks residues 20 to 108
  VARIANT 18: note = Ancestral polymorphism is D, Derived polymorphism is Y
  VARIANT 17: note = Ancestral polymorphism is A, Derived polymorphism is T
  VARIANT 10: note = Ancestral polymorphism is E, Derived polymorphism is G
  VARIANT 3..108: note = Derived polymorphism lacks residues 3 to 108
MRQAYVRACEFVAMFDADFQPPPDFLVRTVSFLVHNPSLALMQTRWKFGTAGVWRTQAIVESEGWEDRTTAEDMDLVLRAGLMGWEFVYVGSTKVKSELPSTLKAYRS

SEQ ID NO: 19417 - protein, 216 aa, Zea mays
  VARIANT 26: note = Ancestral polymorphism is S, Derived polymorphism is T
MAYRADDDYDYLFKVVLIGDSGVGKSNLLSRFTRNEFSLESKSTIGVEFATRSIHVDDKVVKAQIWDTAGQERYRAITSAYYRGAVGALVVYDVTRHVTFENVERWMRELRDHTDANIVIMLVGNKADLRHLRAVPTEDAKAFAERENAFFMETSALEAMNVEGAFTEVLTQIYHVVSKKALDIGDDPAAPPRGQTISVGGKDDVSAVKKSACCSS

SEQ ID NO: 19418 - protein, 347 aa, Zea mays
  VARIANT 32: note = Ancestral polymorphism is S, Derived polymorphism is L
  VARIANT 137..347: note = Derived polymorphism lacks residues 137 to 347
  VARIANT 182..347: note = Derived polymorphism lacks residues 182 to 347
MDLSIPYTAQLAWLAAATALLLLLLAASLRCSAAALVAAHGRLWAGGVSIAASVDVDSRPVSAPRAAAAGSGGDGEAAAADEEEKEEYDLFDGEWVWAGVGGGYPLYHSSDCPFLDVGFHCAENGRPDASYTKWRWQPSRCHLPRDLLVFLSNSLQILQGNYNLDAYFSALNELTFFNCLPQLVQMDLANQISFMEGAGHSVVSAFVEIVFDNSDNCIPEQMVAEKERELEEGEAQKSPSKIVADSLSQISRSSTFLPNIGVPTTSKTGRSTSLAAQAHMQVQFEEKLQAEREEAARKQEELQAQLQAQQAALEENQSLLRQTQEEVKGMHTKFEETNALLRAVLKL

SEQ ID NO: 19419 - protein, 275 aa, Zea mays
  VARIANT 123: note = Ancestral polymorphism is V, Derived polymorphism is M
  VARIANT 101: note = Ancestral polymorphism is R, Derived polymorphism is W
MAIGAADDGSHQQLADQAANILENVWAAIIGSGTPAAPSTTEMRPPEAILERLPSLGRWISMGAEEWDELLLNGAALASDAAASGELLIAASPAASQEADRQHGHRASCSSKAAAACKSYRGVRRRPWGKFAAEIRDTRRKGARVWLGTFATAEDAALAYDKAALRMRGPRAHLNFPLDVVQRELAAAAARDDGCAETARVLRRKRRVANHDDSAVGTRSHHRSVMPATGRDPTPTMVSFACARKDQGTPPAMMQGRSTSDPGAVIEGDVLASCG

SEQ ID NO: 19420 - protein, 213 aa, Zea mays
  VARIANT 19: note = Ancestral polymorphism is G, Derived polymorphism is C
  VARIANT 152: note = Ancestral polymorphism is R, Derived polymorphism is S
  VARIANT 205: note = Ancestral polymorphism is R, Derived polymorphism is K
MPHLAAAAAVPAARPTEAGRVAFRRHWSTPLPEPPRLRLRLRTRARGVRREDGGGVRTEEQEQSQTQTAPRTFYELLGISSRGSPDDVRAAYRRMALMYHPDVSPPGAAAENTRRFIEVQEAYETLSDPSRRASYDRALARGVCRIGFSGRRSQSHRAYCHHQEQEDKSCWRRSWEDQVAELQRRSMAEDSEENLSWGARMRRRRAEASSAAE

SEQ ID NO: 19421 - protein, 278 aa, Zea mays
  VARIANT 88: note = Ancestral polymorphism is G, Derived polymorphism is E
  VARIANT 240: note = Ancestral polymorphism is R, Derived polymorphism is H
MASHDHHHSHSHDDHHHHSHGDGGGHAAGGSWVGEDGRVWHSHDGLAPHSHEPIYSPGDFTKRAPPLASRDFADRAFTVGIGGPVGTGKTALMLALCRFLRDKYSLAAVTNDIFTKEDGEFLIKHGALPEERIRAVETGGCPHAAIREDISINLGPLEELSNLYKADLLLCESGGDNLAANFSRELADYIIYIIDVSGGDKIPRKGGPGITQADLLVINKTDLAPAVGADLSVMERDALRMREGGPFVFAQVKHGVGVEGIVNHILQAWEIATGNKRR

SEQ ID NO: 19422 - protein, 131 aa, Zea mays
  VARIANT 85: note = Ancestral polymorphism is G, Derived polymorphism is S
  VARIANT 61: note = Ancestral polymorphism is P, Derived polymorphism is L
  VARIANT 60: note = Ancestral polymorphism is V, Derived polymorphism is I
  VARIANT 46: note = Ancestral polymorphism is D, Derived polymorphism is Y
MAIEADTAAARAGSVSETAPISPTDAVAPAGPARSRGWLRKLVSRDYNLPRSGRRWRLAVPSAAGASRLASSLSRSLRWKRRLPGLPSLTLRSGSAAAVVDAVAFRVMYVVEAVVLGLALSCFFLCCGCHL

SEQ ID NO: 19423 - protein, 578 aa, Zea mays
  VARIANT 489..578: note = Derived polymorphism lacks residues 489 to 578
  VARIANT 335..578: note = Derived polymorphism lacks residues 335 to 578
  VARIANT 325..578: note = Derived polymorphism lacks residues 325 to 578
MPEVNAGALAQAEQRKKAGRSVPERGKNPPDMESFSDADRYIPQEIIGRGSYGVVCSAIDRRTGEKVAIKKIGGVFDDLSDAARTLREIKLLRLLRHPDIVEIKHVMLPPARRDYKDIYVVFELMEADLHQVIKANPDLTTEHHQYFLYQMLRALKYMHAANVYHWDLKPKNILLNADCKLKICDFGLARVAFDDSPTTVFCTDPTSNLSPMSALKRLQDYIATRWYRAPELCGSFFSKYSPAIDMWSIGCIFAEILTGEPLFPGKNVFHQFTLMTNLLGTPSTDTISQIQNEKARKFLSCMRKQPIPFSEKFPGADPSALKLLQRLLAFDPKDRPTAEEALADPYFEGIGEVEREPSCQPIPKMEFEFEEKFTEEDVKELIFLEILQYHPQLLKDYKNSSEKTSFLYPSAVDKFHRQFTSLEENRGSNVMLVRKNASLPRTTTVHSTPIPAKEGPTATSQAAQRIPAARPGRVVGPVLPFESASVTDQHIARQVARNPAVPPATNTSSAYCYHLKPDSADRQEQQLELEEDHMQYRTGQHPMDAKVAHEMGRNKYARHSTMLQGACPKRPNRQGQPP

SEQ ID NO: 19424 - protein, 265 aa, Zea mays
  VARIANT 163: note = Ancestral polymorphism is C, Derived polymorphism is S
  VARIANT 159: note = Ancestral polymorphism is A, Derived polymorphism is S
MASSTMALSSTAFAGKAVNVPSSLFGEARVTMRKTAAKAKPAASSGSPWYGPDRVLYLGPLSGAPPSYLTGEFPGDYGWDTAGLSADPETFAKNRELEVIHSRWAMLGALGCVFPELLARNGVKFGEAVWFKAGSQIFSEGGLDYLGNPSLIHAQSILAIWACQVVLMGAIEGYRVAGGPLGEVVDPLYPGGSFDPLGLADDPEAFAELKVKELKNGRLAMFSMFGFFVQAIVTGKGPLENLADHLADPVNNNAWAYATNFVPGK

SEQ ID NO: 19425 - protein, 857 aa, Zea mays
  VARIANT 39: note = Ancestral polymorphism is A, Derived polymorphism is S
  VARIANT 161..857: note = Derived polymorphism lacks residues 161 to 857
  VARIANT 184..857: note = Derived polymorphism lacks residues 184 to 857
  VARIANT 211..857: note = Derived polymorphism lacks residues 211 to 857
  VARIANT 239..857: note = Derived polymorphism lacks residues 239 to 857
  VARIANT 397..857: note = Derived polymorphism lacks residues 397 to 857
MSGGGAGGKGAAAPVPAGSRKLVQCLKEIVNRPEAEIYSALRECGMDPDEAVSRLLSQDTFQEVKSKRDKKKEIKEVPETRYRSANSSTNRSLRSGADRGGRSNSVHSSSTDNMTSRPPVSGSCTASVNSNQMQTIASSSANKHMVTDGLAVSLQSSCGFQHGGWSGTPGQLSMVDIVKMGRPQGKASSKPVVTADRGYAGQYPSLPSTNQNLKQSGSMVSPAELDKGLQPAHNLVQVKNHGHFTADSKLPYGTDWSPQDDPTSENQSSQPETSGDPSLYESSFQSSTLVTDVVNSHENSHLELDENSTFAMRSTPASERHLEPSDSIPEYNDGILNNSSSYQPHNYSYTEQDAVEDSSADVSAAAENFQSLSLHNDELAAKKTAEDNPAVIIPDHLQVTNTECVSLSFGSFGSGAFSGLLPQKTTDSNVEFLVQEDSATVDPIDARNQDYYESGAVTSPAEENLEAMLGTNMENVDAPSVSQANELSQDVLDPSVLKYDVSSVSSHAYSNMNTPQPSTIEDPQGNNQAHTLSHLSNMMQANPLSTSSLLASNQNHPSLHGLEFDLPYLEAKYNAGTTTNPRPAISMQEALKAGVFSNARSTQSLPSTSIPTGHPLPQQLAHHPYSQPTLAPITHFPNIVGYPPYLPQNYAAYLSSGTFQQAYPSNGAFHQSAAALLGSGMKYSAPEYKNNLSATGLQQQHQPQPQPPSSVISGYGGLGSSSNIQGNFTLNQSTGTGSTLVFDDALGRQYKDTSQHIALQQPDNSGMWLHGSGSRAAALPPNHFYGYQGQSQLGGFGQAQQQQPSQFGGHGYPTFYQSQGGLTQEHHPQNLAEGSLNGFQVAPSQPSHPSWQHQHTY

SEQ ID NO: 19426 - protein, 262 aa, Zea mays
  VARIANT 194: note = Ancestral polymorphism is P, Derived polymorphism is L
  VARIANT 131: note = Ancestral polymorphism is T, Derived polymorphism is I
  VARIANT 94: note = Ancestral polymorphism is G, Derived polymorphism is C
  VARIANT 45: note = Ancestral polymorphism is A, Derived polymorphism is T
  VARIANT 38: note = Ancestral polymorphism is R, Derived polymorphism is K
  VARIANT 32: note = Ancestral polymorphism is V, Derived polymorphism is F
MVDGNGLLHPREYWCDGSDADSSRKKPGYVIVIGATNKPDVVDQTLQRPERFDREIYLGVPDVKSRKQILMMLSRKLRLEGQFDFLKIARATPGFLGADLKALVNNAGYLAMKRIINKRRAQYCSEVKEATKLVQPSLRREGFSSIPDVTWDNVGGLYSLRKEFHRYIRCIKSPEDCDLFGVRMQDGFLLFGPPGCGKTLIAKAVAHEAGANFIHIKGPDILKKYVGDSESEIRKIFNRARTNAPCIVFFDEVKFVSNAFYK

SEQ ID NO: 19427 - protein, 246 aa, Zea mays
  VARIANT 197: note = Ancestral polymorphism is A, Derived polymorphism is P
  VARIANT 194: note = Ancestral polymorphism is R, Derived polymorphism is H
  VARIANT 144: note = Ancestral polymorphism is T, Derived polymorphism is R
  VARIANT 139..246: note = Derived polymorphism lacks residues 139 to 246
  VARIANT 132: note = Ancestral polymorphism is I, Derived polymorphism is V
  VARIANT 125: note = Ancestral polymorphism is Q, Derived polymorphism is K
  VARIANT 122: note = Ancestral polymorphism is K, Derived polymorphism is I
  VARIANT 94: note = Ancestral polymorphism is S, Derived polymorphism is Y
  VARIANT 90: note = Ancestral polymorphism is D, Derived polymorphism is G
MPTCAKHMKRYFPHAPQPHAPNTSISRYPWTTTAVARERTDEEIVSSVVIRDVLSMPVAVSKNPNIAFMFLTSGSLPFDKLWEKFLQGHDGQYSIYIHASLSHTYYLYILSLFLLGVKFTVISFQGQFGFFVGFMKLQWDLNETMELGPLVVKALGVNNGMGLGLHEGRYLLLSSITKDKFGKEIVDLCLDRVRKLPDNCTGLQGFFVFNAVGGGTGSGLGSLLLERLQLIMARSTSLVSPFILPH

SEQ ID NO: 19428 - protein, 529 aa, Zea mays
  VARIANT 12: note = Ancestral polymorphism is A, Derived polymorphism is E
MGPRGVALALLAAALLQALAPASAAAAAAAAAGGLVRVALKKQPVDQNARVAARLSAEERQRLLLRGANALGSAGGDDDSDVIALNNYMNAQYFGEIGVGTPPQKFTVIFDTGSSNLWVPSSKCYFSVRPRPFLRLVEIACYFHSRYKSGQSSTYKKNGKPAAIQYGTGAIAGFFSEDSVKLGDLDVNDQEFIEATKEPGLTFMVAKFDGILGLGFQEISVGNATPVWYNMVKQGLISDPVFSFWFNRHAGEGEGGEIVFGGMDSSHYKGDHTYVPVTQKGYWQFNMGDVLVDGKSTGFCAGGCAAIADSGTSLLAGPTAIITEINEKIGAAGVVSQECKTVVSQYGQQILDLLLAETQPAKICSQVGLCTFDGTHGVSTGIRSVVDDKAGKSNGGLKSDPMCNACEMAVVWMQNQLAQNKTQELILTYINQLCERLPSPMGESAVDCASLGSMPDIAFTIGGKKFKLKPEQYILKVGEGQAAQCISGFTAMDIPPPRGPLWILGDVFMGVYHTVFDYGKLRVGFAESA

SEQ ID NO: 19429 - protein, 165 aa, Zea mays
  VARIANT 54..165: note = Derived polymorphism lacks residues 54 to 165
  VARIANT 63: note = Ancestral polymorphism is G, Derived polymorphism is R
MAEGKSSSGGDLFSSGKLVAGAAVSVFQQKSVENVDKQEVAGAAAELLHAASAYGKLDDKPAGQYVEKAEGYLKEFSAGHATEQEQPAAAAGDDAAPKSPAPEAPKEPAAVPAPAAEEGSKSSEGFGLGDVMKGAEQLVGGNKQGGGEESAGGGGLFKMAQGFLK

SEQ ID NO: 19430 - protein, 112 aa, Zea mays
  VARIANT 47: note = Ancestral polymorphism is A, Derived polymorphism is T
MSERIARKMCVSANRLMWLGLQDALKVALPEKSELQRTYSKGDEQPAHAPWGPKEHIYADERAGKVCVASVGCVGAASCSFDSCSADRASHQEIGIISARSRQKDAGFPLIF

SEQ ID NO: 19431 - protein, 703 aa, Zea mays
  VARIANT 329: note = Ancestral polymorphism is G, Derived polymorphism is C
MSLLCFLLDLRNIPPPLLHRLKECLLDLANLYAATTSQTHAVTASPAAAGTLPDRLALGYVYDPSSKPSSSCSSSCPELKIGYRPGEKFSLRDFHHAVNNLPMDGFLADQHGGSLPIRDVSLTSFFSNKAIYSWATDDISKKVIAICMSAQNTEALRRTLMDAAEQCVAVDFIMLEAEAAFMYGRASENANSFVNRICDLENCVVRRYNPETQVLHGLVKRWLEELKDDKEDTLQAVFVFSDPIIDSVKHIYCNLYASANQITDGFPPCQNTLTEQACKCHGHPIDLFTPSKAKWTCPTTNRQLVVSDIVDTAVRIGEQTVLFLPTLEGSSNLRRVSTSISFVVIERTELASMNEGVIMGRSYVVIPSSNDVEASLADERTDQNTKIFYGLCETLFKLDQGLVCSSSCNIETMKIGTLQCYYLLQPSEKGPMLLRRLAASEEILPLPDMTRDCSSKITMEIRNSIETSLSKNSDTWFRVFVFVCCFYHDRSWKHSPNKMSITGPTSFCRSIAPSCAPKDPHNIGSFSEPQVPTCQDLEESMSLNEHEDAAGGLNDHPYSFSEPQPQTSAFITPSKNKASIQSKKGKASPSISEEWEKLIIIDDLDDDFASPAHPRTAVHKPPRPKPPSPVKPLDEKTSRILERLEPPRAKKQRANIVSKASTGAAPAPASKQIKKPLLLPREPSASQPLRPSFSRLRRVPYLT

SEQ ID NO: 19432 - protein, 110 aa, Zea mays
  VARIANT 79: note = Ancestral polymorphism is D, Derived polymorphism is Y
  VARIANT 72: note = Ancestral polymorphism is S, Derived polymorphism is L
MPLPPSLELDLFHRRAAAGTGTGATAVRFPFGNIPVTHPYYFFRQDATAAAAEAGCRVLKLASADTVAQSDSDCSSVVDLSPSPPTAVSARKPAVFDLDLNCSPPTEAGA

SEQ ID NO: 19433 - protein, 538 aa, Zea mays
  VARIANT 56: note = Ancestral polymorphism is P, Derived polymorphism is L
MASDGDHGGALQKPLLPKAPRSGGWFRKGTSTARLGAAAAGTSSKAAALRPPHHVPALLCTLVVALGTVQFGFTSGYSSPAQDGVTRDLDLSISEFSVFGSLSNVGAMVGAIASGQMAKYVGRRGSLMIAAVPNVMGWLAISLARDTSFLYVGRLLEGFGVGVISYVVPVYVAEISPQNMRGALGAVNPLSATFGVVFADVLGLFFPWRLLALIGTLPCLLLIPGLFFIPESPRWLARMNMMDECEASLQVLRGVDADITVEANDIKARTCFHSSRMDGYSLFENSLHSIAVASANKSGAMSFQELNQKKYRTPLILGMGLLVLQQLSGINGIIFYAGSIFKAAVPVNLVLTVSSNNQSSPGLKNSNLDTCILGVIAASSCHCCYDQDLGQGWTENPPYRNISSFGMTLSLLVVAVVFYIKDNISHDSDLGNTLSMVSLVGVLAYVTAYSFGMGAIPWIIMAEILPVSIKSVAGSFATLANWLTSFGITMTANLLLSWSAAGTFAFYMMVSAFTLVFVILWVPETKGRTLEEIQWSFQ

SEQ ID NO: 19434 - protein, 94 aa, Zea mays
  VARIANT 6: note = Ancestral polymorphism is C, Derived polymorphism is Y
  VARIANT 10: note = Ancestral polymorphism is R, Derived polymorphism is Q
  VARIANT 49..94: note = Derived polymorphism lacks residues 49 to 94
  VARIANT 59: note = Ancestral polymorphism is T, Derived polymorphism is A
  VARIANT 87: note = Ancestral polymorphism is A, Derived polymorphism is D
MDIMICQVLQSQQCLAFSMFFLPIMESSQQMIQPTTWTQPCSSLSHDWSPFVMELAVATTLSTLNVKDVIDVMPGLMKSSVALLNQADLGWYFL

SEQ ID NO: 19435 - protein, 166 aa, Zea mays
  VARIANT 35: note = Ancestral polymorphism is G, Derived polymorphism is W
  VARIANT 38..166: note = Derived polymorphism lacks residues 38 to 166
  VARIANT 40..166: note = Derived polymorphism lacks residues 40 to 166
  VARIANT 41: note = Ancestral polymorphism is S, Derived polymorphism is L
  VARIANT 135..166: note = Derived polymorphism lacks residues 135 to 166
MPLRCALGRGAKERRRATAPRRGLDGERPSAAVAGYLWCQSCAAAEVADCVALGCCPCATVARLGLALARAPLAAGHCLRRRRRSLLRRKRVRDVEGAQAIGAAANCLTWTATMPRSTRRCCSSSRPRQRSWRGWTRCTGPTTGASAAASPSRGRRVTTDDNLRPN

SEQ ID NO: 19436 - protein, 281 aa, Zea mays
  VARIANT 24..281: note = Derived polymorphism lacks residues 24 to 281
  VARIANT 34..281: note = Derived polymorphism lacks residues 34 to 281
MPPSAAYKNKPRPAPRSVPATAPSRLCMGTKRCCVVGVRARGPDASSSDDMREPRSATMLDDGDDDFTFAAAHPPPRLLPAGAGGGFVGPPLLYPVFGRPRSPPRVADPAEPEPEPDTATARVPLGRHLAVDRRRDPAPAPLPAPADDDDDSVPAETFCPWSPGWSAAAASPARCKKSGSTGSVLRWRPRLAVGRSQSDGKEKFVFLSAGGGSSGRRSQNGRGVAAPGGGATAGAPHAWSCYVNDNKSGGGARRRSFLPYKRDLVGLFANAAVFRRSYLPF

SEQ ID NO: 19437 - protein, 461 aa, Zea mays
  VARIANT 176: note = Ancestral polymorphism is G, Derived polymorphism is E
  VARIANT 117..461: note = Derived polymorphism lacks residues 117 to 461
  VARIANT 106..461: note = Derived polymorphism lacks residues 106 to 461
  VARIANT 89: note = Ancestral polymorphism is G, Derived polymorphism is D
MAAPSSAATACFVSPLPPPRRPRHFLRHLARAAAAEPTPASASSFALPSPWPWARRLRDLVPAEAAGRLLSSAAGSLIVALASASLVLGDAGAASAFVVSTPRKLQADELATVRLFQENTPSVVYITNLAVRQDAFTLDVLEVPQGSGSGFVWDKSGHIVTNFHVIRGASDLRLVGTPEGFMLSFYVFLAVCGKAKIQLIVLCRVTLADQSVYEAQVVGFDQDKDVAVLRIEAPKDKLRPIPVGVSADLLVGQKVYAIGNPFGLDHTLTTGVISGLRREISSAATGRPIQDVIQTDAAINPGNSGGPLLDSSGNLIGVNTAIYSPSGASSGVGFSIPVDTVGGIVDQLIRFGKVTRPILGVKFAPDQSVEQLGLSGVLVLDAPPNGPAGKAGLQPTKRDPYGRLILGDIITSVNGTKVTNGSDLYRILDQCKVGETVTVEVLRGDHKEKIPVVLEPKADES

SEQ ID NO: 19438 - protein, 297 aa, Zea mays
  VARIANT 51: note = Ancestral polymorphism is S, Derived polymorphism is F
MDGGGDKSALASELAQVLAMVRELEARMDQDPLPAAARELCAGLASSVDRSIRIARSCCADLPDGNAAAQSKRRQVDHRKGTPCVRRQLRAASLQDAAALDDGLSWRKYGQKDILGAKYPRSALSSTHLFNSPLTNQPTVRIDRATLTTCGEIDRRAYFRCTHRHSQGCLATKHVQRADGDPLLHDVVYHGAHTCVQAAHPGANQLRQELQLQHGHSAQDKDQGACSPLALATGLLEPMTPYSFASGADFPLFSPTGLDGQLRSSHGAGIGVEFETLFEELFTNATEPFQWDLYAAN

SEQ ID NO: 19439 - protein, 159 aa, Zea mays
  VARIANT 124: note = Ancestral polymorphism is N, Derived polymorphism is S
  VARIANT 117: note = Ancestral polymorphism is G, Derived polymorphism is R
  VARIANT 75..159: note = Derived polymorphism lacks residues 75 to 159
  VARIANT 34: note = Ancestral polymorphism is A, Derived polymorphism is V
MEDGVFDGHGRCGQLVSKLARDHLPFMILSQRNALLLGSDGDGDRDGPAFSDASPTALSSTDGSRSGRSSLAPAQMLEVWREACANAFETMDRELGVQARVDCDFSGTMSVCATKQGEDLIVANLGDSRAVLATVSETCYLKAVQLTIDQKPNVPRESS

SEQ ID NO: 19440 - protein, 263 aa, Zea mays
  VARIANT 108: note = Ancestral polymorphism is L, Derived polymorphism is Q
MDASLRTLPPAGSSFRGEVRSAVSSLLLSSRGTSALDSSFFSHLPPLGSSVYYRQCELLRNFAASQTQQSAAAACSPSSSSSGLQLQTPVPHDDATAAAAATLLRQKLYRGVRQRQWGKWVAEIRLPQNRVRVWLGTYDSPETAAHAYDRAAHRLRGEYARLNFPGVMDGPPGADCPDHLRRLRAAVDAKIQAIRARRQQRNKRESARSGANAKLPTARPIASETSTTPDGVLSVSPASADGGCPLDRMPSFDSELIWEMLSL

SEQ ID NO: 19441 - protein, 375 aa, Zea mays
  VARIANT 206: note = Ancestral polymorphism is R, Derived polymorphism is L
  VARIANT 201: note = Ancestral polymorphism is A, Derived polymorphism is V
  VARIANT 168..375: note = Derived polymorphism lacks residues 168 to 375
MRENGAARDEGPALCKAAAADGGGDVGAASARRRRRLGRATEGPAPTKRIRSGSQRSPYDSSLETATDGCCWPARLSHGAVSVIGRRREMEDAFAVALSFLASEAVGGEQEQELDFFAVYDGHGGARVAEACRERMHVVLAEEVGLRRRRSGSDDLRWEEAMAASFARVDGEVTGGLSSPHHDDAGSSLPYRTVGSTAVVAVVGRRRIVVGNCGDSRAVLSRGGVAVPLSSDHKPDRPDEMQRVEAAGGRVVNWNGYRVLGVLATSRSIGDYYLKPYVSAEPEVTVVERTERDEFLILASDGLWDVVSNEAACKIARSCLSGRAASRFPGSVAGRTAADAAALLAELALSRGSRDNISVVVVELRRLQTDQMTRV

SEQ ID NO: 19442 - protein, 144 aa, Zea mays
  VARIANT 104: note = Ancestral polymorphism is S, Derived polymorphism is L
  VARIANT 80: note = Ancestral polymorphism is G, Derived polymorphism is S
MAVDESLINYDVLLHVHQCCPDFVGLKVSALYVDEEMASVICNSLPRLKKLEIPSCDMSSATIIRFLDCLEQLEHLDISGYETSAISSPVLEKASRLKVFLWNSKFELGEFVDCSNCGEHNINPQEPCKCMMEHKVMDWLAGPS

SEQ ID NO: 19443 - protein, 635 aa, Zea mays
  VARIANT 439: note = Ancestral polymorphism is R, Derived polymorphism is C
MKYVLVTGGVVSGLGKGVTASSIGVVLKACGLRVTSIKIDPYLNTDAGTMSPFEHGEVFVLDDGGEVDLDLGNYERFLDIKLTRDNNITTGKIYQSVIDKERRGDYLGKTVQVVPHITDEIQDWIQRVAMNPVDDTEEPADVCVIELGGTIGDIESMPFIEALGQFSYRVGPGNFCLVHVSLVPVLNVVGEQKTKPTQHSVRGLRGLGLMPDILACRSTQPLEEHVKVKLAQFCHVPIPNIINLHDVTNIWHIPLLLRDQKAHEAILKVLDLQCASKVAREPQLSEWTERVSRCDRLKSPVRIAMVGKYTGLSDSYLSVIKALLHASVALDRKLVVDWVPSCDLEDSTAKETPDAYEKAWESLKVRIECLLDCDTPLTTRQQSERVFAPQGADGVLVPGGFGDRGVQGKILAAKYARENNVPYLGICLGMQIAVIEFARSVMKLHGANSTEFDPTTKTPCVVFMPEGSKTHMGATMRLGSRRTFFQATNCKSAKLYGNACYVDERHRHRYEVNPDMVPEFEKAGLSFVGRDESGERMEIIELPTHRFFVGAQFHPEFKSRPGKPSPLFLGLVAASSGQLDHLLQRGLTSSAGRDICGKGGAQKPKACQNGHVMKPLNGLVHGHYSATRCNGVIPI

SEQ ID NO: 19444 - protein, 186 aa, Zea mays
  VARIANT 172: note = Ancestral polymorphism is R, Derived polymorphism is M
  VARIANT 133: note = Ancestral polymorphism is G, Derived polymorphism is D
  VARIANT 122: note = Ancestral polymorphism is E, Derived polymorphism is D
  VARIANT 86: note = Ancestral polymorphism is P, Derived polymorphism is L
  VARIANT 68: note = Ancestral polymorphism is P, Derived polymorphism is L
MHIDDLRALAPLWLSKTEEVRQDKSHWSTNITGDIYGMGWISEMYGYSFGAAEVGLRHKINDDIMIYPGYTPRPGIEPLILHYGLPFKVGNWSFSKLEHREDGIIYDCNRLFDPPHFPREVEMMESDPNIKHGLFLSIECINTLNEGLLLHHASAGCPKPQWSKYLSFLKSRRFSELTKPKYWKGE

SEQ ID NO: 19445 - protein, 583 aa, Zea mays
  VARIANT 192..583: note = Derived polymorphism lacks residues 192 to 583
MAAASTLAFGHPKTLAAAGAKPLPAATSTSVSFPATHQPACLLSSPAPGSLRRRDVAAMVSAPPAVGTAMPSLDFDTSVFNKEKVSLAGHDEYIVRGGRNLFPLLPEAFKGVKQIGVIGWGSQGPAQAQNLRDSLAEAKSDIVVKIGLRKGSKSFEEARAAGFTEESGTLGDIWETVSGSDLVLLLISDAAQADNYEKIFSHMKPNSILGLSHGFLLGHLQSLGLDFPKNISVIAVCPKGMGPSVRRLYVQGKEVNGAGINSSFAVHQDVDGRATDVALAWSVALGSPFTFATTLEQEYKSDIFGERGILLGAVHGIVEALFRRYTEQGMDEESAYKNTVEGITGIISKTISKKGMLEVYNSLSEEGKKEFNKAYSASFYPCMDILYECYEDVASGSEIRSVVLAGRRFYEKEGLPAFPMGNIDQTRMWKVGEKVRSTRPEGDLGPLHAFTAGVYIALMMAQIEILRKKGHSYSEIINESVIESVDSLNPFMHARGVAFMVDNCSTTARLGSRKWAPRFDYILTQQAFVAVDKDAPINQDLISNFLSDPVHGAIEVCAELRPTVDISVPANADFVRPELRQSS

SEQ ID NO: 19446 - protein, 368 aa, Zea mays
  VARIANT 98..368: note = Derived polymorphism lacks residues 98 to 368
  VARIANT 93..368: note = Derived polymorphism lacks residues 93 to 368
  VARIANT 75: note = Ancestral polymorphism is S, Derived polymorphism is F
MRPSLLKSTAELLRRSRGYASSANPERKVAILGAAGGIGQPLSLLMKLNPLVSSLSLYDIAGTPGVAADVSHINSPALVPPCSARSSGLARTELDWIRAHWFLLLQVKGFMGDDQLGEALEGSDIVIIPAGVPRKPGMTRDDLFNINAGIVKALCTAIAKHCPNALVNMISNPVNSTVPIAAEVFKKAGTYDEKKLFGVTTLDVVRAKTFYAGKAGVPVTEVNVPVVGGHAGITILPLFSQATPASNSLSQEDIEALTKRTQDGGTEVVEAKAGKGSATLSMAYAGAVFADACLKGLNGVPDIVECSFVQSTVTELPFFASKVRLGKNGVEEVLGLGELNDFEKKGLESLKVELKSSIDKGIKFAHGS

SEQ ID NO: 19447 - protein, 297 aa, Zea mays
  VARIANT 179: note = Ancestral polymorphism is R, Derived polymorphism is I
  VARIANT 122: note = Ancestral polymorphism is A, Derived polymorphism is E
MPPPTLSRDLRRRVFTTQARDLRRRPHLGQPIGNFGLLPGLMLEKKASLAVLGEKTTLMSPDVLVARGVPCCRLVQYPGEFVVTFPRAYHIGFSHALLDFHLHGDNSSAQESAEQGGVELYEEVQCFNSRSNARAHTYIIESTIDFLELALQFGMIMMFACAFPLIFCFAALNNVTEIRADALKLLVMLKRPEPRAAATIGAWLNIFQFLVVMAICTNCLLLVCLYDEEGKWRIEPGLAAILIMEHALLLIKFGFSHFVPKEPAWVKANRVRYVAQAQNVCSKQLLRSISKFDGKLD

SEQ ID NO: 19448 - protein, 226 aa, Zea mays
  VARIANT 19: note = Ancestral polymorphism is C, Derived polymorphism is Y
  VARIANT 27: note = Ancestral polymorphism is I, Derived polymorphism is L
  VARIANT 41: note = Ancestral polymorphism is E, Derived polymorphism is G
  VARIANT 47: note = Ancestral polymorphism is F, Derived polymorphism is L
  VARIANT 67..226: note = Derived polymorphism lacks residues 67 to 226
  VARIANT 85..226: note = Derived polymorphism lacks residues 85 to 226
  VARIANT 88..226: note = Derived polymorphism lacks residues 88 to 226
  VARIANT 89..226: note = Derived polymorphism lacks residues 89 to 226
  VARIANT 110..226: note = Derived polymorphism lacks residues 110 to 226
  VARIANT 116: note = Ancestral polymorphism is K, Derived polymorphism is T
  VARIANT 133: note = Ancestral polymorphism is E, Derived polymorphism is G
  VARIANT 150: note = Ancestral polymorphism is G, Derived polymorphism is D
  VARIANT 167..226: note = Derived polymorphism lacks residues 167 to 226
  VARIANT 197: note = Ancestral polymorphism is P, Derived polymorphism is L
MAHTSPTSIHGRSSIRKPCLPQALHLILLLNVSAADPPKAEEAIRWFYPSASAGNARAQYNLGLCLQNGKGVKQNQKEAAKWYLRAAEGGNVRAMYNISLCYSYGEGLGQDPVRAKRWLQLAADCGHKKALYECGIKLCASSSTIGVVYGGYDSPKLTYNGHVKMWQGNNKKFRTIRPPCKLIALEVQNTSLLVISPLCPRDEQERFIIFLLDFTTVLPFVSTFDV

SEQ ID NO: 19449 - protein, 211 aa, Zea mays
  VARIANT 166: note = Ancestral polymorphism is V, Derived polymorphism is I
MASSAATTAKLIALPPAPTRGGCCCWRTRRPAIPAAAARLKVSASAASSDVPDFLSSNWLETRKRKPFGPRLNFSAEEAVEYQLESLKYNDLPRPDYGIEVMYRFAGFDPFERSTYFGRQFDLGQFERFRRLFHHSTYRVLLGHRERRILSSLWVEENQFKQRVWIQGARPEEEEIFQFTMVQRVGGSWDGYWLTESLINDGDAFSGGIAY

SEQ ID NO: 19450 - protein, 475 aa, Zea mays
  VARIANT 397: note = Ancestral polymorphism is P, Derived polymorphism is S
MDPFTAMALSGTLSPSFSTTSTNDTMYNLNPALYASLVPPIRKPATPTTLEVGRQCKEEEDASIRLVHLLITCTSAIETGDYSIAQGNLSEARKILGEIPTSTGIGRVGKHFIDALVQRLFPAYPHAAPPSPSPSTSIDLHNNFYDAGPYLKFAYSTANQAILKAIKGYNHVHIIDFSLMQGLQWPALMDVFSAREGGPPKLRITGIGPNPIGGRDELHEVGIRLAKYAHSVGIDFTFQGVCVDQLDRLCDWMLLKPIKGEAVAINSILQLHRLLVDPDANPVVPAPIDILLKLVIKINPMIFTVVEHEADHNRPPLLERFTNALFHYATMFDSLEAMHRCTSGRDITDSLTEVYLRGEIFDIVCGEGSARTERHELFGHWRERLTYAGLTQVWFDPDEVDTLKDQLIHVTSLSGSGFNILVCDGSLALAWHNRPLYVATAWCVTGGNAASSMVGNICKGTNDSRRKENRNGPME

SEQ ID NO: 19451 - protein, 86 aa, Zea mays
  VARIANT 48: note = Ancestral polymorphism is V, Derived polymorphism is M
  VARIANT 37: note = Ancestral polymorphism is V, Derived polymorphism is D
MALIMGGFGPLYLDLQRFAAFLSPLTLGRVNIAVNSVYISKVSLAIVVRYSLSRRAFSIAPDAPESRSPPTSSSTGRLAPLSLTFH

SEQ ID NO: 19452 - protein, 157 aa, Zea mays
  VARIANT 16: note = Ancestral polymorphism is P, Derived polymorphism is L
MGDRHQHGPGSGVEDPATLLRRVQTRAPNSTQVVGFLTLLVSGAVLLLLTGVTLTGAVVALVFLGPIALLTSPIWVPVAVVISAIVAAALSACAFAAAALPVATWMYRYFTGRHPVGADRVDYARSRIADTASHVKDYAREYGGYLRTRAKDAAPGA

SEQ ID NO: 19453 - protein, 192 aa, Zea mays
  VARIANT 39: note = Ancestral polymorphism is A, Derived polymorphism is V
  VARIANT 43: note = Ancestral polymorphism is A, Derived polymorphism is V
  VARIANT 47: note = Ancestral polymorphism is R, Derived polymorphism is W
  VARIANT 68: note = Ancestral polymorphism is S, Derived polymorphism is F
  VARIANT 69: note = Ancestral polymorphism is A, Derived polymorphism is V
  VARIANT 73: note = Ancestral polymorphism is G, Derived polymorphism is D
  VARIANT 79: note = Ancestral polymorphism is T, Derived polymorphism is M
  VARIANT 111: note = Ancestral polymorphism is P, Derived polymorphism is R
  VARIANT 116: note = Ancestral polymorphism is A, Derived polymorphism is V
MVGLGARLTGTLYGHRRDHVHLAFQVDTRVCPVLLLELAAPTAALVREMVSGLVHIVLECEHARGPPSAAGSGRRLVETVWRAYYNGRGCGGVLMLAFVSVPHSYFALGPPLGTSAVRHRGLGRASRAGARVHGADVIPVASCGGGAGNVMYMCVRLEHIVGSRDSEAFYDMMSPDSGGRAEPELSVYLLRV

SEQ ID NO: 19454 - protein, 204 aa, Zea mays
  VARIANT 14..204: note = Derived polymorphism lacks residues 14 to 204
  VARIANT 41..204: note = Derived polymorphism lacks residues 41 to 204
  VARIANT 44: note = Ancestral polymorphism is G, Derived polymorphism is R
  VARIANT 47: note = Ancestral polymorphism is L, Derived polymorphism is H
MDRYLRVERPRNESTIEENGIRITAQGLIRNYASYATSLLQVLGLVLAIAVVSCGHCKHLAPIYEKLASVFKQDDGVVIANLDADKHTDLAEKYGVSGFPTLKFFPKGNKVGEDYDGGRDLDDFVKFINEKCGTSRDPKGHLTSEVGLVPSLNPLVMEFLNAADDKRKEVLSKIEEDVAKLSGSAAKYFLPPSPTLCLQATRLI

SEQ ID NO: 19455 - protein, 253 aa, Zea mays
  VARIANT 118..253: note = Derived polymorphism lacks residues 118 to 253
MSFRLLDCSRYSQLTGSSEHLRRALLRFALVHERACLLVVVCSTHSPSKFGVFTVDTGLYALLFGCPLSLLVFFLVLQMKFVAAYLLAVLAGNASPSAEDLTAILESVGCEVDNERMELLLSQLSGKDITELIAAGREKFASVPCGGGGVAVAAASPAAGGAAPTAEAKKEEKVEEKEESDDILGRPWHTSPRPRPGARLPPPFTDLDLKEAKELVEKASAVLKDGVEGWSLEGSGREYCREDVGGRHEIVLE

SEQ ID NO: 19456 - protein, 281 aa, Zea mays
  VARIANT 16: note = Ancestral polymorphism is S, Derived polymorphism is F
  VARIANT 23: note = Ancestral polymorphism is P, Derived polymorphism is L
  VARIANT 49: note = Ancestral polymorphism is E, Derived polymorphism is K
  VARIANT 84: note = Ancestral polymorphism is Q, Derived polymorphism is R
  VARIANT 123: note = Ancestral polymorphism is G, Derived polymorphism is S
MRSITARNSHDSLSISRRYFKWPVLGKSKSHDDTTFCKDEEYMKSSKAEEEDESTMAFSSACPSFHSDGFSVSPLLKAASAPHQPPALPPPQRRRKVDPRACPAMLLESAAPTAVLVREMASSLVRIVLECERAKGPPSTTGSRRRLVEETVFAVDRVLGAHNRFKVLWMKVVAAYLLAVLAGNASPSAEDLTGILESVGCEVDNERMELLLSQLSGKDITELIAAGREKFASVPCGGGGVAVAAGAPAAGGAAPAAEAKKEEKVEEKEESDDDMGFSLFD

SEQ ID NO: 19457 - protein, 229 aa, Zea mays
  VARIANT 158: note = Ancestral polymorphism is E, Derived polymorphism is K
  VARIANT 151: note = Ancestral polymorphism is G, Derived polymorphism is S
  VARIANT 125: note = Ancestral polymorphism is S, Derived polymorphism is F
  VARIANT 90: note = Ancestral polymorphism is W, Derived polymorphism is R
  VARIANT 76: note = Ancestral polymorphism is R, Derived polymorphism is C
  VARIANT 5: note = Ancestral polymorphism is P, Derived polymorphism is L
MRTRLDAISRTSTAVGAADSSSIAGHARGSTWNARCTWLCLCLYRMPVSRAPSPTYRCRPTTTLARADHNHDMVVRTFLLLCGGGSAGGWCGADAAFNRGDTLKPSEWKDGQAEEKAMVDSSSSSAFELFMYSSSLQNVVSSWLLLLPRTGHLKYRLEMESESCEFLAVMLLMVMVWCCGCLAVFSSSYDPAKLAQAFLEQAKGSRGMKCLLLVLDSCVVLFAQGYIRS

SEQ ID NO: 19458 - protein, 415 aa, Zea mays
  VARIANT 187..415: note = Derived polymorphism lacks residues 187 to 415
  VARIANT 116: note = Ancestral polymorphism is R, Derived polymorphism is G
  VARIANT 87..415: note = Derived polymorphism lacks residues 87 to 415
  VARIANT 86: note = Ancestral polymorphism is R, Derived polymorphism is Q
MQLASEHPACGRASAEGEAFVPRSGAQGLRRRTGAAPLDYSSPRSGRAGDGKRTTFREDVGHAAAETYLVTGLAFTLLGYLGVSYRWISQLIALLVYAVLLMPGFIKVGYYYFFSRHVIRSVIYGEQPRNRLDLYIPKDNSKSSPVVAFVTGGAWIIGYKAWGALLGRRLAERGIIVACIDYRNFPQGTISDMVSDASEAISFICNNVVSFGGDPNKIYLMGQSAGAHIAACALLEQAIKESKGENTYWNVAQIKAYFGLSGGYNIQNLVDHFHERGLYRSIFLSIMEGEESLPHYSPEIVAKKLSAETISLLPQIVLLHGTADYSIPSSASETFADVLKQAGGKVELQLYKGKTHTDVFLQDPLRGGRDKLVEDVLSVIHVDDASARERDASAPTPERLVYEWQIKLARQISPF

SEQ ID NO: 19459 - protein, 439 aa, Zea mays
  VARIANT 68..439: note = Derived polymorphism lacks residues 68 to 439
MGMFFSKAEPPPPMVLVPPLFDYPPIAARTRFAASLLSSIRTLLFCDLMAVPAYELMFGKVSLHNLFEDYFDQAGNMTSRIMLKPLEDPHVDLIATVSAAADRNSGTEVKGDALFRWQRELDDPHTFVDLLVSTSNPLLQLRLCAYHPKYRIGAFGTLPLLMGNRVRSEDYGVMGVRYGSENLSVGASFVPISLPSEVPFGAWLVGRKGSLSAGVQYKPLSGSKYPMPFTELENWNYAISYGVGSTSPLSPSFIFSLELARSTQLTASFYQHLVVQRRVKNPFEDDQVVGITNYIDFGLELAAKVDKDKVSGDGNSFQLAASWQANKNFLLKGKLGPSTSSVALAFKSWWRPSFTFSVTAVNDHSKGTTSYGFGLRVEDLRRASYQRADPNYVMLTPSKEHLAPGVLREYGKRPMFQTQIDSGNYDHLPTELKPLGRIF

SEQ ID NO: 19460 - protein, 270 aa, Zea mays
  VARIANT 25: note = Ancestral polymorphism is P, Derived polymorphism is L
MLRHCTHKQHRHSHQQSVVAAAAAPATMAAASPAFSLFFPLPNTKAFQFDDDSHSSVTTCPSSPSSSSSSTGTVDCTLSLGTPSSRRAAAKPRPPCLALPSRSAVSCDVAAPADQSCCCRCCSCPGGRRPSPAAANKRAAAAHGHGQDPAPLVDHRCASCGTTSTPLWRNGPRGPKSLCNACGIRFRKKERRAATGTTTADMDQGGCYLAQRAQYGAATSGRAYYGGGDGDIADAEAVPAQFLAWRPSVVEAAEFAAVWPEPATLFQYIN

SEQ ID NO: 19461 - protein, 506 aa, Zea mays
  VARIANT 72: note = Ancestral polymorphism is L, Derived polymorphism is P
MSFRDQESGGEDGGRTSSASDLRKPLINTGSWYRMPPAGGVMGSRQSSLMERLGSSAFSLRDVAISATLCTLIVALGPIQFGFTCGYSSPTQDAIIADLGLSLSEFSLFGSLSNVGAMVGAISSGQLAEYIGRKGSLMIAAIPNIIGWLAISFAKDSSFLFMGRLLEGFGVGVISYTVPVYIAEIAPQDQRGALGSVNQLSVTIGILLAYLFGMFVPWRILAVLGILPCSILIPGLFFVPESPRWLAKMGKMEDFEYSLQVLRGFQTDITAEVNEIKRSLASSRRRTTIRFADIKQKRYSVPLVIGIGLLVLQQLSGVNGILFYAASIFKAAGITNSNLATFGLGAVQVIATGVTTWLTDKAGRRLLLIISTTGMVITLVIVSVSFFVKDNIAAGSHLYSVMSMLSLAGLVAFVIAFSLGLGAIPWIIMSEILPVNIKSLAGSVATLANWLTAWAITMTASLMLNWSSGGTFAIYAVVSTMALIFVCLWVPETKGRTLEEIAFSFR

SEQ ID NO: 19462 - protein, 202 aa, Zea mays
  VARIANT 8: note = Ancestral polymorphism is A, Derived polymorphism is E
  VARIANT 41: note = Ancestral polymorphism is S, Derived polymorphism is Y
  VARIANT 75: note = Ancestral polymorphism is G, Derived polymorphism is R
  VARIANT 136..202: note = Derived polymorphism lacks residues 136 to 202
  VARIANT 152: note = Ancestral polymorphism is G, Derived polymorphism is D
MAIAILAAVVGSQAVITGTFSMIKQCASLGCFPRVKIIHTSAKAHGQIYIPEINWIMMILCLAVTIGFRNTKHLGNASGTVLLSRTHQVHEALYFLAALIKFREGAWVPIVLALIFILIMCVWHYGTIKKYEFDVQSKVSINWLLGLSPNLGIVRVRGIGLIHTELETGIPAIFSHFVTNLPAFHQVASIRPCPIDGSIVQS

SEQ ID NO: 19463 - protein, 80 aa, Zea mays
  VARIANT 67: note = Ancestral polymorphism is D, Derived polymorphism is N
  VARIANT 25: note = Ancestral polymorphism is A, Derived polymorphism is V
MREDSWDAGFELGVDEANATDADNAKVRAESKEPVDGDLALDVKLVLLDGAIVPDAHYQDEDESKNDWDPGSLPELDECG

SEQ ID NO: 19464 - protein, 327 aa, Zea mays
  VARIANT 200: note = Ancestral polymorphism is S, Derived polymorphism is F
MGEQTHSQTLSSTPPVSASASASASAALPATTRASDPASAASTSRASAAASRASAAASRLKKKEANASPDPNPAKKHRLTFSIPGQPLSAAGEVGVAIRHLRAVDPALAAVIDAHEPPVFQCPHRPFHSLVRSILYQQLAFKAAASVYSRFLALLGGEASVAPDAVLALSPHQLRQIGVSPRKASYLHDLARKYASGILSDASIVNMDDRSLAAMLTMVKGIGAWSVHMFMIFSLARPDVLPSADLGVRKGVQMLYALQDVPRPSQMDRLCERWRPYRSVGAWYMWRLIESKVPQPAPPIPALPSPDGQIMLQQQQQQSVIQMIIPF

SEQ ID NO: 19465 - protein, 382 aa, Zea mays
  VARIANT 104..382: note = Derived polymorphism lacks residues 104 to 382
MSLTSKAQNNSLSNNVFRGLSDTEIQNSWKSRAEQPQPEPKCEKDPFNSFVADFDTHNLNIAVGKASELELEVSNLKEQLKKITLEKAEMTTKHEKLSAICRSQRQEIQELKLTLVEPTPPSNKVSSRTQDSGSQRKEKIQGTVWELEQGMLAIASNSSSASSDAKTWQAFPDTKTQARPKVDHATNGSQNITKNTTSGASPDAWGFGTDNFRTPATTLRATTQINRAAAQRSSSQRFNAGVAKSQSRSCFPRVKVVHTSLQRDNRYYERENLLMVIKNNLLWHHLSMGLGYDDSNSNDSGVSPSSDRANNIEVATVSPVPAVVKKQARFLVASPRSPDVNETMMEELHELCEAREAGTAFIMEHSACGDQARVVTAQEADM

SEQ ID NO: 19466 - protein, 664 aa, Zea mays
  VARIANT 329..664: note = Derived polymorphism lacks residues 329 to 664
  VARIANT 338..664: note = Derived polymorphism lacks residues 338 to 664
MPRRDEVAYATLLSGYAAAADFPGAMALFSRFRASSSQPHDAADPFILSPVLKACASAAASAGLLPLPHAAAAAALHAFAVRSSSLPSVFVSTALADAYAKAGRLDLALQVLDEMPSRNVVSWTTLVASLARAGRRHDALRRFAEMRASGVACDSHACSAALTACADAGLLPRGREVHALCAKLGLDAVPFVANALAALYARCGDVDRALAAVGRMGSHDVAVCTTLIASYVQTGRTEEAIEAFVRMLRDESSNSASPNEYTFSAVIAACPNMDRAYLGEQLHAQAARRGLSHARSVANSLVKLYSRRGHLSAADAIFRESVVKDVVSWSTIISGYTQEGLAEESFALFSEMRHHSSCPRPNEFTLASLFSVCASAASLDTGRQLHALAVAAGLEHHAMVRSALVNMYGKGGSMSDANVVFSNRTKDDVISWTAMIVGHAEHGHSKEAFELFEEMCRIGLKPDHVTFIGVLTACSHAGELELGLRYLNAMNKSYGLEPEKEHYGCVVDLLARAGRIHEAEELIGRIAAEERDGVVWTSLLRACAARGAEETGKIAAERMMEAEPWGSGAHVVMANLYASKGLWCEAAQERHLMKQKGVLKGAGWSSVEVGGDDRGVGVFVSGDRTNPQDSAIYMMLELMYYGAGMVRQIPDQLDLGSEGELTVY

SEQ ID NO: 19467 - protein, 187 aa, Zea mays
  VARIANT 23..187: note = Derived polymorphism lacks residues 23 to 187
  VARIANT 31..187: note = Derived polymorphism lacks residues 31 to 187
  VARIANT 39: note = Ancestral polymorphism is E, Derived polymorphism is D
MSRAFDDYYIKDCGIISAPEVTQRRTDSNDQLIILAIVDVAFVSAEAETQEEEAERGEDDGGLYHPQQMEDDALVQAAEEDDARQAGGGGPVPVPPPGPGAARRTARERAAPTAATAAVCARPVSRRSSPSCSAATPASSRRPSVGGAIDGPAGGAAAENQALFFFDRILSLIKCLLGEARGVYLCS

SEQ ID NO: 19468 - protein, 245 aa, Zea mays
  VARIANT 48: note = Ancestral polymorphism is P, Derived polymorphism is L
MPLRPVHGFASLLVIFACHCHGGGSEQGADVAAERLERDVTSPLATVPVVDPTAAAAATTTQSPATGGSWCVASPSASATALRVALDYACGQGGADCSAIQQGGSCFSPDTVRDHASYAFNSYYQKNPVQTSCDFGGTAALTTADPSTSTCQYPSTSTGASVLNTSTPLTPTNGSPPGPGYGSSPPAGYANSPPLYGNMSPPDYGDNISAAARALPGRKTTATAAVASLATTCLLTAALSLTVSG

SEQ ID NO: 19469 - protein, 291 aa, Zea mays
  VARIANT 255: note = Ancestral polymorphism is R, Derived polymorphism is W
  VARIANT 220: note = Ancestral polymorphism is R, Derived polymorphism is S
  VARIANT 129: note = Ancestral polymorphism is A, Derived polymorphism is T
  VARIANT 124: note = Ancestral polymorphism is T, Derived polymorphism is I
  VARIANT 27: note = Ancestral polymorphism is P, Derived polymorphism is T
MEAPLLLPISTASSCIEIAEGAVPSGPRARSSSSMPSAQSFVLRVVTVVAVACASLFAQHEAGKGFAVSVANDLPRGSAAARRFDLLLVSNGRAERALLRASRAVERALFPDPSFPRRQVRRVTVRMAARNLTGAAVHSAAPGEYVVSLGPGLASSAPAAEAALRRAIARVWLWDGRGAAPARVTESMVDYLASAAAEVEVEVEAPPSAAGCGMSARLLRLLEARREGFVARLNRAMRDRWSDAAVDAALGAPARLACHDQKKGATALTGRGTTTSPRRTPDAARGSSVAT

SEQ ID NO: 19470 - protein, 444 aa, Zea mays
  VARIANT 208: note = Ancestral polymorphism is G, Derived polymorphism is R
  VARIANT 190: note = Ancestral polymorphism is R, Derived polymorphism is C
  VARIANT 165..444: note = Derived polymorphism lacks residues 165 to 444
MHIDFFTTGRVAFNDTPSTVFWTDYVATRWYRAPELCGSFFSKYTPAIDIWSTGCIFAEVLTGKPLFPGKNVVHQLDLMTDLLGTPSMDTISRVRNEKARRYLSSMENKDPVPFSQKFPIADPLALKLLEKLLAFDSKDRPTAEEALRDPYFKGLARVEREPSCQPIRKVEFDFEHKRMSKEEIRELIFREILEYHPQLLNSYINGTGRTTFLYPSAVDQFKKQFSHLEESGGNGPSVPTDRKYASLPRPQLLAFLYLRMYEFVVRMLIPESEVTKARYDHGSSDFKDKIVVLLASFCRTTVVHSNPIPAKEQPLAAVSSKVRPVSDDSCKNPWEKGRGPGNLPRTSLVPQALQAQAGSVRVKGSVMNSGYPPHQQIPRARGYRQTPAKLDNPNPSPAMGGYTLKSQQFYACAGSKCSPGVAAKCEHESTPFPSPSWTKEEPIG

SEQ ID NO: 19471 - protein, 322 aa, Zea mays
  VARIANT 148: note = Ancestral polymorphism is D, Derived polymorphism is E
MHAAIYAAYTCPRLVIDRDVDSIQSVGRMHDAGKAKMGEKEWYFFYQKDRKYPTGLRANRATEAGYWKATGKDKEVYNAAEGVAVLVGMKKTLVFYRGRAPRGDKTNWVMHEYRLEGSGRLPAGLASATGSAAANAAAALKASAYKQDEWVVCRVFHKTTGIKKTTAAPAYQVAMAGAEMDQNQNNFPGIPFPMPMQFPMLPDFSLDPVPPYYPNAAGAGMSMLPMAAGIGGGAGGFQLNGAALFGNPMAAPQPMSFYHQMGAAGTACAGGFDVSAPESRPSSMVSQKDDQANGAEISSMMSVAGPGPATTTTIEMDGVWKY

SEQ ID NO: 19472 - protein, 435 aa, Zea mays
  VARIANT 11..435: note = Derived polymorphism lacks residues 11 to 435
  VARIANT 31: note = Ancestral polymorphism is K, Derived polymorphism is T
MITLVQLLVFLAVPCSISSVTIAVKHAYLEKSISCRSCNLCGKEIIEAILDCADLVKGAKDKHLRVKRLVRIPTKDDMSHFRKKLAAILLSSDINKRKGCPLYKYDKEVDAGCSSDVQILDSPTNPKKRKLPCVSEENEVLMEDDDGPITQADLERWFVHDWDKRTPIKIPTDECTNEFLLSGLSTKDMPVTKADLIDVLCDYIMTIQDDTTLEMTWVRSFNPFKIEISVKDLQNVLRVNLYMTLKCFDMAVRLLAIKESHMSKDEMIKDKNIIWTCASGEWLVLVLMPWKFNGCYALFIIDHGKKHVTFIDFTPTEDWCKHMPYKGFAEAIIMASKKYKIAYNKKRSGWADDIFKWEHTIRSGLPLDLKGVNTSYFVLQAMVMWGSGRRMEFNRDTKILRRNFVIDLLSYEENSCRYAIPPNIQQRLISIAKKD

SEQ ID NO: 19473 - protein, 230 aa, Zea mays
  VARIANT 55..230: note = Derived polymorphism lacks residues 55 to 230
  VARIANT 84..230: note = Derived polymorphism lacks residues 84 to 230
MAEKAVWDNATLKHLIDICKEEILAGNRPQGCFTRNGWKNLEEKFFARSGTKLVKTQLKNKLDNMKKDYTQFMELKNAATGLGWDEANKIVAWWAEHLEVRQVVIVSIYFKLPSVHVTGANASCPGEISSDSAAFKKPKPAGKKRKQMSRATEEKEEKSPFFRMYKNTCLKIESAADKIRSSVEASSAPTPSNHVPTIADAMRLVKECGVQEKTSLMHTTVMLIMKAEFR

SEQ ID NO: 19474 - protein, 246 aa, Zea mays
  VARIANT 48: note = Ancestral polymorphism is D, Derived polymorphism is Y
MQVLRLLAARPGAAATITDDDEGPFFDLDFSSSSVRASSTSSTSASSDDAALTDLDLAISLHRSRSASPSYYDARRLSQLHLFPSHAPPLLLKPGPDVGLQAHSSAGAAASSTTNAALYGRRRSSSAGSGARLSLRQFMECPTTPGGDGEAEREPPPPRAAVRRYLAEISVRLRRSVRPRRLRKSRSAAAPATHRDDSLAEKQDGIASAIAHCKESLHRGLALAPSVSPQSGRAATSRGPLVLSSS

SEQ ID NO: 19475 - protein, 571 aa, Zea mays
  VARIANT 297..571: note = Derived polymorphism lacks residues 297 to 571
MAIRESSQMPELLRLPLPPPATTGSPYSVCLSVPASPSGLHLGVCASVRSVAPAPQPQPAEDQQLLQNQARYHSQPTLTIRTEEPPPLQRVRTVSRSDSARDRRFDHFKTFSGRLERQLSNLRGVVPVDIEPAGADSTSNKIISEEETDDDDEVPSADRYFAALEGPELETLRPTEVSALPEDETWPFLLRFPINAFGMCLGVSSQAMLWKTLQSEPSTAFLHVSPAVNHVLWWVSASLMALVSFIYLFKVVFYFEAVRREFHHPIRVNFFFAPWIACLFLVKGLPHPVWTIHHVVWYILMAPIFLLDLKIYGQWMSGGARRLSKVANPTNHLAVVGNFVGALLGAKMGLREVPIFFFAVGVVHYLVLFVTLYQRLPSNAQLPRELHPVFFLFIAAPSVASVGWARLCGDFNYAAKILYFTSLFLYMSLVVRLNLFRGVRFSLAWWAYTFPMTSVAIATAVYASAVTNVITRALAVGLSVVATVTVAGVLVTTMYRAFVCKDLFPNDVSIAVTQRPKAKFGKILAHIRASGDGVKDLVLAVSRHGGSPGSDTNGTSDPSSPVAHGRGEAEP

SEQ ID NO: 19476 - protein, 96 aa, Zea mays
  VARIANT 85: note = Ancestral polymorphism is C, Derived polymorphism is Y
  VARIANT 79: note = Ancestral polymorphism is R, Derived polymorphism is T
  VARIANT 51: note = Ancestral polymorphism is V, Derived polymorphism is I
  VARIANT 48: note = Ancestral polymorphism is P, Derived polymorphism is L
  VARIANT 47: note = Ancestral polymorphism is V, Derived polymorphism is M
  VARIANT 40: note = Ancestral polymorphism is G, Derived polymorphism is S
  VARIANT 35: note = Ancestral polymorphism is R, Derived polymorphism is C
  VARIANT 15: note = Ancestral polymorphism is G, Derived polymorphism is R
  VARIANT 6..96: note = Derived polymorphism lacks residues 6 to 96
  VARIANT 2: note = Ancestral polymorphism is Q, Derived polymorphism is R
MQMVGWSHDDSVVTGQHREALQYNGMIDAFRKTVRHEGVGALYKGLVLNSVKVVPSIAIAFVLYEVCEGCASSRDGDIRLRKRGYYFCRFRGFLFL

SEQ ID NO: 19477 - protein, 219 aa, Zea mays
  VARIANT 74: note = Ancestral polymorphism is A, Derived polymorphism is D
MRLPSGRLPDVSNRSSQRLGEEEQHGTAAVARKALVLSHPNPAAVQGGGDPIGVQASTVHPSIQFQSAGLCVAACSWRRGCCGTRRQLAMSSSVLRAAADRAIRRQALTLTDAAASRIRQLLSLRQRPFLRLGVKARGCNGLSYTLNYADEKGKFDELVEEKGVKVLIDPKALMHVIGTKMDYVDDPLKSEFVFVNPNSKGECGCGESFMTTGSKGSPS

SEQ ID NO: 19478 - protein, 264 aa, Zea mays
  VARIANT 250..264: note = Derived polymorphism lacks residues 250 to 264
MVKLATAREARLYGPALAARRWEYINAGTYVFAALLLVLAAALSMSVSAARLGLAVGAVALAAVAAVNAHDLAAHLAGVDCRVGLARYDAQLGLVEFLVPAVHAAGCALAAAGLALLASPHSHSQSQQRHAATMLLVAALLWVLGSVLNSCQVYERADGRAQLLQSGVQVPQLLGSLLFLVAAALNRPRSGGEPAWLCLVGSVLWLAAALLNVLKVFAMHQSDALRLEKLRGGAQEWLSRDREGRVPLNWEEAARRRALPTELR

SEQ ID NO: 19479 - protein, 505 aa, Zea mays
  VARIANT 406: note = Ancestral polymorphism is R, Derived polymorphism is W
MVYDGAVKDQDQESAAASTALAASVVAASPEQVVVGSTRVSARPPQDKRLGVRHPLKHRWFRARGKVMVELGGVPPAHAVPEGEEEEEEEEGVSESEVEEELVEVEVEQASSAGTGMRGVEVEVLSAPATGVQEMDVEVGEMEVSPEPAVAVGGTELEPQPDDEDEVSSVTLARGERKQEAAPAPASSAVLAVEAPREKDQDGERVEKEKRDKEREMQKERERVDEVGYMSGGWKSVDGTLNCGYSSFRGKRASMEDFYDIKSSKIDDKQIHLFGIFDGHGGSRAAEYLKEHLFENLMKHPEFMTNTKLAINETYRKTDSEFLDAERNSHRDDGSTASTAVLVGDHLYVANVGDSRAVISKAGKAIALSEDHKPNRSDERKRIESAGGIVMWAGTWRVGGVLAMSRAFGNRLLKQFVIADPEIQEQEINDELEFLIIASDGLWDVVPNEDAVSLVKMEEDPEAAARKLTETAFSRGSGDNITCIVVKFEHDKPGGGGYSPPGDKS

SEQ ID NO: 19480 - protein, 82 aa, Zea mays
  VARIANT 13: note = Ancestral polymorphism is A, Derived polymorphism is V
  VARIANT 16: note = Ancestral polymorphism is L, Derived polymorphism is P
  VARIANT 28: note = Ancestral polymorphism is G, Derived polymorphism is R
  VARIANT 42: note = Ancestral polymorphism is R, Derived polymorphism is Q
  VARIANT 53: note = Ancestral polymorphism is S, Derived polymorphism is L
MISNSFLCFFSAASCLKSFRPNTIVLSGLSGRGKTTIYYQLRDGSSHQGTVTSMEENSNTFVLHSEQERVCKLLEFILFPTY

SEQ ID NO: 19481 - protein, 242 aa, Zea mays
  VARIANT 203: note = Ancestral polymorphism is W, Derived polymorphism is R
MWRRLQTLAPSLRRAAASSSPASARAVPLSTVPVAAFRRTSTLLSSPGDKPAPSKVEDVMPIATGLEREELEAELQGKKRFDMDPAVGPFGTKIKLVLSTSNDTIFHSSMDMALSKKDPPDTSLVTDINIVNYKVFDMCMLKLHYLKLVSNTPAVSQPYMKFVGHALTSMLSTDIASVIESYYNKRIVGCPGAEGEDEHDVVWFWLEKDKPHECLVCSRYFVLKVIGDGGDPDGHDDEDDHH

SEQ ID NO: 19482 - protein, 288 aa, Zea mays
  VARIANT 144: note = Ancestral polymorphism is V, Derived polymorphism is F
  VARIANT 131: note = Ancestral polymorphism is V, Derived polymorphism is A
  VARIANT 88: note = Ancestral polymorphism is R, Derived polymorphism is M
  VARIANT 73: note = Ancestral polymorphism is D, Derived polymorphism is V
  VARIANT 70: note = Ancestral polymorphism is P, Derived polymorphism is S
  VARIANT 53..288: note = Derived polymorphism lacks residues 53 to 288
  VARIANT 41: note = Ancestral polymorphism is R, Derived polymorphism is Q
MTGRPPLYARSPARRQAFASNEHPPPGKRTLPPSLPAMTGRPPPYARSSARRQAFAGDEHPPPALLGPPPLVDPSAGRGVCLMSTSWRDKQRPELVNFVATFLATNMYRLNFMSLSPDFIFNNGGLSVAFAFETDWLPEREAAVFSRVTTLKRQFKYLYVVVVVRSAEQNESFNQSYFKYGMELGCPTFVPVCDPAMGFEKIVRIAHARGGKTFVASFTQFLARVQVLNRELALIACLFSSVCKQKDNIATMRIEREQAVQCMDAFLRVLTSIPGIDSHDANAVSCST

SEQ ID NO: 19483 - protein, 245 aa, Zea mays
  VARIANT 169: note = Ancestral polymorphism is W, Derived polymorphism is R
  VARIANT 165..245: note = Derived polymorphism lacks residues 165 to 245
  VARIANT 145..245: note = Derived polymorphism lacks residues 145 to 245
  VARIANT 29..245: note = Derived polymorphism lacks residues 29 to 245
MLLQRYRATSDFIRNLQLQEDVDKDMTIQDHLTPLHRRCIEQLYDEHGLDMLDALSQKTDTRIALVILESRLNQKIEDLEQAQLSLNKACSNIIANNYYRSLDHRSSSFKQLDKRRMRPKDTNLHIHEDIDRMVRYACKGCPSEQNLMMIWTTLAQPCFSIIGRQLQEWNGTVAPKEACEDCGLSKTFLGNIPDSSLANNLYSPSKRCGYLQIASNKPASIPDACQTEIEDGCALDSQVVLSMLH

SEQ ID NO: 19484 - protein, 140 aa, Zea mays
  VARIANT 6: note = Ancestral polymorphism is G, Derived polymorphism is R
  VARIANT 9: note = Ancestral polymorphism is S, Derived polymorphism is F
  VARIANT 38: note = Ancestral polymorphism is R, Derived polymorphism is C
  VARIANT 42..140: note = Derived polymorphism lacks residues 42 to 140
  VARIANT 48: note = Ancestral polymorphism is R, Derived polymorphism is C
  VARIANT 52..140: note = Derived polymorphism lacks residues 52 to 140
  VARIANT 105: note = Ancestral polymorphism is L, Derived polymorphism is I
  VARIANT 108: note = Ancestral polymorphism is K, Derived polymorphism is E
  VARIANT 124: note = Ancestral polymorphism is T, Derived polymorphism is M
  VARIANT 125: note = Ancestral polymorphism is P, Derived polymorphism is L
  VARIANT 126: note = Ancestral polymorphism is L, Derived polymorphism is P
MHKSKGKFSGVLHKGFKPDKCKTSLRMAVARIKLLRNRKEVQVRQMCREVAQLLEANQDMTARIKILIESDETPANCATVVVNKDLSVYLQLQGDLNADAEREKLRKKKMKFKSYKMHWHKKWTPLGIARRLHRACRRRT

SEQ ID NO: 19485 - protein, 418 aa, Zea mays
  VARIANT 138..418: note = Derived polymorphism lacks residues 138 to 418
  VARIANT 76: note = Ancestral polymorphism is R, Derived polymorphism is W
  VARIANT 72: note = Ancestral polymorphism is F, Derived polymorphism is I
  VARIANT 9..418: note = Derived polymorphism lacks residues 9 to 418
MGAEAAHPQQQPPSSVRPCREAAAPAVLGLQLSALIDHVARVDWSLLDRVPGDRGGSQQDESLAIMSCGCLFEPLRFLVIKSSVAFTEKGPACWLACSALHTSGKVSIVELNHILNEVNTHILPSHNDLTPITTIAGGSVANTIRGLSAGFGISTGIIGACGDDNQGLLFVNNMSFSGVDLTRLRAKKGHTAQCVCLVDASGNRTMRPCLSSAVKIQANEFRKEDFKGSKWLIVRYAQQNMEQIIEAIRIAKQEGLSVSLDLASFEMVRDSRSKLINLLETGNIDLCFANEDEAREVIGGGLESDPEEALAFLGKYCKWAVVTLASKGCMAKHGKQVVQVPAIGESNAVDTTGAGDLFASGFLYGLVKGLPLEECCMVGACSGGSVTRALGGEVRPENWQWMYKQMHARGMLLPELKN

SEQ ID NO: 19486 - protein, 432 aa, Zea mays
  VARIANT 251..432: note = Derived polymorphism lacks residues 251 to 432
  VARIANT 211: note = Ancestral polymorphism is G, Derived polymorphism is R
  VARIANT 180: note = Ancestral polymorphism is D, Derived polymorphism is Y
  VARIANT 117..432: note = Derived polymorphism lacks residues 117 to 432
MVSYDKAFESYKKALTTATSVAGLATSMMMDHTIVVEKKNDGLANNHVYCVVKTYLAMCMNIDIQQRLRVSSMDEDDKMMVSMDEGDKMLDVYQGTEFKWCLVCKDSSKDSLNNGSQNESQLFELTFNKRHKDKAIKAQERTLMIYMTEYDDWSAIDLNHPSTFDTLAMDHKLKQSIIDDLNRFIKRKDYYKKIGKAWKRGYLLYGPPGTGKSSLIATMANQLRFDIYDLELTAVTSNSDLERLLVGMGNRSILVIEDIDCTIELEQREEGEGHDKSNSTEQNRREEKVTMSGLLNFVDGLWPTSGEERIIVFTTNYKERLDPTLLRPGRMDMHIHMGYCTPESFQILANNYHYIEYHDTYPAIEKLIKEMVVTPAEVAEVLMRNDDTDVVLHDLVGFLKSRMKDVNEVKTEHKKENNKMDEKKEDKDNDKD

SEQ ID NO: 19487 - protein, 447 aa, Zea mays
  VARIANT 168..447: note = Derived polymorphism lacks residues 168 to 447
  VARIANT 147: note = Ancestral polymorphism is T, Derived polymorphism is I
  VARIANT 93..447: note = Derived polymorphism lacks residues 93 to 447
  VARIANT 50..447: note = Derived polymorphism lacks residues 50 to 447
MVSYDKAFKSYKKALTTTASVATSMMLVRSVANEVVPPELRELLFSGFGYLRSRASSDHTIVVEKKNDGLTNNHVYCIVKTYLATRMNIDIQQCLRTEFKWCLVCKDNSKDSLNNGGQNESQLFELAFNKRHKDKALKSYLPFILATAKAIKAQERTLMIYMTEYDDWSAIDLNHPSMFDTLSMDHKLKQSIIDDLNMFIKRNDYYKKIGKAWKRGYLLYGPPGTGKSSLIAAMANHLRFDIYDLELTVVTSNSDLRRLLVGMGNRSILVIEDINCTIEMKQREEGEGHGKSNSTEQNRREEKVTLSGLLNFVDGLWSTSGEERIIVFTTNYKEWLDPALLRPRRMDMHIHMGYCTLESFQILANNYHSIEYHDTYLEIEKLIKEMTVTPAEVAEILMRNDDTDVVLHDLIGFLKSRMKGVNEVKIEHKKVNNKMDEKKEDKDNDKD

SEQ ID NO: 19488 - protein, 973 aa, Zea mays
  VARIANT 166..973: note = Derived polymorphism lacks residues 166 to 973
MEWNWKVGVPVKKASTGNQDHDLVVEPRSFTGSTQPSRPDVRPSSSSSSDNARAHNSDSEGLTLPDPLSIGDTWKSLVFGWVNTNNTTLSLLSSNAESALGFLHCSRGAALKPMYHAAPVTSRRPVPPSRRPFLGSKYGGSVFSVALFLSLCRRRQRRSAHPLHHCSHHTGVVQGMSRGVSSGRRTCLELERIILNRHRSGSLGREDALNLFDELLPQARPASVHAFNSVLTVVARADSSSSPRHSAALAVSLFNTMARSGVNMMAANRYIIGILIRCFCTVGRLDLAFAAFALFLKMGWRVQNVTLNQLIKGLCDGKRTDDAMDMVFRRMPELGYTPDVFSYNALIKGLCVEKKSQEALELLLHMTADGGYNCSPNVVSYSTIIDGFFKEGEVDKAYFLFDEMIGQGFPPDVVTYSSLIDGLCKAQAMNKAEAILQHMFDKGVMPNTRTYNIMIRGYCSLGQLEEAVRLLKKMSGSGLQPDVVTYILLIQYYCKIGRCAEARSVFDSMVRKGQKPNSTIYHILLHGYATKGALIDVRDLLDLMIRDGIPFEHRAFNILICAYAKHGAVDKAMTAFTEMRQNGLRPDVVSYSTVIHILCKIGRVEDAVYHFNQMVSEGLSPNIISFTSLIHGLCSIGEWKKVEELAFEMINRGIHPDAIFMNTIMDNLCKEGRVVEAQDFFDMVIHIGVKPNVVSYNTLIDGYCFVGKMDESIKQFDRMVSIGLRPDSWTYNALLNGYFKNGRVEDALALYREMFRKDVKFCAITSNIILHGLFQAGRIVAARELYMKMVDRGTQLRIETYNTVLGGLCENSCVDEALRMFEDLRSKEFELDVWTFNIVINALLKVGRIDEAKSLFSAMVLRGPVPHVITYSLMIKSRIEEGLLEESDDLFLSMEKNGCAADSHMLNVIIRRLLEKGDVRRAGTYLTKIDEKNFSVEASTAALLIPIVSEKKYQKEVKFLPEKYHSFMQPRDD

SEQ ID NO: 19489 - protein, 143 aa, Zea mays
  VARIANT 114..143: note = Derived polymorphism lacks residues 114 to 143
  VARIANT 111..143: note = Derived polymorphism lacks residues 111 to 143
  VARIANT 94: note = Ancestral polymorphism is K, Derived polymorphism is N
  VARIANT 24: note = Ancestral polymorphism is T, Derived polymorphism is S
  VARIANT 13..143: note = Derived polymorphism lacks residues 13 to 143
MASTFIGNSTSIQEMFCHVSEQFSALFRRKAFLHWYTGEGMDEIEFTESESNMNDLVSEYQQYQDAAADEEAKYKDEEAIQDESGVAYEWVVTKKSGYCSKGDIIALFKKQPEQQRVGSAPNLDSVAKESPVSKGTPKRRNTI

SEQ ID NO: 19490 - protein, 217 aa, Zea mays
  VARIANT 167: note = Ancestral polymorphism is R, Derived polymorphism is W
  VARIANT 163: note = Ancestral polymorphism is E, Derived polymorphism is K
  VARIANT 154: note = Ancestral polymorphism is T, Derived polymorphism is M
  VARIANT 151: note = Ancestral polymorphism is G, Derived polymorphism is R
  VARIANT 117: note = Ancestral polymorphism is E, Derived polymorphism is K
  VARIANT 46..217: note = Derived polymorphism lacks residues 46 to 217
MRAASAGSVPTDPHPRWPTAMRKAGAGSADGTKQWVHRRHASHWRQWTKQLNAPLEEVDPEIADIIEHEKGLELIPSKNFTSVSVMQAVGSVMTNKYSKGYPGARYYGGNEFIDMAESLCQKRALEAFRLDPTKWGGFQVCHSLGGGTGSRMGTLLISKIREEYPNRMILTFSVFPSPKVSDTVVEPYNATMSVHQLVENADECMVLDNEALYDICF

SEQ ID NO: 19491 - protein, 376 aa, Zea mays
  VARIANT 79..376: note = Derived polymorphism lacks residues 79 to 376
  VARIANT 93..376: note = Derived polymorphism lacks residues 93 to 376
MASSNQFDLLGDVENDDPAHLLAAAEKKAAAVPKPAPAPAKLPTKPPPPAQPGEPIAIRFRCRVREERNYGAPPRDGPGRGRGGRGGRTGPRRDFGDADAHGFEGGYGGGGGGFGDGGVARGENGEGRQAERGRGPRQPYRGGGRRGGYSDGQAGNEFGRPRRAYERHSGTGRGYGMKREGAGRGNWGTATDEGLEQDTVDAVNPEETTAVVEDEKKPEDAPQSEVEKDKEGAENEEEEKEPEDKEMTLEEYEKVLEEKRKALLSLKAEERKVEIDKELQAMQQLSVKKDGDEVFIKLGSDKDLKKKESAEREERGKKSLSINEFLKPAEGERYYNPSGRGRGRGRGGFRGGYNGGYRGPAAAPAIEDQAQFPALA

SEQ ID NO: 19492 - protein, 580 aa, Zea mays
  VARIANT 487..580: note = Derived polymorphism lacks residues 487 to 580
  VARIANT 537: note = Ancestral polymorphism is L, Derived polymorphism is Q
MATTAAIHLRPLRSVAVSSARSRSLLHLLARPLSSSQSSYAYRPSPTAPAAAAPNHVHHPPHHHQSVPPPGPPPQWSAQGHPPPPPRGYGPPPPQHQHVPPPPPRGYGPPPPPPHGHVPPPPPPRHGHGPPPPGQHVLPPLLPHGHGPPPPGQHMPPPHGHGPPPPGQRVPPPPPPHGHGPPPPGQHLPPPPPPHGHGPPPPHQQAPPPPDPVAGPGELMGLCREGRVKDAVELLSKGARTDLDTFYELAATCSNPKLLEELRKVHDFFLRSPFRGDLRVNNMLLAMYAKCAAMPHARRTFDNMPDRDMDSWHIMIDGYSVNGLGDEALRLFELMKECMAPTSQTYLLVLNACANSEAIEEALLYFDAMSRDHGIEPGVEHYVGIIEVLGKSGHLNEALEFIEKLPFEPNAMVWESLLNLARMNGDIDLEDRAEELLVSLDPSKANPKKLPTPPPKRRLGINMLDGRNKLVEYRLPPKIEKKVVNEQRYVPDTRYVLHDIDQEAKEQALLYHSERLAIAYGLISTPARTPLRIIKNLRICGDCHNAIKIMSRIVGRELIVRDNKRFHHFKDGKCSCGDYW

SEQ ID NO: 19493 - protein, 451 aa, Zea mays
  VARIANT 58..451: note = Derived polymorphism lacks residues 58 to 451
  VARIANT 111..451: note = Derived polymorphism lacks residues 111 to 451
  VARIANT 176: note = Ancestral polymorphism is P, Derived polymorphism is L
  VARIANT 181: note = Ancestral polymorphism is S, Derived polymorphism is F
MPKPATANRRRKRGGGGGEGGAADEQASSKRRPATSVLTSLDVNDAPRPELPLFQLSRPRQQAEQDDEEEEVTGGGGGGGAGSSLSSVVNGHGQSPHQQRRLWVKDRSRAWWEQCSSADYPEADFRSAFRMGRATFAMLCDALGAAVAKEDTALRAAIPVRQRVAVCVWRLATGEPLRLVSKRFGLGISTCHKLVLEVCAAIRGLLMPRFLRWPDDAAAEAFKSRFQAESGIPSVVGAIYTTHIPIIAPKVSVTAYFNRRHTERNHKTSYSITLQGVVDPDGAFTDVCIGWPGSMPDDQVLERSALQQRAAAGMMAGSWVVGGVSFPLTEWVLAPYAQANLTWAQHAFNEKVAEVRRVAVDAFARLKGRWACLQKRTEVKLQDLPVVLGACCVLHNICESRGEGMDPALRCDIDDDETVPENPVRSDGATKARDDIAHNLLHSGRAGTKFF

SEQ ID NO: 19494 - protein, 423 aa, Zea mays
  VARIANT 181: note = Ancestral polymorphism is L, Derived polymorphism is P
MEDLAPGALALFAAVADFIDDSAPAAAGAGMPPPEPESAPGSPCSDCSSVATADFEGFADLASTLVLDDLVSPASASASASSLPASGPRAARSVFALDCVPRWGLHSVCGRRPEMEDAARVLPTFFHVPLWMLAGDAPVDGLDRASFRLPAHFFAVYDGHGGLQVANYCRDRMHEVLAEGLTRAEQAVSDADLSGLDPSTHEHWEKVFVDCFSRVDAEVGGDAATGTKPVAPDTVGSTAVVALVCSSHVIVANCGDSRAVLCRGKQPLPLSVDHKPNREDEYARIEAQGGKVINWNGYRVLGVLAMSRSIGDRYLKPYIIPVPEVTIVARAKDDECLILASDGLWDVMSNEEVCDAARKRILLWHKKNGDDSASAQRSGDSADEAAQAAAEYLSKLALQKGSKDNITVIVVDLKSHRKFKSRT

SEQ ID NO: 19495 - protein, 199 aa, Zea mays
  VARIANT 148..199: note = Derived polymorphism lacks residues 148 to 199
MEGGDSSGAGAGGAVAAAAKWRSDASRAFQYYLDRSTPHATGRWLGTLAAAAIYALRVYMVQGFYIVTYGLGIYLLNLLIGFLSPMVDPELDPSAASEGPALPTRGSDEFKPFIRRLPEFKFWYAITKAFVIAFVMTFFSVFDVPVFWPILLCYWIVLFVLTMKRQIVHMIKYKYVPFSIGKQKYGGKKSAVSPSSSKD

SEQ ID NO: 19496 - protein, 88 aa, Zea mays
  VARIANT 1: note = Ancestral polymorphism is M, Derived polymorphism is I
  VARIANT 26: note = Ancestral polymorphism is P, Derived polymorphism is S
  VARIANT 28: note = Ancestral polymorphism is T, Derived polymorphism is M
  VARIANT 33: note = Ancestral polymorphism is T, Derived polymorphism is I
  VARIANT 40: note = Ancestral polymorphism is R, Derived polymorphism is L
  VARIANT 46: note = Ancestral polymorphism is A, Derived polymorphism is P
  VARIANT 53: note = Ancestral polymorphism is V, Derived polymorphism is M
  VARIANT 58: note = Ancestral polymorphism is G, Derived polymorphism is D
MCKWWRSLAPALLAAALAITVATLRPATEHADTKGQSPLRFGPGGAFKVALFVNLYYGEDTWTDWGPAQDAASWPPSSMPRTQLLKRY

SEQ ID NO: 19497 - protein, 944 aa, Zea mays
  VARIANT 14..944: note = Derived polymorphism lacks residues 14 to 944
MCNYSFCICLFVSQAARLRSANAVCSQLVVSSPFRAPRSDNAAGGMLRNLQVRYRSSYTGSFPHWIRELDSPREASLLKQIYKSDPERVVQIFERHPSLHSNSAALSEYIKALASLDRLEDSPLLKTLQRGFATSAAEEERSTGLAAFGSVGRRTKDGALGTANAPIHMVTAGTGQFKEQLWKTFRSVALTFLVISGIGALLEDRGISKGLGLNEEVRPNMDSKTKFSDVKGVDEAKAELEEIVHYLRDPKRFTCLGGKLPKGVLLVGPPGTGKTMLARAIAGEAGVPFFSCSGSEFEEMFVGVGAKRVRDLFNAAKKCSPCIIFIDEIDAIGGSRNPKDQQYMKMTLNQLLVELDGFKQNGGVIVIAATNFPQSLDKALVRPGRFDRHIVVPNPDVEGRRQILEAHMSKVLRADDVDLMIIARGTPGFSGADLANLVNVAALKAAMDEAKAVTMQDLEYAKDRIMMGSERKSAVISDESRKITAYHEGGHALVAIHTEGAHPVHKATIVPRGVSLGMVIQLPEKDQHSVSRKQMLARLDVCMGGRVAEELIFGESEVTTGSSSDLNYATRLARAMVTKYGMSKRVGLVSYSENSVSGQTSVIDKEVKEILEKAYNNAKAILTTHDKELHMLANALLEHETLSGAQIKKLLPQVDNSNNKQKKAAKVPQKTPAARAKGVAQEAAGKAKGVAGTAAVAQEAATANTEGGAGTAAVPQEAATSVAAKAKGVAGTAAAAQEAATANTEGGAGTAAAPQEAATSVAAKAKGVAGTAAAAQEAATANTEGGAGTAAAPQEAATANTEGGAGTAAAPQEAATSVAAKAKGVAGTAAAAQEAATANTEGGAGTAAAPQEAATANTEGGAGTAAAPQEAATSVAAKAKGVAGTAAAAQEAATANTEGVAGTAAAPQEAATSVAAKAKGVAGTAAVAQEAATANTEGVAGVGS

SEQ ID NO: 19498 - protein, 446 aa, Zea mays
  VARIANT 211: note = Ancestral polymorphism is L, Derived polymorphism is M
MMTLPTSPGAASAVDDDMPMPVRSPKLLRTNSSKKVAAASNLERALLSFKSWEATKPPAVPPSPVVRRIHGARPGRLALSSPTPATERDDGADDTAVLRSPLHDAAATRVQKMFKGHRTRRTLADCAIVIEELWWKLCDSASLDRTSISFFAATAGGGKQETAASRWVRAGKRIAKVGKGLSKDEKAQKLALRHWLEAIDPRHRYGHNLHLYYDMWFQSSSTEPFFYWLDIGGGREIHHPSCPRSKLNAQLVMYLGMAERAAYQVVVADGRLTYLHTGLPVHTTDDSKWIFVLSTTRSLYVGQKRKGQFQHSSFLAGGATSAAGRLVAKDGVLKAIWPYSGHYLPTEENFNEFIAFLRDNNVDLTDVKRCSVDDDECPLSKPAAGAVVAKWTSGAGARIGCVRDYPAELQSRALEQVNLSPRVQHTGAPPLKQQQGRQASHSDGSR

SEQ ID NO: 19499 - protein, 286 aa, Zea mays
  VARIANT 76: note = Ancestral polymorphism is M, Derived polymorphism is I
  VARIANT 57: note = Ancestral polymorphism is Q, Derived polymorphism is H
  VARIANT 9: note = Ancestral polymorphism is R, Derived polymorphism is C
  VARIANT 3: note = Ancestral polymorphism is N, Derived polymorphism is K
MLNDASRNRPYHLAIDATVMDPTFRVIDIGKHFQLQKKKAAVRMKMTVVRKVRMMSQQKLKKKRLQKYQKTLDLRMNLLKTRVIKTVKSLRHAIIFVSQLKTFCNMGKHNFLVAIYLTLKYCLQEIWHSRVIQYWKHLKFEIQKDSFRNVMDMSANLGGFAASLKKKNVWVMNVVPFTESGKLKIIYDRGLMGTTHDWCESFSTYPRTYDLLHAWLLFSEIEKQGCSLEDLLIEMDRILRPYGYAIIRDKVDVVTYIKKLLPALRWDDWTFEMRPKKDALTKIYII

SEQ ID NO: 19500 - protein, 467 aa, Zea mays
  VARIANT 68: note = Ancestral polymorphism is K, Derived polymorphism is M
MASRRLLFAVQLLVLIAAVAGTRWQDFLRLPSESESVGTRWAVLIAGSNGYYNYRHQADVCHAYQVLKKGGLKDENIVVFMYDDIADSPDNPRPGVIINHPSGGDVYAGVPKDYTGKDVNANNFLAALLGNRSAVTGGGSGKVVASGPADHVFVYYSDHGGPGVLGMPSSDDYLYAKDLVDALRKKHAAGGYRSLVFYLEACESGSIFEGLLPPDIAVYATTAANAEESSWGTYCPGDDPGPPPEFDTCLGDLYSVAWMEDSDARRDRRAETLRQQYLAVKDRTSAHGTYSLGSHAMEYGDVQGLGAQSLYTFMGSDDATAASLSGRGRGQPAVSQRDADLVYFWRRYRRAAERTPEKAEARTRLLRAVSRRSRVDSIMELIGGLLFGSEGGPRVLGAVRPAGQPLADDWDCLKSLVRAYERSCGPLGQYGMKHMRGFANICNAGVGEDGMAKVASEACAAVARSDD

SEQ ID NO: 19501 - protein, 489 aa, Zea mays
  VARIANT 171: note = Ancestral polymorphism is S, Derived polymorphism is R
  VARIANT 172: note = Ancestral polymorphism is K, Derived polymorphism is T
MMGEAKENDVYEEELLDYEEDDDKTVDGSAAKPTGEVAKKGYVGIHSSGFRDFLLKPELLRAIQDCGFEHPSEGKLLFIYCCQLTSVFPSVKTARYTFFFGAEHVQHECIPQAILGMDVICQAKSGMGKTAVFVLSSLQQIDPVAGQVAALVLCHTRELAYQICHEFERFSKYLTEVKVAVFYGGVHIRKHKDLLKNECPHIVVGTPGRILALARDKDLSLKNVRHFILDECDKMLESLDMRRDVQEIFKMTPHDKQVMMFSATLSKEIRPVCKKFMQDVMPCSLLQLSFPKSSYFIPIAPVPMEIYVDDEAKLTLHGLVQHYIKLSEAEKNRKLNDLLDALDFNQVVIFVKSVSRAAELNKLLCECNFPSICIHSGMTQEERLTRYKNFKEGHKRILVATDLVGRGIDIERVNIVINYDMPDSADTYLHRVGRAGRFGTKGLAITFVSSASDSDVLNQVQERFEVDIKELPEQIDTSTYSKWSLLILL

SEQ ID NO: 19502 - protein, 297 aa, Zea mays
  VARIANT 192: note = Ancestral polymorphism is A, Derived polymorphism is D
MAASYDREFWNFSDQLRLHNNFSNLSIADPIWSSTTLDPPSSFSDAPGLIGSAKLAFGNATTANADRYNANAAGVASKSMSVGMIDHYLNKNTNNDVVKSYFNKSVGSRPANNNTTTTVKKNSAAHHDKKHKNSGNGAGVDKRFKSLPAAEALPRGEAIGGYIFVCNNDTMEENLKRRLFGLPSRYRDSVRAIRPGLPLFLYNYSTHQLHGIFEAASFGGSNIDPAAWEDKKCPGESRFPAQVRVATRKICSPLEEDAFRPILHHYDGPKFRLELSVPEALSLLDIFAEKIFDRQTA

SEQ ID NO: 19503 - protein, 974 aa, Zea mays
  VARIANT 253..974: note = Derived polymorphism lacks residues 253 to 974
  VARIANT 557..974: note = Derived polymorphism lacks residues 557 to 974
  VARIANT 660: note = Ancestral polymorphism is G, Derived polymorphism is R
  VARIANT 760..974: note = Derived polymorphism lacks residues 760 to 974
  VARIANT 802..974: note = Derived polymorphism lacks residues 802 to 974
MSKDCKEKPSQDSIAIENPNFTSELVWSSADAQAPTGSLFSSEHMAILELTPTPFVPTPSIRVSHQNQEFQSAIGRKFSSATMDREMESDGDNEIDHLTTFEIDNNDGESGEDIEIDETQDAFTINPDVPNLYNKVYSNIPEETHLLSTVADCDYCKAKKFQYEPPRFCCCNGQINLAAFETLPQLKRLWESADADARHFRDNIRFFNSHFSFTSLYCFFDIMTTNMDCGIYTFRAHGMMYHNRKYKLSCPEQYDLLISAEIPDKKKYPQLYKMVIKHMMHGPCGVLNPKCPCTKGRSSCKNHYPRAFSDSTLQGCRDDGCKEMVRGCELDNPYLLHLFNCHINVEACGSIKAVKYLFKYIYKGHDRASVVVRDANKADGDVDEIKQYRDARIFNFDLSQNFPPVMQLQLHLENMHMVSFHERAKVNHVVQRPGADRSMLTAYFEANSLHEETRGILYCDFPEWYTLQQGKLLLNHVTGATSYADLRTIYGNTLPSFHEATERRGLLEADGIIDECLNEAGLYQMPSVVRRLFATILVYCEPNNVAELWQRHLDAMSEDYHRNTQSKTHVQQMVLIDIRNIMQSMGKDKRTFPLPAIIDRYDDSHGTDREIYGEESFEPTGEDVAMKETLNEEQRSTYDKILSVVDTNNGGVFFVDGPGGTRKTYMYKALLAALHSQDKIAVAIATSGVVASILPGGRTAHSRFKIPLTIDDGAVCSFMKQSGTTKLLQKASLIIGDEASMTKRQAIEALENNMRDIMGQTRLPFGGKTVVFGGDFRQVLPIVRKGSRAQIVAASLWSSYLWESMCHLKLVHNREHRVTHGLQNICYTSVVQLRKRTTLVIFVFQVSIDAEIILGQHAGMRIFLPRIPLCPSDDDMFPFQFKRKQFLARLSFAMTVNKAQGQTIPNVGVYLLEPVFSHGQLYVVLSRATSRSKVKILVIPVTNDKKKKKGVENNSTINDATYTKNIVYKEVLTP

SEQ ID NO: 19504 - protein, 246 aa, Zea mays
  VARIANT 7: note = Ancestral polymorphism is P, Derived polymorphism is L
  VARIANT 38: note = Ancestral polymorphism is C, Derived polymorphism is Y
  VARIANT 77..246: note = Derived polymorphism lacks residues 77 to 246
  VARIANT 105..246: note = Derived polymorphism lacks residues 105 to 246
  VARIANT 123..246: note = Derived polymorphism lacks residues 123 to 246
  VARIANT 136..246: note = Derived polymorphism lacks residues 136 to 246
  VARIANT 166..246: note = Derived polymorphism lacks residues 166 to 246
MPPPPLPYLLLLWTHGQAPSDQTRAALNSKQASNSTRCGWWLGLVTAAWVQCVSGNNYTFSNYSHALKTLMGLTQLQLNDLSVAKDIGKAFGLLAGLASDRVPIWLLLAVGSLEGLLGYGAQWMVVSGAVAPLPYWQICVFLCLGGNSTTWMNTAVLVTCIRNFRWSRGPISGLLKGYVGLSTAIFTDTCSVLFANDPASFLVMLAVVPAAVCALAMVFLREGTAAADEEDDGRCFAHTAPSRRDR

SEQ ID NO: 19505 - protein, 790 aa, Zea mays
  VARIANT 216..790: note = Derived polymorphism lacks residues 216 to 790
  VARIANT 348..790: note = Derived polymorphism lacks residues 348 to 790
  VARIANT 366..790: note = Derived polymorphism lacks residues 366 to 790
MASLGDIGLAAGLNVLTAVAFLLAFAFLRLQPINDRVYFPKWYLRGMRDNPIVSGAAVQKFVNLDARSYLKFLNWMPAALKMPQDELINHAGLDSVVYLRIYVTGLKIFVPITVLAFLVLVPVNWTNDTLGRINVVYSPIDKLSISNVPNGSKRVYTLLKRKRCGHIFNTLHVLFRFIAHLGMAYAITFWTCYVLLKEYEIISNMRLRFLASEKRRPDQFTVLVRNIPPDPDESISELVEHFFLVNHPDHYLQHQVVYNANKLADLVEKKKKMRNWLDYYLLKYERNSSLRPTTKTGFLGCFGSKVDAIDYYKSEIEKIGKQEAEERKNVMKDPKSVVPAAFVSFRSRWGAAVCAQTQQTSNPTLWLTEWAPEPRDVYWNNLSIPFVSLTIRRLIVAVAFFFLNFFYVIPITFVQSLANLEGIEKALPFLKPLIDLPFIKSFIQGFLPGIALKIFLIVLPTILMFMSKFEGLISQSSLERRSASKYYIFLFFNVFLGSVIAGSALEQLKTYLHTSANDIPRIIGDSIPMKATFFITYVMVDGWTGIAGEILRLKPLIFFHLKNFFLVKTEKDREEAMDPGSICFDSTEPRIQLYFLLGLVYAAVTPFLLPFILVFFGFAYVVFRHQIINVYNQQYESAAQFWPSVHGRIITALIVSQLLLLGLMSTNDFEQTTPVLLVLPVLTFGFYKYCKNRFEPAFVRNPLQEAMKKDTLERAREPNLDLKAYLANSYLHPVFKGDEGDDRYSVMDDDGWMEEEVIVPTKRHSRRTTPAQSKHEGSDSLSVLESSLQR

SEQ ID NO: 19506 - protein, 153 aa, Zea mays
  VARIANT 3: note = Ancestral polymorphism is R, Derived polymorphism is L
MARLGLLALAVAVLALASSVASQAPGPAPSTDCASALAYVQQGSTQGKPDRECCAGVKAALKSPATVACLCAAVAQNYGMPVNLTRGAGLPAACGEDHAALSKCNKPTASGTAPAVQSPGSSKSSSSAAAAIRSPVSAFAIVVAATLLSHCLL

SEQ ID NO: 19507 - protein, 314 aa, Zea mays
  VARIANT 167..314: note = Derived polymorphism lacks residues 167 to 314
  VARIANT 187: note = Ancestral polymorphism is E, Derived polymorphism is K
MYADAGFAFAFAAAYSPTLTSSQPQPPPPPFDYAFSSEPPLLSMPAMDHDAYLGNLVQPSMVSEYDLGGEGDLFKAPEAIIEEPLLSLDPVAAAFSMMAGNGSAVMDQTIKDAGIGTIQNDPLLSEVLYECEKELMEKSTIEETISELMDVKIPMLQVEEIPSQAEQVLIQNQQLPAMEKEKQSVPECSLQKSVSSGCLNSADWMNGPARPNFLDFQGLDFEAAFGLRRAYSEGDIQNLGANTPRPAANVCVTISDLKTEERKQKLSRYRKKKIKRNFGRKIKYACRKALADSQPRVRGRFAKIEECDLLKPSK

SEQ ID NO: 19508 - protein, 238 aa, Zea mays
  VARIANT 225: note = Ancestral polymorphism is S, Derived polymorphism is F
  VARIANT 215: note = Ancestral polymorphism is A, Derived polymorphism is T
  VARIANT 101..238: note = Derived polymorphism lacks residues 101 to 238
  VARIANT 21: note = Ancestral polymorphism is H, Derived polymorphism is N
MSAASKKLFQAARSLVLSASHRSVLAAEGRTAALATLTNFGRKTLPTAYLSYHKQGSHHAASGWGAIAAAVPAAVYMLQDQEAHAAEMERTFIAIKPDGVQRGLISEIMSRFERKGYKLVAIKLIVPSKEFAEKHYHDLKERPFFSGLCDFLSSGPVLAMVWEGEGVIKYGRKLIGATDPQKSEPGTIRGDLAIVVGRNIIHGSDGPETAKDEIALWFEPKELVSYTSNAEKWIYGVN

SEQ ID NO: 19509 - protein, 532 aa, Zea mays
  VARIANT 4: note = Ancestral polymorphism is G, Derived polymorphism is R
MPPGRSVASVLLHGLLCLQLVALAEIEMEGGSCMHFSVSPPAAPPEDADERRNYFRAMEAKDLFRHQQMIKMMGNGSGTGSGSSRRRQAKESSKLPEVMSATSMFELPMRSALNIAHVGMYLVSVRFGTPALPYNLVLDTANDLTWINCRLRRRKGKHYGRTMSVGAGDDGAAAKEARRKNWYRPAKSSSWRRIRCSQKECALLPYNTCQSPSKAESCSYYQQMQDGTLTMGIYGKEKATVTVSDGRMAKLPGLILGCSVLEAGGSVDAHDGVLSLGNGEMSFAVHAAKRFGQRFSFCLLSANSSRDASSYLTFGPNPAVMGPGTMETDIVYNVDVKPAYGPLVTGIFVGGERLDIPQEIWDAEKVVGGGVILDTSTSVTSLVPEAYAAVTSALDRHLSHLPRVYELDGFEYCYRWTFAGDGVDLAHNVTVPRLTVEMAGGARLEPEAKSVVMPEVVPGVACLAFRKLPRGGPGILGNVLMQEYIWEIDHGKGKMRFRKDKCNTHHLHNSKGGEVYNNNNGNSSSTVVHRVN

SEQ ID NO: 19510 - protein, 227 aa, Zea mays
  VARIANT 192..227: note = Derived polymorphism lacks residues 192 to 227
  VARIANT 45: note = Ancestral polymorphism is G, Derived polymorphism is R
MLLLLGIGCSAAVARAWDLAQEPTPDIPSSSPAGDVVFVFRAGQRQVGNRIRSRICQIRGSKSGGISHAHAVVQAKGKFSSSSSPAAAATKRGTTTSSSRGRGRGKADKKVYSLPGQKFDPPEEREPLRIFYESLSKQIPSSEMAEFWLMEHGMLSPERARKAYERKQKRQQQVRMGTPIKSCAVRKDNKPESSKKPGIMDSKAKRRVDYSDDDDDDFIVKMKRSRG

SEQ ID NO: 19511 - protein, 219 aa, Zea mays
  VARIANT 130: note = Ancestral polymorphism is R, Derived polymorphism is C
  VARIANT 151: note = Ancestral polymorphism is E, Derived polymorphism is D
  VARIANT 163: note = Ancestral polymorphism is T, Derived polymorphism is I
MSHIAVERNRRRQMNEHLKVLRSLTPGLYIKRGDQASIIGGAIEFIKELQQVLESLEARKKRRSSGGGHSFLTGSPSPTPSPRSHLLSSVSTPSPPVMIKELAACCNSAVADVEAKISGSNVLLRTLSRRSSIPGRQAVRLIAVLEGLHLEVLHLNISTMEDTVLHSLVLKIGLECQLSVEDLAYEVQQIFGQDTAEQKPQEENHNQHIIYSSAMAAAI

SEQ ID NO: 19512 - protein, 585 aa, Zea mays
  VARIANT 573: note = Ancestral polymorphism is S, Derived polymorphism is I
MGSTAAVSVSASAIASRGCARSEAARRPGGIRVCGLRSEALTCHSLRISQAPARLMVTRPPPPAAATNGAAAGSCGFDYDLVIIGAGVGGHGAALHAVEEGLKTAIIEGDVVGGTCVNRGCVPSKALLAVSGRMRELHDEHHMKSLGLQVSSPGYDRQAVADHANNLASKIRINLTNSMKALGVDILTGVGTIVGKQKVRYGKAGFPDKEITARNIIIATGSVPFVPKGIEIDGKTVFTSDHALKLESVPDWIAIVGSGYIGLEFSDVYTALGSEVTFVEALDQLMPGFDPEIAKLAQRVLINPRKIDYHTGVFASKITPAKDGKPVLIELIDAKTKEHKETLEVDAALIATGRAPFTKGLGLENINVVTQRGFVPVDERMRVMDAGGNVVPNLYCIGDANGKLMLAHAASAQGISVVEQISGKDHILNHLSIPAACFTHPEISMVGLTEPQAREKADKEGFEVNVVKTSFKANTKALAENEGDGIAKLIYRPDTGEILGVHILGLHAADLIHEASNAIALGTRVQDIKFAVHAHPTLSEVLDELFKAAKLQPRERPDSKPRQPPQPLLKVLSFVTTLFSSPKRD

SEQ ID NO: 19513 - protein, 506 aa, Zea mays
  VARIANT 340..506: note = Derived polymorphism lacks residues 340 to 506
MPREIITIQVGQCGNQIGMEFWKQLCLEHGIGKDGLLEDFATQGGDRKDVFFYQADDQHFIPRSLLIDLEPRVINGIQNSEYRNLYNHENIFVAEHGGGAGNNWASGYHQGEQFVDDIMDMVDREADGSDSLEGFVLCHSIAGGTGSGMGSYLLETLNDRYSKKLVQTYSVFPNQVETSDVVVQPYNSLLTLKRLTLNADCVVVLDNTALNRIAVERLHLSNPTFAQTNSLVSTVMSASTTTLRYPGYMNNDLVGLLASLIPTPRCHFLMTGYTPLTVERQVNMIRKTTVLDVMRRLLQTKNIMVSSYARTKEASQAKYISILNIIQGEVDPTQVHESLQRIRERKLVNFIDWAPASIQVALSRKSPYVQTTHRVKRSLPTFPPSLTFVGFQSFIYFEKMDNAVLNDNVLQVSGLMLANHTSIRHLFSKCLGQYEKLRKKQAFLDNYRKFPMFADNDLSEFDESREIIESLVDEYKACESPDYIKWGMEDPGEANVVAALDSKLVV

SEQ ID NO: 19514 - protein, 350 aa, Zea mays
  VARIANT 8: note = Ancestral polymorphism is G, Derived polymorphism is E
  VARIANT 5: note = Ancestral polymorphism is G, Derived polymorphism is R
MATPGKGGAARFAAALFVLLNLAVAIAGKSYYDVLQVPKGASEDQIKRSYRKLALKYHPDKNPDNEEANKRFAEINNAYEVLTDQEKKKIYDRYGEEGLKQFQGGRGSGGGMNIQDIFSSFFGGGGGGMEEEEQQILKGDEVIVELDASLEDLYMGGSLKVWREKNVIKPAPGKRRCNCRNEVYHRQIGPGMYQQMTEQVCDQCPNVKFVREGEFLTVDIEKGMKDGQEVLFFEEGEPKIDGEPGDLKFRIRTALHSHFKREGNDLHATVTISLLQALVGFEKTIKHLDNHLVEIGTKGITKPKEIRKFKGEGMPLYQSNKKGDLYVTFEVLFPKTLTADQKAKLKDVLV

SEQ ID NO: 19515 - protein, 1018 aa, Zea mays
  VARIANT 149..1018: note = Derived polymorphism lacks residues 149 to 1018
MECNRDEAARAKVLAERKMLDKDFVGAKKLIIKVQQLLKEVEDIDIPKMLTVCDVHCAAGAKVNTEIDWYGILQVPVNADDALIKKQYRKLALLLHPDKNKFGGAEAAFKLVGEANITLTDPSKRYVHDMKRNTFRSVTARPNRQPPKRPAPARSSSTPVNLYNMHQQHQRQASNPTGTQTTFWTICPACGMRYQYYLSILKKALRCQNCLKPFIAHDLKDQAIPSGANQRSAGVWKNAGTPQNSAGPQSNVTGQKGWSATSGVHVNTGSHHANVNTKRKTDGNAGGLKNKMKSAQATRKPSKASSTAGLKRGRRAVFESSESSISETDSDGEVEIPKHGPAENSAGPGQQTRRSSRQKQEVKYNEDSDDDNDDVEDDDNTVEDDFVDSPALKRLRKGGMFHGDHSTKTAKLNEDTAGHNSVNSWGNIKDKKNGGMPCEEKTSNGVEQMKRETMHVGENSDGKEELFHSVSNNGLGLNDDDASDDNKFTFPDPEFFDFDKLRDASQFRANQVWAVYDDQGCMPRFYARITRVKMVPKFMLQFVWLEFNPANKAEEAWSYRGLPVACGHFTHGLSETTSETGMFSRIISLERSKTKNFYEIYPRKGEVWALFKGWDIGWSSDAGIHKKMNHRYEVVQVLSDLTTSTSIIVMPLVKLKGYVSLFVQSGEAAPYVIPQVDTLRFSHCVPHYLTSGTEKEGIPEGSLELDPAALPSNLEEAFPSANPECSSARSQESDSKNAGLSSGNRKGSMNVGQGQHKIAANGRVCTKTTKVENIKHNIDLSEVTDVVDDSICQTEYVCADSEFYDFSVRRSLQRFSPGQIWALYSDIDKFPNYYAFIQKVDLKNDKVQVRWLDVCPQGEVEKRLSQDRTIGIGTFRVGYIHDMMTYTGTDAFSHLVEARPTGRKGEYEILPRLGEIWAVYKNWSAGWTAQDFEKCEYELVEIFGYTDSSIQVQLVRKVDGYKMVFMSYRAGGVKTIRRDEYPKFSHQIPCFHLTHEKGGKLRGYLELDPLSLPEEFLC

SEQ ID NO: 19516 - protein, 343 aa, Zea mays
  VARIANT 273: note = Ancestral polymorphism is P, Derived polymorphism is L
  VARIANT 268..343: note = Derived polymorphism lacks residues 268 to 343
  VARIANT 256: note = Ancestral polymorphism is A, Derived polymorphism is G
  VARIANT 230..343: note = Derived polymorphism lacks residues 230 to 343
  VARIANT 224: note = Ancestral polymorphism is I, Derived polymorphism is M
  VARIANT 211: note = Ancestral polymorphism is H, Derived polymorphism is Y
  VARIANT 204: note = Ancestral polymorphism is R, Derived polymorphism is C
  VARIANT 172: note = Ancestral polymorphism is G, Derived polymorphism is C
  VARIANT 159: note = Ancestral polymorphism is D, Derived polymorphism is Y
  VARIANT 148: note = Ancestral polymorphism is V, Derived polymorphism is F
  VARIANT 144..343: note = Derived polymorphism lacks residues 144 to 343
  VARIANT 130: note = Ancestral polymorphism is Y, Derived polymorphism is C
  VARIANT 121: note = Ancestral polymorphism is R, Derived polymorphism is C
MSRLISSAEVDRFAGGAGSPPSSSSSAQSPVGSTPANCPIIVSLHFPSRSFSCVNLELLQEHVITALSVESYYSLAVSTNEQDNVWTFILTDATFKSAEIQDGKLYLPIVCLYLYVDSLARFQGGSPYIYPLYGLGELPQGFARLSAVYGGTYMLNKPDCKVEFDMEGKVCGVTSEGETAKCKKVVCDPSYLQNKVRKIGRVVCAIAIMSHPIPNTNESHSVQIILPQKQLGRRSDMYVFCCSYTHNVAPRGKFIAFVSVEAETDNPQSELKPGIDLLGSVDEIFYDIYDRYEPVNEPSLDNCFVSTSYDATTHFETTVTDVLNMYTMTTGKVTWTSSFYLLE

SEQ ID NO: 19517 - protein, 698 aa, Zea mays
  VARIANT 128..698: note = Derived polymorphism lacks residues 128 to 698
  VARIANT 132..698: note = Derived polymorphism lacks residues 132 to 698
  VARIANT 170..698: note = Derived polymorphism lacks residues 170 to 698
  VARIANT 279..698: note = Derived polymorphism lacks residues 279 to 698
MSRPNKAPFSGVTEDLKGRAGCYKQDWNHGFRSGLRILAPTLYIFFASAVPVIAFGEQLSKDTDSALTTVETLASTAICGIIHSIIGGQPLLIVGVAEPTIIMYTYIYNFAKNQPNLGEKMFLPWAAWVCIWTAVMLFLMAIFNVAAILNKFTRFAGELFGMLITILFMQEAIKGMVGEFSAPDGSNQSQSTFQFQWLYINGLLGFIFSMGVLYTALASRSARSSLYGTAWQRSLIADYGVPLMVILWTALSYSLPSRIPSGVPRRLFTPLPWEPKSLQHWTVAKDLFSVPTVHIFLAIVPATMVAGLYFFDHSVASQMSQQKEFNLKNPSAYHYDILVLSLTTLICGLLGIPPSNGVLPQSPMHTRSLAVLKRQLLRKKMVQTAKEGMMNNATSSEVYVKMQDVFIKMDHGGDVSTISTKHLHYHMPCSSHYITKALLSVSAHKELKDLKDAIIPEGNGSGTVPEVFDPEKHVDAYLPVRVNEQRVSNLLQSLLIAGCIGVTPLIQKIPTSVLWGYFAYMSIDSLPGNQFWERIQLLFITPQRRYKVLEGAHASFMESVPFNTICTFTLFQLIYLLIVFGMTWIPVAGILFPLLFFFLIIIRQHFIPKYFDPSHLRELDAAEYEELKGFTPDPSVCEDESVRSGDAQPGYASEILEEFTTHRGELKRRNSTFRDGRLLQLNSIKMTRELSRAPSRLT

SEQ ID NO: 19518 - protein, 103 aa, Zea mays; identical to SEQ ID NO: 16770
  VARIANT 3: note = Ancestral polymorphism is E, Derived polymorphism is K
  VARIANT 46..103: note = Derived polymorphism lacks residues 46 to 103
  VARIANT 61: note = Ancestral polymorphism is G, Derived polymorphism is E

SEQ ID NO: 19519 - protein, 176 aa, Zea mays
  VARIANT 140..176: note = Derived polymorphism lacks residues 140 to 176
  VARIANT 143: note = Ancestral polymorphism is K, Derived polymorphism is I
  VARIANT 144: note = Ancestral polymorphism is I, Derived polymorphism is N
  VARIANT 156..176: note = Derived polymorphism lacks residues 156 to 176
MSSSLYLVFEYMEHDLAGLAATPGLKFSEPQVKCYMQQLLCGLDHCHNRGVLHRDIKGANLLLDNNGILKIADFGLATFFNPKQKQHLTSRVVTLWYRPPELLLGATNYGAAVDLWSAGCILAELLSGKPIMPGRTEVEQLHKIFKLCGSPSEEFWANLKLSRATIFKPHIRTADV

SEQ ID NO: 19520 - protein, 261 aa, Zea mays
  VARIANT 191: note = Ancestral polymorphism is M, Derived polymorphism is T
  VARIANT 182: note = Ancestral polymorphism is P, Derived polymorphism is R
  VARIANT 26: note = Ancestral polymorphism is C, Derived polymorphism is Y
MMVRARDAARALLRLAGARAGVHRDYFPPLARATFARAFLDFRKTGNKEAIEKDKARLTDELSRGYFQDFAEIRENAGKIATASKVIIPEVDAVKFPDLDVDSPDGGALHLPLVAPTLQADDGEAGDHKIPGASLVCLSFRASSLKMAESWSLPYLDAFGAAKNMHVYEVSFIDSWVLSLSPMRRAFLKAMRKSNNPRRHVVYAFGDHYDFRKKLQIINLLTGYIYLVDGLGRIRWQGSGSATQEELSSLTACTSILLDEK

SEQ ID NO: 19521 - protein, 1075 aa, Zea mays
  VARIANT 81..1075: note = Derived polymorphism lacks residues 81 to 1075
  VARIANT 726: note = Ancestral polymorphism is T, Derived polymorphism is I
  VARIANT 730..1075: note = Derived polymorphism lacks residues 730 to 1075
  VARIANT 786..1075: note = Derived polymorphism lacks residues 786 to 1075
MAANKGMVAGSHNRNEFVMIRHDGDAPGSAKPTKSANGQVCQICGDSVGVSATGDVFVACNECAFPVCRPCYEYERKEGNQCCPQCKTRYKRQKGSPRVHGDEDEEDVDDLDNEFNYKQGNGKGPEWQLQGDDADLSSSARHEPHHRIPRLTSGQQISGEIPDASPDRHSIRSPTSSYVDPSVPVPVRIVDPSKDLNSYGLNSVDWKERVESWRVKQDKNMMQVTNKYPEARGGDMEGTGSNGEDMQMVDDARLPLSRIVPISSNQLNLYRVVIILRLIILCFFFQYRVSHPVRNAYGLWLVSVICEVWFALSWLLDQFPKWYPINRETYLDRLALRYDREGEPSQLAPIDVFVSTVDPLKEPPLITANTVLSILSVDYPVDKVSCYVSDDGSAMLTFESLSETAEFARKWVPFCKKHNIEPRAPEFYFAQKIDYLKDKIQPSFVKERRAMKREYEEFKVRINALVAKAQKVPEEGWTMADGTAWPGNNPRDHPGMIQVFLGHSGGLDTDGNELPRLVYVSREKRPGFQHHKKAGAMNALIRVSAVLTNGAYLLNVDCDHYFNSSKALREAMCFMMDPALGRKTCYVQFPQRFDGIDLHDRYANRNIVFFDINMKGLDGIQGPVYVGTGCCFNRQALYGYDPVLTEADLEPNIVIKSCCGRRKKKNKSYMDSQSRIMKRTESSAPIFNMEDIEEGIEGYEDERSVLMSQRKLEKRFGQSPIFIASTFMTQGGIPPSTNPASLLKEAIHVISCGYEDKTEWGKEIGWIYGSVTEDILTGFKMHARGWQSIYCMPPRPCFKGSAPINLSDRLNQVLRWALGSVEILLSRHCPIWYGYNGRLKLLERLAYINTIVYPITSIPLIAYCVLPAICLLTNKFIIPEISNYAGMFFILLFASIFATGILELRWSGVGIEDWWRNEQFWVIGGTSAHLFAVFQGLLKVLAGIDTNFTVTSKASDEDGDFAELYVFKWTSLLIPPTTVLVINLVGMVAGISYAINSGYQSWGPLFGKLFFSIWVILHLYPFLKGLMGRQNRTPTIVIVWSILLASIFSLLWVKIDPFISPTQKAAALGQCGVNC

SEQ ID NO: 19522 - protein, 125 aa, Zea mays
  VARIANT 42: note = Ancestral polymorphism is F, Derived polymorphism is I
  VARIANT 30: note = Ancestral polymorphism is N, Derived polymorphism is S
  VARIANT 13: note = Ancestral polymorphism is K, Derived polymorphism is E
MCESMVAVERRLKEIGIPYVQRCVEEGGINVDQIFFHDPDGFMIEICNCDNLPVVPLAGDQQRAPAACRRAPAAVNTVKQQQQGSVVPASSAPVTTAAAQCMPSAATAAQAIRVAEESSSHISCA

SEQ ID NO: 19523 - protein, 184 aa, Zea mays
  VARIANT 89: note = Ancestral polymorphism is K, Derived polymorphism is E
MSGDTAAAVQAGGDAQQAVGRNRIQVSSSKKPLFFYVNLAKRYMQHHDDDVELSALGLGPKSLSNLLAAISTAVTVAEILKNNGLAVEKKVRTSTVDIKNEISTRSIQKAKIEIVLGKTNKFDELMAANDGDGTAGDGVGKNDKFDELMAANDGDGTAGGGNKQRFVIDFPTIFISSPLLDRSS

SEQ ID NO: 19524 - protein, 319 aa, Zea mays
  VARIANT 66..319: note = Derived polymorphism lacks residues 66 to 319
  VARIANT 97: note = Ancestral polymorphism is F, Derived polymorphism is S
  VARIANT 138: note = Ancestral polymorphism is S, Derived polymorphism is L
  VARIANT 196: note = Ancestral polymorphism is V, Derived polymorphism is I
  VARIANT 204: note = Ancestral polymorphism is E, Derived polymorphism is Q
MQWAGLRSQAPVPTAAWTGPRPRTARCPQGRFPTARRALVASAAASDANSSSNSPGKDEEGEEVVRREKEEKAVASLLMRSQKYAMLKQQLAVAAQFEAKAEMKFCNISIGRNLVSSLTCTLGLVLQDYKEAARLRDSLRSFEEKEPVLCLRRLMKKAIEEERFEDAAKYRDELKILAPHSLLKCSSDATTLGIRVQVRSVYIESRSQPLKGQFFFAYRIRITNSSQRPVQLLKRHWIVTDGNGRTENIWGVGVVGEQPVIFPKTGFEYSSACPLSTPNGRMEGDFEMKHIDKAGSSTFNVAIAPFSLSILGDDNDVLL

SEQ ID NO: 19525 - protein, 176 aa, Zea mays
  VARIANT 143: note = Ancestral polymorphism is A, Derived polymorphism is T
  VARIANT 123: note = Ancestral polymorphism is L, Derived polymorphism is P
  VARIANT 122: note = Ancestral polymorphism is M, Derived polymorphism is I
  VARIANT 109..176: note = Derived polymorphism lacks residues 109 to 176
  VARIANT 94..176: note = Derived polymorphism lacks residues 94 to 176
  VARIANT 89..176: note = Derived polymorphism lacks residues 89 to 176
  VARIANT 72: note = Ancestral polymorphism is S, Derived polymorphism is W
  VARIANT 68: note = Ancestral polymorphism is T, Derived polymorphism is I
  VARIANT 66: note = Ancestral polymorphism is R, Derived polymorphism is W
MEVPRLPQGALPSMALSRLSPQSTPRSRAHLPAIKVVTPDEDGRQSPHGGSGPSDSSGAGARKKLRLTNEQSTLLEDTFRAHNILSNAQKQELGRQVDLSARQVEVWFQNTHVQITHMFMLMLTPHSFCPLLINSEENPENHALVELFIWKVTPLLNMIEGLLLCPLTEASRGRER

SEQ ID NO: 19526 - protein, 99 aa, Zea mays
  VARIANT 64: note = Ancestral polymorphism is Y, Derived polymorphism is C
  VARIANT 59..99: note = Derived polymorphism lacks residues 59 to 99
  VARIANT 42: note = Ancestral polymorphism is R, Derived polymorphism is H
MAWRASLSRSVKEIRVLFCQSSPASAPAREFVKKNYGDIKARNPSLPFLVRECSGVQPQLWARYDMGVERCVNLDGLTEAQIDKKLEELAMAGESLKTK

SEQ ID NO: 19527 - protein, 78 aa, Zea mays
  VARIANT 49: note = Ancestral polymorphism is R, Derived polymorphism is C
  VARIANT 47: note = Ancestral polymorphism is R, Derived polymorphism is C
  VARIANT 42: note = Ancestral polymorphism is R, Derived polymorphism is G
  VARIANT 41: note = Ancestral polymorphism is W, Derived polymorphism is C
  VARIANT 40: note = Ancestral polymorphism is R, Derived polymorphism is C
  VARIANT 36: note = Ancestral polymorphism is R, Derived polymorphism is C
  VARIANT 3: note = Ancestral polymorphism is A, Derived polymorphism is T
MIARFMLLHSVSGMDRGALAHILFLFVIRYISLVVRHISRWRPQALRCRTSASLTMEALLAAWTTRVVCTHLTHRFAW

SEQ ID NO: 19528 - protein, 199 aa, Zea mays
  VARIANT 174: note = Ancestral polymorphism is S, Derived polymorphism is L
  VARIANT 150..199: note = Derived polymorphism lacks residues 150 to 199
  VARIANT 139: note = Ancestral polymorphism is L, Derived polymorphism is Q
  VARIANT 132: note = Ancestral polymorphism is G, Derived polymorphism is S
  VARIANT 87: note = Ancestral polymorphism is G, Derived polymorphism is C
  VARIANT 86: note = Ancestral polymorphism is P, Derived polymorphism is Q
  VARIANT 51: note = Ancestral polymorphism is A, Derived polymorphism is V
  VARIANT 22: note = Ancestral polymorphism is V, Derived polymorphism is A
  VARIANT 20: note = Ancestral polymorphism is P, Derived polymorphism is H
  VARIANT 6: note = Ancestral polymorphism is V, Derived polymorphism is M
MWRSTVKLGVMSFAGSAPDHTVLMYSESWPGLPSGVEFNPSDSDLLWHVAAEVGNAIAERHPFINEFIKFVDDVREFICTHPQHIPGVRQDGRASYFFHRSFEPYINENDVNNCWKKIGSHRSIILDGTLTGCKEVFALYADMPSDKRSQETDWRLHQYHLQNTVKTESEIVASKIFLASRNSLCELAEETHIESERDS

SEQ ID NO: 19529 - protein, 214 aa, Zea mays
  VARIANT 176: note = Ancestral polymorphism is S, Derived polymorphism is L
  VARIANT 155: note = Ancestral polymorphism is F, Derived polymorphism is L
  VARIANT 149..214: note = Derived polymorphism lacks residues 149 to 214
  VARIANT 148: note = Ancestral polymorphism is F, Derived polymorphism is L
  VARIANT 144..214: note = Derived polymorphism lacks residues 144 to 214
  VARIANT 126: note = Ancestral polymorphism is P, Derived polymorphism is T
  VARIANT 116: note = Ancestral polymorphism is D, Derived polymorphism is V
  VARIANT 110..214: note = Derived polymorphism lacks residues 110 to 214
  VARIANT 109: note = Ancestral polymorphism is G, Derived polymorphism is E
  VARIANT 102: note = Ancestral polymorphism is K, Derived polymorphism is I
  VARIANT 90: note = Ancestral polymorphism is R, Derived polymorphism is G
MICCWQLLMAEAERRHGSDTVWNGEEPKWRLDQSGLGRSQANRVQDDWVRYAKMTEAIGEQLHIVGDDLVTNPTLIALDMGALIAGAKYRGEFEDRPKAVLKEVTDSDGQTILFIDEIHKVVGAGPKDLVYLTKSFTSTHFNVQIMHFYQFLIFFSCSVHCKEDLPEARHWCGWLSEDLQWLHLKRFGKVDSANKYETLLELYNAELTDRLAVQ

SEQ ID NO: 19530 - protein, 218 aa, Zea mays
  VARIANT 136: note = Ancestral polymorphism is R, Derived polymorphism is G
  VARIANT 127: note = Ancestral polymorphism is R, Derived polymorphism is I
  VARIANT 34: note = Ancestral polymorphism is R, Derived polymorphism is S
MKDAIVKKLKDQLFMARAHYPSIAKLKQHEAFTSELKQNIQEHERMLSDTITDADLPPFFAKKLEKMEHTIVRAKSSEVGCSNVERKLRQLLDITENEAYFHTRQSAFLYHLGVQTMPKTHHCLNMRLTVEYFKSGSSHVDQLNDQKLESPALHHYVIFSRNVLAASTTINSTVMNSQMPAATRPEAGELLVLDLSFNAFEGAVPSALANLNRLILDD

SEQ ID NO: 19531 - protein, 355 aa, Zea mays
  VARIANT 338: note = Ancestral polymorphism is R, Derived polymorphism is W
  VARIANT 337: note = Ancestral polymorphism is R, Derived polymorphism is C
  VARIANT 310..355: note = Derived polymorphism lacks residues 310 to 355
  VARIANT 304: note = Ancestral polymorphism is T, Derived polymorphism is M
  VARIANT 284..355: note = Derived polymorphism lacks residues 284 to 355
  VARIANT 92..355: note = Derived polymorphism lacks residues 92 to 355
MEEEVESSSAVALLLVLVAPVVVPSMALLVRGRWRRAASRREEMGSSPPKKYEVVEQIDPERAMERWTPRWWNRSTGCLQLRLPRTPQGRAQEVTISPLMLLVYSSCSDFSMGAPILDPSLSVACPCRGTGAGEGIIIDIMTLESGLREDTHPVGAELRESKLMNKYNELKEAGKLDAFMERRRSKNASKDHRYMPYRWNGDDSEDLDLSKEDLVKLLLEKDRSLKSKDKEFKDMKDKVLQQAWPCHNKRESENTKKRRNSVDVPQRLLSCASVRRGEDGIFGRHPGTTTMGGAKWKEEEMVKTLRPSVWLTEDFPLSVDKFLPLLDILASHVCAVRWLRVLLTTKFPQGTFPVK

SEQ ID NO: 19532 - protein, 531 aa, Zea mays
  VARIANT 132: note = Ancestral polymorphism is N, Derived polymorphism is Y
  VARIANT 391..531: note = Derived polymorphism lacks residues 391 to 531
MKPRRFGYGYGYGYGRVRRAAALLLLLLLCLCLSSLFLLLLHGSSTPLEPAAAAAAAEARVAEAQAEVEEAPLPPGNSKVAFLFIARNRLPLELVWDAFFRGDKEGRFSILVHSRPGFVLTRATTRSRFFYNRQVNDSIQVDWGEASMITAERILLSHALKDPLNDRFVFVSDSCVPLYNFSYTYDYIMSSSTSFVDRYHESISKYCGPSAPFRGGGAPFGIDVPFGPPGPDMLPTFVNWSTYGAVTPIQDQGDCGSCWAFGVTGLIEAAHFIRNKELIKLSEQHLIDGNNLRNFGCKHGSCSEALDYIMRNGGIINAESYPYKEAQEPVRSITVHSNSLLFADTKAGRYNPRMDPVIPVENWRKGSQWAVLIKKHAEVVVDDEVVLPEFQKHCRRRPLPEFWRDWDRPIPAEAWKAHNCIPDEHYVQTLLAQSGLEEELTRRSVTHSAWDLSASKDRERRGWHPVTYKVSDATTRLIKSIKDIDNIYYETENRREWCTSNGKPAPCFLFARKFTRGAGLKLLDSSLIASK

SEQ ID NO: 19533 - protein, 235 aa, Zea mays
  VARIANT 8: note = Ancestral polymorphism is P, Derived polymorphism is S
  VARIANT 14: note = Ancestral polymorphism is V, Derived polymorphism is M
  VARIANT 19..235: note = Derived polymorphism lacks residues 19 to 235
  VARIANT 42: note = Ancestral polymorphism is A, Derived polymorphism is T
  VARIANT 44: note = Ancestral polymorphism is E, Derived polymorphism is V
  VARIANT 63: note = Ancestral polymorphism is A, Derived polymorphism is S
  VARIANT 64: note = Ancestral polymorphism is F, Derived polymorphism is S
  VARIANT 73: note = Ancestral polymorphism is C, Derived polymorphism is Y
  VARIANT 74: note = Ancestral polymorphism is A, Derived polymorphism is T
  VARIANT 75: note = Ancestral polymorphism is R, Derived polymorphism is H
  VARIANT 82: note = Ancestral polymorphism is E, Derived polymorphism is D
  VARIANT 94: note = Ancestral polymorphism is P, Derived polymorphism is H
  VARIANT 138..235: note = Derived polymorphism lacks residues 138 to 235
  VARIANT 143: note = Ancestral polymorphism is T, Derived polymorphism is M
  VARIANT 214: note = Ancestral polymorphism is R, Derived polymorphism is Q
  VARIANT 220: note = Ancestral polymorphism is R, Derived polymorphism is C
MRLPSDVSHGHFAVYVGEWWRRFVVHIALLDRPEFRSLLRRAEEEFGFTGAGGALVLPYEEVAFRSLTSALACARLDDDLVELLWHNGSVVAQPQAHHRPAPPSDRDRPGTSGLTAEETAAWFLNTLDDPLEKDLYTQLWYNTIADAAPQHEGTFPGPTSHPSSPPPPVGSSGVESSWAGDICSTFCGSNQVPRTPTGIRGKDAALQSERRRDRIKEKMRALQELIPHCNKVQVP

SEQ ID NO: 19534 - protein, 1120 aa, Zea mays
  VARIANT 60..1120: note = Derived polymorphism lacks residues 60 to 1120
MSQTTYMAPVGTLGFSLPLIILLASLSALLATTPNDDMEALLCLKHHLSASSDPTGTLPSWKNDSTQFCSWSGVTCSKRHSSRVVALDLESLDLHGQIPPCIGNLTFLTRIHMPNNQLQGQIPAELGQLNRLRYINLSSNNFISGEIPETVSSCLALQAIDLSRNSLSGSIPEGLGSLLGNLSDLRLSGNHLTGSIPASLGSSSSLVSVVLNNNSLTGPIPSLLANSSSLQRLGLRNNRLSGLIPQSLFNSTSLEMLVLAGNSFAGPIPAVSNTVVDSPPPPLQYLILDSNDLTGPLPSTLGNLTSLLWLTLGGNGFHGSIPTSLGALVNLQVLDMTNNALSGTVPASIYNMSALTHLGMGMNNLTGEIPANVGYSLPRIVNLIMARNKFTGQIPVSLTKATNLQIINLWDNALTGTVPLFGALPNLVELDLTKNQLEAGRDWSFLTSLTNCTQLVTLYLDRNTLGGVLPKSIGDLPSGLEVLFLSANGISGTIPNEIGRLKNLKLLYLDRNLLAGSIPYSLGHLPNMFALNLAQNKLSGQIPASLGNLSQLSELYLQENHLSGPIPGALGRCKNLDKLNLSCNSFGGGIPEELFTLSSLSNELDLSHNQLSGEIPLEIGSFVNLGLLNISNNMLAGRIPSTLGQCVHLESLHMEGNLLDGRIPQSLQGLRGLVEMDMSRNNLSGEIPEFFETFSSMKLLNLSFNDLEGPVPTGGIFQDARDVFVQGNKDLCSSTHLLQLPLCTTDTTSKRHRHTSSYVLKLVGFTALSLVLLLCFAVVLLKKRKKVQQVDHPSSMDLKKFTYAGLVKATNSFSSDNLVGSGKCGLVYKGRFWDEEHVVAIKVFKLDQLGAPNSFLAECEALRNTRHRNLVKVITACSTIDSEGHDFKAVILEYMSNGSLENWLYPKLNRYGIRKPLSLGSRIEIAADIACALDYLHNHCVPAIVHCDLKPSNVLLDDAMVAHLGDFGLAKLLHTCSYSITHSSSTSLIGPRGSIGYIAPEYGFGSKLSTQGDVYSYGITVLEMLTGKRPTDEMFSKGLTLHKFVKEAFPQKIHEILDPSIFPVTRDGDNHTTDEITRSIMNLLKIGISCSADAPTDRPTIDDVYAKVITIKETFLDLCH

SEQ ID NO: 19535 - protein, 229 aa, Zea mays
  VARIANT 110: note = Ancestral polymorphism is R, Derived polymorphism is C
  VARIANT 116: note = Ancestral polymorphism is V, Derived polymorphism is D
MLVFGCVLASSVFFCHVFPENKFGADPNSDRACTLCLWKCVSRWRSIATLEKPLICLLTILFTAPSMGNFLFCLMGDMSYTLHHHDGCWKAPLHCSELTDEQMIAFIVHRVRASAVFLAAFPSLLRKYVKALLHTWARGRGAMPLVSFMFLRDLCIQVGSNCLDTCLKGIYKAYLVNCKLSKSISRSKQQHIQILGNCARELYSLDPQCVSACFCFHPSTGGYPKRSSY

SEQ ID NO: 19536 - protein, 67 aa, Zea mays
  VARIANT 27..67: note = Derived polymorphism lacks residues 27 to 67
MVMRSLPEKPSKTLLARERARVEFQDWEKKEEEFHFDQSKVRSEIRLREGRTKPIDVLLKNHLLILI

SEQ ID NO: 19537 - protein, 62 aa, Zea mays
  VARIANT 34: note = Ancestral polymorphism is Q, Derived polymorphism is H
  VARIANT 30: note = Ancestral polymorphism is R, Derived polymorphism is S
  VARIANT 28: note = Ancestral polymorphism is A, Derived polymorphism is T
  VARIANT 9: note = Ancestral polymorphism is R, Derived polymorphism is H
  VARIANT 8: note = Ancestral polymorphism is E, Derived polymorphism is K
  VARIANT 4: note = Ancestral polymorphism is R, Derived polymorphism is C
  VARIANT 1: note = Ancestral polymorphism is M, Derived polymorphism is L
MAARAIAEREDAVARLEGDKAGLEKLLAEREKEQAQEIESLRRFKLEEEIIDAEYTLTCDRI

SEQ ID NO: 19538 - protein, 666 aa, Zea mays
  VARIANT 453..666: note = Derived polymorphism lacks residues 453 to 666
  VARIANT 599: note = Ancestral polymorphism is F, Derived polymorphism is S
MSTAATACATRAAARPPLNTAPARRAPPSAVRPPSATPARRAAGCCFCAAASSASSPSTWDWTRWSRHFDEVDQAESYASLLQFQLEEAVENEDFAEAAKLKRDIIEATGNDAVAHVMAELKNAIEEQRYQDASRLTRLAGTSLVGWWVGYAKDTDDSIGRIVRISPGVGRYVAKSYNPRQLVTASSGTPLFEIFLVKEDDETYTMKVVHMRPTKGTSGAPSISSTITESPAKVENENSSESSAISDSVTEEANTDTTVRGNEDAEEKAQDVGSSKDSSVEGLKSVLNFFKSRIPEFKVQVINVDVAEETELAANSSEELVQDDVKSTPESSLEEPATEELEQEEDVPEENTDEESKSTEVKLFISGVVHNKEDAGAKSYVRVPAEINNMEKDSFELYIPGEGSDRDLAETKAAKQKVADMAAKLASELMPSDVAKALWGTAKSSSKINKEVQELLRLTLSKARVKLTENTIFKRIIMDTNSTDPFNGLYVGAFSPYGPEIVQLRRKFGHWNSTDDVEFFEYVEAVKLTGDLSVPAGQITFRAKIGKGKRLENRGAYPEEFGVVISSCRSDCLKDAKMLVFYVLTSESHMQFSHSNCTFVFQIASYKGQGRIAQPGFKNPRWVDGELLVLNGKSTIPHLGGAELGFLYSVPEQSFLVLFDRLNLPE

SEQ ID NO: 19539 - protein, 638 aa, Zea mays
  VARIANT 472..638: note = Derived polymorphism lacks residues 472 to 638
MIASQPRRVRPLAAVSLVLFLLLLYSRSGCGPPRAARLLGSGLHPVHRRFLSDADPGGPTSSAANPSGAATLNGEQAEDPAAACADIARHEGFGTQCEFLRAHPQCSSSGLVDYLGFFYCRCERFRLLGYAVLGVCLAALFYMLGNTAADYFCCSLEKMSALLRLPPTVAGVTLLPFGNGAPDVFASIAAFMGSGAGDVGLNSVLGGAVFVTCVVVGAVSLCVAEKNVQIDRRCFVRDVGFFLVTLLTLSIVLIVGKVTVWGAMMFVSIYAVYAFVVAANEVLRKHARKLKFDVVTPLLPVRASIFEQGAEEDESVYSSLLEEDADGDVAQMNTSLPQWMWASHVAIYSNHGNRVGSPDSPRPLWGWSEGEVDNSMFNISKLFLFMKLPLTIPRRLTIPIVEEDRWSKECAVASSCLAPVLLAFLWSSQDTVSTKVSIAAYVMAVILGITLAALAFLFTSNERPPRRFLFPWVFGGFVMSIIWFYIIANELVELLVASGVILGINPSILGLTVLAWGNSMGDLMSNVALAMNGGDGVQIAMSGCYAGPMFNTLAGLGISMLLGAWSTAPNSYVLPQDHSLIYTMSFLVAGLIWALVMLPRGDMRPNKILGVGLISLYSVFLFIRVSNAVGILPLPGLS

SEQ ID NO: 19540 - protein, 572 aa, Zea mays
  VARIANT 426: note = Ancestral polymorphism is L, Derived polymorphism is H
  VARIANT 411: note = Ancestral polymorphism is L, Derived polymorphism is P
  VARIANT 235: note = Ancestral polymorphism is E, Derived polymorphism is G
  VARIANT 187..572: note = Derived polymorphism lacks residues 187 to 572
MPHHHHTNPSHPPAARKLLSWRRVVAACAVVAALALLLAAAPATEDPSRWRSYLLGPLPGDTRKETVAAAVVAGSFAGPAASTSSPSEAPLSSFGEINLSARIAPAAAPSMFLAPSSSPAEIFYDGSMEEPEHPDIKLLMTLQRNPPKESSPFLKEEPIFSGLPTMSSDVNGENVMDTKSVLPVTPEQAPLWSTAADEELIYAKKEITNAPLTSDDPDLYAPLFRNVSIFKRSYELMERLLKVFIYHDGAKPIFHSPELKGIYASEGWFMKLMETNQNFVVRDPNTAHLFYLPYSSRQLEHNLYVPGSNTIEPLSIFVKNYIDLISAKYPYWNRTKGADHFFVACHDWGPYTTKLHDELRKNTIKALCNADLSEGFFIRGKDVSLPETFLRSPRRPLRDIGGRPAAQRTILAFFAGQMHGRVRPVLLKYWGNKDDDMRIYSRLPHRITRKRNYVQHMKSSKYCICPMGYEVNSPRIVEAIYYECVPVIIADHFVLPFDAALNWSTFSVVVPESDVPKLKQILLAIPESRYITLQANVKRVQKHFMWHPNPVKYDIFHMILHSVWFSRVNQIR

SEQ ID NO: 19541 - protein, 318 aa, Zea mays
  VARIANT 58..318: note = Derived polymorphism lacks residues 58 to 318
  VARIANT 69..318: note = Derived polymorphism lacks residues 69 to 318
  VARIANT 163..318: note = Derived polymorphism lacks residues 163 to 318
  VARIANT 200..318: note = Derived polymorphism lacks residues 200 to 318
  VARIANT 230..318: note = Derived polymorphism lacks residues 230 to 318
  VARIANT 238..318: note = Derived polymorphism lacks residues 238 to 318
  VARIANT 276..318: note = Derived polymorphism lacks residues 276 to 318
MAAVALLLSPRSVSFPPHPSLAPGFTKRPPPYLLGGHGAGARFRAVEDGPGAGLPPEQATIYDGAYGPWTLEDSDVCEVVFGKNGGLEQIGSRKGYVDMSTVDATTLTKISEYGRILDIDLKIPPRPPRYAVVEFEDPHDADDAIYGRDEYNFDGYRLLVCISCFHLMVLLEERIDLCFLAFAENAFSTHVELAHSGRGQSYSYDRSSSYISACRGGVSRRSDFHGWTCWKELITTFQDHMRRAGDVCFSDVYREVGEWMWASKSYVPRLSTNRGGGGWTPRSIMLDLINLAVKSQAKSIDVAAVDLPFQLCLMFLVL

SEQ ID NO: 19542 - protein, 219 aa, Zea mays
  VARIANT 118: note = Ancestral polymorphism is E, Derived polymorphism is K
MAAAARRSCSSPAGAGAVAGAAMNIITPCAACKLLRRRCAQECPFSPYFSPLEPHKFAAVHRVFGASNVSKMLLEVHESQRADTANSLVYEANLRLRDPVYGCMGAILTLQQQVQALEAELATVRAEIVRHSCRPAAAAVATVLPSSHASHLLAASAAASRGLHAGSSKSVGARAATLAAAAAVGPAASSSSSSAVYAAAASSSTDYSSVTNENVPYFG

SEQ ID NO: 19543 - protein, 341 aa, Zea mays
  VARIANT 283..341: note = Derived polymorphism lacks residues 283 to 341
  VARIANT 276..341: note = Derived polymorphism lacks residues 276 to 341
  VARIANT 274: note = Ancestral polymorphism is A, Derived polymorphism is D
  VARIANT 272: note = Ancestral polymorphism is A, Derived polymorphism is V
  VARIANT 268: note = Ancestral polymorphism is D, Derived polymorphism is Y
  VARIANT 234: note = Ancestral polymorphism is A, Derived polymorphism is T
  VARIANT 216: note = Ancestral polymorphism is T, Derived polymorphism is I
  VARIANT 215: note = Ancestral polymorphism is S, Derived polymorphism is R
  VARIANT 211: note = Ancestral polymorphism is I, Derived polymorphism is N
  VARIANT 204: note = Ancestral polymorphism is V, Derived polymorphism is L
  VARIANT 197: note = Ancestral polymorphism is R, Derived polymorphism is C
  VARIANT 194: note = Ancestral polymorphism is D, Derived polymorphism is N
  VARIANT 192: note = Ancestral polymorphism is M, Derived polymorphism is I
  VARIANT 46: note = Ancestral polymorphism is G, Derived polymorphism is D
MSTSAPSKPPSPVQQPLLPSGQSAALPATLAATPISSGAMVLVPPGAPAAAIPPTLTLAQIVASPTDLSHAMRDVQLTLNAMLTGQLAYAAIHHSRRYHPYLRRHPLHLCHPPRNYLRRCPQYLGNQFPIRTACQSTQPHRPSHHHKPSPPSSRSDFLRHLPQSHHGRRARRQFLVMPFGLSNAPATFQALMNDVLRPCLRRFVLVFFDDILIYSTSWAEHLQHVSIVLESLRAHHLHLKRSKCSFGATSVAYLGHVILEGGVAMDADKVAAVAFWPLPQSARGLRGFLGLAGYYRKFIKDFGLIIAPLTRLLWRDAFAWDDDAQAAFNALKHALTTGPVL

SEQ ID NO: 19544 - protein, 172 aa, Zea mays
  VARIANT 64: note = Ancestral polymorphism is G, Derived polymorphism is R
  VARIANT 84: note = Ancestral polymorphism is P, Derived polymorphism is S
  VARIANT 90: note = Ancestral polymorphism is G, Derived polymorphism is D
  VARIANT 91..172: note = Derived polymorphism lacks residues 91 to 172
  VARIANT 93..172: note = Derived polymorphism lacks residues 93 to 172
MEHKQAREAVDLAAGGCGEEGSPQADAKRLRPQDLLDMLEDDTDTAAVGDLASVMRRASDDELGLPPSGAASSSEEEAGRAGAPKLALDGQIWAFEGGGILSFLAGGGMDWAAVSGSPSWGAAATDPGSTMLSFAGLSSSATDAEVRLQDFVAGRVEVEATAASITHGRGRR

SEQ ID NO: 19545 - protein, 86 aa, Zea mays
  VARIANT 43: note = Ancestral polymorphism is C, Derived polymorphism is S
  VARIANT 69: note = Ancestral polymorphism is S, Derived polymorphism is A
MGRGKSSFFASLFGCKKQVSAGGRQEESAAARPPLTHRAYQGCGGAMTTIDDYYGQNWYADRDINRRASDYIERVHRVILASEQGE

SEQ ID NO: 19546 - protein, 181 aa, Zea mays
  VARIANT 97: note = Ancestral polymorphism is R, Derived polymorphism is C
  VARIANT 87..181: note = Derived polymorphism lacks residues 87 to 181
  VARIANT 72..181: note = Derived polymorphism lacks residues 72 to 181
  VARIANT 63: note = Ancestral polymorphism is S, Derived polymorphism is P
  VARIANT 44: note = Ancestral polymorphism is A, Derived polymorphism is E
  VARIANT 32: note = Ancestral polymorphism is D, Derived polymorphism is N
  VARIANT 29: note = Ancestral polymorphism is A, Derived polymorphism is V
MSISMRLAIPAPAVTAAAPTRLRVRAAAAGNDDSLPVARVAVQAETGALRVLLVAKGAAIHKSFLVPFFALQAPCCIISWIKGDYGQWTAFLALLVRLFFFIPGELELPLSTMLLVSVAPYQFMDLRGTQGGVVLSLVIAAYLAFQHFTRVGGPGKAFEQGSIVATLAIICIMIVPLMLLF

SEQ ID NO: 19547 - protein, 127 aa, Zea mays
  VARIANT 102: note = Ancestral polymorphism is C, Derived polymorphism is S
  VARIANT 91: note = Ancestral polymorphism is E, Derived polymorphism is K
  VARIANT 67: note = Ancestral polymorphism is V, Derived polymorphism is D
  VARIANT 55..127: note = Derived polymorphism lacks residues 55 to 127
  VARIANT 26: note = Ancestral polymorphism is R, Derived polymorphism is C
MALQDRVMDETKEKKNVVEAYVYDMRNKLYDRYNDFVTPEEKEGLIGKLREVEDWLYEDGEDETKGVYISKLEDLNKIGDPIEARYKESTERGSSVDQLVYCINSFREAALSSDQKFGHIDISEKQK

SEQ ID NO: 19548 - protein, 122 aa, Zea mays
  VARIANT 39: note = Ancestral polymorphism is A, Derived polymorphism is D
MASSSSSFHNSSLPNLFSSPSQQKKHQITVVRLLTGMFADKKNTSSDSNKPAFQFGGNNVIFGGKKDAPVDSSKPFQFGPNNGIFGDKKDTPSDSNKPFHFGANKGIFGDKKTTSGDSSNPI

SEQ ID NO: 19549 - protein, 130 aa, Zea mays
  VARIANT 10: note = Ancestral polymorphism is T, Derived polymorphism is I
  VARIANT 19: note = Ancestral polymorphism is P, Derived polymorphism is H
  VARIANT 20: note = Ancestral polymorphism is A, Derived polymorphism is D
  VARIANT 24: note = Ancestral polymorphism is F, Derived polymorphism is C
  VARIANT 28: note = Ancestral polymorphism is A, Derived polymorphism is G
  VARIANT 35: note = Ancestral polymorphism is E, Derived polymorphism is G
  VARIANT 52: note = Ancestral polymorphism is Y, Derived polymorphism is H
  VARIANT 68: note = Ancestral polymorphism is T, Derived polymorphism is I
  VARIANT 77: note = Ancestral polymorphism is A, Derived polymorphism is D
  VARIANT 81: note = Ancestral polymorphism is F, Derived polymorphism is L
  VARIANT 86: note = Ancestral polymorphism is A, Derived polymorphism is T
  VARIANT 94: note = Ancestral polymorphism is R, Derived polymorphism is S
  VARIANT 100: note = Ancestral polymorphism is N, Derived polymorphism is I
  VARIANT 110: note = Ancestral polymorphism is L, Derived polymorphism is H
MTIVVMLLNTDVDVSPIVPAFKSCFDNALNATVSELNFKTIVDGLGVVLYQYPFNVPAYYALILRSLTVLEDLALYADPDFKVLAASYPYFAKRLLTDPNPYLRDALLELVFKDGKFRQVLAHLSSPSLV

SEQ ID NO: 19550 - protein, 130 aa, Zea mays
  VARIANT 24: note = Ancestral polymorphism is A, Derived polymorphism is T
  VARIANT 30: note = Ancestral polymorphism is A, Derived polymorphism is D
MDVVAAQTKAIAEKISDWTNIVLAYEPVWAIGTGKVSTPTQAQEVHDGLRKWLHSNVSPTVVELTRIIYGGSVNGANCKELAAQPDVDGFLVGGASLKVNRDRYNDGSIKHSLLKQSSLDLLTIETPGLK

SEQ ID NO: 19551 - protein, 573 aa, Zea mays
  VARIANT 208..573: note = Derived polymorphism lacks residues 208 to 573
  VARIANT 266: note = Ancestral polymorphism is C, Derived polymorphism is Y
  VARIANT 301..573: note = Derived polymorphism lacks residues 301 to 573
MAAQPALKASFRGELNAVSFLDSSRGPFGQHKVDFTFQRKGKRAISLRRTCCSMQQAPPPAWPGRAVAEPGRRSLDGPKPISIVGSTGSIGTQIIRSSSMLLYSAALIFNLLHNAKTLDIVAENPDKFRVVALSAGSNVTLLADQVKTFKPKLVAVRNETLVDELKEALADCEEKPEIIPGEQGVIEVARHPDAITVVTGIVGCAGLKPTVAAIEAGKDIALANKETLIAGGPFVLPLAHKHKVKILPADSEHSAIFQVSHKMFTCSAANFFIIIHVWLHPRLVRRSTSSHYSNCIRWCFQASPSICVICTSVNMRIHLISNAHDRDWPVDRLKDVKVADALKHPNWNMGKKITVDSATLFNKGLEVIEAHYLFGAEYDDIEIVIHPQSIIHSMVETQDSSVLAQLGWPDMRIPILYTLSWPDRIYCSEVTWPRLNLCKLGSLTFKAPDNVKYPSMDLAYAAGRAGGTMTGVLSAANEKAVELFIDEKKEKEKENFGPTKVHGHLLMRMHVLKDIIPKISYLDIFKVVELTCDAHRNELVASPSLEEIIHYDLWARRHAASLQPASGLSPVPA

SEQ ID NO: 19552 - protein, 1443 aa, Zea mays
  VARIANT 488..1443: note = Derived polymorphism lacks residues 488 to 1443
MKRGARDDALMGSQLKRPNVGRSDPSAQPQHMPVPGLASAAAPPPQAGAAPPAQPQQTSGAALTNQKLTTNDALVYLKAVKDKFQDKREKYEEFLEVMRDFKSERIDTNGVIGRVKTLFNGYPELILGFNAFLPKGYAIKLQEEKKPVDFVEAINFVNKIKNRFQHDERVYKAFLDILNMYRKDNKSIQDVYHEVAGLFKDHKDLLEEFQHFLPDTSVAPQAVASSRGGLVKREDRSSLPPANRTLHNEKRERACLSHADRDFSVDRPDVDHDRQRRRLDKEKERKVERDRRDYEREDKDGEHDSRDLEIGQRKRKPFPRKMEDNAGAETHQGGPSENHGIHSVSSSSYDDKDALKSVYTHEFHFCEKVKEKLEHEAYQEFLKCLHIYSQEIITRSELKNLVNDILQHYPDLMEGFNEFLEHCENIVWPLVADGFLAGVFNKRPTTRIVKTEDKEKDRDRDREDRDRDREKEREKERERLDKGSTFNSKDGSCHKPPMFSGKEKYNLSKPISELDLSNCQRCTPSYRLLPKNYPMPPASNRTDLGASVLNDHWVSVTSGSEDYSFKHMRKNQYEESLFRCEDDRFELDMLLESVNAATKRVEELIEKMQDNSVKPESPIRMDEHLTPLNLRCIERLYGDHGLDVMDVLRKNASVALPVILTRLKQKQEEWSRCRSDFNKVWAEIYAKNYHKSLDHRSFYFKQQDTKNLSTKSLLTEIKEINEKKRKEDDVLLAIAAGNRRPIVPNMSFEYVDSEIHEDLHKIIKYSCGEICNSSDQLDKVMRIWTTFVEPILGVQRKHGSEDPDLVKPKSRTTKSGIANVGESNTGAGIVSKHNNDDESEQGLPSRARIANGVAANAQNGFHDADRIARRGEESLNVTLNGRVHGAASADETPSLSTQNIASTERSAENAAVVRTEQHKANLELTPGVNGSRSSHGAVEVAGEGKAVNETLPSAVGGETGRLGPSFNGISEGIKGRLNNDGSAPHISKVEREEGELSPNGDFDEDHFVPFEDGTSKGKEGSTSRSFQGRHGEVVPSAEAAGENDADADDEGEESAQRSTEDSENASEAGEDASGSESGDGEECFREDHDEEEEDMDHDDQDTKAESEGEAEGTTETHDVEGGISLPLSERSLYSVKPLAKHVPTALHDREKFSRIFYGNDSFYVLFRLHQILYERLLSAKTNSFTAEKKWRNSKDTNPPDLYAKFMSALYNLLDGSSDNTKFEDDCRAIIGTQSYVLFTLDKLIYKVVKQLQAIATDEMDNKLLQLYLYEKSRSPGRFFDLVYHENARVLLHDESIYRFECCSSPTRLSIQLMEYGHEKPEVTAVSIDPNFSSYLFGEYLCSTSDKKLSEGVYLARNKRKYSDNDEPSDFLKAMDGIKVVNGLECKISCKTSKVSYVLDTEDFLSRLRKRRKILRGGSVSDSSQFSKIYAAKVQRFNRFLSKA

SEQ ID NO: 19553 - protein, 292 aa, Zea mays
  VARIANT 30: note = Ancestral polymorphism is R, Derived polymorphism is W
  VARIANT 76..292: note = Derived polymorphism lacks residues 76 to 292
  VARIANT 85: note = Ancestral polymorphism is R, Derived polymorphism is H
  VARIANT 87: note = Ancestral polymorphism is T, Derived polymorphism is I
  VARIANT 186..292: note = Derived polymorphism lacks residues 186 to 292
MCQSDKHTCILDAIIKQANWDCSKMLEKFRRDIEDHALSIRESKLSEMTRHAKDKLRKALAEPVESLFDAADQTTWQSIRNIYKRETEAILPEFLNNLCQFEMEYAPAEEMVSKLKDYARSVVESKAKEESSKVSIHMKERFTTVFSHDKDSIPRVWTGKEDVRAIVKEARSAALKLLSVMAAIRWDDEPDRIESILTSTLLEGSVVSKIASAASADPLASTTWEEVTLCWSVLAQANNGSTVSMVLILGFNEIMVLIRNPIYLFLLFVGYLMVKALAMQLDVSREFQNGVV

SEQ ID NO: 19554 - protein, 338 aa, Zea mays
  VARIANT 254..338: note = Derived polymorphism lacks residues 254 to 338
MMMTRAPMGPMEGAAVDEVVRRLVEGGRGGRQVQLSEAEIRQLCVDGKRVLLSQPNLLRIHAPVKICGDIHGQFVDLLRLFDLGGYPPASTYVFLGDYVDRGKQSLETICLLLAYKIRYPEKIFLLRGNHEDAKINRVYGFYDECKRRFNVRLWKIFSDCFNCLPIAALIDDKILCMHGGLSPEWTSLDQIKDIERPAEIPDYGLLCDLLWSDPSPDGEGWGESDRGVSCTFGADKLVEFLEKNDLDLICRAHQVVEDGYEFFAQRRLVTIFSAPNYCGEFDNAGALLSIDESLMCSFQILKPTDMGPPHARKQIPNKVNQLPSHRNIGSMFSYKATS

SEQ ID NO: 19555 - protein, 187 aa, Zea mays
  VARIANT 143: note = Ancestral polymorphism is N, Derived polymorphism is D
MGIDLVAGGRNKKTKRTAPKSDDVYLKLLVKLYRFLVRRTKSNFNAVILKRLFMSKTNRPPISMRRLVKFMEGKEKNIAVIVGTVTDDKRIQEVPAMKVTALRFTETARARIVNAGGECLTFDQLALRAPLGENTVLLRGPKNAREAVRHFGKAPGVPHSHTKPYVRSKGRKFEKARGRRNSRGFKV

SEQ ID NO: 19556 - protein, 576 aa, Zea mays
  VARIANT 266..576: note = Derived polymorphism lacks residues 266 to 576
  VARIANT 261: note = Ancestral polymorphism is C, Derived polymorphism is Y
  VARIANT 247: note = Ancestral polymorphism is R, Derived polymorphism is H
  VARIANT 221..576: note = Derived polymorphism lacks residues 221 to 576
  VARIANT 204: note = Ancestral polymorphism is L, Derived polymorphism is P
  VARIANT 192: note = Ancestral polymorphism is D, Derived polymorphism is V
MSLRPSEREQMRKGNYKQTVDAEESRRRREGQMVDIRKAKREESLQKKRRDGFPASAAGVPPMGHSTALQQKLDGLPAMVQAVHSNDPSVQLEATTQFRKLLSIERSPPIEEVISTGVVPRFIEFLTREDHPQLQFEAAWALTNIASGTSENTKVVVESGAVPIFVKLLNSLSEDAVWALGNVAGDSPKCRDLVLGHGGLYPLLQQLNEHAKLSMLRNATWTLSNFCRGKPQPNFDQVKPALPALQHLIHSQDEEVLTDACWALSYLSDGTNDKIQAVIESGVFPRLVELLMHPSASVLIPALRTVGNIVTGDDMQTQVNSIGKLDLLFNVFIFCTLIIIFPHCYHVDILYSTESKCFCVHHYYFSFLQCVIDNQALPCLLNLLTTNHKKSIKKEACWTISNITAGNKEQIQAVINANIIAPLVQLLQTAEFDIKKEAAWAISNATSGGTHDQIKYLVAQGCIKPLCDLLVCPDPRIVTVCLEGLENILKVGEAEKNLGAGDVNVYAQMIDDAEGLDKIENLQSHDNTEIYEKAVKMLESYWLEEEDDAMPSGDNPQNGFNFGNQPSVPSGGFNFG

SEQ ID NO: 19557 - protein, 509 aa, Zea mays
  VARIANT 76: note = Ancestral polymorphism is R, Derived polymorphism is H
  VARIANT 141: note = Ancestral polymorphism is T, Derived polymorphism is M
MAAGSGPAPPAEAQPPPPIHHLPPDALHNVLLRLQLRDAVLLALLPTLRLLLLHHPRPNGGGCLHAFNPARRTWLRLPFAQFLPYQSFSPIASSTSLLYLWVETSSSTSPLALPPSTSSASSASPVHPPKSLAVCNPFSDTYRLLPQLGSAWACHDTVLTGPAGTVLIRTELAALSYTPSRSAKWMKHPLSLPSKPRSPILASDAVFALCDVGTPWRSQWKLFSCPLAILTGGCAPVERAVWGDVFEVLKRPRLLARAGGRRVLMIGGLRSSFAMAGTRRGAGGRRMRRAEETRELRTINKWGEMMYEKIKKLDKELARYVHNNIFFSFAVDSDYEDISKDHKPDCQNGSSRSTKVSSPDVITKPDANHGKSAEVVDSKSEEAQLTDREQATYASTNNDLKGTKAYQEADVSGLHNLAMAIVDYRGHRVVAQSIIPGILQGDKSDSLLYGSVDNGKKISWNETFHSKVVEAAKQLHLKEHVVLDGSGNPVKLAATVECKGIVGSDDRKR

SEQ ID NO: 19558 - protein, 513 aa, Zea mays
  VARIANT 17..513: note = Derived polymorphism lacks residues 17 to 513
MDATVVAIADDHDDSDCRRPLLAQNEEIHLYTEPPNRQHPPLDAAATQLEEQRKPERVASLDVFRGFTVAMMILVDDAGGAWPGINHAPWFGVTVADFVMPAFLFIIGVSAALVFKKMANKTAATKKAAIRASKLFILGVILQGGYIHGRHKLTYGVDLDHIRWLGVLQRIAIGYFVAAMSEIWLVNNNLRIAIGYFVAAMSEIWLVNNNLVDSPVPFVKKYFIEWFMAIAITVLYVALVFGLYVANWEFEIQTSNSTLSIPSNSIETKMIQCGVRGSLGPPCNAVGLVDRVLLGENHLYKNPVYKRTKECSINSPDYGPLPPNAPDWCLAPFDPEGLLSTLMAVVTCFVGLFFGHVLIHCKNHSQRMLIWLLASVVLTISAYLVLLLGMPFSKPLYTVNYMLLTGGVSGFLLLLLYYIVDVIHIKKPFVLFQWMGMNALIVYVLAACELFPTLIQGFYWRSPENNLVDVTESLLQAIFQSKRWGTLVFVLLEIVFWCLAAGFLHMKGVYLKL

SEQ ID NO: 19559 - protein, 501 aa, Zea mays
  VARIANT 146: note = Ancestral polymorphism is N, Derived polymorphism is Y
MDLALLEKALLGLFAAAVVAIAVAKLTGKRYRLPPGPPGAPVVGNWLQVGDDLNHRNLMAMAKRFGDIFLLRMGVRNLVVVSTPELAKEVLHTQGVEFGSRTRNVVFDIFTGKGQDMVFTVYGDHWRKMRRIMTVPFFTNKVVAQNRAGWEEEARLVVEDVRKDPEAAAGGVVLRRRLQLMMYNDMFRIMFDRRFDSEHDPLFNKLKALNAERSRLSQSFEYNYGDFIPVLRPFLRGYLNRCHDLKTRRMKVFEDNFVQERKKVMAQTGEIRCAMDHILEAERKGEINHDNVLYIVENINVAAIETTLWSIEWGIAELVNHPAIQHKLREELASVLGAGVPVTEPDLERLPYLQAIVKETLRLRMAIPLLVPHMNLNDGKLAGFDIPAESKILVNAWFLANDPKRWVRPDEFRPERFLEEEKSVEAHGNDFRFVPFGVGRRSCPGIILALPIIGITLGRLVQNFQLLPPPGLDKIDTTEKPGQFSNQIAKHATIVCKPLEA

SEQ ID NO: 19560 - protein, 451 aa, Zea mays
  VARIANT 59: note = Ancestral polymorphism is V, Derived polymorphism is M
MGKEKSHINIVVIGHVDSGKSTTTGHLIYKLGGIDKRVIERFEKEAAEMNKRSFKYAWVLDKLKAERERGITIDIALWKFETTKYYCTVIDAPGHRDFIKNMITGTSQADCAVLIIDSTTGGFEAGISKDGQTREHALLAFTLGVKQMICCCNKVCSKMDATTPKYSKARYDEIVKEVSSYLKKVGYNPDKIAFVPISGFEGDNMIERSTNLDWYKGPTLLEALDQITEPKRPSDKPLRLPLQDVYKIGGIGTVPVGRVETGVIKPGMVVTFGPTGLTTEVKSVEMHHEALQEALPGDNVGFNVKNVAVKDIKRGYVASNSKDDPAKEAASFTSQVIIMNHPGQIGNGYAPVLDCHTSHIAVKFAELITKIDRRSGKELEKEPKFLKNGDAGMVKMIPTKPMVVETFSQYPPLGRFAVRDMRQTVAVGVIKSVEKKDPTGAKVTKAAAKKK

SEQ ID NO: 19561 - protein, 126 aa, Zea mays
  VARIANT 84: note = Ancestral polymorphism is E, Derived polymorphism is K
  VARIANT 42: note = Ancestral polymorphism is A, Derived polymorphism is V
  VARIANT 22: note = Ancestral polymorphism is T, Derived polymorphism is S
  VARIANT 16: note = Ancestral polymorphism is V, Derived polymorphism is A
  VARIANT 3: note = Ancestral polymorphism is R, Derived polymorphism is S
MPRANEMLRADSRMMVVFGALSSKPEQLTFEESLIFVKKVKARDYMLYLSLFDVLGRTELPQLDAYRELQQMFQNHPDLREELERFRPPPPPPVPTSKQAANNNIWPWVIVCAAVPLVAASLLPSL

SEQ ID NO: 19562 - protein, 130 aa, Zea mays
  VARIANT 125: note = Ancestral polymorphism is D, Derived polymorphism is N
  VARIANT 124: note = Ancestral polymorphism is D, Derived polymorphism is G
  VARIANT 118: note = Ancestral polymorphism is D, Derived polymorphism is G
  VARIANT 97: note = Ancestral polymorphism is G, Derived polymorphism is D
  VARIANT 78: note = Ancestral polymorphism is A, Derived polymorphism is V
  VARIANT 42: note = Ancestral polymorphism is E, Derived polymorphism is D
MTYSSFSSDRPDADGGGAKNPPGPSPSPSVEDAMSFVQMVKEAFKERQPDKYGLFLRVMEDFRNQRLDIAEVASTAKALFQDNPDLALRFNVFLPKGHQIQLGLDELAAYLVRDINLGADNNDDDSDGGQ

SEQ ID NO: 19563 - protein, 456 aa, Zea mays
  VARIANT 34: note = Ancestral polymorphism is A, Derived polymorphism is V
MASSSSAATTSGDSQGLKARDACIVGVARTPIGALLGSLSSLPATKLGSIAIQGTYLSRHSLGSDVFGRISNNPSTNCRNTCGPSQIPGALKRAKVDPALVQEVFMGNVLSANLGQAPARQAALGAGLPNSVPCTTVNKVCSSGMKAVMFAAQSIQLGINDVVVAGGMESMSNAPKYVAEARRGSRFGHDVLVDGMLKDGLWDVYNDFPMGMCAELCSDQHSISREEQDSYAILSNERGIAAQDSGAFSWEIVPVEISSGRGKPPVVVDKDESLAKFDPVKLKKLGPTFKTNGSVTAGNSSSISDGAAAIVLVSGEKAKNLGLEVIARITGYADAAQAPELFTTAPALAIPKAISNAALQTSQIDYYEVNEAFSVVAIANQRLLGIPSGKLNLSGGAVSLGHPIGCSGARIIVTLLGILRQKNGKFGVAGVCNGGGGASALVLELMQPSSHIHSSL

SEQ ID NO: 19564 - protein, 451 aa, Zea mays
  VARIANT 207..451: note = Derived polymorphism lacks residues 207 to 451
MGKEKSHINIVVIGHVDSGKSTTTGHLIYKLGGIDKRVIERFEKEAAEMNKRSFKYAWVLDKLKAERERGITIDIALWKFETTKYYCTVIDAPGHRDFIKNMITGTSQADCAVLIIDSTTGGFEAGISKDGQTREHALLAFTLGVKQMICCCNKVCSQMDATTPKYSKARYDEIVKEVSSYLKKVGYNPDKIAFVPISGFEGDNMIERSTNLDWYKGPTLLEALDQITEPKRPSDKPLRLPLQDVYKIGGIGTVPVGRVETGVIKPGMVVTFGPTGLTTEVKSVEMHHEALQEALPGDNVGFNVKNVAVKDLKRGFVASNSKDDPAKEAASFTSQVIIMNHPGQIGNGYAPVLDCHTSHIAVKFAELITKIDRRSGKELEKEPKFLKNGDAGMVKMIPTKPMVVETFSQYPPLGRFAVRDMRQTVAVGVIKSVEKKDPTGAKVTKAAAKKK

SEQ ID NO: 19565 - protein, 112 aa, Zea mays
  VARIANT 1: note = Ancestral polymorphism is R, Derived polymorphism is M
  VARIANT 8: note = Ancestral polymorphism is T, Derived polymorphism is I
  VARIANT 11: note = Ancestral polymorphism is S, Derived polymorphism is Y
  VARIANT 16: note = Ancestral polymorphism is S, Derived polymorphism is P
  VARIANT 20: note = Ancestral polymorphism is P, Derived polymorphism is L
  VARIANT 26: note = Ancestral polymorphism is W, Derived polymorphism is C
MHNIVSVTIVSTLSLSGAVPTKPLTWNLIKVWLPVNIIFVGMLITSMFSLKYINVAMLTILKNVANVLTASGETYFFKKQHGTQVWVALMLMIIYAVAGGITELLPWFHADS

SEQ ID NO: 19566 - protein, 366 aa, Zea mays
  VARIANT 37..366: note = Derived polymorphism lacks residues 37 to 366
  VARIANT 57..366: note = Derived polymorphism lacks residues 57 to 366
  VARIANT 194: note = Ancestral polymorphism is G, Derived polymorphism is R
MATTTPMPAFAPEDSPPLSTEELLLCEAGLDDLLEPWPPVVTGLTESPGVAGAGTDGVPSEPGVDGVVPGDEGLEGVGIEGSADVGEGLVGEGSTGIPEGGGARGGGGCATVGGVGSAGGLGAGRLDGGGDAAAGGRIGDAFGGAAGVGGGGTAAGDEGGGTTAAGAGGGVATTTGGGGTASGGGGGKEGGGEGSCGGGVDAGGGRGGGAAGDEGGSAGVALGCVTGAGESGLGVVVAGDGVAVEGGEVALMVIGEGEGEDAIGAQASSRLLESTTLRAVTFTAELLPWWWNWRREPWPTPQFKGDSSLNPADSRSNQPIEIPPLPFLLPLGSLAVRKNVDEVKSHLEYRTRSSNWHAQHCIRRQR

SEQ ID NO: 19567 - protein, 730 aa, Zea mays
  VARIANT 221: note = Ancestral polymorphism is P, Derived polymorphism is Q
  VARIANT 70: note = Ancestral polymorphism is P, Derived polymorphism is L
MASSPSPSPITIRATSPPSTATPSPATTTPKPDSPAPVTQPNATPADPPSSPAAPPPLPPPASTPPPQLPSPPPSLPPPPPDAVPPPPVVVATPPPAPAAVVPPPSSPAAVPPPPTPAAPPKASPIRPPAAASPPPSNLPAPNPPADPTPPTVAQPPPPRRRPPRSPQTEPPPLAPPPSGIPVEPSPTSPSPTSADPSIPTPSSPSSPGTTPSTPGSDGTPSVPAPATPGDSVSPVTTGGQGSNKSSSPASQSSSSSVDSGGLSSGAKAGIGVVVAIIVLSLVGAAFWYKKKRRRVHGYHAGFVMPSPASTPTQVLGYSAKTNFSAGSPESKDSMPEFSMSNCRFFTYEELYQITNGFSSQNLLGEGGFGSVYKGCLADGREVAVKKLKDGGGQGEREFHAEVDIISRVHHRHLVSLVGYCISDDQRLLVYDFVPNDTLHYHLHGRGVPVLEWPARVKIAAGSARGIAYLHEDCQPRIIHRDIKSSNILLDNNFEALVADFGLARLAMDACTHVTTRVMGTFGYLAPEYASSGKLTERSDVFSFGVVLLELITGRKPVDASKPLGDESLVEWARPLLTQALETGNAGELVDARLNKNYNEVEMFRMIEAAAACIRHSASRRPRMSQVYKDKRRAREHLIRVPDTDQNLTFSPPPLASSQVVRVLDSLADVDLTNGVQPGKSEMFNVANTAEIRLFQRMAFGSQDFTTDFSQSSWNNSQSRGLDASGSRPL

SEQ ID NO: 19568 - protein, 570 aa, Zea mays
  VARIANT 303: note = Ancestral polymorphism is H, Derived polymorphism is L
MPRTVTPTPVPCASPYLWPPPQNWPRASQGSLAHFFPAECAVVMANASRGRVGGGGRSSVLALLLLLSAGGARASYDGEGEAARAGAEEKEKAAAWTGGLSRRSFPKGFVFGTAASAYQVEGMAHKDGRGPSIWDAFIKIPGEIANNATADVTVDEYHRYKEDVNIMKNMGFDAYRFSISWSRIFPNGTGEVNWKGVAYYNRLINYMVKKGITPYANLYHYDLPEALEVRYGGLLSREVVRSFADYADFCFGAFGDRVKNWLTFNEPRVVAALGYDDGRFAPGRCTGCEAGGDSGTEPYVVAHHLILSHAAAVQRYRRRHQPTQRGRVGILLDFVWYEPLTADSAADRAAAQRSRDFHVGWFLHPIVYGEYPKSVRRSVKGRLPKFTAEEAGLVRGSIDYVGVNQYTAYYVRDRRPNATAAPPSYSSDWHAEFVYERDGVPIGPRANSDWLYIVPWGLYKAVTYVKEKYGNPTMLLSENGMDDPGNVTVGQGVRDAARVAYYRSYVAELKAAIDGGANCVGYFAWSLLDNFEWKLGYTSRFGLVYVDFRTLRRYPKSSAYWFRDVIAGTN

SEQ ID NO: 19569 - protein, 335 aa, Zea mays
  VARIANT 4: note = Ancestral polymorphism is R, Derived polymorphism is H
  VARIANT 101: note = Ancestral polymorphism is P, Derived polymorphism is L
  VARIANT 128..335: note = Derived polymorphism lacks residues 128 to 335
MSGRGKGGKGLGKGGALRHRKVLRDNIPGITNLTIRRLARRGGVKRISGLIYEETRGILKIFLEQCCWFRGSSRAHPARPPRSVAMAQCRHHLLLMVIAAPMSHCTTTCGSSKPTTSSTQHMSKELGQEEFGIYNLGSPSTNSPSLPSLGMVFIFFIFIVCHVLMSMDAFPDVRIILQGSSNIVAMTSCGRENGSMHGLHSGLLTSMSPFREASFLGLSSTLPQSLSSPIGIASAATHSNQAPLGELSHSLSRMNRHVNYGFQGLGAIHPHSLPDVHNGANNGTPYNLNTITPVGVNKNSRTAEAVDSRHLHKVGSGNLNGHSFDRAGEGVVKWW

SEQ ID NO: 19570 - protein, 1288 aa, Zea mays
  VARIANT 16..1288: note = Derived polymorphism lacks residues 16 to 1288
MANPVLGLGLAPPGAEPSAGTPPSSRRAPRLAKRRHAPASSRFRAAQASVGTWNPFGGGGGTDGQTRGFVFGAASPVSQQPSEPAVEISSSSEAPFVFQSVRENLPRFEEGLSGSSMLPDKMGKLNLRTSGEVGDGLGQGRDRKDGSSAFGVDISGLFSNKEDNGLQEKLTQLNLGHREPLQSEKRDSANGVPQAFVFGCNGAGSFADCKNTVASGAQSDDPSSVCGTDAKAMAGKSTQFNIGSQAPSWGGGIEGTNGAPEAFTFQSTAVSGHVDNINNVVSGANTSANTSSSTVAKGVGDVDLLPEKLTRLNIGSDMPLHESKSGYQPKVFRAVQGTIFGNETSSTSDRSSEFLSANSNTSSSSSDLFSTANSNTSNSANGTYCFPPEKTPDLNAGEGVMSESLESDSSNCPPQTFLFERNETRSSVSHSASIAMDDGGNFVNHKNTDTCSSARGTFDYAGALPEKMTKLNIGCRNSYHSRKDETATEPPEVFVFGCNVSSFSSTHTASKSHDPTTPEFCFQSKAEATSGYGAVPQTKVQESYLFTTLNNSCSPSTFENAVPAFSFGTMDAEIETAPDDHFSVKQDLPGFSRETLFGLDSIKSAYKDKREAHKGKMKNKRPTRLKQHAQLHQVISKEACNDGKSSDLAGDYSPMDCSPYPAEAEHVPTEAYVASGQPVHIGDSVISNWNTSCAEDDVVSATEHLIIDVNLPMFGDEGRGPKLDASESNFGSSFSSFQGDQSNGPQHSFTNIGQDCNDNTYRTPHDFVEPPAFQSSSSNFSGLNFRFGVSSSPQISAAAQRRNTRRKLRTKGSLASKPSTIGSFEQSKSSQDTKGMRFFCETSKNEDPVKEQPSRKSSTSAALEACETWRTSGNKAYENGHFATAEDYYTRGINSVTHYGVSGHCSRALMLCYSNRAATRMSLGMMWEALQDCLTATSIDPTFLKAKVRAANCHLALGDLEDALRSYMACLNSNTGSSSDPKILAEASDGLERVKVDETREGEEGAEDDGACRGEAAAAPYMVWTVAGVGRNFCCDLRAQQSCPFFQLDNLWSYPRVIDWVSLCKELIEKKTSPEATKALELISNALHICPYSDSLKEMKAEALLMLRRYEEVIQLCQESVNPTERKPALFKDNGEPKNSSLFEQTHFSGRYWRPYLICKSYFLSGKLDEAVELLKKHEQVTPVKESDVNTYQENFSSLSAIIRELLSLKAAGNESFQAGRYSDAVKQYSAALACNSESRAFSAVCFCNRAAAYQALGQVTDAIADCSLAMVLDTNYPKYDFFAPTCA

SEQ ID NO: 19571 - protein, 301 aa, Zea mays
  VARIANT 70: note = Ancestral polymorphism is N, Derived polymorphism is H
  VARIANT 54: note = Ancestral polymorphism is S, Derived polymorphism is Y
  VARIANT 49: note = Ancestral polymorphism is P, Derived polymorphism is R
MSANDLPAASTVVSMYKANGISAMRLYAPDQGVLQAVGGTDISVTVGTPNDALSNIAASPAAAASWVRNNIQAYPSVSFRHVCVGNEVAGGAARNLAPAMENVHAALAAAGLGHIKVTTSVSQAILGVYSPPSAAQFTVEAQGYMGPVLKFLARTGSPLMANIYPYLAWAYNPSAMDMSYAIFTSSGTVVQDGAYGYQNLFDTTVDAFYLAMASNGGGSGVPLVVSETGWPSGGGVQATPANARVYNQYLINHVGRGTPRHPGGIETYLFSMFNENQKESGVEQNWGLFYPNMHHVYPISF

SEQ ID NO: 19572 - protein, 376 aa, Zea mays
  VARIANT 10: note = Ancestral polymorphism is R, Derived polymorphism is C
MTPSKPPGKRRRSAPPPRLPSPAPPVALSPPGFVADRAEAAARVERLLRYQFCDRALLEEALTHQSFSDGALSYQRLEFVGDAALGLAFSNFLYLTNPTLGPGALSTLRAANISTEKLARVAVRHDLYPLLRRKCPRLDLLVGQFIESVKQELMHDLATAPYGGSVVKAPKVLADIVEAIAAAVYVDCKFDLEKLWKVTRWLFEPIITAETIDEQPVTTLHELCQKHGKVAQFKTWQKDGMIVVNVFVGGEMVGLGSSEQKVIAKLNAARDALGKLIGGAKQQVLINCAANGLVDDIAELRECKQKLIEQCIRKHWPKPIFKLEKEGGPAHERNFVCSVQVDTQTGTFVTIGESMSRVKDAENSAAHKMVELLLKL

SEQ ID NO: 19573 - protein, 649 aa, Zea mays
  VARIANT 259..649: note = Derived polymorphism lacks residues 259 to 649
  VARIANT 253..649: note = Derived polymorphism lacks residues 253 to 649
  VARIANT 176..649: note = Derived polymorphism lacks residues 176 to 649
  VARIANT 171..649: note = Derived polymorphism lacks residues 171 to 649
MAAEAPPSASASASSSSAPRPPTAAASAPGGGGGGAPASAESYLGSLISLTSKSEIRYEGVLYDINTEESSIGLRNVRSFGTEGRKKDGVQIPASDKVYEYILFRGTDIKDLQVKSSPPQPPPPQAASLHNDPAIIQSHYSQPASTSSSLPSAGGAVLPDFSSQAVQYGLQRPTFQSNLPLYQPGNTPWGSSVAPPAGNAPWGSSVAPPAGNASTLSVPSMYWQGYYAPSSGLPHHLQPPPLLHPTPGLSVPQNLQYPGLNPSLQSGPQKLSELQPSLMPPITSQGPSSGILPATTAPASATLLAPESSKPLLPNMGSLFAPRATSLGATFPLPSQPTAVAETSATVSQNLTSFGSSKVPALPGSTLAYQTVSQSVSSTIAPSSSAQAEMPVPLLAPSGQLLQNTSSILSSSHSMQAPLQLASKEVKPIEPKAKVAEPLLPDPLLPDPPSRAMPEIKEPILPLPKQTPQKYNGSGSRNHHNFRGRGRGRGSAFSQSVTAFTEEFDFTAMNEKFNKDEVWGHLGKKSQSRDKDGEVGDDVFDEELEAEETDNPELAVKPVYVKDDFFDSLSSGTFGRGGPNGRGRPSERRRVDTETFGEFPRHRQPYRGGGRGYRGGGRSRGSYYGGRGYGNTGRGGPGNSYPHWGNGRD

SEQ ID NO: 19574 - protein, 303 aa, Zea mays
  VARIANT 58: note = Ancestral polymorphism is P, Derived polymorphism is L
  VARIANT 79: note = Ancestral polymorphism is P, Derived polymorphism is S
  VARIANT 83: note = Ancestral polymorphism is E, Derived polymorphism is K
  VARIANT 88: note = Ancestral polymorphism is A, Derived polymorphism is V
  VARIANT 98: note = Ancestral polymorphism is G, Derived polymorphism is D
  VARIANT 102: note = Ancestral polymorphism is G, Derived polymorphism is E
  VARIANT 103: note = Ancestral polymorphism is R, Derived polymorphism is H
  VARIANT 118: note = Ancestral polymorphism is A, Derived polymorphism is V
  VARIANT 119: note = Ancestral polymorphism is R, Derived polymorphism is W
  VARIANT 121: note = Ancestral polymorphism is L, Derived polymorphism is Q
  VARIANT 129: note = Ancestral polymorphism is Y, Derived polymorphism is C
  VARIANT 132..303: note = Derived polymorphism lacks residues 132 to 303
  VARIANT 138: note = Ancestral polymorphism is V, Derived polymorphism is L
  VARIANT 143..303: note = Derived polymorphism lacks residues 143 to 303
  VARIANT 155: note = Ancestral polymorphism is A, Derived polymorphism is V
  VARIANT 159: note = Ancestral polymorphism is R, Derived polymorphism is W
  VARIANT 168: note = Ancestral polymorphism is R, Derived polymorphism is C
  VARIANT 212: note = Ancestral polymorphism is E, Derived polymorphism is V
MRAACHAHASLGKAKMSQRILNTAKQTPAPTQRHNPSPPPKLGRRAAAGASIAIAAAPALLAVSPAPSKAREAEAAVAPCLAELPVTAKAFLDVSIGGEPAGRITVGLFGGAAPAGAARFLSLVTGVGYRRKEFVKVVPGYVQHGGVVSYPAVPAVTERLAAEAEAVRARCGAGAGAVHAAAGAVSIVVRDPSLPPPRPKLVARGGKLEVEEEQAGVVPNATEFVVTTGAAPELDAAAVLVGRVLDGMDVVAKIAAVPTVRDNTDSPYFRVAKLIGDKRAVVAERGFNRPYTKILVTNCGVLS

SEQ ID NO: 19575 - protein, 437 aa, Zea mays
  VARIANT 234: note = Ancestral polymorphism is L, Derived polymorphism is H
  VARIANT 62: note = Ancestral polymorphism is L, Derived polymorphism is H
  VARIANT 60: note = Ancestral polymorphism is T, Derived polymorphism is A
MVRSADLVVLPYQSLLLKSARESRVLILKNSVVIIDEAHNLADSLSNMYNSKITSSQLKTVLSCLDEYLDRFYNVLGAGNRRYIQTLTVLTRSFIRVLINNQDGASTMSSMTINQFLFSLDIDNINIVKLCQFVKESNIIHKDCGYANKLSSIQNQFDLQLHDEGSSIACFQALVDFLRSLLNSNDDGRIIVAKQKLGGQPDEAYLKFVMLCAEKIFSKVTQDAYVVILAGGTLQPIEETRFRLCPSLPPTDIKFFTCNHIVPPESILPIAVTRGPSGMAFDFSYNSRSSPSMIEELGRFICNIITVVPEGVVMFFSSYDYERRVYDAWMTTGTISRISKKKHVFREPRNSADVEAVLNKYKEAIESCSNFSQDTGVNGALLLAVVGGKISDGINFSNGMGRCVIMVGLPYPSPSDVELIYYGSALEVEESIMRIYA

SEQ ID NO: 19576 - protein, 68 aa, Zea mays
  VARIANT 51: note = Ancestral polymorphism is M, Derived polymorphism is V
  VARIANT 48: note = Ancestral polymorphism is E, Derived polymorphism is D
  VARIANT 35: note = Ancestral polymorphism is A, Derived polymorphism is V
  VARIANT 34: note = Ancestral polymorphism is C, Derived polymorphism is S
  VARIANT 26: note = Ancestral polymorphism is M, Derived polymorphism is I
  VARIANT 21: note = Ancestral polymorphism is L, Derived polymorphism is H
  VARIANT 20: note = Ancestral polymorphism is D, Derived polymorphism is N
  VARIANT 3: note = Ancestral polymorphism is R, Derived polymorphism is M
MPRLNDLYQRGNARGVAPPDLQKKQMFLVLDVFCADYKEELGKRRLGELDMKKVPVQVSLPNFYGLCS

SEQ ID NO: 19577 - protein, 243 aa, Zea mays
  VARIANT 241: note = Ancestral polymorphism is T, Derived polymorphism is M
MARPQRLAPPSDLRTWGPNSPCASDVDEPAADDDVASSLLEMGALVLSTADPLTKARRTHAAFSRWAVGLPVGQATAPYHPKRKDRLVERAPYARPSSPAKEPEKKTVKPASALASWLGLGSTEADRLTIATWSAPPSSPRSCETWVYPVAARPLAPSTSKPRKYTPERRQKFIGGQRSNHEKIHTATMKILMYQLCNSVAFVHDPKVLHRELKLHILLKDHKTMVLKIADLSLSHAIRFTEI

SEQ ID NO: 19578 - protein, 184 aa, Zea mays
  VARIANT 159: note = Ancestral polymorphism is A, Derived polymorphism is V
  VARIANT 117: note = Ancestral polymorphism is K, Derived polymorphism is M
  VARIANT 109: note = Ancestral polymorphism is G, Derived polymorphism is S
  VARIANT 98: note = Ancestral polymorphism is A, Derived polymorphism is S
  VARIANT 76: note = Ancestral polymorphism is G, Derived polymorphism is R
  VARIANT 58: note = Ancestral polymorphism is P, Derived polymorphism is S
  VARIANT 42: note = Ancestral polymorphism is V, Derived polymorphism is M
  VARIANT 41: note = Ancestral polymorphism is A, Derived polymorphism is V
  VARIANT 29: note = Ancestral polymorphism is P, Derived polymorphism is H
MVVTFGPTSLTNEVNSVEMHHEALQEALPGDNVGFNMKNVVVKDLKCGYVASNSKDDSAKEAASFTSQVIIMNHLGQIGNGYASVLDYHTSHIAVKFAKLVTKIDRRSGKELEKEPKFLKNGDAGMVKMIPTKLMVVETFSEYPPLGWFVVHDMRQTVAVGVISSVEMKDPTGTKVTKAVAKKK

SEQ ID NO: 19579 - protein, 146 aa, Zea mays
  VARIANT 141: note = Ancestral polymorphism is T, Derived polymorphism is I
  VARIANT 104: note = Ancestral polymorphism is G, Derived polymorphism is S
  VARIANT 103: note = Ancestral polymorphism is T, Derived polymorphism is I
  VARIANT 87: note = Ancestral polymorphism is T, Derived polymorphism is A
  VARIANT 86..146: note = Derived polymorphism lacks residues 86 to 146
  VARIANT 72: note = Ancestral polymorphism is V, Derived polymorphism is D
  VARIANT 58: note = Ancestral polymorphism is V, Derived polymorphism is M
  VARIANT 31: note = Ancestral polymorphism is L, Derived polymorphism is F
  VARIANT 25: note = Ancestral polymorphism is G, Derived polymorphism is C
  VARIANT 17: note = Ancestral polymorphism is D, Derived polymorphism is E
  VARIANT 2: note = Ancestral polymorphism is G, Derived polymorphism is D
MGTEKSHINIVVIGHVESDKSTTTGHLIYKFGGIDKRVIERFEEAAEMNKRSFKYAWVLDKLKAERERGITVDIALWKFETTKYYCAVIDAPGHRDFIKNMITSTSQGDCVVLIIDSTTGGFEAGISKDGQTREHALLAFTVSLLE

SEQ ID NO: 19580 - protein, 195 aa, Zea mays
  VARIANT 47..195: note = Derived polymorphism lacks residues 47 to 195
  VARIANT 2: note = Ancestral polymorphism is G, Derived polymorphism is W
MGKKRAAAVSAPFPAPASEPESDHFSDYGFDPQLLHFPSQPEAKRPWGRRQRHQQPAQLKPLDSARFKLQKPIAKKHHRQQKQQQRRRWWSSAASAALHLFRKRPSSTRPAAGAPPPQYGSPASPTVPMYLTDCDAGGDDGGGASACTCWAPAVRSGRLAAAELGAAAVAVPYVSLRSTSLGTGGAPVMPIYLVT

SEQ ID NO: 19581 - protein, 93 aa, Zea mays
  VARIANT 59: note = Ancestral polymorphism is R, Derived polymorphism is G
MCLSDFKVANVKDAAFVPGHGNPGPSEDLETKKTSIGVIIVVSVLASVLVVTALFEGFRYWQKKKRERDQARFLKLFEEGDDLEDELGLSNEF

SEQ ID NO: 19582 - protein, 214 aa, Zea mays
  VARIANT 180: note = Ancestral polymorphism is P, Derived polymorphism is L
  VARIANT 93..214: note = Derived polymorphism lacks residues 93 to 214
  VARIANT 92..214: note = Derived polymorphism lacks residues 92 to 214
  VARIANT 83: note = Ancestral polymorphism is R, Derived polymorphism is W
  VARIANT 25..214: note = Derived polymorphism lacks residues 25 to 214
  VARIANT 24..214: note = Derived polymorphism lacks residues 24 to 214
MVFKRTAIDSFYKKDIVVDVPREQGQNSSGSEEDEIANWLAAQQEDDQEEKAPEQSSPKNRLCHIEPIIEMQTSEEVKANRLRLRTSIDTVRWLAFQGCPFRGHDESANSKNQGNFLEMELMGVTDLLCKKLQHKSQDIVNAIDDVASTKMLIQNLRDHGWDRLINDVTIFCNKHEIIVPNMTEFIYELLYTLYVIFVLKVLEKLRKTNSCATT

SEQ ID NO: 19583 - protein, 208 aa, Zea mays
  VARIANT 112: note = Ancestral polymorphism is S, Derived polymorphism is A
  VARIANT 158: note = Ancestral polymorphism is V, Derived polymorphism is M
  VARIANT 179: note = Ancestral polymorphism is T, Derived polymorphism is M
  VARIANT 183: note = Ancestral polymorphism is A, Derived polymorphism is T
MARFVDPLVVGRVIGEVVDLFVPSISMTVAYDGPKDISNGCLLKPSATAAPPLVRISGRRNDLYTLIMTDPDAPSPSNPTMREYLHWYVYTALMMPNFFSLATHVRMHVRFSLRQFAAAYVCRIVINIPGGTDATKGEEVVEYMGPRPPVGIHRYVLVLFEQKTRVHAEAPGDRANFKTRAFAAAHELGLPTAVVYFNAQKEPASRRR

SEQ ID NO: 19584 - protein, 242 aa, Zea mays
  VARIANT 177..242: note = Derived polymorphism lacks residues 177 to 242
MSRTFDDYYIEDCGIILAPKVTQRRIDNSDQFVILATVRVAFVPAVRGRLPPSGSAFNQSAPSIYMRQIITIHLVASTSSLLHPIATAPLSAPLFLDTTHTGAGVETDHHDTSSSGCLWPRHPSVLDFPPSSRSPASRIGSSTWRDISSLSSMAVAEVYSPTAAAAAQQQREKATSQIWRAVVGWIDETSLPPGSRLDVRAYTTVLHALSRAGQYERALELFAELRRQGYEIKRDSMFHKAR

SEQ ID NO: 19585 - protein, 121 aa, Zea mays
  VARIANT 64: note = Ancestral polymorphism is A, Derived polymorphism is T
  VARIANT 106: note = Ancestral polymorphism is N, Derived polymorphism is T
MSDEELMEQCDMGTFKASGPGGQHRNKRESAVRLKHLPTGIIAQEMQALLDLLFAVEGSVSDATKILVLSTGALSRLILSDDSLRTTANELRASKVTLQICELATTAYSLIRGYRIPNFRL

SEQ ID NO: 19586 - protein, 57 aa, Zea mays
  VARIANT 23: note = Ancestral polymorphism is F, Derived polymorphism is C
MAMESQAEALDQLATDDLLEGKFALLETSSVDDDLSQLKKELSGSSLDVGEPGTAVE

SEQ ID NO: 19587 - protein, 574 aa, Zea mays
  VARIANT 17: note = Ancestral polymorphism is M, Derived polymorphism is T
MALHSAAAAAALSALLMLSFSGLTLSDTTPSTPVSPSAACNATTDPTFCRSVLPPRGKGDLYKYGRFSVAESLAGARMFAALVDRYLARHRHLSSSAIGALRDCQLMADLNVDFLTAAGATIKTTDTLLDPQADDVHTLLSAILTNQQTCFDGLQAASGSWSDRGGLDAPIANGTKLYSLSLSLFTRAWVPTAKPAHSHKGGSNDPHHGHGHGHGDKNKKHPAASAARRGLFDVTDDEMVRRMAIEGPEATVEVNTVVTVDQSGAGNFTTIGDAVAAAPRNLNGSTGYYVVYVLAGVYEENVVVPKHSKYIMLVGDGIGQTVVTGNRSVVDGWTTFQSATFAVVGQGFVAVNMTFRNTAGPAKHQAVAFRSGADLSAYYGCSFEAYQDTLYTHSLRQFYRGCDIYGTVDYVFGNAAVVFQGCTFYSRLPMQGQCNTVTAQGRSDPNQNTGTSIQGCSLVAAPELAANTAFTTLSYLGRPWKNFSRTVVMESYVGALVDPSGWMPWSGDFALSTLYYAEYNNTGPGADTSRRVAWPGFHVLGDGTDAGNFTVSSMVLGENWLPQTGVPFTSGLIP

SEQ ID NO: 19588 - protein, 175 aa, Zea mays
  VARIANT 5: note = Ancestral polymorphism is R, Derived polymorphism is H
  VARIANT 21: note = Ancestral polymorphism is A, Derived polymorphism is V
  VARIANT 25: note = Ancestral polymorphism is P, Derived polymorphism is S
  VARIANT 26: note = Ancestral polymorphism is T, Derived polymorphism is M
  VARIANT 27: note = Ancestral polymorphism is A, Derived polymorphism is T
  VARIANT 29: note = Ancestral polymorphism is E, Derived polymorphism is K
  VARIANT 33: note = Ancestral polymorphism is D, Derived polymorphism is N
  VARIANT 53: note = Ancestral polymorphism is A, Derived polymorphism is D
  VARIANT 58: note = Ancestral polymorphism is T, Derived polymorphism is M
  VARIANT 59: note = Ancestral polymorphism is A, Derived polymorphism is T
  VARIANT 65: note = Ancestral polymorphism is A, Derived polymorphism is V
  VARIANT 67: note = Ancestral polymorphism is G, Derived polymorphism is D
  VARIANT 91: note = Ancestral polymorphism is G, Derived polymorphism is D
  VARIANT 107: note = Ancestral polymorphism is K, Derived polymorphism is N
  VARIANT 112..175: note = Derived polymorphism lacks residues 112 to 175
  VARIANT 119: note = Ancestral polymorphism is T, Derived polymorphism is I
  VARIANT 122: note = Ancestral polymorphism is G, Derived polymorphism is V
  VARIANT 149: note = Ancestral polymorphism is C, Derived polymorphism is Y
MLAHRFLLLVVVAAAAASGIASAKPTAYEALADYDFPPGILPKGVVAYTVDNATGAFTATLDASASGAGSSICEFSIEGSYSLRYQTKITGKISPDHLTDLQGVSVKVLFFWLNIVEVTRHGDNLEFSVGIASADFGIDNFLECPTCGCGFDCNDLLMLQKAGAATARLRLRGAF

SEQ ID NO: 19589 - protein, 384 aa, Zea mays
  VARIANT 333: note = Ancestral polymorphism is N, Derived polymorphism is Y
  VARIANT 70: note = Ancestral polymorphism is P, Derived polymorphism is S
  VARIANT 61: note = Ancestral polymorphism is R, Derived polymorphism is C
MSEGATATSPALETEVAPLPDNDDLHREIFLRLPPLPSSLPRASLVCKRWRRLISDPAFLRRFHVHHRAPPLLGFFADEDGDIEFVPTLRRPDRIPGARFSLPRRDNDYLSFLGCRHGLALLVDRARFEAVVWNPVSGSQCRVPFPLEFNKRHVYKGAVVRSSGDGHVQGDSRLIPFKLVLVHHTDLHDKLAFACLYESESGRWGNISSIAIPLSRLHQPAVLVGNRLYWILLGTSDILEFDLDGQSLAIVRKPEDARVTNNSGIQALAVEGNKLGLATLSKMSIQLWRRETNSDAAGRWMPWKTVELDKLLPVSRSTRIWPTTILGFDEDSNAFFICTSVGIYMIQLESTQFTKLLEGDSFTAYYPYTSLYTAGDVFTSTRLD

SEQ ID NO: 19590 - protein, 121 aa, Zea mays
  VARIANT 22: note = Ancestral polymorphism is R, Derived polymorphism is C
  VARIANT 25: note = Ancestral polymorphism is C, Derived polymorphism is Y
  VARIANT 48: note = Ancestral polymorphism is K, Derived polymorphism is N
  VARIANT 56: note = Ancestral polymorphism is K, Derived polymorphism is N
  VARIANT 75..121: note = Derived polymorphism lacks residues 75 to 121
MSPPPAAAPTPPFTALAVAPTRPGCDSGAERQPRAAELEIEVSSGLAKSKKASNSKLEEGVKIMCVGLAESPVISDFKEEEDRRLLLLLTFVTPTLRTEVVSDERRGEHRSALSIGDVATS

SEQ ID NO: 19591 - protein, 107 aa, Zea mays
  VARIANT 80..107: note = Derived polymorphism lacks residues 80 to 107
  VARIANT 50: note = Ancestral polymorphism is S, Derived polymorphism is T
  VARIANT 47: note = Ancestral polymorphism is A, Derived polymorphism is T
  VARIANT 31: note = Ancestral polymorphism is E, Derived polymorphism is Q
MAAAAEGLAAYRAVLRAARRTFAGDQLMLKESAVEIRRRFEDHRGLTPGSDDAARALADAREAAHFITHMIVQATRAPSGSFVVKPESVHAGATLEVPSEEILSKLK

SEQ ID NO: 19592 - protein, 434 aa, Zea mays
  VARIANT 95: note = Ancestral polymorphism is A, Derived polymorphism is S
  VARIANT 223..434: note = Derived polymorphism lacks residues 223 to 434
  VARIANT 300..434: note = Derived polymorphism lacks residues 300 to 434
  VARIANT 375..434: note = Derived polymorphism lacks residues 375 to 434
MQRHIRAVYSIFVPLSGGGLAGVWSSSRRLPSLSSDDAEGRVGVRVISLRFQPISPELIGLMDGNKDEALRSVKLAKSAFASGDRQRAEKLIKIAQRLDPGLPLDDLLSPVEKVGILNISTCKDKTERGQALLYPKTTKESVGPLNVDKAYTEENIRVVQDIRKKKDYYAVLGVERRCTVEEIRKAYRRLSLKVHPDKNKVPGAEDAFKMVSKAFKCLSNDQSRRTYDQTGTTEDHEFNEQYPNVMRRGAARRRRPARSGFYNYEEDFDPDEIFRSFYGTHDNMFHPQYTYRARGTGRQQQQRREHSVEGGSSINLTVFIHLVVVLFIVSLAFIPARQAEYSLQQTNYFPISKVTQKQGVEYFVSKQDFDQQFPQGSQSRENLERHVLMDYKSMLGRYCHVELQRRQWAKDYPTPRCDKLRELSVAQNVHMPSV

SEQ ID NO: 19593 - protein, 86 aa, Zea mays
  VARIANT 25..86: note = Derived polymorphism lacks residues 25 to 86
MLDAAERAADIGGGAKLDRKASMVQRRGYTSDDDLDDLDSPLASLIDRSAPPSPSNGFAHFSARRGVSMENTRYTLLREVWGLEQR

SEQ ID NO: 19594 - protein, 242 aa, Zea mays
  VARIANT 187..242: note = Derived polymorphism lacks residues 187 to 242
  VARIANT 186: note = Ancestral polymorphism is Q, Derived polymorphism is L
  VARIANT 150..242: note = Derived polymorphism lacks residues 150 to 242
MVAVQSNNVSAVNEALNELYVEDEDYERLRESVDMHDNFDQIGLAQKLEKHELLEMRRIAAYIYKKAGRWKQSIALSKKDNMYKDCMETCSQSGDRELSEDLLVYFIEQGKKECFASCLFICYDLIRPDVALELAWMNNMVDFAFPYLLQFIREYTSKVDDLVKDKIESQKEERAKEKEEKDLVAQQNMYAQLLPLALPAPPMPSMGGPPPPMGGMGMPPMAGMGMLPMGPGPMPAFGMGGY

SEQ ID NO: 19595 - protein, 192 aa, Zea mays
  VARIANT 142..192: note = Derived polymorphism lacks residues 142 to 192
  VARIANT 91: note = Ancestral polymorphism is R, Derived polymorphism is C
  VARIANT 52: note = Ancestral polymorphism is A, Derived polymorphism is T
MAVEQGRSLAETSTWSVATVTTLMVAACFLVERSLSRFAKWLRKTKRKAMLAALEKIREELMLLGVISLLLSQTTCFISEICVPSSLFTSRFYICFESNYQDLLRNTDANQTSLDRNMFGGQRLHVCGEGHEPFVLYEGLEQLHRFLFILGITHVLYSFVTVVLSMIKIYNWRKWETLAGPIGAEELKGEPR

SEQ ID NO: 19596 - protein, 374 aa, Zea mays
  VARIANT 172: note = Ancestral polymorphism is S, Derived polymorphism is L
MDEQQAEEGESARVKRTPEEGSSPLSALADDVLLQILGRLEADPRDWARASCASPRLAALLRAACLPPRLSRALPAELLPAPSPDGAPAAWAALHKLSVCCPGLLRAGVLLEPTDDFGLDLDIGPDVPIYARTDASSAEGFEATATSRHSGTIVAAGSAPRAGESANVAAWSLYDDLYLDAAYDCSSELQIPPAAAAVEPAPPAPVAAIRDVEEATTTNAVSCGVARRGVVAGSRLHPRRWLGTVGAHLASGSWTLSREQGNKLLASRFRGDRLYLCDWPGCVHKEERRKYMVFRGVFHNFARSQVRRALRDTRRPTVAVECAFCGCKETWDLYSAFCLRSFYGYHDDGEPVVRAYVCENGHVAGAWTDRPLYS

SEQ ID NO: 19597 - protein, 99 aa, Zea mays
  VARIANT 14: note = Ancestral polymorphism is D, Derived polymorphism is N
MADSGRQNEECAVDCKTAMTVLCVIKVQKLQITCFCLVFTAAKHGVMCSDVRDRNHHVFEAVSTNPATLFEFIVIEGNTWIAAGLNALSILLLAELRRC

SEQ ID NO: 19598 - protein, 159 aa, Zea mays
  VARIANT 84..159: note = Derived polymorphism lacks residues 84 to 159
  VARIANT 79..159: note = Derived polymorphism lacks residues 79 to 159
  VARIANT 47: note = Ancestral polymorphism is N, Derived polymorphism is K
  VARIANT 19..159: note = Derived polymorphism lacks residues 19 to 159
  VARIANT 17..159: note = Derived polymorphism lacks residues 17 to 159
  VARIANT 13: note = Ancestral polymorphism is S, Derived polymorphism is F
MATKILSLTASSSGCERNWSGFDGVHTKKRNRLTTDCLNKLVYIQFNNRLINKRAKIKSKKITDVLLSSGTTEAQGPGRERHWQQGLRHLALPQPIGPSGLLVQKRGDGEPPSESRLMVERATIRVKVASSVVLAARGEAGPQRVKRYIQEIRLERALK

SEQ ID NO: 19599 - protein, 94 aa, Zea mays
  VARIANT 2: note = Ancestral polymorphism is A, Derived polymorphism is V
  VARIANT 13: note = Ancestral polymorphism is G, Derived polymorphism is S
MAPSATCWCGHCGAVRRLRAEGEFASCAVCGRVLLDLQDDAVAAPPPRQLRRRQRRARDGAAARDIGARPERGDISDAESTVTSTGEDRWIDEK

SEQ ID NO: 19600 - protein, 93 aa, Zea mays
  VARIANT 13: note = Ancestral polymorphism is G, Derived polymorphism is S
  VARIANT 17: note = Ancestral polymorphism is R, Derived polymorphism is H
  VARIANT 51: note = Ancestral polymorphism is R, Derived polymorphism is L
  VARIANT 69: note = Ancestral polymorphism is G, Derived polymorphism is S
MAPSATCWCDHCGAVRHLRAEGEFASCAVCGRVLLDLQDDAVAAPPPPQLLRRQRRRARDGGAAGRGVGARPERGDISDAESTVTSTGGSMFD

SEQ ID NO: 19601 - protein, 165 aa, Zea mays
  VARIANT 28: note = Ancestral polymorphism is R, Derived polymorphism is I
MARRPQPMPNLVPTLLLLLLVVAAAVVRADDDEKCSNPCGNPCGEPCVYASPPPPPVYSPPPPPPTPEYYPPTTPTPTTPYCPPPPLGGGGGYEPSPGYTPSTPYTPGYNPTPSGSGWYAPPYTPPSAGTLYPQDPGFRPNAAPRRAATLFSLAAAVACACFGLL

SEQ ID NO: 19602 - protein, 1063 aa, Zea mays
  VARIANT 723..1063: note = Derived polymorphism lacks residues 723 to 1063
  VARIANT 543: note = Ancestral polymorphism is G, Derived polymorphism is S
  VARIANT 250..1063: note = Derived polymorphism lacks residues 250 to 1063
  VARIANT 223..1063: note = Derived polymorphism lacks residues 223 to 1063
  VARIANT 183..1063: note = Derived polymorphism lacks residues 183 to 1063
  VARIANT 2..1063: note = Derived polymorphism lacks residues 2 to 1063
MGAQIDNSVNDGRGPPLFKICGQVHHRIGTLLPDNGSPPRFIQLYIYDTTNEVQNRINALDSGDRTQDSFDPVIIRNLIKMLDHHNPFVKKFRMARDRLADNPNEEFTIRLIGAKEGDPIQYNLPTTDELAMLVVGDFTLDTFKRDIIIETQNKELKRISSLHPTYMALQYPLLFRFGERGFQVGERGGRRYMIQNYHDSIAICRVHGPPDFFLTFTCNPNWQEILESLSQPGQTPSERSDIIVHVYHMKLNDLLHHIRNGSIFGPCTAGVASLLLPGGRTTHSRFKIPCDLDESTTCNIKRGTMLAELIESTSLIIWDEAFMTHRCAFEALDRSLRDLLYLNASASTNAPFGDIGDGNIPATVKPGESEPTWIKIPSEFLLIPEHDNISAIIGSIYTNITENFNDPIYLEQRAILTPTNEIADLINEKVVHLIPGHSKEYTSSDRIAPHSNRNGTYDLLYPIEFLHSLNGNNFPQHKLILKEGVPIMLLQNLNQSEGLCNGTRLIVTALGEMVHVSRKWSFHGATENGPLQHIDMVLSDCKGNSMYAEIPANLAEEKGALIETNQIYDISRFRVTAAKTAYKPIDGDKMIQFTIYTIIKPASNPPPTFSLYIYQLTPFDEIESQIQHKTKFLDVLGTITEVTALKTVHIEGQLSPTIIRDIMIEDLSRKTLKITLWAKRATSFTIQNVYDPVSKKPILALFVGCLPKFYKGVYLSGGAACHWYFNPAIPEAEAYQNSITKYYAYKHGGETIQLHLPTQPEHALQTFQPPTIEHKTLEQLLTMNPYDYPDTGYECTVTVTEIDTSNTWWYPSCTKCGRKTTPHNTTYYCDLCKWDGYKFKYKLKFRASDATAIAQMFCFDNIARYIVGKSCKVILRSTNAATPIPPDLAQIVSLKFTFRVIPDDSSFDNQDQVPIALRIISITAAHGRQHALPLKPTNIIEGTSTPQNKLQLQLIENSPSNPFQNLSTSTPPPKQATRKLIYPPLSNPLTYQHTPKSDGEEEITEQTMDTSQIKGKKVCTHSNLLQKGIHEQNNMMDDRATKTIWLDEEDTRIRVGQEHGFVS

SEQ ID NO: 19603 - protein, 835 aa, Zea mays
  VARIANT 56..835: note = Derived polymorphism lacks residues 56 to 835
MEPDPVAAGASSSPPPSPAPATSPPWQTRDDDEPGAVDCADPGGDLNPAPPPSLQQGTVENAAVGSEVEQEEPKKEAMAGVGETLRSFMEEFGDQGEDSIILSPRLKDISTPDRPAALGFLGEKYNNLMERYKKYKKQVVKCSEECEPRYNGLKKKYTDECAERRRLYNELIELRGNIRVFCRCRPLSSDEVNRGCLSVVEIDPSQESELQFVPSEKERKPFKFDHVFGPEDDQEAVFSETVHVVRSVMDGFNVCIFAYGQTGTGKTFTMEGVPENRGVNYRALEELFRTSEKRSASVAYTFSVSILEVYNEKIRDLLDESNDQSKRLDIKQNADGTQEVHGLVEAPVYNIDDVWEKLKFGAQNRSVGSTNSNELSSRSHSLVRVTVRSEHLVTYQRSRSHMWLVDLAGSERIAKTGVEGDRLKESQFINKSLSALGDVISALASKNSHIPYRNSKLTHLLQSSLGGDCKTLMFVQISPSSMDSGETLSSLNFASRVRTVEHGPARKQVDPAESLKFKQMTEKLRHEEKENAQLNQSLQLMQLKYASRENVFRTLNEKVKDAEQACRNYQQRIRELESELGNEKRVSRDSARSSRPPLVPTRQKQPHGRNAPPSGPSRWRLKAPTIHNKENIPVMMNKSNPGDDPNKAVGRARRVSLTPVIRQIPIQPKRRSSIAILPSVREHLSVLNEKRAASRLSQVNMPRRSVATFGLNLGPGTPLAGHGGPVDATPDGAKFRRFDLGSSSSKFTSPPPNVTPQRKMGMAPAGGPPNAAKLCFSIQKRVTPAHVRAKPGMGIFDPALRENMVVGRTGNALRLVLSETVLGQKIFFSASVNGF

SEQ ID NO: 19604 - protein, 148 aa, Zea mays
  VARIANT 43: note = Ancestral polymorphism is P, Derived polymorphism is T
MATAHGSRLIFLFEATLFSALLLVPARPASAADGSAYPAGDCPYPCLPPPAVTANCPPPPPAAASYSYPPPPGAYIPYFQPAAGGGGGGGSGGYGGYPAPPPPNPILPWYPWYYKTPPSSAAATSGRGSRVLLGSAAMVAAAALLIMA

SEQ ID NO: 19605 - protein, 241 aa, Zea mays
  VARIANT 171: note = Ancestral polymorphism is G, Derived polymorphism is V
MASSRCFENPPVLEPASGGGEVVDDFGGQKAYVSGSAGSKAAVVLISDAFGFEAPNLRKIADKVASLGYFVVVPDFLHGDPYDPSNNAHSNPGTWIQSHNPQTAFEEAKPVIAAIKEKGVSSIGAAGYCWGAKVVVELAKVHEIQAAVLAHPSLLTVDDMKDVKCPISILGAEIDRSAPPELLKQFEQVLSANPEVDHFVKVFPGVAHGWAVRYSDDDAAAVTSAEEALRDMSHWFNKYLN

SEQ ID NO: 19606 - protein, 599 aa, Zea mays
  VARIANT 126: note = Ancestral polymorphism is G, Derived polymorphism is R
MESEMAEESPAAVSAAAARARPLEAVAEEGQEVAEQHEVAVGSTKTMERVAAAKKFIEDHYRAQMKNLQERKERRLILEQQLASSQVPREEQINLIKDLERKETEYMRLKRHRICVDDFDLLTIIGKGAYGQVQLCREKSTGNIYAMKKLKKTDMLVRGQVEHVRAERNLLAEVGSHCIVKLYYSFQDAEYLYLIMEYLPGGDMMTLLMREDTLTENVARFYIAETILAIESIHKHNYIHRLHVYESDLCVMQHVRSPPLIGCGVFPILSLYSYLLTVIVNQCCRDIKPDNLLLDKNGHMKLSDFGLCKPIDCSKLSTLNENEPMTDENLRESMDIDHSLSDTANGRRWRSPNEQLQHWQNNRRKLVHMFAYLAFSTVGTPDYIAPEVLLKKGYGLECDWWSLGAIMYEMLVGYPPFYSDDPLVTCQKIVHWRSYLNFPDNPRLSLEAKDLICRLLCDVDHRIGSGGADQIKAHPWFRGVEWDKLYEMEAAFKPLVNDELDTQNFMKFPDLNPAPARASSGASRKMMLNSKDLSFVGYTYKNFEAVKGLHQFADLQRSSSFTRHSAGSPSDTADMDASMEANGTDTHMRTGSAGDPMAP

SEQ ID NO: 19607 - protein, 374 aa, Zea mays
  VARIANT 348: note = Ancestral polymorphism is L, Derived polymorphism is S
  VARIANT 171: note = Ancestral polymorphism is R, Derived polymorphism is C
  VARIANT 168: note = Ancestral polymorphism is A, Derived polymorphism is S
MTLLAAITNPATGSSEKAHPIVITPGATPPPPTSSALPTSIPPSAWSLSPADPAIATAASYLAASLDSCSSLPRLRILLTDFITTLSQSLALSTPAAALPATIRAVAPYFPAAISSLVASKAASLAGHDILLALAESRLLPHPPPELISSLCKKDQVDLVCALLRQAADIRSSEILAALRCFLSPASDKAYDAMIDVKGRWKDAAVLAVNRCQGKSAGKRKRVDAATRRVALLLMMGYDRFTSPEVCLHYLFASEIVDSVVLGAAVAELDGEEVIKLMRYLNMWIGKYRRFLEAHMCPEAVEMLELDQCDIVPSFGAVARALGVLLDNHFSHLVLNADAREDLRAAELIVRELTAEAESSGTILDLLHRLQLNK

SEQ ID NO: 19608 - protein, 833 aa, Zea mays
  VARIANT 390..833: note = Derived polymorphism lacks residues 390 to 833
MSVVGFDLGNESCIVAVARQRGIDVVLNEESKRETPAIVCFGDKQRFIGTAGAASSTMNPKNSISQIKRLLGRKFSDPELQRDLASFPFRVTEGPDGFPLVHVRYLGEERTFTSTQLLAMVLSNLKGIAEGNLNAAVVDCCIGIPVYFTDLQRRAVLDAATIAGLRPLRLFHETTATALAYGIYKTDLPENDQLNVAFVDIGHASMQVSVVGYRKGQLKMLSHTYDRSLGGRDFDEALFKHFAAKFKEEYKIDVYQNARACIRLRVACEKLKKVLSANPEAPLNIECLMDEKDVRGFIKREEFEQISASVLERVKGPLEKALAEAGLTTENVHFVEVVGSGSRVPAIIKIITDFFGKEPRRTMNASECVARGCALQCAILSPTFKVREFQVNDGFPFSIALSWNGDSQNAPQQTLVFQKGNAIPSTKALTIFKSSTFEVDVLYVDPDNSQIPQKISTYTIGPFQTSNGEKAKLKVKVRLNIHGTVTVDSVIMLEEDVEVPVSSANEAPNDTMKMDTDDVPSDPAAGSDVTMQEQPPAAGNGAQDNEEKSVSMETDAKVEPSKKKVKKTTVPVHELVYGALAAADLQKAVEKEYEMALQDRVMEETKEKKNAVEAYVYDMRNKLYDKYSDFVTPEDKEGLIGKLQEVEDWLYEDGEDETKGVYIAKLEELKKVGDPIEVRFKEWEIRGSAVSQLLYCIKSFREAALSKDQKFEHIDMSEKQKVISECSEAETWLMEKRQQQDALPKHANPVLLAADLKKKAETLDRFCKPIMTKPKPVPKPQTPPPAETQAPEPQTPEQQRSNGESTTSEGAAEEPPAEQMETDKPEGATDPSA

SEQ ID NO: 19609 - protein, 367 aa, Zea mays
  VARIANT 195: note = Ancestral polymorphism is P, Derived polymorphism is S
  VARIANT 131: note = Ancestral polymorphism is T, Derived polymorphism is A
  VARIANT 94: note = Ancestral polymorphism is N, Derived polymorphism is T
  VARIANT 92: note = Ancestral polymorphism is L, Derived polymorphism is P
  VARIANT 11..367: note = Derived polymorphism lacks residues 11 to 367
MESPEACSSGEASPASPPPLAAAAAERPSEAAALRALVDRVRAGEVDAAREVRRLTRASARHRRKLAAAVDPLVAMLRSPAPEAGEAALLALLNLAVRDERNKTKIVDAGALEPLLGYLQSSDPNLQEYATAALVTLSASSTTKPIISASGVIPLLVEVLKEGNHQGKNDAVMALYNLSTITDNLQAILSVQPIPPLIKLLKGSKKSSKTADKCCALLESLLAFNQCPLALTSEEGGVLAIVEVLEEGSLQGREHAVGALLTMCESDRSKYRDLILNEGAIPGLLELTVHGTPKSRMKAHVLLDLLRDSPYSRPKLQADTLENIVTNIASQIDGEDRGGKAKKMLAEMVKVSMEQSLRHLQRRASFA

SEQ ID NO: 19610 - protein, 281 aa, Zea mays
  VARIANT 201..281: note = Derived polymorphism lacks residues 201 to 281
  VARIANT 100: note = Ancestral polymorphism is R, Derived polymorphism is C
MEVVLAPAQHDGLHAAFWPNPFDIGVGGDGRFSSSLSSLGGDRFCGYSTTASRFVNSPGLSSPSPRADSLSRGSSDSGSVVEDGDDAAATASSVAERRLRLVRLALQYQEVVNRFELCLSYLADAINEAAALRQENDELRVANEYLARRINVVGGRLADEFSGLRLAEEHTTPPPPSPLPATPVMPKSISVRSPGYLKMIQNGKHRASKPTKGSQRVLVGMEGGVKGEEEEKLNGGLQFEVYNQGMLKTELCNKWEETGTVLSLRMLGEHCRLTEAAVGRI

SEQ ID NO: 19611 - protein, 859 aa, Zea mays
  VARIANT 222: note = Ancestral polymorphism is S, Derived polymorphism is L
MSVVGFDLGNESCIVAVARQRGIDVVLNDESKRETPAIVCFGDKQRFIGTAGAASSTMNPKNSISQIKRLLGRKFSDPELQSDLASFPFRVTEGPDGFPLVHVRFLGEERTFTPTQLLAMVLSNLKGIAEGNLKTAVVDCCIGIPVYFSDLQRRAVLDAATIAGLTPLQLFHETTATALAYGIYKTDLPEHDQLNVAFVDVGHASLQVSIVGYKKGQLKMLSHAYDRSLGGRDFDEALFKHFAAKFKEEYKIDVYQNARACLRLRVACEKLKKMLSANPEAPLNIECLMDEKDVRGFIKREEFEHISAPVLVRVKGPLEKALAEAGLTTENVHFVEVVGSGSRVPAIIKIITDFFGKEPRRTMNASECVARGCALQCAILSPTFKVREFQVNDGFPFSIALSWKQDSQNSAPQQTLVFPKGNVIPSIKALTFYKSSTFEVDVLYVDTCDSQIPQKISTYTIGPFQPSKGERAKLKVKVRLNIHGIVTVDSAMMLEEDVAVPVSSANEAPKDTTKMDTDDAPSDPVSGTDVNVHEPDTTEAAPAAENGTQNPEEKSVPMETDAKVRSILEAIILVVEPSKRKVKRTSVPVHALVYGALAAADLQKAVEKEYEMALQDRVMEETKEKKNAVEAYVYDMRNKLYDRYNDFVTPEEKEGLIGKLQEVEDWLYEDGEDETKGVYISKLEDLKKIGDPIEARYKESTERGSSVDQLVYCINSFREAALSSDQKFGHIDISEKQKVINECSEVENWLRERKQQQDALPKHTDPVLLVSDLKKKAEALDRFCKPIMTKPKPAPKPQTPPPHTPPPQPEAQASDPQTPEQQQSGTGAAGEPGSEGGVQQASGEQMDMDRPDDSADVAA

SEQ ID NO: 19612 - protein, 251 aa, Zea mays
  VARIANT 224: note = Ancestral polymorphism is S, Derived polymorphism is Y
  VARIANT 216: note = Ancestral polymorphism is N, Derived polymorphism is D
  VARIANT 210: note = Ancestral polymorphism is V, Derived polymorphism is A
  VARIANT 209: note = Ancestral polymorphism is D, Derived polymorphism is V
  VARIANT 207: note = Ancestral polymorphism is D, Derived polymorphism is G
  VARIANT 206: note = Ancestral polymorphism is T, Derived polymorphism is N
  VARIANT 142: note = Ancestral polymorphism is G, Derived polymorphism is R
  VARIANT 134: note = Ancestral polymorphism is E, Derived polymorphism is V
MRTAAATVPAAPALGVGLQSQLPIAAAAGKEGPALLASTDAKRIIDEERANARLEIGRAKASVQKIQSALKEQEKFSHRTGKQDVDELKEEVQEAPRVKMLHCPSKAMDIENEIQVLCDQLAKTSSYSLRLLKVLELHRSYGENDMPLYELKGTTKPAYAPEPHDVGRYTQAEVKSGGQTSITKTAGSVHPGLVHYVEALVRRRETGYDVVILQVNGVAQAADSVHILCIGRLQMRLAKEKTIIVKEFYST

SEQ ID NO: 19613 - protein, 96 aa, Zea mays
  VARIANT 41: note = Ancestral polymorphism is A, Derived polymorphism is T
  VARIANT 24: note = Ancestral polymorphism is G, Derived polymorphism is D
MLPPDLLLSGIWRSGFAPPHLVAGLLTSTSPRHRRLLFAIAPLASCANDPTNLAAKQGHTGVRCYEHVTLNLLVLEWITVVRNFCWDCDIKKLKLS

SEQ ID NO: 19614 - protein, 313 aa, Zea mays
  VARIANT 24: note = Ancestral polymorphism is A, Derived polymorphism is V
MAGGGSRRAGAAEQPKIGSGNVFAALETLKKKKKPADKGAKPAAREDPKPEVFWAPAPLTAKSWADVEDDDDDDYFATTAPPPRPVWGDAHRDAAKDQHDAPALEEEIESEDDGLDDEVDDDADEDHEDKADDAVPAEPTVKNATAPPAPPKDTERQLSKKELKKKELAELDAVLAELGLGTSNNSIQEEPNGKKGADQVADGEKKEDAPAPLESKNSKKKKSKKEKSSKELKEAQDQANGLEAAAVAEPDEDTASVDVKERIKKVASMKKKKSSKEMDAAAKIAASEAAARSARLAAAKKKEKSHYNQQPVR

SEQ ID NO: 19615 - protein, 146 aa, Zea mays
  VARIANT 2: note = Ancestral polymorphism is T, Derived polymorphism is K
  VARIANT 48: note = Ancestral polymorphism is A, Derived polymorphism is V
  VARIANT 62: note = Ancestral polymorphism is R, Derived polymorphism is L
  VARIANT 89: note = Ancestral polymorphism is R, Derived polymorphism is K
MTDGELLWRASFTPAVPILTRMEGCLHVPHARAGAAQGVPHYYIYVHALSANFTFESIFSQRQIPTFKKALHGPDKSRIDFMREIVCLRIALRLSNKDDDQYRSYLNNDRLSSPPKKYVAQSTYRIKASQLHKLQSDFTDPENDNH

SEQ ID NO: 19616 - protein, 430 aa, Zea mays
  VARIANT 67: note = Ancestral polymorphism is A, Derived polymorphism is T
  VARIANT 103: note = Ancestral polymorphism is A, Derived polymorphism is V
MEPAAAVERLAQRLVPPAEPTPTGPHGLSWLDRYPTQMALIESLHVFKPDPARDGASPSETIERALARALVDYYPLAGRLAVSEGAGGLHVDCSAEGVWFIEAAVRCRLEDVDYLEYPLQIPKDDLLPHPLPRPTHQEESKLILLVQVTAFECGGFVVGFRFSHAVADGLGAAKFMGAVGELARGADRVSVAPTWARDAIPDPAGALVGSLPEPTGAKRLEYLAVDISADYIDHFKSQFAAATGGGRCSAFEVLIAKAWQSRTRAAGFEDPDTPVQLCFAMNARPLLGARLPRGGAGFYGNCYYIMRVASTADKVSSSSVADVVKVIREGKKRLPSEFARWAAGEEDADPYQITSDYRTLLVSDWTRLGFAEVDYGWGPPAHVVPLTNLDYIATCILVKPWAHKPGARLITQCVTPDRVSRFHDAMVDMN

SEQ ID NO: 19617 - protein, 93 aa, Zea mays
  VARIANT 64: note = Ancestral polymorphism is E, Derived polymorphism is K
  VARIANT 8: note = Ancestral polymorphism is S, Derived polymorphism is F
MELAASASASVCSAYHHLSVPAAAADAAATDRGGAQETTTTRLDRRRGKRAGGGCAGLRRRCYKVLKQQRTRLYILRRCVTMLLCWHEHDLSD

SEQ ID NO: 19618 - protein, 196 aa, Zea mays
  VARIANT 169: note = Ancestral polymorphism is G, Derived polymorphism is E
  VARIANT 165: note = Ancestral polymorphism is R, Derived polymorphism is H
  VARIANT 158: note = Ancestral polymorphism is D, Derived polymorphism is Y
  VARIANT 112: note = Ancestral polymorphism is S, Derived polymorphism is P
  VARIANT 111..196: note = Derived polymorphism lacks residues 111 to 196
  VARIANT 39: note = Ancestral polymorphism is A, Derived polymorphism is T
  VARIANT 33: note = Ancestral polymorphism is S, Derived polymorphism is T
  VARIANT 12: note = Ancestral polymorphism is A, Derived polymorphism is V
  VARIANT 8: note = Ancestral polymorphism is R, Derived polymorphism is C
  VARIANT 3: note = Ancestral polymorphism is P, Derived polymorphism is S
MVPTKRKRSTGAAVVATVVKWKVGDLVLTKMKSFPAWLAMAGVSHLGFGGSLGRLVSFSKDMRSLMEPAYGNMKNSQCFMKRKELASEAHARCNLMFETIPKFARCNLMLQSYIERHTYSLHYIVYDKSQVKANQLPVANMIGYLEAKNHLLLGYCQDIVYYLLRKAKGLSVDGHPIACLLELLLQPSVSSLPYVD

SEQ ID NO: 19619 - protein, 84 aa, Zea mays
  VARIANT 66..84: note = Derived polymorphism lacks residues 66 to 84
MGGRVDHEYSYLFKMVLIGDSGVGKSNILSRFTRNHFSLDSKSTIGVEFATKSLQRSWFMVRVHFSTIKLRSVSQSFNAILWNR

SEQ ID NO: 19620 - protein, 558 aa, Zea mays
  VARIANT 357..558: note = Derived polymorphism lacks residues 357 to 558
  VARIANT 265..558: note = Derived polymorphism lacks residues 265 to 558
  VARIANT 244: note = Ancestral polymorphism is D, Derived polymorphism is Y
  VARIANT 169: note = Ancestral polymorphism is A, Derived polymorphism is P
  VARIANT 167..558: note = Derived polymorphism lacks residues 167 to 558
MGYLSCRADSSVATCRSITAIPPLPTSRRSGPGAGSSRPALPPAPAAIERFDYAEVEAATSHFADAALLGRGSHGAVYKAVLPSGRAVAVKRPSPRRPEVDNEIRILSSVSGPRFVNLLGFSDPGPAPAPAARLLVVEYMPNGTLYDLLHRNPRPPGWPRRLRLALQTARALRALHDADPPVIHRDVKSANVLLDANLGARLGDFGLALRVPKAAGVATPAPAGTLGYLDPAYVTPESLSTKTDVFSFGILLLEIMSGRKAIDVQHSPPFVVEWAVPLLRKGKVASLFDPRVAPPRDPLTRKDLAALAASCVRSCRERRPSMADIVQRLVVLSKAVSAKVWNGLAVVGNPCAVVDVQTISKRAAASNRAESERESSSALAFDDDEKEEADAEPLDEDQVPLVGAKKLPQPLKNGIVLPESGARERRNLLDLMARIDGVASQRFGISRARTVRATSELIEKDAVLLLRRNQTVRVVGSKALPKSERISRYDVKIKHKAVEEQEKAGKVQEKAEKIQDNAGGVQEGYKEILGKTDSNARQRKSRKVKEESETKYKSSSED

SEQ ID NO: 19621 - protein, 312 aa, Zea mays
  VARIANT 102: note = Ancestral polymorphism is I, Derived polymorphism is T
  VARIANT 76: note = Ancestral polymorphism is R, Derived polymorphism is K
  VARIANT 74: note = Ancestral polymorphism is A, Derived polymorphism is V
  VARIANT 66: note = Ancestral polymorphism is G, Derived polymorphism is D
  VARIANT 61: note = Ancestral polymorphism is G, Derived polymorphism is D
  VARIANT 32: note = Ancestral polymorphism is K, Derived polymorphism is R
  VARIANT 8: note = Ancestral polymorphism is T, Derived polymorphism is R
  VARIANT 4: note = Ancestral polymorphism is V, Derived polymorphism is M
MQAVDNLTLRRFLRARDHDVDKASAMFLKFLKWRREAAPGGSVPEEQVRRELSQDKLCMGGVDRAGRPILVAFAARHFSAGHDMAEFKSFVVYFFDKICARIPRGQEKFLCIVDLKGWEILVFLQVNKVHTKKAAAPKIAKQESSDDDTSDETFESDEEPAKKPVAKPLAAVAKNGSKTVKQESSSDEDSSEDESDDDSDDGSDIVFNLLNRVYDDVGKRWSRFSSLGLRGLPGIKVNDSIMLFVLCLWLSMAFNTNYEIVFLIISGMMRTIWSPNRSTDDYRNKDEVSVLTEEFKTQLTIREDLFITTKVV

SEQ ID NO: 19622 - protein, 164 aa, Zea mays
  VARIANT 101: note = Ancestral polymorphism is G, Derived polymorphism is S
MEAKMGRFFESVSNFFTGGDHIPWCDRDLIAGCEGELVNAVNEEQRNESLMRLSWALVHSRQTDDVNRGISMLQASLDNSASPLQTREKLYLLAVGFYRIGDYSKSRQLADRCLEIQADWRQAISLKKAIEDKIAKDGLIGIGIATTAVGLLVGGIAAAVARKK

SEQ ID NO: 19623 - protein, 320 aa, Zea mays
  VARIANT 287: note = Ancestral polymorphism is E, Derived polymorphism is D
  VARIANT 253: note = Ancestral polymorphism is A, Derived polymorphism is T
  VARIANT 206..320: note = Derived polymorphism lacks residues 206 to 320
  VARIANT 156: note = Ancestral polymorphism is R, Derived polymorphism is S
  VARIANT 56: note = Ancestral polymorphism is G, Derived polymorphism is A
  VARIANT 50: note = Ancestral polymorphism is I, Derived polymorphism is V
  VARIANT 33: note = Ancestral polymorphism is K, Derived polymorphism is E
  VARIANT 26: note = Ancestral polymorphism is Q, Derived polymorphism is R
MASISVPDPVPSATEDAENIRKAAVQGWGPDKKALMEILGHRTAAQRAEIAAAYAGRYNESLLDRLHSVLSGDFRSAMMLWTADPAARDAKLAHKAMKKKGERYVWVLIEVACASTPDHLVAVRKAYRESYPASLEEDVAACPLYKDPRVKQFLVRLVSSYRYSGDLVDDELARAEAAELHDAVVARKQLLHGQVVRIVSSRSKQQLQATFERYRQDRGKAFDEVLEERRSDQLAAMLKTAVWCLTSPEKHFAEVIRRSIVGLGTDEESLTRVIVSRAEIDMKKVKEEYKVRYRTTVTSDVNGDTSGYYNSILLTLVGRE

SEQ ID NO: 19624 - protein, 460 aa, Zea mays
  VARIANT 389: note = Ancestral polymorphism is R, Derived polymorphism is W
  VARIANT 49..460: note = Derived polymorphism lacks residues 49 to 460
  VARIANT 41..460: note = Derived polymorphism lacks residues 41 to 460
  VARIANT 28..460: note = Derived polymorphism lacks residues 28 to 460
  VARIANT 10..460: note = Derived polymorphism lacks residues 10 to 460
MQQVLVPMRYAYTNIVAITGHFRDKLGQGGYGSIYKGVLQRGEVHVAVKMLGNSNCNGEEFISEVATICKIHHVNVVRLGVEIRNSAATDDDMANHQLVSYHELARATENFSDANLLGSGSFGKVFKGQLSNGLVVAVKVIRMHMEQAAARFDAECCVLRMARHRNLIRILNTCSNLDFRALVLQYMPNGSLEELLRSVNRGMRLGFVERLDIVLDVSMAMEYLHHEHCEVVLHCDLKPSKLRHETLKQQLCRKLINGVSVHKHVPGQSSVIPPETNSISMQDLKAPNESLYEQKPEETTPVLPSSVIASTAARSKPHTSRFEYVENAAAPKTGSSSEGNLMSGHVAPPKSSNFFVEFGMDSGYHKKYTSSSSKVQLLPDIMFLCTGLRPVVLVDYGGTMPQLQENLCGLLYIARQFKLCKVRSVQFGQKGIPYLNTYDDRTIRYPDPLIKANDTIKIDL

SEQ ID NO: 19625 - protein, 63 aa, Zea mays
  VARIANT 13: note = Ancestral polymorphism is E, Derived polymorphism is V
  VARIANT 25: note = Ancestral polymorphism is K, Derived polymorphism is E
MTTNTKRAYKLQEFVAHSSNVNCLEISRDSGCYKVILDCTPELRAYYAKCGFVDKGVQMAVYF

SEQ ID NO: 19626 - protein, 109 aa, Zea mays
  VARIANT 102: note = Ancestral polymorphism is S, Derived polymorphism is Y
  VARIANT 71: note = Ancestral polymorphism is I, Derived polymorphism is M
  VARIANT 69: note = Ancestral polymorphism is E, Derived polymorphism is D
  VARIANT 65: note = Ancestral polymorphism is P, Derived polymorphism is S
  VARIANT 64: note = Ancestral polymorphism is R, Derived polymorphism is Q
  VARIANT 63: note = Ancestral polymorphism is D, Derived polymorphism is E
  VARIANT 55..109: note = Derived polymorphism lacks residues 55 to 109
  VARIANT 50: note = Ancestral polymorphism is C, Derived polymorphism is Y
  VARIANT 35: note = Ancestral polymorphism is G, Derived polymorphism is R
  VARIANT 28: note = Ancestral polymorphism is L, Derived polymorphism is P
  VARIANT 20..109: note = Derived polymorphism lacks residues 20 to 109
  VARIANT 4: note = Ancestral polymorphism is E, Derived polymorphism is K
MTGEQRNVDPHAGSSSQAYYPSLVYSQLSQGDANGISEGVDMHKLEKKLCIIGLWCIQMKPQDRPTMREVIEMLEASVDGIQMPPRPFFCDDEGDSSYSAISKLDIIEE

SEQ ID NO: 19627 - protein, 682 aa, Zea mays
  VARIANT 548: note = Ancestral polymorphism is P, Derived polymorphism is L
  VARIANT 399..682: note = Derived polymorphism lacks residues 399 to 682
  VARIANT 226..682: note = Derived polymorphism lacks residues 226 to 682
  VARIANT 68: note = Ancestral polymorphism is S, Derived polymorphism is P
  VARIANT 52: note = Ancestral polymorphism is S, Derived polymorphism is W
  VARIANT 26: note = Ancestral polymorphism is A, Derived polymorphism is P
MGMSAASHLCASSSLRALTVLFLLAALVSDVEGRHHRHVCPHFSCGGLSNISYPFRRQGDPSGCGVQSYELVCTDTDATIRIGSGTYKVLSINSTYSYFWVIDADLDIQSSCPLPRWDYHARWINLYLHLWRIEFIYQYFYPSSFYIDSGRWAIFVNCSQPIENIDTDKYHIYEPVSCLSNSSFIYLLVTHYWDADNWDVTAGVLEPSCGYLAMTPLGGPGMQVPWNTSYPDVVKFMRSGFALGFPVWYGDNIRECLANNMRTFHKEPRNSTGIRQQILDILTFETLWFCVIEQLGSTNNGVKSVLIHIIEEIPYVLSGLKSAHVICRFILMPLAVFVFLAYKYWKTRITIDAVEKFLRMHHMLVPMRYAYTNIIAITGHFRDKLGQGGYGTVYKGVLQPGEVHVAVKMLGNSNCNGEEFISEVATIGKIHHVNVVRLIGFCSEENIRALIYEFMPRGSLDKYIFSSEKTFSWDKLNEIALGIARGLNYLHHGCDMQIVHFDIKPHNILLDSNFVPKVADFGLAKLFPRDDSFVPLSAMRGTIGYIAPEMVSRSFGVISSKSDVYSFGMLLLEMTGGRRNADPHAGSSSQAYYPSLVYRQLSQGDANRISEGVDMHELEKKLCIIGLWCIQMKPQDRPTMSEVIEMLEAGVDGIQMPPRPYFCDEEGESSYSTISELDTIEE

SEQ ID NO: 19628 - protein, 53 aa, Zea mays
  VARIANT 1: note = Ancestral polymorphism is M, Derived polymorphism is K
  VARIANT 6: note = Ancestral polymorphism is R, Derived polymorphism is Q
  VARIANT 9: note = Ancestral polymorphism is V, Derived polymorphism is I
MKHAYRVIVADPPYLSKECLEKFAKAVSFLARPEGSFLLLLTGNYSSWQCSVE

SEQ ID NO: 19629 - protein, 211 aa, Zea mays
  VARIANT 184..211: note = Derived polymorphism lacks residues 184 to 211
  VARIANT 182..211: note = Derived polymorphism lacks residues 182 to 211
MGQAYPRLVLLALVALLSAGLFPQALGNGKGKVHGGGAVNPLVAGICSRAPFPEVCTATAGRHASKYPVIDNLAVLNMQVAAFAKRTAQARKHVAVAARTIPPPQAQALRTCDTMYMNTQDAIGAAQRAIAFKDTGTAKIMLQLAVQDFDSCDRPFTHAGVPNPMARHQHKEPHPSIWISKELQRLERLIDRASEKGSNRLVLKGIRQTGS

SEQ ID NO: 19630 - protein, 375 aa, Zea mays
  VARIANT 277..375: note = Derived polymorphism lacks residues 277 to 375
MPLHHPKHRHHDEDLLPYRRSDDEAKPRRPYTPTFPSSPASTNRLLLFFAVACLVLAAASFAFAVSTSRNRQSLPQPPPTVAFRCGRAEDSLRSFLAASSHGNFSAGDREKVLAVVGVHTEHGNFSAARRAALRATWFPLNPEGIVSLEHGTGLSFRFVARRPKDKDKMEDLQKEADTYHDFLFIDADEATKPPQTMLAFFKAAYHMFNAEFYVKASDDIYLRPDRLAALLAKERPQHKTYIGCMKKGPVVNDPNLKWYESSWELLGNEYFMHASGSLYALSSEVVEALATAKSDSLRMFDYEDVTIGAWMLAMNVKHEDNRAMCDSVCTPTSIAVWDSKKCSGTCNVADKIKQLHNTTVCSKSPTLPPEVEEEE

SEQ ID NO: 19631 - protein, 249 aa, Zea mays
  VARIANT 235: note = Ancestral polymorphism is S, Derived polymorphism is P
MERTGHPAERETTTALPPSSESSMFRSFPGSPADEASSLRPRSSNNNSTTANSYHHHPAEVSSQSHLTELSPVTYGGGHRHCDDHQCYVNLDTILKLDDEFKRCHDEQPHNERAQHKNGFRGGAFVPYTRHLGPKKKPKPPAGSGGQRAIKAAMAALARMHMVRLAQWQCYQMELVVAPAPPTGGINGNNQQQHVLSERKRREKLNDSFKALRTVLPPSSKVLLRQFVQYHTIIPKRNNVYICFVVAER

SEQ ID NO: 19632 - protein, 161 aa, Zea mays
  VARIANT 73: note = Ancestral polymorphism is L, Derived polymorphism is F
MADALLPRRFLAPLSVVSGASSSASSSPPCLWVLSSPGSPRRPRLAAGHPQPRPRRFTRHKLCRTALENPDILFLKVNFDENKPMCKRLNVKVLPFFHFYRGADGLLEAFSCSLAKFQKLKDAIAMHNTARCSIGPPVGVGDVDLLDNASPQEKPAEASPR

SEQ ID NO: 19633 - protein, 219 aa, Zea mays
  VARIANT 19: note = Ancestral polymorphism is M, Derived polymorphism is I
MEPGLARRLWHVVVAVCHILRRGLSPKRIMMDVHLLLGRGKLVGRTLRGHLAHPSSGHHLATYGASSSSSSTLASFYGHPREVEFSCATTPSYPQQHYGLFPSNKARGGGGYGGLDAAAVARAFEMLSRAEVDAGGGSGTPATATPSPMLAWILGRSPAGVRPLRVTDSPFPAVAGDGDGCCGERVDADADDFIRKFYEQLRLQPTAATPDAHLRRRGY

SEQ ID NO: 19634 - protein, 89 aa, Zea mays
  VARIANT 68: note = Ancestral polymorphism is M, Derived polymorphism is I
  VARIANT 56: note = Ancestral polymorphism is A, Derived polymorphism is T
  VARIANT 55: note = Ancestral polymorphism is N, Derived polymorphism is Y
  VARIANT 54: note = Ancestral polymorphism is A, Derived polymorphism is T
  VARIANT 52: note = Ancestral polymorphism is S, Derived polymorphism is F
  VARIANT 47: note = Ancestral polymorphism is C, Derived polymorphism is G
  VARIANT 45: note = Ancestral polymorphism is A, Derived polymorphism is V
  VARIANT 44: note = Ancestral polymorphism is A, Derived polymorphism is V
  VARIANT 39: note = Ancestral polymorphism is D, Derived polymorphism is G
  VARIANT 28: note = Ancestral polymorphism is L, Derived polymorphism is M
  VARIANT 25: note = Ancestral polymorphism is E, Derived polymorphism is K
  VARIANT 24: note = Ancestral polymorphism is P, Derived polymorphism is S
  VARIANT 21: note = Ancestral polymorphism is E, Derived polymorphism is V
  VARIANT 13: note = Ancestral polymorphism is A, Derived polymorphism is T
  VARIANT 12: note = Ancestral polymorphism is A, Derived polymorphism is V
  VARIANT 1: note = Ancestral polymorphism is M, Derived polymorphism is V
MEVTIAEKKPRAAGDGGGLVERLPEALLVEVLARVDVDGACSAAASCRSLYSAANAVLPALTSIDLSMSFSLPFSPTACQTGSFPFLPL

SEQ ID NO: 19635 - protein, 187 aa, Zea mays
  VARIANT 114: note = Ancestral polymorphism is A, Derived polymorphism is D
  VARIANT 151: note = Ancestral polymorphism is D, Derived polymorphism is H
  VARIANT 165: note = Ancestral polymorphism is A, Derived polymorphism is T
  VARIANT 178..187: note = Derived polymorphism lacks residues 178 to 187
MEKAEEAAAAAAQEQWQGVVEANLPSTPASAAWPHIASFCALHRYLPGIDVCELAAGEDGRPGCVRYVASLVPGTTTGEVRSWAREKLLEIDDGARRLGYAVVGSSMGFGSYVATMSVVAGDADEGCRLVWAFECQPVQGWSRDGLLAYLDGGVRAIAARIEEAARAAYAAANATPEEAAASVAANA

SEQ ID NO: 19636 - protein, 322 aa, Zea mays
  VARIANT 260: note = Ancestral polymorphism is A, Derived polymorphism is V
  VARIANT 259: note = Ancestral polymorphism is R, Derived polymorphism is C
  VARIANT 88: note = Ancestral polymorphism is R, Derived polymorphism is C
  VARIANT 46: note = Ancestral polymorphism is S, Derived polymorphism is F
MVSRTPTKPRPSPKTGTGTGIGSVTPPKSSPTLVARRCLALRRRVSPATAKRRGSPLKSLASAPTAVAASFDRSIRSCRRRLLKLFARLAVLGSSRKRRAASAGFQRLRSSSAPPPPPPPLPLPSQNPAVRAQSAALPPPPSPGRRTLFLDLDETLIHSQTEPPPSRFDFTVRPVIGGHAVTFYVVKRPGVEAFLRAAADAFEVVVFTAGLQEYASLVLDRLDPDGEVFAHRLYRGACRDAGDGTLVKDLAATGRALDRAVIIDDNPNAYALQPENAVPVAPFVDDDNDQELQRMTAFLDVAAGYEDTRDAIRCYKDLVTAT

SEQ ID NO: 19637 - protein, 111 aa, Zea mays
  VARIANT 80: note = Ancestral polymorphism is K, Derived polymorphism is E
MANSSHKTGVFVLLLLTASSSMLQATRVAAPPTDRRHAQAAHHQAHVKETLPSPAASQESTTRDMAPPSSDAETTTAVAKRWGTTTTTSTQVPDGSVPSPGIGHQQILLQQ

SEQ ID NO: 19638 - protein, 165 aa, Zea mays
  VARIANT 27: note = Ancestral polymorphism is E, Derived polymorphism is K
  VARIANT 34: note = Ancestral polymorphism is S, Derived polymorphism is I
  VARIANT 83: note = Ancestral polymorphism is N, Derived polymorphism is K
  VARIANT 108: note = Ancestral polymorphism is E, Derived polymorphism is D
MYIFPLDEDADLILGEGQSSKTLENSEHNIKPQIFDVAKVDEILKPLAGKTLSYKMFAHDTHASRMAHLQNVSCSIPELQWPNYILLMRITKEAWWSCVVTYHCFRQEMYYVNQELTVEDFLYDYDYKIDLSSMQHVHGMSTSLLDFWYDQFYQIMYSNLFTPRL

SEQ ID NO: 19639 - protein, 181 aa, Zea mays
  VARIANT 60: note = Ancestral polymorphism is G, Derived polymorphism is C
  VARIANT 70: note = Ancestral polymorphism is Y, Derived polymorphism is C
  VARIANT 86: note = Ancestral polymorphism is L, Derived polymorphism is F
  VARIANT 93: note = Ancestral polymorphism is L, Derived polymorphism is F
  VARIANT 136: note = Ancestral polymorphism is A, Derived polymorphism is V
MASEKKQSNPMREIKVQKLVLNISVGESGDRLTRAAKVLEQLSGQSPVFSKARYTVRSFGIRRNEKIACYVTVRGEKAMQLLESGLKVKEYELLRRNFSDTGCFGFGIQEHIDLGIKYDPSTGIYGMDFYVVLERAGYRVARRRRCKSRVGIQHRVTKEDAMKWFQVKYEGVILNKAQNTS

SEQ ID NO: 19640 - protein, 224 aa, Zea mays
  VARIANT 47: note = Ancestral polymorphism is V, Derived polymorphism is D
  VARIANT 44..224: note = Derived polymorphism lacks residues 44 to 224
  VARIANT 32: note = Ancestral polymorphism is V, Derived polymorphism is G
  VARIANT 27..224: note = Derived polymorphism lacks residues 27 to 224
  VARIANT 16: note = Ancestral polymorphism is R, Derived polymorphism is C
  VARIANT 9..224: note = Derived polymorphism lacks residues 9 to 224
MPPKLEASQVVEVFVRVTGGEETAKDWKGLRVTVKLTVQNRQAKVSVIPSAAALVIKALKEPERDRKKVKNIKHSGNISLDDVIEIAKTMRHRSMAKELAGTVKEILGTCVSVGCTVDGKDPKDLQQEIDDGEAKGRLHRWDFETEEEWAKYNDQKEAMLKAAFQFGVKMQDGRKTRKQNKDQKLTNDLHKINKILARKKGEKDGVEDGGHYDDDLPSSKKQRG

SEQ ID NO: 19641 - protein, 417 aa, Zea mays
  VARIANT 99..417: note = Derived polymorphism lacks residues 99 to 417
MTDGDDEYKREESVALLVIVFLAALSLLSVIAAFAYYCYITRKVSRRLQAFHIPKRSSSHHTLPPRALPPQQQGTDNPSSNSTRDGVGAAAMSVVAAGERGVQVFSYRQLHAATGGFDRAHMVGQGSFGTVYRGVLPDGRKVAVKLMDRPGKQGEDEFEMEVELLSRLRSPYLLGLIGHCSEGEHCLLVYEFMANGGLQEHLYPNRGSCGGISKLDWDTRMRIALEAAKGLEYLHEHVNPPVIHRDFKSSNILLDKDFHARISDFGLAKLGSDRAGGHVSTRVLGTQGYVAPEYALAGHLTTKSDVYSYGVVLLELLTGRVPVDMKRSPGEGVLVNWALPMLTDRDKVVRILDPASEGQYSLKDAVQVAAIAAMCVQPEADYRPLMADVVQSLVPLVKNRYNQKSCNPNVQPSKPLD

SEQ ID NO: 19642 - protein, 267 aa, Zea mays
  VARIANT 42: note = Ancestral polymorphism is L, Derived polymorphism is F
  VARIANT 35: note = Ancestral polymorphism is G, Derived polymorphism is E
  VARIANT 21: note = Ancestral polymorphism is R, Derived polymorphism is C
  VARIANT 5: note = Ancestral polymorphism is P, Derived polymorphism is S
MLFTPIEELDPRSTNVAIRVCIIRKWEFRGAINDGPLCHVNLILADKQGTTIHTEIQVALVADKGSLIQLDKVYELKHFRVASSRNYYKPVDNSMMIQFTLYTQAKVLKDPPPTFPRYAYKLTSFENIGNNVDNKTYLIDVLGILTEIGSLHHVGYNNSNIIRDIFLKDINYTIYIYKYNNKCVTPNVGEAYLSATVACTWYFNPDIPEVYMYYNKNEVSYAPSLYHAPNKMVDGGSHPVSSATSLHPRHLLGTNAHRAMGQKLSSG

SEQ ID NO: 19643 - protein, 135 aa, Zea mays
  VARIANT 1: note = Ancestral polymorphism is M, Derived polymorphism is V
MQADSTLPAAQRRNYKNAFHALYRITADEGEGVLALWKGAGPTVVRAMALNMGMLASYDQFFASACSLPFDYVKTQIQKMQPDANGKYPYTGSLDCAMKTFKSGGPFKFYTGFPVYCVRITPFVMIQKFEKKIGI

SEQ ID NO: 19644 - protein, 563 aa, Zea mays
  VARIANT 344: note = Ancestral polymorphism is D, Derived polymorphism is N
MGRFEQVTPEGPETNQHDEQRSIRLHAFSDLSHVPAATFIYLLKDCYGYGTNKATSKFKILMQLVKVALHNGPQPGPFTYVVQCMYIVPLLGKTYSEGFSHMLTSSLKHLKSVESAQKDFLEAKHLAAQLVLDILDSIVPHENRILVKLLETFEIELRDMARALYDSELDDGDLMKAREHLRQQVKRCMESESNALAVTLITHFSIQCCDESFIIKLIKNNQLEIAEQCAIFMGKEMISLVVQKYLDMKMLKSANKLVKEHELTEEFPDVSYLYKESSVKKLAEKGCWDIAETRAKKDTKLLEYLVYLAMEAGYMEKVDELCKRYSIEGYVDSLVPEKVFCVSDYLDLKKLDVEEIVWVDEINGLLNATSDIEACKIIGMDCEWRPNFEKNTKSSKVSIIQIASDKIAFIFDLIKLYEDDPKALDSCLRRVMCSSKILKLGYDIQCDLHQLTRSYGELECFQSYEMVLDMQKLFKGVTGGLSGLSKEILGAGLNKTRRNSNWEQRPLTQNQKEYAALDAVVLVHIFHEHMRRQAQFGVSEGSRVEWRSHVVSRVSCTRTPLRF

SEQ ID NO: 19645 - protein, 362 aa, Zea mays
  VARIANT 86..362: note = Derived polymorphism lacks residues 86 to 362
  VARIANT 120: note = Ancestral polymorphism is R, Derived polymorphism is C
MPGDVATSPAPAPPSVSSSSQNHHHHGPTTARGLLCHAVAGASAGVVAATFVCPLDVIKTRFQLLLPNLLKYQTMRTTVLHLNCLWTLRFIMCCQSILGSVIIGSLQQIAQREGFRGMYRGLSPTVLALLPNWAVYFTVYEQLKSLLSSNDGSHQLSLGANVVAASCAGAATTTVTNPLWVVKTRFQTQGIRAGPMPYKGTLAALRRIAHEEGIRGLYSGLVPALAGISHVAIQFPAYEKIKAYLAERDNTTVEALSFGDVAVASSLAKVAASTLTYPHEVVRSRLQDQRAHSDARYKGVVDCIRKVYHKEGVAGFYSGCATNLLRTTPAAVITFTSFEMIHRFLLDLFPAESEPHIQPLKH

SEQ ID NO: 19646 - protein, 70 aa, Zea mays
  VARIANT 33: note = Ancestral polymorphism is V, Derived polymorphism is I
MSHSHSTKTSWPEVEGMPAEVAKRKIQEDRPDIQVILVPVDSAVTDDFNTKRVRVFFDKAGNVAQVPKIG

SEQ ID NO: 19647 - protein, 323 aa, Zea mays
  VARIANT 189: note = Ancestral polymorphism is P, Derived polymorphism is R
MQHMLVPMRYAYTNIIAITGHFRDKLGQGGYGSVYKGVLLPGEIHVAVKMLGNSNCNGDEFISEVATIGKIHHVNVVRLIGFCSEENIRALIYEFMARGSLDKYIFSSEKTFSWDKLNEIVLGIPRGLNYLHHRCDMQIVHFDIKPHNILLDSSFVPKVADFGLAKLFPKDDNFVPLSAMRGTIGYIAREMVSRSFGVISSKSDVYSFRMLLLEMTGGRRNADPHAGSSSQAYYPSLVYKQLSQGDANRISEGVDMHELEKKLCIIGLWCIQMKPQDRPTMSEVIEMLEAGVDGIQMPPRPYFCDEEGDSSYSTISELDTIEE

SEQ ID NO: 19648 - protein, 60 aa, Zea mays
  VARIANT 9: note = Ancestral polymorphism is A, Derived polymorphism is S
MAKSKNHTAHNQSFKAHKNGIKKPKRHRQTSTKGMDPKFLRNLRYSRKGNKKSCEAESEE

SEQ ID NO: 19649 - protein, 973 aa, Zea mays
  VARIANT 665..973: note = Derived polymorphism lacks residues 665 to 973
  VARIANT 607..973: note = Derived polymorphism lacks residues 607 to 973
  VARIANT 578..973: note = Derived polymorphism lacks residues 578 to 973
  VARIANT 433..973: note = Derived polymorphism lacks residues 433 to 973
  VARIANT 421..973: note = Derived polymorphism lacks residues 421 to 973
  VARIANT 26: note = Ancestral polymorphism is A, Derived polymorphism is P
MGMSAASHLCAPSSLRALTVLFVLAAFVSDVEGRHHRHVCPHFSCGGLSNISYPFRRQGDPSGCGVQSYELVCTDTDATIRIGSGTYKVLSINSTYSYFWVVDANLDIQSSCPLPRWDYHARRTSRNRNLHRRRIEFSHDFSNSTPTMWVYAYFYPDWTSSNSYRQRVEFSHDTPFSSYMDYSGWAIFVNCSQPIENNDTDKYHIYEPVSCLSNSSFIYLLVTDYWYDDNVSAGDLEPSCGYLAMTPLGGPGMPVPMNTSYPDVVKFMRNGFALRFPLSIEYYPNIRECLAENMRAFHEEPRNSTGIREQILDILTFETLWFCVIEQLGSSNNGVKSVLINIIVRIIPYVLWGLKSAHVICRFVLMPLAVFVFLAYKYWKTRITIDAVEKFLRMQHMLVPMRYAYTNIIAITAHFRDKLGQGGYGTVYKGVLQPGEVHVAVKMLGNSNCNGEEFISEVATIGKIHHVNVVRLIGFCSEENIRALIYEFMPRGSLDKYIFSSEKTFSWDKLNEIALGIARGLNYLHHGCDMQIVHFDIKPHNILLDSNFVPKVADFGLAKLFPRDDSFVPLSAMRGTIGYIAPEMVSRSFGVISSKSDVYSFGMLLLEMTGGRRNADPHAGSSSQAYYPSLVYSQLSQGDANEISEGVDMHELEKKLCIIGLWCIQMKPQDRPTMTLVLDVEGRHHRHVCPHFSCDGLSNISYPFRRQGDPSGCGVQSYELVCTDTDATIRIGSGTYKVLSINSTYSYFWVIDANLDIQSSCPLPRWDYHARWINLNSHRLWIELSHYSFYSFYMDSGQWAIFVNCSQPIENNDTDKYHYEPVSCLSNSSFIYLATGYWYDDYVSAGDLEPSSGYLAKTPLGGPGMTVPSNTSYPDVVKFMRSGFALRFPFSYGDNIRECLAKDMRTFHKEPRNSIGIRQQILDILTFETLWFCFIEQLGSTNNRVKSVLINIIVRIIPYVLWGLKSAHGTHSR

SEQ ID NO: 19650 - protein, 217 aa, Zea mays
  VARIANT 21: note = Ancestral polymorphism is Q, Derived polymorphism is L
MEHDEEEELPSPSSSLGYLMLCRICHEEEDGGRATMESPCGCSGSLKYAHRRCVQRWCDEKGTAICEICLQNFEPGYTMPPKKTPVVETAVTISEHEDMQSLESREGLSGGAGYTRCSYTADQCATWCRSLAITDSDFCNPVQFTIMLLAWHLVAVVTVEAAAHCAFSLLAMYLLRAAGILLPLCVVMRLIRIVQSGQEQQYGLQLLEHQRRNVSTI

SEQ ID NO: 19651 - protein, 637 aa, Zea mays
  VARIANT 256: note = Ancestral polymorphism is G, Derived polymorphism is R
MAVKPTPAAAAALHGDQQVAAALLAAAGALCDYGDVVPVPGVLPPCPHRHLHRTHCPLSPLLPHPSCTPHLPAPLSPPHLTSGSARTSAVVLLPRGALPLLPPRRRSLTGSPQLATPACGAYDVLWGFAAGRFLSTSSASDEDGGSLEQEDAATSNPEGVGRVCAAIADVIAAGADANLEAALSALSPPLCEAVVLAVLHRFKHAHRPSYRFFRWATASGGFTHTTITYCKMLLILGKTRQFESMVALLQEMGKAGTLSMDAFKVAIKSFAAAGEIKNAVGVFELMRKNGFDDGVESFNCLLVALANEGLGREARQVFDKMLGQYSPDLRSYTALMLAWCNARNLVEAGRVWNEMLEKGMKPDVVVHNTMIEGLLRGQRQHEAVKMFELMKAKGPPPNVWTYTMLICNHCKRGKMDMAMECFEEMQEARCQPDVATYTCLLVGYGNAKRMDRVTAVLEEMTQKGCPPDARTYNALIKLLTNRKMPDDAARIYKKMIKKGLDPTIHTYNMMMKSYFLGDRNYAMGCAVWEEMHRRGICPDVNSYTVFISGHIRHGRPEEAYKYIEEMINKGMKAPQIDCNKFAADLSKAGKLDMLYELAQKVKFAGKFDVSNAFYQWADRMKSQVKRNVSNQIGNRMF

SEQ ID NO: 19652 - protein, 134 aa, Zea mays
  VARIANT 68: note = Ancestral polymorphism is L, Derived polymorphism is R
MTRLCSSPAVKPKKKAHYCSSIFMSMQQQLCLVSGDKWRWHYQFLDVPGMFGLLYSDIVWFNIFKIYLETNKIMDFFKFDVGNVVMVTGGRNTGHVGVIKNWEKHKGSFEVIDVLLGAFCMLCLVFSYLLYRKT

SEQ ID NO: 19653 - protein, 163 aa, Zea mays
  VARIANT 9: note = Ancestral polymorphism is S, Derived polymorphism is Y
MAKLHRLISAVLRLAAAGAAAAAAVIMVTSHETTSLFGIEMEAKYSYTPSFVFFVVAFAVTFAYSLLAAVLVRPGTTASRLVLLSDVTVGMLLTGAVAATGAISQVGKSGNEHAGWLPICAQVQAYCGHVMGALIAGFVSLLLYFLIIMYSLHAVAEPLCSCH

SEQ ID NO: 19654 - protein, 589 aa, Zea mays
  VARIANT 471: note = Ancestral polymorphism is R, Derived polymorphism is W
MGFRGGLRPPVTRVCFVLLCLCASLSEAKRTPQPAPTTGKKQQPPAASSSQQSPAVSYPALPVRAVCLGGWLVTEGWILPSLFDGIPNKDLLDGTQLQFKSALRKTYLTADNGGGGAVVANRTQASDWETFKVRSDNDAGLRLENSSYLINGGSMQLWRLNDTTFNFRTSGNQFVGIGASDGIIVATATTPGLPETFQIVRCPFDKNRVRIKAANGYFVQAIATGEVIADYGEPTRWSDFDASVFLMTTVGQQLQGEYQLCNGYGADKAAPLLREHWSTYIVEDDFKFFASSGLTAVRIPVGWWIASDPSPPAPYVGGSLQALDNAFRWAEKHELGVIVDLHAAPGSQNPWEHSSSRDGTQEWGTTDASIAQTVQVIDFLASRSETNKHHARILSPNPPNDRRYTHARRYATSPRLLAVELLNEPLAPGATLDSLTRYYRDGYAAVRKHAPAAYVVMSNRLSSGNSTELLWFAGRGFPGAVVDVHYYTVFNSLFGNFTAQQNIDFVRTNFSGELAAVTTRDGPLTFVGEWVAEWKVPNATKEEYQKYAAAQMNVYGQATFGWAYWTAKNANNHWDLEWMIRNGYISLKG

SEQ ID NO: 19655 - protein, 178 aa, Zea mays
  VARIANT 25: note = Ancestral polymorphism is Y, Derived polymorphism is C
MVRVNNSCCRLQLAISMFVISGLSYHQQPAVSPGDGASAAPSDDDRDHNLTVLLTFGIFFSFTLLYLVAGVICASVVTACAVALSCCYLKARQRVALHRREALLLHAARSRGPRTEASAALVLSAIPAFAYKREGGTTTTGRGGDAAGWAQCVICLGLVQVGEVVRRLPVCQHLCGVH

SEQ ID NO: 19656 - protein, 171 aa, Zea mays
  VARIANT 20: note = Ancestral polymorphism is D, Derived polymorphism is G
MISNISFTYRSIYSKKAMTDMDSTNLYAYISIIALFVCIPPAIIIEGPQLVQHGFKDAIAKVGLTKLISNFFVVGLFYHLYNQVATNTLERVAPLTHAIGNVLKRVFVIGFSIIAFGNKITTQTGIGTSIAVSGVALYSFIKAKIEEKKVLMSHDIPSLIAGLQLVIFYSR

SEQ ID NO: 19657 - protein, 216 aa, Zea mays
  VARIANT 19: note = Ancestral polymorphism is F, Derived polymorphism is I
MLRPEPPQVPLALQLRKLFFWSLVTGIFYYREAKPQGFAERYPALVTGFFFFLWYFLNVIFNILNKKIFDYFPYPYFVSVSHLFIGVLYCLIGWSFGIPKRAPINSTLLKQLVPVAVCHAIGHVTSTVSFAAVAVSFAHTIKALEPFFNAAASQFILGQPVPLTLWLSLVPVVIGMSYSRFCFSCGASCINLYFVICCNINTTVSVLKTRFNLALL

SEQ ID NO: 19658 - protein, 75 aa, Zea mays
  VARIANT 67..75: note = Derived polymorphism lacks residues 67 to 75
  VARIANT 49: note = Ancestral polymorphism is G, Derived polymorphism is V
  VARIANT 33: note = Ancestral polymorphism is A, Derived polymorphism is T
  VARIANT 32: note = Ancestral polymorphism is A, Derived polymorphism is T
  VARIANT 30..75: note = Derived polymorphism lacks residues 30 to 75
  VARIANT 29: note = Ancestral polymorphism is R, Derived polymorphism is C
  VARIANT 23: note = Ancestral polymorphism is A, Derived polymorphism is V
  VARIANT 18: note = Ancestral polymorphism is P, Derived polymorphism is L
  VARIANT 7: note = Ancestral polymorphism is A, Derived polymorphism is G
  VARIANT 5: note = Ancestral polymorphism is S, Derived polymorphism is F
  VARIANT 2..75: note = Derived polymorphism lacks residues 2 to 75
MWLQSMAGIGYLFGAISPVMKAALGYNQRQVAALGVAKDLGDCVGFLAGSLSAVLPSWAMLLIGSAQNFLGYSWL

SEQ ID NO: 19659 - protein, 396 aa, Zea mays
  VARIANT 293: note = Ancestral polymorphism is T, Derived polymorphism is M
  VARIANT 279..396: note = Derived polymorphism lacks residues 279 to 396
  VARIANT 228..396: note = Derived polymorphism lacks residues 228 to 396
  VARIANT 202..396: note = Derived polymorphism lacks residues 202 to 396
  VARIANT 173..396: note = Derived polymorphism lacks residues 173 to 396
  VARIANT 171..396: note = Derived polymorphism lacks residues 171 to 396
  VARIANT 40: note = Ancestral polymorphism is D, Derived polymorphism is N
MASPDLLFNLWNLFYLGAYQAAINNIDIPGLDVGAAAERDAIVFCSYIALGSYQLVISEIDSSAATSLQVVKLLALYLTGDKDWMRFSVAFWHTFCGTSADPFGAPTMTWPWEDGTNSLAVAKRRMRAHFEFMEKLGVNKWCFHDRDIAPDGKTLEETNSNLDEIVQLAKQLQGETNIKPLWGTAQLFMHPRYVHGAATSPEVKVYAYAAAQVKKALEVTHYLGGENYVFWGGREGYQTLLNTDMKRELDHLANFLQAVVDYKKKIGFNGTLLIEPKPQEPTKHQYDWDVATTFAFLQKYGLTGEFKINVECNHATLSGHMKAAIMNWRLHGLMGCLEISMQTLVILKLVVTLLYGFNQARKGDFETLEKKVLEWGEPAVASGKQEMAEILFQSAL

SEQ ID NO: 19660 - protein, 749 aa, Zea mays
  VARIANT 90..749: note = Ancestral polymorphism lacks residues 90 to 749
MTITGTNTHSVQAQNLEQQGPSTPPNTSKLKLFKDSPSKLSMTTSTVVAKKLLYPTNDGTTKPPTNIDITDAENDDIDEGNIENISYFDKLVQHIVSVGPMCRTAGVRTTIMDTVIYKHDDISQEGTLPFGETMNMGGSNVEILTRIELDIAFASEKLLNLEMLVMEIARQATDFEPSTLEDESISSEIAENALELDILYGILDAEVKELHNLISSLQADIKSIEHEVYEEESGGKMQELIADIQNESAKFEKVVEFSQDKEGTIEAVGCDNDHLSYQTGAQTEDQHRNVLHMLEQSIASEIDLEKKLSDSISVIEDLRLKLHHQEEEIYFLEESTETVSGRMFEAENASELLFGTSKELINRLNNMQFHVSEQKCTEDDLKSKLEQSLTKLSFLENSPEKVEKGSNKAGAGSPSLQDKIQELEKQLNESNLQLQLALASAETKQEEQNALQSELNTLENTIKNIKDDVSRAESRAQNAEIRCMELTVANIELNGELNALKSEKSDKASLLEKKLTESNTQLEHAKAAVDAIVEQQDLKGKVSKTETRAECAESKCTLLTDTNLELSEELAFLRGRVESLENSLREANHAKVSTAKDIGVKTKIITDLVRKLALERERLHLQIATLTKKNKMLVKKRAEGINGSIKMSKKGTSNHTEFQSTQKAEEICPDSLPSQTVVEKPSDPIDNDESKNQSADVSTSEDDSIREDIHETVCTIEPSLLNRKYIFMAFLVLLAAAVVFLLHEDGSPA

SEQ ID NO: 19661 - protein, 155 aa, Zea mays
  VARIANT 92: note = Ancestral polymorphism is G, Derived polymorphism is R
  VARIANT 65: note = Ancestral polymorphism is V, Derived polymorphism is A
  VARIANT 55: note = Ancestral polymorphism is P, Derived polymorphism is S
  VARIANT 31: note = Ancestral polymorphism is S, Derived polymorphism is L
  VARIANT 13: note = Ancestral polymorphism is T, Derived polymorphism is I
  VARIANT 7: note = Ancestral polymorphism is E, Derived polymorphism is K
  VARIANT 6: note = Ancestral polymorphism is D, Derived polymorphism is G
MHRLGDEFIILATDGVWDVISNKEDVDIVASAPSRAMTANALLDCDVRSWRLKFPTSKSDDCAVVCLFLDHEKSTDSIQGSELNMETTKPTRKEVSTQDANAGVDEDIADAGVHVSSAEHIFKATQQHTTTLREVDEIVPVEEPTTSKKPRRCRS

SEQ ID NO: 19662 - protein, 502 aa, Zea mays
  VARIANT 340: note = Ancestral polymorphism is G, Derived polymorphism is W
  VARIANT 295: note = Ancestral polymorphism is R, Derived polymorphism is L
MSPTTTPPPAPVAAPTSKGAKRSLMSSLMDATALLRSSSFKEDSYVAAALPASELRALADLKALLATHPDPISIWGVPLNPRSPPAAADDAAPVDERADVVLLKFLRARDFRVRDAHAMVLRCAAWRAEFGADAVLDEELGFKDLEGIVAYMHGWDRDGHPVCYNAYGVFKDRDMYERVFGDGDRLARFLRWRVQVMERGVRALTLRPGGVNAIIQVTDLKDMPKRELRAASNQILSLFQDNYPEMVARKVFINVPWYFSVLFSMISPFLTERTKSKFVIAREGNVAETLYKFIRPELVPVQYGGLSRTGDLENGPPKPASEFTIKGGEKVFLEIDGIEGLKFRNAPAHCTVQLCTPSLSTVVTSYAMREFREDTKGNVHVSLAHGSVRVSKKLVWLSRHASQDQLKLSDVQKQSNAGATITWDLVVGGWDLEYGAEYVPAAEDSYTLCVEKTRMVSATAEEPVHNAFTAREAGKMVLSIDNSGSRKRKVAAYRYFVRKSSA

SEQ ID NO: 19663 - protein, 131 aa, Zea mays
  VARIANT 45: note = Ancestral polymorphism is E, Derived polymorphism is K
MGIDAPPPKSGCDGRYTWEGLGVVVEGQLDPAPPTIDPNYEVVKEGGAVDDEVAREVVVEEVKISKVAESKDDIARGPCLLPQLAVLSTVDHPQVAVNSHTRASSHRKVHMVSPLFLNLTMFVRMNLRVRC

SEQ ID NO: 19664 - protein, 285 aa, Zea mays
  VARIANT 98..285: note = Derived polymorphism lacks residues 98 to 285
  VARIANT 114..285: note = Derived polymorphism lacks residues 114 to 285
  VARIANT 125: note = Ancestral polymorphism is G, Derived polymorphism is C
MAAYSCALWTAASVVAFLVIGVAEARYGGPGQWRRPAPAPVVPVAALVSEQLYGSLFLHKDDDACPAKGFYTYASFIQAARTFPTFAATGDLSTRKREVAAFLAQISHETTGGWATAPDGQYAWGLCYKEEIKPASNYCDATDEQWPCYPGKSYHGRGPIQLSWNFNYGPAGQALGFDGLRNPELVANCSQTAFRTALWFWMTPRRPKPSCHEVMVGEYRPTPADAAANRTPGFGLVTNIVNGGLECNRTDDARVNNRIGFYQRYCHIFNVDAGPNLDCAHQQPY

SEQ ID NO: 19665 - protein, 312 aa, Zea mays
  VARIANT 103: note = Ancestral polymorphism is D, Derived polymorphism is H
MAESFVLSTGSRIPSVGLGVWQIQPDAANDAIYAAVKAGYRHIDCAAAYNNEEEVGLALKKLFEDGVVKRDDLFITSKLWAANHAPEDVEEGIDTTLQDLQLDYLDLYLIHGPIRIKKGTSTMTPENFLPTDIPATWAAMEKLYDSGKARAIGVSNFSCKKLHDLLAVARVPPAVNQVECHPVWQQDKLRKLCQSNGVHLSAFSPLGSPGSPWINGPSVLKNPIVVSVADKLQKTPAQVALRWGIQMGHSVLPKSANESRIKENIDIFGWSIPEDLMAKFSEIKQVRLLTAEFVVHPQAGYNTLEDFWDGEI

SEQ ID NO: 19666 - protein, 209 aa, Zea mays
  VARIANT 72: note = Ancestral polymorphism is W, Derived polymorphism is R
  VARIANT 71: note = Ancestral polymorphism is L, Derived polymorphism is H
MDWSAVTAEDLVDALREVDWSMPPRPVPEFFSRFTVPRSYSKWTSRLKCNLYYYRTNYFILIMFILGMGFLWKPVAIVAAFMTGLSIAFLNDSFAVTFNEKVTRTVRQFSPHLAAKLRPPITPVLRGRPSSKRSIHICGRPRWVFVLFFSAVSCILWLTSCSLLTVLWALLIALFATVLHASFRTPNLKARLNTFREEFRAVWRNYSEL

SEQ ID NO: 19667 - protein, 133 aa, Zea mays
  VARIANT 125..133: note = Derived polymorphism lacks residues 125 to 133
  VARIANT 104: note = Ancestral polymorphism is A, Derived polymorphism is V
  VARIANT 96..133: note = Derived polymorphism lacks residues 96 to 133
  VARIANT 69..133: note = Derived polymorphism lacks residues 69 to 133
  VARIANT 32: note = Ancestral polymorphism is L, Derived polymorphism is F
  VARIANT 24: note = Ancestral polymorphism is G, Derived polymorphism is R
  VARIANT 15..133: note = Ancestral polymorphism lacks residues 15 to 133
  VARIANT 8: note = Ancestral polymorphism is G, Derived polymorphism is S
MFVFSLTGTVVNLLLVGVIIGKAGETIRYIQLQSGAKIQVTRDHEAEPGALTRQVELSGKLERISKAEQLIKEVLAEADAGSSGAGSGGRKYNATQPGAETFQAVHLFSNHFGLLILILTHVPMLFLSLHILE

SEQ ID NO: 19668 - protein, 136 aa, Zea mays
  VARIANT 22: note = Ancestral polymorphism is N, Derived polymorphism is I
MEAKKKPSAPAAVGAAPPPPGNGYFSTVFSAPTAGSASDAKHADLYTMLNKQSSRGQNGRDGKSHSRPTYKDGKHAHPNEPSESPYFGSSVHYGGREFYSSVLRKQPANEPHTDYKGDNPDGSATRGDWWQGSLYY

SEQ ID NO: 19669 - protein, 577 aa, Zea mays
  VARIANT 245..577: note = Derived polymorphism lacks residues 245 to 577
  VARIANT 158..577: note = Derived polymorphism lacks residues 158 to 577
  VARIANT 56: note = Ancestral polymorphism is T, Derived polymorphism is N
MARGDTASEALTADSADEEGRRGSSSSASSDAASSFSCTYSPAPPDEWHKVAIIKTCVSVSADAAGGGGGKDQKPRGVVAAADRHGGASEMEMMKERFSKLLLGEDMSGSGKGVCTALAISNAVTNLCATVFGQLWRLEPLPPEKKAMWRRELDCLLCVSDHIVELVPTWQTFPDGTRLEIMTSRPRSDLYINLPALRKLDNMLLEILEGFRDVEFWYVDQGICAPDCDSSASYRRTFHRRDDKWWLPVPHVPHGGLREATRRQLEHRRDCASQILKAAMAINSNALAEMAVPVSYLDSLPKVHQSLSTGCRTPVPRVPVPNGRAALGDVIYRYITSDQFSQDYLLDCLDLSSEYQALEIANRVEASIYVWRRKGGGGARSSWGIVKDMVMDTEKRDLLAERAEALLMSLKQRFPGLTQTSLDMSKIQYNKDVGKSILESYSRVLESLASNIIARIDDLLNVDELSKQPADSIPSAGADAKVACKSNGSKQATAVPASGTPYATAYATPSFSPAQLSSPSKIGRALLVDRRSHHVAGAKRATASAADRAGVEVVKGMVVDGSSAIFDIIPIAVPAKI

SEQ ID NO: 19670 - protein, 108 aa, Zea mays
  VARIANT 22: note = Ancestral polymorphism is A, Derived polymorphism is T
  VARIANT 35: note = Ancestral polymorphism is C, Derived polymorphism is R
  VARIANT 72: note = Ancestral polymorphism is A, Derived polymorphism is P
  VARIANT 78: note = Ancestral polymorphism is S, Derived polymorphism is I
  VARIANT 96: note = Ancestral polymorphism is C, Derived polymorphism is F
MEYGHKVYIPSWFRMSWDCGLTCVLMVLKTLGIDRCDSIADLDLDLERLCHTTRSNCKMISINRVDELSGKAFDAEISVQCRSITAYDIALLSGHCIAIVLVDKSKLH

SEQ ID NO: 19671 - protein, 327 aa, Zea mays
  VARIANT 186: note = Ancestral polymorphism is S, Derived polymorphism is L
  VARIANT 170..327: note = Derived polymorphism lacks residues 170 to 327
  VARIANT 113: note = Ancestral polymorphism is P, Derived polymorphism is S
  VARIANT 106: note = Ancestral polymorphism is A, Derived polymorphism is T
MQLSAWKAPSFVPLYSTKCAPSGRGLEGRRCVGPSVEDVVRKEMVRALSVAPSLAGPLLRMHFHDCFVRGCDGSVLLDSTANNTAEKDAKPNLTLRGFGFIERVKTAVEKACSDTVSCADVLALMARDAVWPSKGPFWAVPLGRRDGRVSISNETDQLPPPTGNFTELAQLFGAKGLDTRDLAVLSAGHTIGTSSHCFSFSDRLYNFTGLDDARDTDPELDRAYMARLRAKCASLDDNTTLVEMDPGSFRTFDLGYYANVAKRRGVFHSDAQLLADPSTRAYVLRHATGAHRDEFFADFAASMVKMGAVGVLTGGQGEVRKKCNVVN

SEQ ID NO: 19672 - protein, 367 aa, Zea mays
  VARIANT 174: note = Ancestral polymorphism is Y, Derived polymorphism is C
MSTECSDLGDEFWLPEEFLDDDFFSEEEKAAVAARSESDEEDSLAGLSRRLAGLLGDDGERKPPTAKQAEVAVIGSPQSTLCGLPKSGQESPNGGASKGTSPPSSPPLEQKPADPWDVLYEAAGQVARIRAASSVPVQVPANAYAFSKPSPPPPPPPQIAPPSAKVPAGAGGHYHPLAHLVSQRQMQAAQFHLLKQHQLLKLQRQRHLAAWSARQSACAKPVGCGGGDAPLGLNPAAWPPLQKPPPPPPPQQHQAPAHPASGMRAVFLTPPGAKRERNGTGVFLPRPAGAPAAEPKRKTAGACSTVLVPARVVQALNLRLEDLGAQPRYYPGGFVLDHDALISRSNAMLASQKRRAAAAAAVCHRST

SEQ ID NO: 19673 - protein, 679 aa, Zea mays
  VARIANT 366..679: note = Derived polymorphism lacks residues 366 to 679
MNLLAMATMSAASHRCCASSLRALTVLFVLAAPVSDVEGRHHRHVCPYFSCGGLSNISYPFRRQGDPSGCGVQSCELVCTDTDATIRIGSGTYKVLSINFTYSYFWVVDANLDIQSSCPLPRWDYHAGTSGNSRLGRIEFSHDFTYFCYPNSKWAFFVNCSQPIENNDIYEPVSCLSSSSFIYMVTDFLYDGYVPADSLQPSCGYLAMTPLGSPGMPVPKNTSYPDVVKFMRNGFALGFTVSIPDPNIRECFAEFMRTFLKDPRSSTGIKELIVDILRVVDIFLACVIYQLQSTNNNGVTTVLIGIIETIQYVSGVLKYTAVVCRFVLMPLAVFIFLVYKYWKTRITVDAVEKFLQMQQMLVPMRYAYTNIIAITGHFRDKLGQGGYGSVYKGVLQPGEVHVAIKMLGNSNCNGDEFISEVATIGKIHHVNIVRLIGFCSEENSRALIYEFMPHGSLDKYIFSSEKSFSWDKLNEIALGIARGLNYLHHGCDMQIVHFDIKPHNILLDNNFVPKVADFGLAKLFPKDDNFVPLSAMRGTIGYIAPEMVSRSFGVISSKSDVYSFGMLLLEMTGGRRNADPHAGSSSQAYYPSLVYSQLSQGDANEISEGVDMHELEKKLCIIGLWCIQMKPQDRPTMSEVIEMFEAGVDGIQMPPRPFFCDDEGDSSYSAISKLDTIEE

SEQ ID NO: 19674 - protein, 104 aa, Zea mays
  VARIANT 1: note = Ancestral polymorphism is M, Derived polymorphism is I
  VARIANT 2..104: note = Derived polymorphism lacks residues 2 to 104
  VARIANT 3: note = Ancestral polymorphism is D, Derived polymorphism is H
  VARIANT 35: note = Ancestral polymorphism is E, Derived polymorphism is K
  VARIANT 36..104: note = Derived polymorphism lacks residues 36 to 104
  VARIANT 38: note = Ancestral polymorphism is P, Derived polymorphism is T
  VARIANT 68: note = Ancestral polymorphism is R, Derived polymorphism is K
  VARIANT 74: note = Ancestral polymorphism is A, Derived polymorphism is V
  VARIANT 78: note = Ancestral polymorphism is M, Derived polymorphism is I
MLDAFIAGCDFHSRIAMNMYQHIRETVKEEKVILEWHPQPDQEKPSVLLLKIFVKEEKDTPKLWYSNRRKGTAADVAICAMLEIDRNTRLKELGWTLLMQVVYA

SEQ ID NO: 19675 - protein, 140 aa, Zea mays
  VARIANT 22: note = Ancestral polymorphism is E, Derived polymorphism is K
  VARIANT 56..140: note = Derived polymorphism lacks residues 56 to 140
  VARIANT 85: note = Ancestral polymorphism is H, Derived polymorphism is Y
MAWGEDEPIGPDVASAGLHVSERIGRDAVAQPDLEEALEASCYASHPYSSHPKEVYSSYPGRFVSLFPPVEWGGEESMNEGGGKYVVATHAVNLARLLRFFLENLTPEMIKKGAQPPHWVTPVFSGRLIASDRQRTDQND

SEQ ID NO: 19676 - protein, 216 aa, Zea mays
  VARIANT 2: note = Ancestral polymorphism is A, Derived polymorphism is V
  VARIANT 22: note = Ancestral polymorphism is Q, Derived polymorphism is L
  VARIANT 102: note = Ancestral polymorphism is G, Derived polymorphism is C
  VARIANT 142: note = Ancestral polymorphism is T, Derived polymorphism is I
MAGRGSLAGLLPFGDANDIVLQMANEVLPVVKGVPVLAGVCATDPFRRMEYFLRQLETIGICGVQNFPTVGLFDGNFRQNLEETGMRYIMEVEMISMAHRMGFLTTPYAFNPDEVAAMAKAGSHIVVAHMGLTTAGSFGAMTATTLDDSVLRVQAIADAAFGVNPDIIVLCHEGPISRPLEAEFILKNTERVHGFYGASSMERLPVEQTITNTVRE

SEQ ID NO: 19677 - protein, 259 aa, Zea mays
  VARIANT 64: note = Ancestral polymorphism is K, Derived polymorphism is N
  VARIANT 76: note = Ancestral polymorphism is G, Derived polymorphism is D
  VARIANT 84: note = Ancestral polymorphism is R, Derived polymorphism is S
  VARIANT 92: note = Ancestral polymorphism is R, Derived polymorphism is H
  VARIANT 96..259: note = Derived polymorphism lacks residues 96 to 259
  VARIANT 120: note = Ancestral polymorphism is G, Derived polymorphism is V
  VARIANT 141..259: note = Derived polymorphism lacks residues 141 to 259
  VARIANT 144..259: note = Derived polymorphism lacks residues 144 to 259
MEFTTPPPATRSGGGEERAAAEHNQHHQQQHATVEKEHMFDKVVTPSDVGKLNRLVIPKQHAEKYFPLDAAANEKGLLLSFEDRTGKPWRFRYSYWNSSQSYVMTKGWSRFVKEKRLDAGDTVSFGRGISEAARDRLFIDWRCRPDPPVVHHQYHHRLPLPSAVVPYAPWAAHAHHHHYPADGHTEPVTPCLCATLVATEMRASSSQLSLTRSNLSRPPQPRIARVDGAQPRPSSSPRQPQSLWCRSCQPQPRRTADVP

SEQ ID NO: 19678 - protein, 199 aa, Zea mays
  VARIANT 189: note = Ancestral polymorphism is D, Derived polymorphism is Y
  VARIANT 79..199: note = Derived polymorphism lacks residues 79 to 199
  VARIANT 37..199: note = Derived polymorphism lacks residues 37 to 199
MKSTLAAVSRPSSTDASVHACGEEDGGPRDVAPNTAKNFECKLEERGLHRFERHLENAPHGMGIDTPPPKSRCDGRYTWEGLGVIVEGQLNPAPPTIDPNYEVVKEGGAIDDEVAREVVVEEVKIAKVAESKDDVARGPCLLSQPAVLSTMDRPQVAVNSHTRASSHRKAWCREQHASIMKIVLICVFDLPFFSVLEVP

SEQ ID NO: 19679 - protein, 599 aa, Zea mays
  VARIANT 51: note = Ancestral polymorphism is R, Derived polymorphism is H
  VARIANT 69: note = Ancestral polymorphism is C, Derived polymorphism is W
  VARIANT 146: note = Ancestral polymorphism is G, Derived polymorphism is E
MGGEAPEPRRLTRALSIGGGDGGWVPEEMLQLVMGFVEDPRDREAASLVCHRWHRVDALSRKHVTVPFCYAVSPARLLARFPRLESLAVKGKPRAAMYGLIPDDWGAYARPWITELAAPLECLKALHLRRMVVTDDDLAELVRARGHMLQELKLDKCTGFSTHGLRLVARSCRSLRTLFLEECQIDDKGSEWIHDLAVCCPVLTTLNFHMTELEVMPADLKLLAKSCKSLISLKISDCDLSDLIEFFQFATALEEFAGGTFNEQGELSKYVNVKFPSRLCSLGLTYMGTNEMPIMFPFSAILKKLDLQYTFLTTEDHCQLIAKCPNLLVLAVRNVIGDRGLGVVADTCKKLQRLRIERGDDEGGVQEEQGGVSQVGLTAIAVGCRELEYIAAYVSDITNGALESIGTFCKKLYDFRLVLLDREERITDLPLDNGVRALLRGCTKLRRFALYLRPGGLSDAGLGYIGQCSGNIQYMLLGNVGETDDGLISFALGCVNLRKLELRSCCFSERALALAILHMPSLRYVWVQGYKASQTGRDLMLMARPFWNIEFTPPNPKNGGWLMEDGEPCVDSHAQILAYHSLAGKRLDCPQSVVPLYPA

SEQ ID NO: 19680 - protein, 338 aa, Zea mays
  VARIANT 4..338: note = Derived polymorphism lacks residues 4 to 338
  VARIANT 7..338: note = Derived polymorphism lacks residues 7 to 338
  VARIANT 161: note = Ancestral polymorphism is P, Derived polymorphism is L
  VARIANT 206..338: note = Derived polymorphism lacks residues 206 to 338
MNIQFQKKMQLQVPTSVGMLFPLACDATRPARSPSGPVMASTTSSCSRKSFQHGDQSLSAPDDSCRLTLGLGPTPNLYSADSHSFGGNKAYQSATLLSQHCATTDPGLMLGLSRCSSRNLQSTRASGSNNYSPARKTVIILPLIDEGSTSAKRKKGVYLLPLLFVPRSEDLCLNGTSTDTYAQQHVGTECDTESGHDRSLNLHEIQPSADLSITVGCFFAATSDVAADTSDEQRSHQRHPKKCRFNGCSKGARDASGLCISHGGGQRCQKPSRQQLIATWIMPSRHLAMAHGNGRDDGVSRNQSCGLVVPEGRVHGGGLMSMLGVGGNLGSNPDGSKA

SEQ ID NO: 19681 - protein, 239 aa, Zea mays
  VARIANT 159: note = Ancestral polymorphism is R, Derived polymorphism is W
  VARIANT 144..239: note = Derived polymorphism lacks residues 144 to 239
  VARIANT 135: note = Ancestral polymorphism is T, Derived polymorphism is M
  VARIANT 123: note = Ancestral polymorphism is W, Derived polymorphism is R
  VARIANT 107: note = Ancestral polymorphism is G, Derived polymorphism is W
  VARIANT 106: note = Ancestral polymorphism is A, Derived polymorphism is V
MTELWMEVLPPYFAGQAGGWFLLDRRAGPGAWTLEENKMFERALARVDWDAPDRWERVAAVLPRRTVADVAAHYDDLEVDVGSIEAGFVPFPRYGGCGGGTSQSAAGFTLFLMGLKNYGRGDWRNISRNFVRSRTPTQVASHAQKYFIRLSSGGKDKRRSSIHDITTVNLPDDDDDGDDDDTGGGNPPVISEQLGVLVDSRPPPPHPYRHLLLPHPYGNVKLEPRHGGFLDDSVLMQSH

SEQ ID NO: 19682 - protein, 682 aa, Zea mays
  VARIANT 593..682: note = Derived polymorphism lacks residues 593 to 682
  VARIANT 463..682: note = Derived polymorphism lacks residues 463 to 682
  VARIANT 19: note = Ancestral polymorphism is L, Derived polymorphism is S
MATMSAASHRCCASSLRALTVLFVLAALVSDVGGRHHHHVCPHYFSCGGLSNISYPFRRQGDPSGCGVQSYELVCTDTDATIRIGSGTYKVLSINSTYSHFWVVDADLDIQSSCPLPRWDYHARWINLNLHRWWIVSSQYYFYSSSFYMDSWRWAIFVNCSQPIENNDTDKYHIYEPVSCLSNSSFIYLVPDYWYAGLVPAGSLEPSCGYLAMTPLGGPGMQVPSNTSYPDVVKFMRSGFALGFPSYGDNIRECLAKDMRTFHKEPRNSTGIRQQILDILTVVDIFWACVIYQLQSTNYNGVTTVVIGIIETIQYVSGVLDYTAGVCRFVLMPLAVFVFLVYKYWKTRITVDAVEKFLRTQQMLVPMRYAYTNIIAITGHFRDKLGQGGYGSVYKGVLQPGEVHVAIKMLGNSNCNGDEFISEVATIGKIHHVNIVRLIGFCSEENSRALIYEFMPHGSLDKYIFSSEKSFSWVKLNEIALGIASGLNYLHHGCDMQIVHFDIKPHNILLDSNFVPKVADFGLAKLFPRGDSFVPLSAMRGTIGYIAPEMVSRSFGVISSKSDVYSFGMLLLEMTGGRRNADPHAGSSSQAYYPSLVYNQLSQGDANGISEGVNMHDLEKKLCTIGLWCIQMKPQDRPTMSEVIEMLESGVDGMQMPPRPYFCDEEGDSSYSIISELDTIEE

SEQ ID NO: 19683 - protein, 340 aa, Zea mays
  VARIANT 112..340: note = Derived polymorphism lacks residues 112 to 340
MHATGMRTTTGTGAHGATGMLDTGVLGGGGHAATGMPAGHDTRPGATGVAGTGGAFPHAAEHKTGGGILRRSGSSSSSSSSSSEDDGMGGRRKKGLKEKIKEKMPGGHREGQGQATATGAYGGIGYVAGPTTGGPHEKKGVMEKIPGGHKDYDQHQHTTAATGGGGGYGGATDTTYGTTTEGTHEKKGFMEKIKEKLPVHQRFLLTGVQVGLDPADPVPPIAEKHVNAAGGSVNQPGDNAKLGGAGGSPQCRLAEGSVAEELLGQVPGLITDEYMSRVPENSWTVPEVPSPPTASGLNWHGNLCFPAYDSTMFVPEITSLQNSQSHFTVPSSFKRRRREY

SEQ ID NO: 19684 - protein, 292 aa, Zea mays
  VARIANT 198: note = Ancestral polymorphism is Q, Derived polymorphism is P
  VARIANT 161..292: note = Derived polymorphism lacks residues 161 to 292
  VARIANT 157..292: note = Derived polymorphism lacks residues 157 to 292
MLRRALLSSVSPLHGTVRIPSPSYSPIQALLAQWSRYASVVSSSAPPTPPPPPPSPPRGPSRSSGGGPTSSSLNPAEVAKFASIAETWWDSSGPFKPLHVMNPTRLSFIRSTLCRHFRYNCAPLDLVHFCWKDPNSSKPLEGLKVIDVGCGGGILSEPLARMGATVTAIDVVDKNIKIASIHASMILCSYLLRHLIQQVLRLSIVVQQLVLSSLHVPILPRGTHEWSKLVTPEELVLMLQKASVSVEEMAGFVYNPLSGEWSLSDDISVNYIAFGVKKGEASSTNDREANLS

SEQ ID NO: 19685 - protein, 88 aa, Zea mays
  VARIANT 58..88: note = Derived polymorphism lacks residues 58 to 88
MLRRALLSSVSSLHGMIRIPSPSYSPIQALLPQWSRYASVVSSAAPPPPPPPPPSPPRGPSRSSGGGPTSSSLNPAEVAKFASIAETW

SEQ ID NO: 19686 - protein, 323 aa, Zea mays
  VARIANT 232..323: note = Derived polymorphism lacks residues 232 to 323
  VARIANT 109..323: note = Derived polymorphism lacks residues 109 to 323
MAHYQQGRRQQVDEYGNPVPGGHGVQGQQLGESAGGYGVAGTGSYGGQQQAGYGPTGTGTHDAGGYGGSGHPGYGVTGTGVHDAGGPGAYGAATGTRAHGTHGGVTGIQDGAAGLTGGGLHGATGMGTTAGTGAHGATGMLDTGVLGGGGHAATGMPAGHGTRPGATGISGTGGAFPHAAEHKTGDDILRRSGSSSSSSSSSSEDDGMGGRRKKGLKEKIKEKMPGGHREGQATATGAYGGTGYVAGLTTGGPHEKKGVVEKIKEKIPGGHKDYDQHQHTTAATGGGGGYGGTTDTTYGTTTEGTHEKKGFTEKIKEKLPGQH

SEQ ID NO: 19687 - protein, 211 aa, Zea mays
  VARIANT 48: note = Ancestral polymorphism is H, Derived polymorphism is D
MGATVTAIDAVDKNIKIASIHAASDPTTASIEYCCATAELVIAQNKEHYLSNFDETEFGYQSYPFLIFLMTVTRRNLYENCLYAEGLVIEHVANPLEFCESLSALTIPNGATVISTINRSMRAYATAIVAAEYILRWLPRGTHEWSKLVTPEELVLMLQKASVSVEEMAGFVYNPLSGEWSLSDDISVNYIAFGVKKGEASSTNDREANLS

SEQ ID NO: 19688 - protein, 547 aa, Zea mays
  VARIANT 88..547: note = Derived polymorphism lacks residues 88 to 547
  VARIANT 128: note = Ancestral polymorphism is P, Derived polymorphism is L
  VARIANT 175..547: note = Derived polymorphism lacks residues 175 to 547
MPSLPAAERGRYSISPSLLKFLLQTWNPETNTFISVDGERTITLLDMLRIGGLPIDGEFYEEFVPSRIERDPSLLSYPSILSRLLNVWRDLEVGGEVSFQEWRANVCIAEPYHPDRVARQFRLDQEIPYLSLSSLYTEEYFGIAHAYWRHLLRPVQNNLHLLPDDDRTGRTTIYWLKWYKKFSEPFLSILDGLSHGIICGRVPYSDRTRLAVNRSIVSRQRPRNNPDIDPPAGSSSSPILIDNIPAQENLINNQAVLLPQDTQRRETPNIVIPNINAKPPTKLKLKRKLFGDTDENCSPTIAPASIGSINTINQPSASAELLEDDDYTDITNFGIVKRKGNLQPLPFVDSTVGSSGDFSKSPYNMTRAASPHVDAPEISIFLNGTRSPPVGPTPGPVPCSGLVVSPTVLSPLRGAPSPIAPGPSEGGGTAPPTGPSVLTPPARFAQPIKAMLEQLVVISEQLQLAYSALDASSGEVDQAVEGFKQELLAKSNTLQVIAEEIASVEKKEAEISAEIEKLKLTLLEQGEKKKQLSELQSAQDLEVKQQE

SEQ ID NO: 19689 - protein, 1029 aa, Zea mays
  VARIANT 725..1029: note = Derived polymorphism lacks residues 725 to 1029
  VARIANT 716..1029: note = Derived polymorphism lacks residues 716 to 1029
  VARIANT 700..1029: note = Derived polymorphism lacks residues 700 to 1029
  VARIANT 695..1029: note = Derived polymorphism lacks residues 695 to 1029
  VARIANT 689..1029: note = Derived polymorphism lacks residues 689 to 1029
  VARIANT 560..1029: note = Derived polymorphism lacks residues 560 to 1029
  VARIANT 501..1029: note = Derived polymorphism lacks residues 501 to 1029
  VARIANT 477..1029: note = Derived polymorphism lacks residues 477 to 1029
  VARIANT 375..1029: note = Derived polymorphism lacks residues 375 to 1029
  VARIANT 315..1029: note = Derived polymorphism lacks residues 315 to 1029
  VARIANT 67: note = Ancestral polymorphism is P, Derived polymorphism is L
MGFLYEGMAARVQDFVTIRFGSMWVDVPMGPIQASNSAGSLQTTATSPAVVAHDQEVNSKAEEGFTPVMSKVAKRRARRVIAKARVAATNECAANWHKATPTNSTPDSSKYKGAKPSSFMMTPKLFHPITLGEWPICARKAPPTKSTVLMVSSSSPKEKEAMPPAVTHEKQGSDSSTPSPSILGAPPRNSTSTKSFPPPNGGIVLQDQPQGSQPHGKQGTEVAEEINRPRPIDKRKAVMAESDSLPKLHSDPSCFTDQHKMIIVGKSEVQVAVTSATMTVERFLRDVRGEEPKPLIVGLDTEWFENDRKRIALIQICVDKKCLLFKVGIAGDIPDNLKSFLADEDHVFVGVAIANDLDRLREGHQIELSNKVELQAMAPFIISDRQWNNVPSLATLAQELLGVAIGGKGTNVRYKHWDNKQLTENQIKYACTDVVVPYMVGDMIQKEYGCDLHVTQSPYPSTNSMDNNEDGEVQRSQLHFVEDPQTKRIKTCPACPAGAKQKNRMWNEVISHVVSQAASEKGSEDNRRRHKCLLRNHGFHVETSDDSGSNPEERGEAVEEINPRHPANEEKAMTMENSLSSTDSDSSTKSRLRVEAPEFIPMLVHNPSNGQPKYELRWQGLHLSFNDITRGHVDPAASISDPISSEVVVSWPSAQNSTSPKRRRRRQRNIHKAWANFNNSIDSLTNAQRAYVADSILAQQRGEYRRIQNAAMQAFQASIERTICQDLRSLLPGASTSSDNVEGELMRRAKALAKLPEHHEFIKKDPRRRKYAKQAANVCARRASLKQRELAIPTNSMASKAQRGVSSNHAGGKTIVPYLPPHKRALSNRFEVLSSMPVSVEEEGCNTSDASSTSAHFKRKKPRKQVPMGHRPVTRSLTNSGNSENNMIYVGSYNPLFDDHSNFENKSLDVADSTNLNPSSGEDPQTATDDDLRSPHSEGEPSESERDAEQVLTTNQGQSVEEQMNQMMAALQQKEEELAALRIHNSKLSASMKARLSYDGSTPQKVDHQVPKDQESVNSNSQDDLLSNE

SEQ ID NO: 19690 - protein, 578 aa, Zea mays
  VARIANT 466..578: note = Derived polymorphism lacks residues 466 to 578
MAAAATTSTTTATIPPGPHRRRQPNDIERDDDTCCGGAGVDRRFPHACGAQHDDDAERGLHHAAAATPCGGTRALLLARRRRAWATAAAAAAGAPPRTAWAWTRGVVLCLLALAAVVVGFQLGSHRGGGSTDAGAGGDGGVRLLHLHRVETADADVVMEWTEENLSALARRSPQPPVRKNNATAGYLVVDANGGLNQMRMGISDMVAVAKIMNASLVIPTLDHQSFWTDPSDFRDIFDIDHFKESLKEDIVIVDSLPLDYRRAKPYVRAPTSWSRASFYRDCAKVLRKFKVVRFTHTDSRIVNNGLAPSLQKLRCRANYRALQYRKEIQGLGSTLVDRLRNGSAEHYIALHLRYEKDMLAFTGCNHNLTLREAAELTGMRFKVRRWKEKDIDSEEKRLQGGCPMTPREAAVFLKAMGYPSATNIYIVAGEIYGEHSLDALKAEYPNTYTHYSLATVDELEPLELYQNRLAAVDYIVALQSDVFVYTYDGNMARAVQGHRRFEGFRKTINPDRLKFVELIDKLDEGSMSWSEFQIVVRKHHENRLGGPYERLRGASPRQEEYFYSNPVPGCLCKRVQSR

SEQ ID NO: 19691 - protein, 122 aa, Zea mays
  VARIANT 59: note = Ancestral polymorphism is D, Derived polymorphism is H
  VARIANT 28: note = Ancestral polymorphism is P, Derived polymorphism is H
  VARIANT 17: note = Ancestral polymorphism is L, Derived polymorphism is P
  VARIANT 11: note = Ancestral polymorphism is P, Derived polymorphism is T
  VARIANT 5..122: note = Derived polymorphism lacks residues 5 to 122
  VARIANT 4: note = Ancestral polymorphism is F, Derived polymorphism is L
  VARIANT 3: note = Ancestral polymorphism is Y, Derived polymorphism is N
MSYFQGFFFCPEVASLLLHNFCVYHINPQGHEMGAAPMSSDVPVPSVADLADQVADVLHFFSTDLDDEPDGENPCGVKKDLEAMVFHPEQASSSEATGQEAHHGRMNEEEKSVAWNGCMLLD

SEQ ID NO: 19692 - protein, 132 aa, Zea mays
  VARIANT 119: note = Ancestral polymorphism is S, Derived polymorphism is F
MLRRALLSSVSPLHGTVRIPSPSYSPIQALLAQWSRYASVVSSSAPPPLPPPPPSPPRGPSRSSGGGPTSSSLNPAEVAKFASIAETWRDPNSSKPLEGLKVIDVGCGGGILSEVESFSVSIISENRYWHLT

SEQ ID NO: 19693 - protein, 246 aa, Zea mays
  VARIANT 138..246: note = Derived polymorphism lacks residues 138 to 246
  VARIANT 125: note = Ancestral polymorphism is A, Derived polymorphism is S
  VARIANT 121: note = Ancestral polymorphism is A, Derived polymorphism is T
  VARIANT 78: note = Ancestral polymorphism is R, Derived polymorphism is C
  VARIANT 69: note = Ancestral polymorphism is G, Derived polymorphism is C
  VARIANT 53: note = Ancestral polymorphism is N, Derived polymorphism is Y
  VARIANT 41..246: note = Derived polymorphism lacks residues 41 to 246
  VARIANT 40..246: note = Derived polymorphism lacks residues 40 to 246
  VARIANT 32: note = Ancestral polymorphism is G, Derived polymorphism is S
  VARIANT 30: note = Ancestral polymorphism is G, Derived polymorphism is S
  VARIANT 28..246: note = Derived polymorphism lacks residues 28 to 246
  VARIANT 10..246: note = Derived polymorphism lacks residues 10 to 246
  VARIANT 7: note = Ancestral polymorphism is P, Derived polymorphism is L
MQQVLVLMRYAYTNIIAITDHFRDKLGQGGYGSIYKGVLQRGEVHVAVKMLGYSNCNGETFISEVATICKIHHVNVVRLIGFCSENNIRALIYEFMPRGSLDKYIFSSEKSFSWDKLNEIALGIARGLNCLHQGCDMQIVHFDIKPHNILLNSNFVPKVADFGQLSQGDANGISEGVDMHKLENKLCIIGLWCIQMKPQDRPTMREVIEMLEASVDGIQMPPRPFFCDDEGDSSYSAISKLDIIEE

SEQ ID NO: 19694 - protein, 225 aa, Zea mays
  VARIANT 119: note = Ancestral polymorphism is L, Derived polymorphism is S
MGATVTAIDVVDKNIKIASIHAASDPTTASIEYCCATAELVIAQNKEHYLSNFDETEFGYQSYPFLIFLMTVTRRNLYENCLYAEGLVKEKRLFDAVISLEVIEHVANPLEFCESLSALTIPNGATVISTINRSMRAYATAIVATEYILRWLPRGTHEWSKLVTPEELVLMLQKASVSVEEMAGFVYNPLSGEWSLSDDISVNYIAFGVKKGEASSTNDREANLS

SEQ ID NO: 19695 - protein, 325 aa, Zea mays
  VARIANT 6..325: note = Derived polymorphism lacks residues 6 to 325
  VARIANT 211: note = Ancestral polymorphism is R, Derived polymorphism is C
  VARIANT 212: note = Ancestral polymorphism is R, Derived polymorphism is Q
MAHYQQGRRQQVDEYGNLVPGGHGVQGQQLGESAGGYGVAGTGSYGGQQQAGYGPTGTGTHDTRGYGGSGHPGYGVTGTGVHDAGGPGAYGAATGTRAHDTHGGVTGIQDGAAGLTGGGLHGAIGMGTTAGTGAHGATGMLDTGVLGGGGHAATGMPAGHGTRPGATGVAGTGGAFPHAAEHKTGGGILRRSGSSSSSSSSSSEDDGMGGRRKKGLKEKIKEKMLGGHREGQGQATATGAYGGTGYVAGLTTGGPHEKKGVVEKIKEKIPGGHKDYDQHQHTTAATGGGGGYGGTTDTTYGTTTEGTHEKKGFMEKIKEKLPGQH

SEQ ID NO: 19696 - protein, 175 aa, Zea mays
  VARIANT 100: note = Ancestral polymorphism is G, Derived polymorphism is R
  VARIANT 10: note = Ancestral polymorphism is G, Derived polymorphism is R
MGNAISAAVGMVSFLNPWPGASATVAVHSGVRIRDLQLLATAAGVFISVGFIYRHLHRGASNRRLPEIVPFMLCVCAGVLHFLLFVGASAASGGADVDHGAEARALGLAALRVLPAAATVTFFLGTMLIFAARISAGGEEPVQAPVGLRLLSRMALAAAAALVCMMAVAVYGAYW

SEQ ID NO: 19697 - protein, 410 aa, Zea mays
  VARIANT 109..410: note = Derived polymorphism lacks residues 109 to 410
  VARIANT 72: note = Ancestral polymorphism is R, Derived polymorphism is C
MTKILDLSFYFISSIFESQDKVQVDTAKGREGDDHRDGPEPHAGDVRDGEEGIERVHDAARLGGDVSDAPLCLWLPHTAGRRQLHDLRASRRRSRAVLRGVFLVDDVERGIPEAVHPRADPVQWRCLSGERDPLVRDGVLLRLLHDDDALVLGVRGGSAQRVGRVPVVHVRPSFPADGSVGVGVVALAPGRCRLRWLQRNVCHHSFQLLDGSTCRDDRFFSRTRSVEHEDLKDVVGLKPLRAVVGLPGGWFFSRSLWERDLTGSGMAWQLGGCVNDKGTAACGPMNTASASADEVVDSSGRHVHELYRLHLGAIVATTSCLLGPISDGHTGLLMSAKVQMRPFTSLVDTNYILDAIHGSRLLEVQPISDGHTGLLLSTKVQMRPFKSLVDINYILDDIHGSELLEVQVML

SEQ ID NO: 19698 - protein, 119 aa, Zea mays
  VARIANT 13: note = Ancestral polymorphism is R, Derived polymorphism is C
  VARIANT 11: note = Ancestral polymorphism is P, Derived polymorphism is H
MSNQPTMAAAPVRAWVLVLALALACGLLQLRPSDAAAPAQPVAVAATMVSSGAAKPKCVPGAKNDKACRVGAVHDPENQEEEGSSVTLKAPAAAPDDSDGSDYNDPDEPNDNQLIVVGH

SEQ ID NO: 19699 - protein, 389 aa, Zea mays
  VARIANT 289: note = Ancestral polymorphism is V, Derived polymorphism is E
MASPRGHRRASVLQKAAALLLLALSCCGCTGAGAGPSAPTPKVPAVIVFGDSTVDTGNNNAIGTILKSNFPPYGRDMAGGAQPTGRFCNGRLPPDFISEALGLPPLVPAYLDPAYGIQDFARGVCFASAGTGLDNKTAGVLLTATQNLSGLLSLRLRAAVKSVIPLWKEVEYFKEYKRRLRRHVGLAGARRIVSDALYVVSVGTNDFLENYFLLVTGRFAEFTVGEFEDFLVAQAEWFLGEIHRLGARRVAFAGLSPIGCLPLERTLNTLRGGCVEEYNQVARDYNAKVLDMLRRLTAARPGLRVAYIDVYQNMLDLITDPSTLGLENVEEGCCATGKVEMSYLCNEKSPDTCDDADRYFFWDSFHPTQKVNQFFAKKTLDLCYDQLLL

SEQ ID NO: 19700 - protein, 111 aa, Zea mays
  VARIANT 16: note = Ancestral polymorphism is R, Derived polymorphism is C
MSSAASADHRRWGGARPGRPDRSLKGAGLNGMEVYRSDGEVNGFSKLAEKYGLLKLGGSDFHGRGGKDESDVGTVKLAITTLCCFLKMARSIWSSAMKDILLKFAEGLLQI

SEQ ID NO: 19701 - protein, 223 aa, Zea mays
  VARIANT 158: note = Ancestral polymorphism is A, Derived polymorphism is V
  VARIANT 140: note = Ancestral polymorphism is C, Derived polymorphism is Y
  VARIANT 117: note = Ancestral polymorphism is G, Derived polymorphism is R
  VARIANT 110: note = Ancestral polymorphism is P, Derived polymorphism is L
  VARIANT 104..223: note = Derived polymorphism lacks residues 104 to 223
  VARIANT 70: note = Ancestral polymorphism is C, Derived polymorphism is Y
  VARIANT 47: note = Ancestral polymorphism is S, Derived polymorphism is R
  VARIANT 46: note = Ancestral polymorphism is C, Derived polymorphism is S
  VARIANT 45: note = Ancestral polymorphism is E, Derived polymorphism is K
MAAASMVPPIPAPNPTDDWVDGSWMVDCSCDVTFDDGEEMVSCDECSVWVHTRCAHYVRGVHTSFSCHKCRRSKRVLSSADEAEVAELLAELPTHRPPPLYHRWAEVLLPARIHVHRLPGGGDDALFRGAPAFSAALWRCTGYIPKRLASATVVLSTAVFRVFACSKVKYQRLLLSEQALCWRSRRLRVYGDSIGVHVNGWSVLEQLGVVAELRETCQPCHHD

SEQ ID NO: 19702 - protein, 305 aa, Zea mays
  VARIANT 14: note = Ancestral polymorphism is S, Derived polymorphism is L
  VARIANT 24: note = Ancestral polymorphism is P, Derived polymorphism is S
  VARIANT 41: note = Ancestral polymorphism is T, Derived polymorphism is I
  VARIANT 138: note = Ancestral polymorphism is F, Derived polymorphism is S
  VARIANT 177: note = Ancestral polymorphism is E, Derived polymorphism is G
MSSSIISTVATELSVAEKSRGIEPLPFINDKHGGVIIEMTTPMDPGAFSASLKAALVKWREQGIRGVWIKLPITLSNLIPPVVEEGFWYHHAEETYLMLAYWLPNTTHTLPVNATHRVSVGAFIMNDKREALSIHKVSIFHTLEFLFLQVLAVQEKSGVLRGLGVWKFPTGVVEPGEDINVGAVREVKEETGIDAEFVEVLAFRQSHKSFFDKSDLFFVCLLRPLSYDITKQDSEIEACQWMPVEEFAAQPFVQKHELVKYILEVGLAKVDKEYAGFSPISIKSAFTDKLSLFYMNRRDLDRASG

SEQ ID NO: 19703 - protein, 226 aa, Zea mays
  VARIANT 145..226: note = Derived polymorphism lacks residues 145 to 226
  VARIANT 89: note = Ancestral polymorphism is S, Derived polymorphism is Y
MLTATLGPFVAIAHRACMFDELIHLVSVSRITASDSQQGGAEIKLELSVGKTRTDEEVRSNALTGPRLAFGDAVVEDSGSRTSSGAKYYVGKCGHGGEKDSSMNCNFRREYKKYSTNSRVPSNLKDSSSSRMQAGPSRNRVKLEGSTSVTALSIPNPQRLRTLPSKHPRNSNAGSKKELRDTVVHRTLRKINEDWKEKMLEASDEVLKFLNKDYHGSPHKRGHVHN

SEQ ID NO: 19704 - protein, 393 aa, Zea mays
  VARIANT 111..393: note = Derived polymorphism lacks residues 111 to 393
  VARIANT 285: note = Ancestral polymorphism is R, Derived polymorphism is W
  VARIANT 334: note = Ancestral polymorphism is G, Derived polymorphism is R
MNETCVVPEWLHNIFLGYGNPSAAQWMNMPDLLEVIDFKDTFLDANHVQQSFPDYQVTFINSDGTKNLHPSPPFKIRVSKKMRESSHALPGNMNSNLTVKSRNNMADGEPQKEKLIVETYIPADPGPYPQDKPKQNSVRFTPTQIGAIISGIQPGLTMKMYEDASQVATDAVGSIRTVASFCAEKRVVAAYRDKCEALRKQGIRSGVVGGLGYGFSFLMLFFTYGLCFYVGAQFVRQGKTTFPDVFKVFFALVLAAIGVLQASALASDATKARDSAISIFSVLDRESKIDSSSGDGMTLEDVSGNIDFRNVSFKYPLRLDVQIFSDFTLRIPSGKAQLVLDPSDILALVGKSGSGKSTIIALLERLYDPDFGRISLDDVECTQMTNLTCSYWV

SEQ ID NO: 19705 - protein, 298 aa, Zea mays
  VARIANT 66: note = Ancestral polymorphism is R, Derived polymorphism is C
  VARIANT 80: note = Ancestral polymorphism is D, Derived polymorphism is G
MADFGDELFLDVGDDGFGDLSYVSFSESIELDLACPRDVFSAGFDPETLTHIPGSPISFDSDPDLRHLSPSLTCSPPFWGCLDDAASFEWEEIADAALGVGGGAGGAGGGGQGLEGDADADADVFGFLDEREMLGVMEGIDSGDDDSIFSDEPPFDFGDGDTELEGIFRSGVGWELLPVPLDEDEFEVLPGHVVEVGGAPPAALAVVERLQVVAVRGEEVVQECAVCKEGMEQGELTTGLPCGHFYHGACIGPWLAIRNTCPVCRYELPTDDPEYEKRRTRRHSAGGSTPQLGAPMQV

SEQ ID NO: 19706 - protein, 103 aa, Zea mays
  VARIANT 28: note = Ancestral polymorphism is K, Derived polymorphism is R
MHGRTAMAVACLLCMTALLLVQDVQSRRLLWTEQEKKQTHGGLVGNHGTADRRSTSLEPCSGAMGGGGTGSADKQGEFPCDDDTSKWTELHTDYIYTQDFKHP

SEQ ID NO: 19707 - protein, 150 aa, Zea mays
  VARIANT 63: note = Ancestral polymorphism is S, Derived polymorphism is C
MTHRRSSMPECHAHAQGHDFSRPTTRPTSASLMPLKFLPPYVSMLQRFTPAPLWEMQPPTQWCEESSWRNAMSMTTTVAPFWWAAGMTYIGYSNACTALARDCPWSPSSPRSHPARRSISPSPSGRTTSMRSPGSDLLPPFYFDNAHPLI

SEQ ID NO: 19708 - protein, 110 aa, Zea mays
  VARIANT 65..110: note = Derived polymorphism lacks residues 65 to 110
  VARIANT 26: note = Ancestral polymorphism is S, Derived polymorphism is F
  VARIANT 9: note = Ancestral polymorphism is G, Derived polymorphism is R
  VARIANT 5: note = Ancestral polymorphism is I, Derived polymorphism is T
MHFAIGIYGFCYSGHSVFPNIYQSMSDHSKFPKALFVCFAICTTIYDSFSFIGFMNETSCTIIVKIVLLASIVCIAFLLSFFGKRAPIFYFLSRRKYIHQKGLNRGELRP

SEQ ID NO: 19709 - protein, 153 aa, Zea mays
  VARIANT 64: note = Ancestral polymorphism is Q, Derived polymorphism is L
  VARIANT 99: note = Ancestral polymorphism is G, Derived polymorphism is C
MASRKWTLPRVVLSSHLLLSPFRICAATAGVAGAGRPCNPDEGAAQDASTEGSLSDMKSKTLKQKLEEVDQDKYRIIPSLSYGPMGIRSRQKCCKPVKGQFCGKHIEQKLLESLVEADTRRQERAKKMEEKKVYLQLYEAMEALVHICRENIE

SEQ ID NO: 19710 - protein, 95 aa, Zea mays
  VARIANT 54: note = Ancestral polymorphism is Q, Derived polymorphism is P
  VARIANT 21: note = Ancestral polymorphism is D, Derived polymorphism is Y
  VARIANT 15..95: note = Derived polymorphism lacks residues 15 to 95
  VARIANT 12: note = Ancestral polymorphism is S, Derived polymorphism is C
MVGKDHPVPAISKSEFTVICYFPSEITLIANENENRLDILEAARKADRGPDRLQASPLVISNRRNIRLAAASIHVNGRFFANSSSLRLNTFYQFR

SEQ ID NO: 19711 - protein, 526 aa, Zea mays
  VARIANT 301: note = Ancestral polymorphism is V, Derived polymorphism is L
MAVLAELGTVPAAGYSRSDVAAALWQQLKSPVVVPLLRVSVALCLAMSAMLFAEKVYMAVVVAASRLLGRRPERRYRWQPIRDGDDLEAAAAYPMVLVQIPMFNEREVYKVSIGAACGLSWPSDRIIVQVLDDSTDPVVKELVRAECWRWASKGVNVKYEVRDSRRGYKAGALREGMKRAYARGCDLVAIFDADFQPEPDFLWRAVPFLLHNPDLALVQARWKFVNADECLMTRMQEMSLDYHFAVEQEVGSSTYAFFGFNGTAGVWRISALNEAGGWKDRTTVEDMDLAVRASLKGWKFVYIGDLMVKSELPSTLKAYRYQQHRWSCGPANLFRKTLVEIVRNKKVTLWKKIHVIYNFFLVRKIVAHAVTFVFYCIVIPTTVLVPEVQVPKWGSVYIPTVITLLSAVATPRSAHLVVFWTLFENVMSLHRTKATFIGLLEAGRVNEWVVTEKLGDALRTKVPGKKPRMRIGDRLHVLELGVAAYLLFCGCYDIAFGNNRYYIFLFLQSIAFFIVGIGYVGTFVPH

SEQ ID NO: 19712 - protein, 233 aa, Zea mays
  VARIANT 142: note = Ancestral polymorphism is T, Derived polymorphism is I
  VARIANT 50: note = Ancestral polymorphism is A, Derived polymorphism is E
  VARIANT 45: note = Ancestral polymorphism is R, Derived polymorphism is Q
MATSALAALSATAAAAGKRILLSRPASSSSLSFASRRLAAGAPLRGFLGAPIRAVASSASAAPAAAAKTIAVGDRLPDATLSYFDTSSPDGELKTVTVRDLTAGKKVVLFAVPGAFTPTCTQKHLPGFVAKAGELRAKGVDTVACVSVNDAFVMRAWKESLGIGDEVLLLSDGNGELARAMGVELDLSDKPVGLGVRSRRYALLAEDGVVKVINLEEGGAFTNSSAEDMLNAL

SEQ ID NO: 19713 - protein, 1450 aa, Zea mays
  VARIANT 1017..1450: note = Derived polymorphism lacks residues 1017 to 1450
  VARIANT 1014..1450: note = Derived polymorphism lacks residues 1014 to 1450
  VARIANT 661..1450: note = Derived polymorphism lacks residues 661 to 1450
  VARIANT 17..1450: note = Derived polymorphism lacks residues 17 to 1450
MSSMTVTSSPLPFLSSSSSLTCHLRRAGTATATAASSASEDFDYPLADPSLRWPHLRFPYLPAPRFPATVAAAPPVPARPPQEVEDPVATSGSASSLVEPLDARAHRGRVKKLSKLALRRAQDWRARVAGLADAVLELPPGAPVDDVLDGARASPDEVAFVVRAVGESSWRRALDAFEWLARSSAPASRAVAVVLGVLGRARQDSIAEEVFLRFAGEGATVQVFNAMMGVYARSGRFDDARQLLDTMHDRGIDPDLVSFNTLINARSKSGCLAAGVALDLLFEVRQSGLRPDVITYNTLISACSQSSNLEDAVTVFEDMIASECRPDLWTYNAMVSVHGRCGKAEEAERLFRELVEKGFMPDAITYNSLLYAFAKEGNVDKVEHTCEQLVKAGFKKNEITYNTMIHMYGKMGRLDLAVGLYDEMRAMGCTPDAVTYTVMIDSLGKMNRIAEAGKVLEDMTDAGLKPTLIAFSALICAYAKGGRRADAENTFDCMIASGVKPDRLAYLVMLDVFARSGDTEKMLCLYRKMMNDNYRPDDDMYQVLLVALAKEDKCEEIEEVIQDMELLCRMNLGIISTMLIKARCVSQGAKLLKKACLQGYKPDIKSLRSIMNAYVMTEKHEEGLSLLECICEHVSFSQDLISECSIMLLCRKQTSISAYEQYSQRLMLKYPGQNCNLYEYLITCLIEAEFFSEACQVFCDMQFIGIEASKSIYESIISTYCKLGFPETAHRLMDDALQSGIPLNILSCRVIIIEAYGKIKLWQQAEILVKGLRQASGIDRRIWNALIHAYAESGLYEKARAVFDNMIKTGPLPTVDSVNGMMRALIVDGRLDELYVVVEELQDMNFKISKSTVLLLLDAFAKAGDVFEVMKIYNGMKAAGYLPNMHLYRSMISLLCHHNRFRDVELMIAEMEGAGFKPDLAILNALLNMYTAAGNFDRTTQVYRSILEAGLEPDEDTYNTLIVMYCRSFRPEEGFTLLNEMGKRGLTPKLQSYKSLLAASAKAELREQADQIFEEMRSKSYQLNRSIYHMMMKIYRNAGNHSKAENLLAVMKEDGIEPTIATMHILMTSYGTAGQPREAENVLNNLKSSSLEVSTLPYSTVFDAYLKNGDYNHGTTKLLEMKRDGVEPDHQVWTCFIRAASLCEQTADAILLLKSLQDCGFDLPIRLLTERTPSLLSEIANYLEELEALEDSAALNFVNAVEDLLWAFECRATASRIFQLAVERSIYRDNVFRYPWQSLYRKISFEVVVAQKDWGADFRKLSAGAALVGLTLWLDHMQDASLQGSPESPKSVVLVTGEGEYNMVSLRKTIRAYLLEMGSPFLPCRARSGRFVVKDYSLKMWLKDSPFCMDLELKDAPAHPKLNSMKLIEGYFMRAGFVSAFKDIHERLGEVWPKKFSRLALLSEECRDEVIKADIQGRKEKLERMKKKGIVTARKSKTRARRGKFVRQQK

SEQ ID NO: 19714 - protein, 396 aa, Zea mays
  VARIANT 198: note = Ancestral polymorphism is G, Derived polymorphism is V
MESTAGPRKRQKAASASGSVAPYLPQELVRNILLRLPSRSVLRFRAVCKDWLRIVSDREFAADHNRHQPAMPLVSFLRSAAGSKRGQTDCCVDAFDLSADSFRSVVRFADKGTRCSSFDIHGSCDGLLLLSFDARFYVCNPATHQWTRLPAPLRASWLAGFYRHEPTGEYRALFYRGQWPGTDYYIMVADSRKGRGIGLPSEKYGYKFRRQPYSLPVLLRGHLHWMAAIEGYDYEMLAFNTTTEKFTVMCPPVVRWHMSLAEVGNELALLSCGHQVPMLELWILKDYENKSWVCTHWIRLPELKMSTFAFDDFSRMIFVSEKGVLIATPEQKLLRYDLNGTLLESFPCNNGSHLKITPYTFKESLVRHAFFETPDCNADGHEDEDEPEPPPFFLGL

SEQ ID NO: 19715 - protein, 209 aa, Zea mays
  VARIANT 126: note = Ancestral polymorphism is G, Derived polymorphism is S
  VARIANT 76: note = Ancestral polymorphism is A, Derived polymorphism is S
  VARIANT 69: note = Ancestral polymorphism is S, Derived polymorphism is F
MGSGLSSSHRRSSASLHQPAAAPAPAPALVIAADGSLREFAPAPLPASVSDALAGANAAADGRFFVCSSDALCFDSDVPALGADELLRPGQIYFVLPAAMLGRPLSSAGMAALAARASEALAAGAGWRGRPRGRRGFTKARVVPAHHRHADGDREVNEKLNQRTLGGIETASRGPATNARKSAVAARPAPPLRRALSTIEEDAERSNWL

SEQ ID NO: 19716 - protein, 284 aa, Zea mays
  VARIANT 54..284: note = Derived polymorphism lacks residues 54 to 284
MDYNSVVWYVRAAGDGERGEPEEPGGAVGGGPGPGVAAAAAGHELLRAVPAAPGAEQERVQPLLPRLLHGRRPLRLLPAGAPRPPRRPDTSVVVPQRDPGVGGGEADRHLPRADVRDQQRQDRVPQRPPAGQARQGRHQHLPDLLPEPPGLLPLLLPRMQAGRDAVGPEPDVRHTAETRAGIRRRRRLRLRRLVQPQEATEDGRVRPRPLRAAGRHPVVRRRGQQVQQRAHHAGDTADQPVPAVQEEGHPPPRPVLRLARSSKLLQRLECNTQSSSSSTFKIIQ

SEQ ID NO: 19717 - protein, 501 aa, Zea mays
  VARIANT 375..501: note = Derived polymorphism lacks residues 375 to 501
MRKDAAAAGIAPGSAPAFLCFDLKPFLAALTVLTLLAAAWQLRPYQSLLASPFSAACPQPTAGVSLPRALAVHAKKASSATNSTVSSSPSPPPGPERREFHAVGSAAALFVQMGAYRGGPYTFAVVGLASKPTHVYGKPWFRCEWEPSDASSPPMRAAKTYHMLPDWGYGRVYTVVVVNCTFPRVPNADSAGGRLVLYAHYGPSRSPASRRERIVALEESPGAYDEAAFRTTPPHRYDYLYCGSSLYGNLSAARVREWMAYHARFFGARSHFVFHDAGGVGPAVRAALEPWVRAGRATLQDVRAQAEYDGWYHNQFLVVNDCLHRYRHAAKWTFFFDVDEYMFLPDGRALEDVLAELEPYTQFTIEQNPMSSKLCVDDPAADYSNQWGFEKLVFRNSITGVRRDRKYAIQAKNAYATGVHMSENVIGNTTHKTEHLIRYYHYHNTINVLGEVCREFVSVPPKKGGGLTWSEKTPWYYDGSMKRVAGAVREFERETIGDVRL

SEQ ID NO: 19718 - protein, 1087 aa, Zea mays
  VARIANT 698..1087: note = Derived polymorphism lacks residues 698 to 1087
  VARIANT 466..1087: note = Derived polymorphism lacks residues 466 to 1087
  VARIANT 449..1087: note = Derived polymorphism lacks residues 449 to 1087
MLVYYHFCYLSMLVCGLLLGCIWMANKQYFLSNFPCILTVTSICVDIILQQGSSQGCPDYICQICGDDIDILQEENEYFVACNDCAFPVCRTCYEYERQEGTQVCPRCKTRYKRHKGSPRVHGDEEEEGSDDIESEFASSIAGRSNIVHPYRVSVAESSINSWDIDSVSITNSGASVHFYEEHVGTPTNHHALVVHPNTGEIMRYNPLQTRPINPNRDLALYGYGSVAWKNRVEWKTKQQNKMQKVSSDGEGSDLNDFDSDCDIPRCAESKQQLSRKVPIPSSKINPYRIVISLRLAILGLFFHYRILNPVHDAHWLWLTSVICEIWFAFSWILDQFPKWHPIQRETYLDRLSLRYEKEGKPPELARIDVFVSTVDPMKEPPLIIANTVLSILAVDYPVDKVCCYVSDDGAAMLTFEALTETCLFARKWVPFCKKHKIEPRAPEWYFAQKIDYLREKVHPEFVRERRAMKREYEEFKVRINTVVANSCKVPEGGWSLPEGAPWHGNNVRDHAGMVQVITGNDCVMDDAGNKLPWLVYVSREKRPGHDHHKKAGALNALLRTSAILSNAPFVLNVDCDHYMNNSKALREAMCFLMDPVLGEKICYVQFPQRFDGIDQHDRYSNHNVVFFDINMKGLDGIQGPIYVGTGCVFRRHALYGYDAPTATKPPSKTCNCWPKSCCLCCGSKRKCSKAKKKQEHQKKVKCRNASKQVHALEVAGRETAPPVPREKFEKRFGQSDAFLASTLQDNGEGCHFDMLKSLDDCIHVLSCGYENKTQWGKEVGWIYGSVTEDILTGFKMHCHGWRSVYCMPKRPAFKGSAPINLTDRLHQVLRWALGSVEIFLSKHCPIWYGYRCGLKPLERLSYINCVIYPWTSIPLLIYCALPAFCLLSGKFMVHECLFEHIVHSSICLHSSYQHPRDAVGRSRNRRLVEKRAVLGHWRCLLAPLCAVPGAPQGSRWREYQVQGDSEGRRHGRVLRAVRVQVDLATGPSDDTAPAKRRRGLGRRVQGGDGRVRSLGPAARQAVLLLLGRPPPPPVPQGRDRQAGQGADRCRCAVNATGIHTLSVVGPGEPLRHQVRWTCSGGLWLGL

SEQ ID NO: 19719 - protein, 130 aa, Zea mays
  VARIANT 111: note = Ancestral polymorphism is M, Derived polymorphism is K
  VARIANT 91: note = Ancestral polymorphism is A, Derived polymorphism is T
  VARIANT 78..130: note = Derived polymorphism lacks residues 78 to 130
  VARIANT 59: note = Ancestral polymorphism is G, Derived polymorphism is R
  VARIANT 48: note = Ancestral polymorphism is G, Derived polymorphism is S
  VARIANT 43: note = Ancestral polymorphism is R, Derived polymorphism is C
  VARIANT 29: note = Ancestral polymorphism is P, Derived polymorphism is S
  VARIANT 28: note = Ancestral polymorphism is R, Derived polymorphism is K
  VARIANT 26: note = Ancestral polymorphism is M, Derived polymorphism is I
  VARIANT 22..130: note = Derived polymorphism lacks residues 22 to 130
  VARIANT 18: note = Ancestral polymorphism is E, Derived polymorphism is K
  VARIANT 6: note = Ancestral polymorphism is V, Derived polymorphism is M
MVRVSVLNDALKSMYNAEKIGKRQVMIRPSSKVIIKFLTVMQRHGYISEFEYVDDHRAGKIVVELNGRLNKCGVISPRFDVGVTEIERWTARLLPSRKFGYIVLTTSAGIMDHEEASRKNVGAKALGFFY

SEQ ID NO: 19720 - protein, 104 aa, Zea mays
  VARIANT 3..104: note = Derived polymorphism lacks residues 3 to 104
  VARIANT 15: note = Ancestral polymorphism is H, Derived polymorphism is Q
MTWRGRWGLRLRVRHGGVRLGLLLRVRVRLSGIVGLLLRSVEDLRCRCRPAAGGRRACGWSAPRASGPGPCRHARLPERDQTSYAEAIADCLEFIKSRSSPTVL

SEQ ID NO: 19721 - protein, 240 aa, Zea mays
  VARIANT 145..240: note = Derived polymorphism lacks residues 145 to 240
MHLPFYGTTSSRFSREYHELSSPATKGLEVEHTNLLYEDNYLGSSNWEQNYIGDLHIANGNQGLHYDSETGVSFSDSFASEYAASSDGLVAPLEYLASQFPGFSAESLAELYYANECDFNHTIEILTQLEMQVDATPNHTLNLAQSTPNFSTGDFPALPTVEDQNGFNKAVCKFASQNSGPWKFKKGPEYGNGVSALSVPKQYSSGTKQSSRNKFQSISSARVAPWLQTGDAVGNTHLIL

SEQ ID NO: 19722 - protein, 347 aa, Zea mays
  VARIANT 15: note = Ancestral polymorphism is G, Derived polymorphism is C
  VARIANT 211: note = Ancestral polymorphism is V, Derived polymorphism is A
  VARIANT 213: note = Ancestral polymorphism is T, Derived polymorphism is I
  VARIANT 276..347: note = Derived polymorphism lacks residues 276 to 347
MDPVRKSVCVTGAGGFVASELVKLLLSRGQYAVRGTVRDPDADRETWECGTAFFLEVERSSRFFIKKGASKNAHLKVLEGAEERLQLLKADLMDYDSIASAVAGCEGVFHVASPVLSHRPSNPEVEVIAPAVIGTTNVLKACYEAKVRRVVVVSSCGAVYANPIYPKGKVFDEDCWSDEDYCRKKEDWYLVSKTLSEREALAFAAKTGLDVVTVCPSLVFGPLMQPTVNLSSEMILKYFKADLETVENVLSNMVDIRDVADALLLTYEKPEASGRYICSSHAIKISDMINILKTMYPSYPYPKNFVEDDVNSVYSSEKLQKLGWSFKPIEESLRDTVESYKAFGILN

SEQ ID NO: 19723 - protein, 320 aa, Zea mays
  VARIANT 185: note = Ancestral polymorphism is V, Derived polymorphism is E
MEAVGKSVCVTGAGGFIASWLVKLLLCRGQYKVRGTVRDPGASKNAHLKVLEGAGERLQLVKADLLDYSSVASAIAGCEGVFHVASPVPSGRSSNPEVEVIGPAVTGTTNVLKACYEAKVGRVVVVSSCAAVYANPNYPKGKVFDEDCWSDEAYCRKNEDWYFVSKTLAEREAFAYAAKTGLDVVTICPSLVFGPLMQPTVNSSSKIILKYFTGDRETVENILRNMVDVRDVADALLLAYEKPEASGRYICSSHAIKVADMINILKTLYPSYPYPKNFVEDDDNSVYSSEKLQKLGWSFKPIEESLRDTVESYKAFGILN

SEQ ID NO: 19724 - protein, 162 aa, Zea mays
  VARIANT 7: note = Ancestral polymorphism is V, Derived polymorphism is I
  VARIANT 84: note = Ancestral polymorphism is L, Derived polymorphism is M
  VARIANT 109: note = Ancestral polymorphism is T, Derived polymorphism is I
  VARIANT 137..162: note = Ancestral polymorphism lacks residues 137 to 162
MTKWARVFVLPSEGIIADSSLSNHHEDSLGSGLPSISTGKPFDSDEVPPGVTLTAQFPYHLANKMDLKLDIFSLGDTSKVIGKLMMDMSSLYDVGRNKRSAGLLIVDHIVDLLTPCFHGDSFLDRMLSLLPHKENMRSNSAAKNPQTPSKHSQGTIKRSPCN

SEQ ID NO: 19725 - protein, 211 aa, Zea mays
  VARIANT 110..211: note = Derived polymorphism lacks residues 110 to 211
  VARIANT 113: note = Ancestral polymorphism is S, Derived polymorphism is Y
MTLREPQSSRWDAFTSAERILSVTSAETPQSLASELRDFINTSTLVESHAQTTSMESSQGLLSFQDVLLLTIIGYILASENFPTSMAGGPFSWEDERSLKDVIVDSILERPSSVKLRFLDGLDSELEAKARSKDGERNKNSSEVAPSTDVDFDDEWGTWDDSDNTDHQKEEAYGDMQLKLEVRDRVDQLFKFFHKLSSMRLRNQAFGEALG

SEQ ID NO: 19726 - protein, 224 aa, Zea mays
  VARIANT 62: note = Ancestral polymorphism is G, Derived polymorphism is E
  VARIANT 68: note = Ancestral polymorphism is N, Derived polymorphism is I
  VARIANT 78..224: note = Derived polymorphism lacks residues 78 to 224
  VARIANT 101: note = Ancestral polymorphism is A, Derived polymorphism is P
  VARIANT 102: note = Ancestral polymorphism is G, Derived polymorphism is A
  VARIANT 169..224: note = Derived polymorphism lacks residues 169 to 224
MAAAASVCVTGAGGFIASWLVKLLLSRGQYVVRGTVRDPDRRSHGPLISDFNLDLIGQGANESQHQDNVLNVSCFSGSKKIYLVCALGASKNAHLKELERAGERLQLLQADLLDYSSVASAIAGCEGVFHVACPVPSGRSSNPEVEVIGPAVVGTTNVLKACYEAKVKRVVVVSSVSAVFSNPNWPKDKVFDEDSWSDEDYCRKNEVMQLSLSKAMMLLVQITT

SEQ ID NO: 19727 - protein, 124 aa, Zea mays
  VARIANT 24: note = Ancestral polymorphism is E, Derived polymorphism is D
  VARIANT 28: note = Ancestral polymorphism is R, Derived polymorphism is T
  VARIANT 97..124: note = Derived polymorphism lacks residues 97 to 124
MQSIVNTSSKVLLNYFKGDRETVENRLRNMVDVRDVADALVLAYENPEASGRYICSSHPLKVSDMINILKTLYPSYPYPKNFVETDGNITCSSEKLQKLGWTFRAIEETLRDSVESYKAFGILN

SEQ ID NO: 19728 - protein, 163 aa, Zea mays
  VARIANT 37: note = Ancestral polymorphism is G, Derived polymorphism is R
  VARIANT 41: note = Ancestral polymorphism is V, Derived polymorphism is I
  VARIANT 81: note = Ancestral polymorphism is A, Derived polymorphism is V
MEAAAGEGPTTTMKTVCVTGAGGFVASWLVERLLAGGRYKIHGTVRDPGDAKNAHLLGLDGAAERLRLFKADLLDFGSLAAAIAGCDGVFHTELLAPAVTGTMNILRACSDAHVRRVVVVSSLSAVMINPDWGECKVMDEGCWSDVDLCRTTKSRGQSHLRVK

SEQ ID NO: 19729 - protein, 140 aa, Zea mays
  VARIANT 6: note = Ancestral polymorphism is Y, Derived polymorphism is C
  VARIANT 92: note = Ancestral polymorphism is K, Derived polymorphism is R
MEAFDYAKRTGVDVVSVCPSLVIGPMLQLTVNASSSVVVDFLKGDRLVKMKLRHFVDVRDVADALLLVYETPEASGRYICNSHARLVSDVIRLLRSWFVQVSHEPAFSSNKLQALGWKFRPFEETLRDSVESFKAAGVIH

SEQ ID NO: 19730 - protein, 337 aa, Zea mays
  VARIANT 69: note = Ancestral polymorphism is D, Derived polymorphism is E
  VARIANT 202: note = Ancestral polymorphism is S, Derived polymorphism is F
  VARIANT 314: note = Ancestral polymorphism is K, Derived polymorphism is I
MEGAAGIRTRPAVCVTGAGGFVASWLVERLLAGGRYMVHGTVRDPGDAKNAHLAAMDGAADRLRLFRAELLDYGSVAAAIAGCDGVFHVASPVPMTYPIDVQSLLADTNILLQVELLAPAVTGTKNVLKACSEAKVKRVVVVSSVAAVMVNPGWPQNEAMDEACWSDVEFCRTTQNWYCLSKTLAELEALDYAKRSGLDVVSVCPSLVIGPLLQSTVNASSSVIVDCLKGDREVKLKLRNFVDVRDVADALLLVYETPEASGRYICDANARQMSEVVALLKDWYPAYSHAATKFVQVSDEPLFSSKKLQALGWKFRTLEESLRDSVESFKAAGVLVD

SEQ ID NO: 19731 - protein, 300 aa, Zea mays
  VARIANT 285: note = Ancestral polymorphism is A, Derived polymorphism is V
  VARIANT 227: note = Ancestral polymorphism is L, Derived polymorphism is R
  VARIANT 144: note = Ancestral polymorphism is R, Derived polymorphism is M
MDIDLFPDIDLDALLASFSGDPAAVSGLIIPSPPPPAPATAHDAEAGSPESVTSRTNPLGEVALSEIERLLMQEGEAELGGEVDGISVDQFFDALYDGEEAKGEREAGASADVDSGRDDVLEVVTPEAGTVEVDGDDPISKKKMRQMRNRDSAMKSRERKKSYIKDLETKSKHLEAECRRLSYALQCYAAENMALRQSLLKDRPLGAPTATQESAVLTETLPLVSLLWLVSIVCLFLMPVLPNRSPAAPSSGGRDLVMAAGKTSSETPEILELILHGRRCKSTRAKIKLCILPFHAGAAC

SEQ ID NO: 19732 - protein, 113 aa, Zea mays
  VARIANT 61..113: note = Derived polymorphism lacks residues 61 to 113
MLYVDMKVNGVHLKGYKNNFMSTQDVKFIQFQLTVNVAALIINVVAAVSSGNVPLNAVQIRGMHTLIRDRDITTPDFVFHSDRLIGLVMEHGLGHLPFTEKQVITPTDIRKFQ

SEQ ID NO: 19733 - protein, 146 aa, Zea mays
  VARIANT 89: note = Ancestral polymorphism is T, Derived polymorphism is M
  VARIANT 79: note = Ancestral polymorphism is S, Derived polymorphism is F
  VARIANT 76: note = Ancestral polymorphism is D, Derived polymorphism is G
  VARIANT 74: note = Ancestral polymorphism is G, Derived polymorphism is V
  VARIANT 73: note = Ancestral polymorphism is M, Derived polymorphism is T
  VARIANT 72: note = Ancestral polymorphism is T, Derived polymorphism is I
  VARIANT 53: note = Ancestral polymorphism is P, Derived polymorphism is S
  VARIANT 51: note = Ancestral polymorphism is R, Derived polymorphism is K
  VARIANT 35: note = Ancestral polymorphism is I, Derived polymorphism is V
  VARIANT 31: note = Ancestral polymorphism is N, Derived polymorphism is I
  VARIANT 21: note = Ancestral polymorphism is A, Derived polymorphism is V
  VARIANT 2: note = Ancestral polymorphism is A, Derived polymorphism is T
MALKDYESIGDENDKEKLEIAEANSKILKENAEMINEYFSIHVDHDGNLTRLPVVLDQYTPDMDRLPEFVLTMGNDVGSWDDEKECFRTAAAAIGNFYALHPPILPNPSGSGVQVYKKNKACMASGEHVDSIGEWIGLCTLQLLAY

SEQ ID NO: 19734 - protein, 265 aa, Zea mays
  VARIANT 8: note = Ancestral polymorphism is F, Derived polymorphism is S
  VARIANT 2: note = Ancestral polymorphism is V, Derived polymorphism is A
MVSSLPLSSLLLLLLLLSAASFGGGVRLGDGGYEDWRLGTATYVKEFQSHPLNDGGGACGYGDLDIFRYGRYTAGLSAALFGRGGACGGCYELRCVNHIQWCLRGSPTVVVTATDFCPANMGLADDDAGGWCNFPREHLELSEAAFLRVAKAKAGIVPVQFRRVSCDRAGGMRFTITGSAHFLQVLITNVAADGEVAAVKVKGSRTGWIPMGRNWGQNWQCDADLRAQPLSFEVTGGRGRTVTAYSVAPADWMFAQTFEGKQFAE

SEQ ID NO: 19735 - protein, 248 aa, Zea mays
  VARIANT 230..248: note = Derived polymorphism lacks residues 230 to 248
  VARIANT 204: note = Ancestral polymorphism is E, Derived polymorphism is A
  VARIANT 175: note = Ancestral polymorphism is E, Derived polymorphism is K
  VARIANT 174: note = Ancestral polymorphism is A, Derived polymorphism is D
  VARIANT 164: note = Ancestral polymorphism is G, Derived polymorphism is C
  VARIANT 145: note = Ancestral polymorphism is G, Derived polymorphism is S
  VARIANT 51: note = Ancestral polymorphism is Y, Derived polymorphism is N
  VARIANT 40: note = Ancestral polymorphism is D, Derived polymorphism is V
  VARIANT 33..248: note = Derived polymorphism lacks residues 33 to 248
  VARIANT 22: note = Ancestral polymorphism is D, Derived polymorphism is Y
  VARIANT 20: note = Ancestral polymorphism is A, Derived polymorphism is D
MAAITDIYDPRNWNRLDNKARDIIVEKGPIREENLVFPKDGNSRHFSYAHYLRKMKNGELSDRKCICKISLAHDGFGDWRHINDRLKDHETSMEHITNMNTWNELRARLAKALTIDKEIQEEIKREKEHIRQVLLRLVAIVKFLSKRCLAFSGSKEQLYNDQNGNIYACVEMIAEFDVVMQDHLRRIKNKETRYHYLRHKIQDALIYLMTSSMTIAKSIASKMGVEAPFQVKRKAQRKNIIDENEYNE

SEQ ID NO: 19736 - protein, 774 aa, Zea mays
  VARIANT 235..774: note = Derived polymorphism lacks residues 235 to 774
MAAALCFASLTRVRPFAAVLLLMLLQQARFRALAVARTNLTAGATLTPADYISSPSGTFSFGFLALDSDPTKFLLATWFHFADGNASSQFQPQPQPQSVVWFAKQSPSGSTSNATAQSVLSITSDGQLMLTDGQQVLWTPTTDRGSVLALLDYGNLQFLSDSGNQVLWESFSYPTDTLLPGQSLSYEPTGSEGKLFARRADAEFTTGRFSMGVQSDGNVVLYVDLLEGNDPENAYWQAYTNSPDGNTTVTFDGQGRLNYTLHNGTVNSLVKPAASFAAGEYLKFARMDPDGIVRTYVSPKNGGTGNASWTVSGAFPDYGCVKRTSGLQDMCGPGSYCVSAPTPSSRDRLECTCPSGYKYTDEQHRDSGCTPGFEPQSCDGENGGSDEFTLVELLNTTWETSIYYKKLSSVTEQQCRDSCLGDCFCAAALMIGGSKCAEMAALTNGWQANGATSLTTKAFIKVRTRNPPAAAPARNRNALAYKVAAICLAVVLLVTVGVLVALHCHRRRNRESQRPFSSSVRAFSCKELHQATNGFEKLLGKGSFGEVYRGTMRSPHPHLIAVKKLITSNEYSEQEFTNEVQSIGQIHHRNLVRMIGYCKEGKHRMLVFEFMPGGSLRGFLFDPEKRPPWRWRAEAAIAIARGLEYLHYGCSAPIIHCDIKPDNILLDDRGVPRITDFGISKLLGSQQLVGARRTELTLHGDDADVDSADDMERVDRFARVALWCIEPNPLLRPTTHQVVQMLETSDWAQVQTLRIPDPPECYMESSPLIPQLKD

SEQ ID NO: 19737 - protein, 144 aa, Zea mays
  VARIANT 21: note = Ancestral polymorphism is E, Derived polymorphism is K
  VARIANT 44: note = Ancestral polymorphism is P, Derived polymorphism is L
  VARIANT 59: note = Ancestral polymorphism is G, Derived polymorphism is V
  VARIANT 72: note = Ancestral polymorphism is L, Derived polymorphism is R
  VARIANT 73: note = Ancestral polymorphism is S, Derived polymorphism is L
  VARIANT 83: note = Ancestral polymorphism is S, Derived polymorphism is R
  VARIANT 84: note = Ancestral polymorphism is S, Derived polymorphism is I
  VARIANT 89: note = Ancestral polymorphism is L, Derived polymorphism is Q
  VARIANT 100: note = Ancestral polymorphism is D, Derived polymorphism is V
  VARIANT 103: note = Ancestral polymorphism is S, Derived polymorphism is L
  VARIANT 106: note = Ancestral polymorphism is N, Derived polymorphism is K
  VARIANT 112: note = Ancestral polymorphism is G, Derived polymorphism is V
MSDSGSHWVQADGKEVSFTEEILVAKWSSSESSDRGLIVAWNNPSSALHAGVLPSFLYGRGAQNWWLAHEVLSSEMRLFFDASSLVLGLYPESISSMQHVMASSKNGRLTSVSWEYDVNHHLATVYGSYCCQSPARRFPMLHRV

SEQ ID NO: 19738 - protein, 225 aa, Zea mays
  VARIANT 158..225: note = Derived polymorphism lacks residues 158 to 225
  VARIANT 43: note = Ancestral polymorphism is P, Derived polymorphism is L
MGCPRGPSVLVLLHGFGLQAKRQWWCQVCSRPTLTTKPGSSAPARARRGHIMLLRFPRSRASPAVTAASASLVAPQPPNPYTIVCSPPFSSPRTPGEPSTTAILVCVPTFVGRQRSGSALIRFATRRARRSRRRTSSSPSSKATCPVRVRTVFSPPHQRCVSNERACHQGEARAGGGGDADCVRRRALGGIASSIHVIPDFPKPVCPMMHGAEGPAFCTDTEFEQ

SEQ ID NO: 19739 - protein, 191 aa, Zea mays
  VARIANT 119: note = Ancestral polymorphism is R, Derived polymorphism is W
MGEYNGGVSTSWTIGSAHGGMAPPTRPKIKIIHIIAPEIIKTDVAHFRDLVQRLTGKPASCAASSTGDDDVASTLPPVEDEDMETTTKKRPRPRPAPPPAAGDERSDFTKAQEEPVKKRKIKCEVKVEEQGAGFGDYDLGRGDLWMDLNPGGFLSFLEEEGVFQGLAAADHDFFQPFGSSRMDLVGEMHAS

SEQ ID NO: 19740 - protein, 159 aa, Zea mays
  VARIANT 124: note = Ancestral polymorphism is K, Derived polymorphism is N
  VARIANT 106: note = Ancestral polymorphism is S, Derived polymorphism is F
  VARIANT 85: note = Ancestral polymorphism is S, Derived polymorphism is L
  VARIANT 82: note = Ancestral polymorphism is R, Derived polymorphism is L
  VARIANT 57..159: note = Derived polymorphism lacks residues 57 to 159
  VARIANT 55: note = Ancestral polymorphism is A, Derived polymorphism is E
  VARIANT 19: note = Ancestral polymorphism is I, Derived polymorphism is T
MAPPGSRRWAYVRVMAGTILGGVLGFYVMHRVETSYKARQIQPCPTPPPLWLWLALSPVSSGLAQHFSCRREWRRGCGDTRRICLPKPRSRSSCRTRHSGRIKPSSCPTRDTDILPLLRLLFSKLLVVLPNWATQQQDETFGSFNNRTTLPRVGMASVC

SEQ ID NO: 19741 - protein, 26 aa, Zea mays
  VARIANT 10: note = Ancestral polymorphism is T, Derived polymorphism is N
  VARIANT 13: note = Ancestral polymorphism is R, Derived polymorphism is S
  VARIANT 25..26: note = Derived polymorphism lacks residues 25 to 26
MHISGILTSNYCRFTLLVALLMLPQR

SEQ ID NO: 19742 - protein, 29 aa, Zea mays
  VARIANT 21: note = Ancestral polymorphism is V, Derived polymorphism is F
  VARIANT 24..29: note = Derived polymorphism lacks residues 24 to 29
MHKFHKECIDRWLGMKIWCPFCKSNVFSQ

SEQ ID NO: 19743 - protein, 395 aa, Zea mays
  VARIANT 314: note = Ancestral polymorphism is G, Derived polymorphism is D
  VARIANT 289: note = Ancestral polymorphism is S, Derived polymorphism is R
  VARIANT 288..395: note = Derived polymorphism lacks residues 288 to 395
  VARIANT 283..395: note = Derived polymorphism lacks residues 283 to 395
  VARIANT 233: note = Ancestral polymorphism is A, Derived polymorphism is V
  VARIANT 211: note = Ancestral polymorphism is A, Derived polymorphism is T
  VARIANT 207..395: note = Derived polymorphism lacks residues 207 to 395
  VARIANT 157: note = Ancestral polymorphism is T, Derived polymorphism is I
  VARIANT 151: note = Ancestral polymorphism is G, Derived polymorphism is D
  VARIANT 77..395: note = Derived polymorphism lacks residues 77 to 395
  VARIANT 69: note = Ancestral polymorphism is G, Derived polymorphism is S
  VARIANT 43: note = Ancestral polymorphism is W, Derived polymorphism is R
  VARIANT 36: note = Ancestral polymorphism is F, Derived polymorphism is S
  VARIANT 30: note = Ancestral polymorphism is P, Derived polymorphism is H
MSSTSSAATAPRWADLPANVCDLVREHLDPITLLRFPAVCRHWFEACEESPLLPLGAPALLTSGLDPDSYEIEYDVEAGTFGLHDVSAGGGGRKSFLGKAEGLKGRTWVGGNHGWLTTINKGCDVELLNPLTGAWVRLPSFATISRVKVVGDLRVCTPSAYIFNNTHKILKVALCRTPAHAGYLAVVIFSNGLLAFTAAGGGGEGECRWTAVKNPATDASYMDAIVLDGKLFAVNEIGHVYSWDLDGGAMTEPAVFRDQRLISVANMTMTVKDMYNYGRMYSWDSRVWSRMVFDDRRSFHDLVMSLHELDASSGRWRRVTDFGGDRALFLWASYPFFITVRRYWCGTNLEADCVYLADTPYGYDVAIFDLNGHIKRQMDYSLVVEPLQMPMFFLP

SEQ ID NO: 19744 - protein, 396 aa, Zea mays
  VARIANT 101: note = Ancestral polymorphism is E, Derived polymorphism is K
  VARIANT 102: note = Ancestral polymorphism is I, Derived polymorphism is N
  VARIANT 106: note = Ancestral polymorphism is L, Derived polymorphism is M
  VARIANT 109: note = Ancestral polymorphism is D, Derived polymorphism is E
MAATAAVAGTGSSLSSRRSRSVVSSSFRAAASRFRSPRCVLGSEQLRVAHEGKRMSGAESRTAWAPKVPAPESRLAALPRELRDSRMKIFSGTANRPLAQEIAAYLGIELGKILIKRFADGEIYVQLQESVRGCDVFLIQPTCSPVNENLMELFIMIDACRRASARSITVVIPYFGYARADRKAQGREPITAKLAANLLTEAGSDRVIVCDIHSTQALGYFDIPVDHIYGQPVILDYLASKTISEDLVVVSPDVGGVVRARAFAKKLLNARLAIVDKRRQGHNMSEVMNLIGDVKGKVAILIDDMIDTAGTITSAAALLKQEGAEAVYACCTHAVFSPPAIERLSGGVFEEVIVTNSILLPEDKCFPQLTVLSMANLVGETIWHVHRDGSVSSIFQ

SEQ ID NO: 19745 - protein, 312 aa, Zea mays
  VARIANT 86..312: note = Derived polymorphism lacks residues 86 to 312
MATKAKSSSSSCLSFLKDALLLPTKNAKLFVPVFLLVTAPLILLQITNVFYIQPRTADMLHHINEVKNMDPSSADYAKLMVEIMKEAKELAMISIALLVITFAGSFAKQIIAFFATSTTYAGDRYSFPELFTKVIMKGRHLRGPLITVAMVGVLNVACALLLAALLQLAMRQLGVLYTAILFVLPFLAFLYLDVVFFVAVAASVADEDSRGVSALRLAWRLMTRVCRKEGFVLVVAVHLVAMVPSLLYAVALACLKKNMPMGLALFSVYALLSGLVQLFYFAGIMVYYYLAMESKEVMAHDYVNIPTVEATV

SEQ ID NO: 19746 - protein, 569 aa, Zea mays
  VARIANT 29: note = Ancestral polymorphism is P, Derived polymorphism is L
  VARIANT 466: note = Ancestral polymorphism is P, Derived polymorphism is S
MAGSNGTLLLALRIVLFCALASVATTLLPLVTRPCAYSLPRTILAASGLDPRLISCADDGSAKAQLSDGDGGHNKAGSGGRPIVTDLLSCGEPRLPSHALPPFRCCPPTPASDAAVANFTFPDPGEPLRTRQPAHGAAGADSVARYARAVALMKALPESDPRSFYQQANIHCAYCTAAYRQAGRPELHVQIHFSWLFFPFHRAYLYFFERVAARLLGDPGFAVPFWSWDVPEGMRVPPEFADAASPLYDPIRNPEHAPPRVVDLDFSKVDKNYTDEQQIQLNLRTMYKQMVTNAPLPSLFYGQPYRAGDREMPGAGTVELSPHNTIHVWAGDLSQPNHENMGTYYSAARDPIFFPHHTNSDRLWEVWRGGPARHADFTDPDWLDSSFLFYDEDARLVRVTVRDMLDIGRLRYAYAEVGLPWLSARPPINPGDVNRGRDPPHLESVRFPVSLDAPVTAEVSRRPGKPRSHWEEVLVVEGIKADGADFVKFDVYVNAVDHEKIMPGGREMAGSFVSLKHPGNMVVQSSMRVALNELLEDLGAEGDDSVTVTLVPVEGRVRIGGLRIVYMAE

SEQ ID NO: 19747 - protein, 775 aa, Zea mays
  VARIANT 302: note = Ancestral polymorphism is T, Derived polymorphism is I
MMQRPPLRPEEYSLKETTPHLGGAAAGDKLTTTYDLVEQMQYLYVRVVKAKELPNKDITGSCDPYVEVKLGNYKGQTGHFEKKNNPEWNQVFAFAKERIQSSVVEILVKDKDLVKDDFIGRVIFDLNEVPKRVPPDSPLAPQWYRLEDRNGHKVKGELMLAVWMGTQADEAFPEAWHSDAASVPGDGLASIRSKVYLTPKLWYLRVNVIEAQDLIPNDKTRFPEVYVKAMLGNQVQRTRALASRTLNPLWNEDLMFVAAEPFEEHLVLSVEDRVAPGKDEVIGRTIIALQHVPRRLDHRLLTSQWYNLEKHVIIDGEQKKETKFSSRIHLRICLEGGYHVLDESTHYSSDLRPTAKPLWKPSIGILELGILTAQGLLPMKTKDGRGTTDAYCVAKYGQKWVRTRTIIDSFTPKWNEQYTWEVYDPCTVVTIGVFDNCHLNGGEKANGARDTRIGKVRIRLSTLETDRVYTHSYPLIVLTPGGVKKMGEVQLAVRFTCSSLLNMMHLYSQPLLPKMHYVHPLSVIQVDNLRRQATSIVSTRLGRAEPPLRKEIVEYMLDVDSHMWSMRKSKANFFRITGVLSPLFAVARWFDQICHWKNPLTTVLIHVLFMILVLYPELILPTIFLYLFLIGVWYYRWRPRQPPHMDTRLSHAETAHPDELDEEFDTFPTSRPPDLVRMRYDKLRSVAGRIQTVVGDLATQGERLQSLLSWRDPRATALFVVFCFVAAIVLYVTPFRVVVFLAGLYVLRHPRFRHKMPSVPLNFFRRLPARTDSML

SEQ ID NO: 19748 - protein, 158 aa, Zea mays
  VARIANT 2: note = Ancestral polymorphism is A, Derived polymorphism is E
  VARIANT 10: note = Ancestral polymorphism is A, Derived polymorphism is V
  VARIANT 11: note = Ancestral polymorphism is P, Derived polymorphism is S
  VARIANT 23: note = Ancestral polymorphism is P, Derived polymorphism is H
  VARIANT 26: note = Ancestral polymorphism is L, Derived polymorphism is F
  VARIANT 31: note = Ancestral polymorphism is R, Derived polymorphism is H
  VARIANT 104: note = Ancestral polymorphism is S, Derived polymorphism is Y
MADYPRVVRAPLFVPVLWGQCAPLLLSRLRRRRGTSEGEVLIWTPTVVWSSLLLYRQILDEIEANDYDNFTRRAYVPKTKKRMALPKAYLRSLVPVWEKLSKFSSHAAGGSSIESLMKMSEPAVLSHFKPADYVSILAQIHKELECRPPDDKASLYLL

SEQ ID NO: 19749 - protein, 135 aa, Zea mays
  VARIANT 121..135: note = Derived polymorphism lacks residues 121 to 135
  VARIANT 68: note = Ancestral polymorphism is A, Derived polymorphism is T
  VARIANT 60..135: note = Derived polymorphism lacks residues 60 to 135
  VARIANT 41: note = Ancestral polymorphism is H, Derived polymorphism is Y
  VARIANT 40: note = Ancestral polymorphism is L, Derived polymorphism is I
MSHQLRCRYRVHDQLQERHERMPVHHHHRGRKQGGLIGLLHGIKKFDALRGFSISTYVYWWIRQVLSAHFRAYIQALEKLQMDIATSTNLLGVETRSTGFIFSIGKEPLKTRPSVFALGERINILKVKLLALSFR

SEQ ID NO: 19750 - protein, 350 aa, Zea mays
  VARIANT 319..350: note = Derived polymorphism lacks residues 319 to 350
  VARIANT 269: note = Ancestral polymorphism is T, Derived polymorphism is I
  VARIANT 242: note = Ancestral polymorphism is T, Derived polymorphism is I
  VARIANT 50..350: note = Derived polymorphism lacks residues 50 to 350
  VARIANT 4..350: note = Derived polymorphism lacks residues 4 to 350
MYLRLAPSASSHFSENTSDLLDLSPHQCVPSLDPAAPPLLSPHPQIHRCWPSERSSRTTSSSMTPSSAPRRQRCRHPPGPARPHLREFVQECYELSSEYKNDQYQARLAGREVLQPRHRPRPRVLRLQQLPASTSCDFRGGNVASLRSYLHISGRGPQRRQLCEGAVCSGASTAMSRNVEASLLIEEPPPPEVGEGVDGDEGDVVLVSDEGYDVALHLHGVPSGFVLQDTPNACKMVESVWTLYKIDVVMEVVNNLRNIHCKGVADLVTEFQVRLQGTANTSLASSFLSCIPVETTATLVDHVCIVQAQSEFAYHIKFYPDLQQSLLFSDRRTARGDNHHHHPTTCLSQV

SEQ ID NO: 19751 - protein, 220 aa, Zea mays
  VARIANT 68: note = Ancestral polymorphism is S, Derived polymorphism is G
MATSEPVQESLVVHYSQPSRPRVLLAASGSVAAIKFESLCRSFSEWADVRAVATTPSLHFVDRSSLPSGIVLYTDDDEWSTWKKIGDEVLHIELRKWADVMVIAPLSANTLAKIAGGLCDNLLTCIVRAWDYSKPLFVAPAMNTLMWNNPFTERHLHTINQLGIALIPPVTKRLACGDYGNGAMAETSQIHTSVRLACKTQPHDASSSLAGPVSNNRPSS

SEQ ID NO: 19752 - protein, 507 aa, Zea mays
  VARIANT 370: note = Ancestral polymorphism is P, Derived polymorphism is L
MEVVTARELINPTGLPILLLVAGLTVFFVLRRRSSGGLRLPPSPFALPVLGHLHLLAPLPHQALHRLAARHGPLLYLRLGSMPAIAACSPDAAREVLKTHEAAFLDRPKPTAVHRLTYGGQDFSFSPYGPYWRFMKRACVHELLAGRTLERLRHVRREEVSRLVGSLSRSACDGAAVDVDAVLMGVTGDIISRMVMSRRWTGDDSTTEEMRSLVAETAELTGTFNLQDYIGMFKHWDVQGLGKRIDAVHRKFDAMMERILTARDAERRCRRKASADGAGEGDKKDLLDMLFDMHEDEGAEMRLTRDNIKAFMLAELDAAVGASRLADESDIPRLPYLQAIAKETLRLHPTGPLVVRRSMAPCNVSGYDVPAGATVFVNVWAIGRDPASWAPDPLAFRPERFLEEEGGGESAGLDVRGQHFHLLPFGSGRRICPGASLAMLVVQAALAAMLQCFEWTPVGGAPVDMEEGPGLTLPRKRPLVCTVKARLHPLPVPAAAANNGVEETAGV

SEQ ID NO: 19753 - protein, 116 aa, Zea mays
  VARIANT 60: note = Ancestral polymorphism is P, Derived polymorphism is S
  VARIANT 43: note = Ancestral polymorphism is G, Derived polymorphism is E
  VARIANT 14: note = Ancestral polymorphism is P, Derived polymorphism is T
  VARIANT 11: note = Ancestral polymorphism is A, Derived polymorphism is P
MQFHMAQKRRAYSPGASQSQPSSGRRKKRNAVVRLGGQGRRKERFFGALRLRLRLRMRWPWLASVYRRALRRLRTSYEQALRELIDGSMLVGALHAPIGVDCAHAASFGPMATVGF

SEQ ID NO: 19754 - protein, 185 aa, Zea mays
  VARIANT 106: note = Ancestral polymorphism is H, Derived polymorphism is D
  VARIANT 105: note = Ancestral polymorphism is S, Derived polymorphism is F
MSPSAIFVFLLVSAVHMLECILDLKRRRGSISDDQLRLRVEITQLLKEASALSTPSTFAQAAKLKRLAGAKEKELAKMQDVDIRGKQSLYEKYRKVLLAAKFEESHQTKSACQVVVYGVLVLWFWSTPVTTVPKHLLQPFGRMFSWRGVDASTGRVVVGILPWLFLTSRVSKLLSEKLAPIFLHP

SEQ ID NO: 19755 - protein, 260 aa, Zea mays
  VARIANT 249..260: note = Derived polymorphism lacks residues 249 to 260
  VARIANT 194..260: note = Derived polymorphism lacks residues 194 to 260
  VARIANT 156: note = Ancestral polymorphism is Y, Derived polymorphism is C
  VARIANT 110: note = Ancestral polymorphism is I, Derived polymorphism is M
  VARIANT 98: note = Ancestral polymorphism is A, Derived polymorphism is V
MANRPNARPPARTRQSRKSRCGHCSPRDRSDSSGHSAQSVAQRWHRTNSLNPLHRAFDAVAAAGGAAASVEEGIEALQSYSKEVSRRLLDSDLASLAAPPSSSVSICFHILISLYEVRSRSIDYKCQKHDFDELRLKVDKVGRINGHGYSCGCPKCHSHSFFDNCCSHLKILHTIELDKSYPQDIFQAGRARVQLKKDDGSPINPAIKTSEQTAYLLSPKLNLEWDYIHIILYIFRSMIKYVMDWCLRQKFNLAGIIAYA

SEQ ID NO: 19756 - protein, 555 aa, Zea mays
  VARIANT 341..555: note = Derived polymorphism lacks residues 341 to 555
MEGKAVAVGCGGARVDPADDLKYISGLSTILVATIQEVKDQVSQMEFIFCSQLFPHIQAKSKLVQAHLADTMKASEVEWRKTEAGLVKQLEEVSRGKMLAEERLLQLGTSLEEMKRKLVDSEQLAARHEAEKKQLLGRLEDETRKGEVVRQLQREIEEKDAEVVREREAHQRLLQEFEQLAARHESEKKQLLGRLEDEMGNGEVVRQLQREIEEKAAEVVREREAHQRLQQQVDLKDKNLLLEQSKRRDLIEDYTQLKTNYKHLKSQYTFLLGKIDQHEGSKPPEDIPADRRNTESPPSKRKFKDLEHTNKERIQILPNTRDLKNDSAPGAKAQAAQHASSVRSPIRNSHLAVPSRPMNPLANHSANNSKLQASTSVASPCLNWRETRARKEQGVADPHDDFLDTPLEAVKNTIRNPATPEEALALAASPQVMDFDNSDDETQDLNIATQALRHIPNMPVTKQQNTISVHPPKKDFKYRESVRKKADRENLKGVECKQCKKFYDAVLPGGRADGDGAGSTSLRCEHHDGVSRHRYRYAPPLTPEGFWNIGFESEM

SEQ ID NO: 19757 - protein, 610 aa, Zea mays
  VARIANT 89: note = Ancestral polymorphism is A, Derived polymorphism is G
MLTARGLRRLAAAVCFARRSASAVAALPGAGAARFHDYDAAITECVGRRALREGRQVHARMVTAGYRPALYLATRLVIMYARCGALEDAHNVLDGMPERNVVSWTAMISGYSQNERPAEAWDLFIMMLRAGCEPNEFTLASVLTSCTGSQGIHQHQIKQVHAFAIKKNFELHMFVGSSLLDMYARSENIQEARRVFDMLPARDVVSYTTILSGYTRLGLDEEALNLFRQLYNEGMQCNQVTFSVLLNALSGLSSMDYGKQVHGLILRRELPFFMALQNSLIDMYSKCGKLLYSRRVFDNMPERSVVSWNAMLMGYGRHGMAYEVVQLFRFMCDKVKPDSVTLLAVLLGYSHGGLVDEGLDMFDHIVKEQSTLLNTQHYGCVIDLLGRSGQLEKALLLIQKMPFQPTRAIWGSLLGACRVHANVHVGEFVAQKLFDIEPENAGNYVILSNIYAAARMWKDVFRLRKLMLKKTVIKEPGRSWMILDKVIHTFHSSERFHPRKEDINVKINEIYAAIKAAGFVPDLSCVLHDVDDEQKERMLLGHSEKLAITFGLMSTPSDLTIQVMKNLRICVDCHNFAKFVSKVYGREISLRDKNRFHLITEGACTCGDYW

SEQ ID NO: 19758 - protein, 861 aa, Zea mays
  VARIANT 33: note = Ancestral polymorphism is S, Derived polymorphism is T
  VARIANT 99: note = Ancestral polymorphism is R, Derived polymorphism is L
MAALVALTLALALTAAVTATAKECTNIPTELSSHTVRARLQAAPGGAAEWRWRELFHEHLNPTDEAAWMDLMPPPGAAAAAQHQQHHRQEELDWVMLYRSLKGQQQQQPVGGGTAAAGSTPFLEEVSLHDVRLDPDGDVAYGRAQQTNLEYLLLLDVDRLVWSFRSQAGLPAPGTPYGGWEKPDSELRGHFVGHYLSATAKMWASTHNGTLAGRMSAVVDALDECQRAGGTGYLSAFPAEFFDRFEAIKPIMQGLLDQHVVAGNGKALRMLVAMADYFAGRVRNVIQRYSIERHWTSLNEETGGMNDVLYQLYTITHDQRHLVLAHLFDKPCFLGLLAVQADSLSNFHANTHIPVVIGGQMRYEVTGDPLYKEIATFFMDTVNSSHAYATGGTSVSEFWSNPKRLAEALTTETEESCTTYNMLKVSRHLFRWTKEIAYADYYERALINGVLSIQRGRDPGVMIYMLPQGPGRSKAKSYHGWGTQYESFWCCYGTGIESFSKLGDSIYFEERGERPALYVVQFIPSTFSWRTAGLTVAQQLMPLSSSDQYLQVSFSVSAKTTNGQFATLNVRIPSWTSLNGAKATLNGKHLELASPGTFLTISKQWGSGDQLSLQLPIHLRTEAIKDDRPEYASIQAVLFGPFLLAGLTTGDWDAKTGAADAAASDWITPVPVESNSQLVTLAQESGGEAFVLSALNGSLTMLQRPKDGGGTEAAVHATFRLVPQGGAGAGAAAMLEPLDMPGMVVTDRLTVAAEKSSGAAFNVVPGLAGAPGSVSLELASRPGCFLVGGGEKVQVGCAGGAQQKRGDGAWFRRSASFARGEPLRRYHPMSFAARGVRRSFLLEPLFTLRDEFYTVYFNLVA

SEQ ID NO: 19759 - protein, 101 aa, Zea mays
  VARIANT 1: note = Ancestral polymorphism is R, Derived polymorphism is M
  VARIANT 42: note = Ancestral polymorphism is E, Derived polymorphism is K
  VARIANT 70: note = Ancestral polymorphism is A, Derived polymorphism is T
  VARIANT 73: note = Ancestral polymorphism is R, Derived polymorphism is C
MKLREMSGSPVLLPIEDSSTTNFWSCILRSSKGEVPWAPHSKFCQALPHHGGERTEFILTHNDSNVREAAKVCRLYDIANVLSSLNFIEKTQQVDTRKPAF

SEQ ID NO: 19760 - protein, 191 aa, Zea mays
  VARIANT 25: note = Ancestral polymorphism is S, Derived polymorphism is R
  VARIANT 46: note = Ancestral polymorphism is D, Derived polymorphism is G
  VARIANT 55: note = Ancestral polymorphism is P, Derived polymorphism is A
  VARIANT 66: note = Ancestral polymorphism is P, Derived polymorphism is L
  VARIANT 75: note = Ancestral polymorphism is I, Derived polymorphism is V
  VARIANT 78: note = Ancestral polymorphism is V, Derived polymorphism is L
  VARIANT 88: note = Ancestral polymorphism is L, Derived polymorphism is P
  VARIANT 92: note = Ancestral polymorphism is S, Derived polymorphism is P
  VARIANT 100: note = Ancestral polymorphism is N, Derived polymorphism is I
  VARIANT 109: note = Ancestral polymorphism is L, Derived polymorphism is P
  VARIANT 122: note = Ancestral polymorphism is F, Derived polymorphism is V
  VARIANT 127: note = Ancestral polymorphism is G, Derived polymorphism is E
  VARIANT 136: note = Ancestral polymorphism is S, Derived polymorphism is L
  VARIANT 152: note = Ancestral polymorphism is T, Derived polymorphism is I
MWQPSSAPPATTGDLGPLEILVVESYTNHDLFVAEQEHQVKVYKADTRNPNDLDPQIFEGSLVNTPECVDWDGIINLVSALPQTIKRLVLVSSIGVTKYNEIPWSIMNLFGVFKYKKMGEDFVRNSGIPFTIIRYSDGPYTSYDLNTLLKAIAGERRAVVIGKGDKLVGEVSRLVVAEACIQSLDIESTEG

SEQ ID NO: 19761 - protein, 81 aa, Zea mays
  VARIANT 26: note = Ancestral polymorphism is R, Derived polymorphism is H
  VARIANT 30: note = Ancestral polymorphism is N, Derived polymorphism is K
  VARIANT 31: note = Ancestral polymorphism is L, Derived polymorphism is F
  VARIANT 39: note = Ancestral polymorphism is R, Derived polymorphism is S
  VARIANT 45: note = Ancestral polymorphism is Y, Derived polymorphism is S
  VARIANT 46: note = Ancestral polymorphism is S, Derived polymorphism is C
  VARIANT 49: note = Ancestral polymorphism is Q, Derived polymorphism is L
  VARIANT 58: note = Ancestral polymorphism is L, Derived polymorphism is P
MRRNHELLGDDDEGDLENGQVSKRRHTATKFSMRKSSNRVSASVYSVVQKLCLILGFLKELLTTVFSSDKGYVQVNGFGPT

SEQ ID NO: 19762 - protein, 814 aa, Zea mays
  VARIANT 24: note = Ancestral polymorphism is P, Derived polymorphism is L
MAPSPSHLLLALAALLLCSISPIPVACSRTLPSTAATTTVNVTSFGKAYTKVCDAERFAEMGLNMSAFPYCDASLPYADRVRDLIGWMTVEEKVGNLGDISHGAPRVGLPPYKWWSEALHGVSSTGPTMLFDDLHSKPGNHSGRATVNNATVFANVINSAASFNETLWNSIGQAVSTEARAMYNLGKGGLTYWSPNINVVRDPRWGRALETPGEDPYVAGRYAVNFVRGMQDIPGHYSGDPSARPIKTSACCKHHAAYDVDNWHNQTRFTYDARVSERDMAETFLRPFEMCVREGDVSSVMCSYNRVNGVPACADARLLSGTVRGEWHLNGYIVSDCDAVRVMTDNATWLNFTAAESSAVSLRAGMDLDCAESWIEEEGRPLRDYLSEYGMAAVAQGKMRESDIDNALTNLYMTLMRLGYFDNIPRYASLNETDVCTDEHKSLALDGARQGIVLLKNDHGLLPLDPKKTLAVAVHGPHARAPEKIMDGDYTGPPCRYVTPRQGISRDVKISHKAKMTIYLGGINLYIEREGNDREDLLLPKNQTEEILHFAQASPTPIILVILSGGGIDISFAQKHPKIGAILWAGYPGGEGGNAIADVIFGRYNPGGRLPLTWFKNKYIEQIPMTSMEFRPVPEKGYPGRTYKFYDGPEVLYPFGYGLSYTKFQYETSTDGVSVSLPAPGGHCKGLSYKPSVATVPACQAVNVADHACTETVSFNVSVTNAGGRGGAHVVLVYTAPPPEVAEAPIKQVAAFRRVFVAARSTATVPFALNVCKAFGIVERTAYTVVPSGVSKVLVENGDSSSSVSFPVKIDLSV

SEQ ID NO: 19763 - protein, 296 aa, Zea mays
  VARIANT 245: note = Ancestral polymorphism is S, Derived polymorphism is L
  VARIANT 151: note = Ancestral polymorphism is R, Derived polymorphism is C
  VARIANT 148..296: note = Derived polymorphism lacks residues 148 to 296
  VARIANT 133: note = Ancestral polymorphism is R, Derived polymorphism is I
  VARIANT 131: note = Ancestral polymorphism is T, Derived polymorphism is I
  VARIANT 81: note = Ancestral polymorphism is S, Derived polymorphism is P
  VARIANT 69: note = Ancestral polymorphism is S, Derived polymorphism is N
  VARIANT 46: note = Ancestral polymorphism is A, Derived polymorphism is E
  VARIANT 44: note = Ancestral polymorphism is D, Derived polymorphism is Y
  VARIANT 38: note = Ancestral polymorphism is V, Derived polymorphism is I
  VARIANT 37: note = Ancestral polymorphism is V, Derived polymorphism is I
  VARIANT 32: note = Ancestral polymorphism is R, Derived polymorphism is M
  VARIANT 31: note = Ancestral polymorphism is T, Derived polymorphism is P
  VARIANT 27..296: note = Derived polymorphism lacks residues 27 to 296
  VARIANT 18..296: note = Derived polymorphism lacks residues 18 to 296
  VARIANT 11..296: note = Derived polymorphism lacks residues 11 to 296
MSFPCDSLAIGPCPSFGQILNIYCYVKLVNTRILHNVVTMVLLDIALFKLDIDELIADYAKIVDIFSSSCRGHHKNPPSESYVLSELVDCVSLDGESLQAALSRQVLNSIQWILVQWILVIPITKQVHEITARLLDIHDKMMLINNKEDIRLILHQSDYMLDSETNSLLQIENSRSYYFAINAATFCCSIRLLLNLPDHACLVVGIAVMLGEIINYVQSLQRQVEVHQSCGPPHFSLETSGAPLSYLCQPHHGSPLGYMDNQSCMHPLDTAFCLVINLQYHFLNGVSDASSQLQLI

SEQ ID NO: 19764 - protein, 241 aa, Zea mays
  VARIANT 1: note = Ancestral polymorphism is M, Derived polymorphism is T
  VARIANT 8: note = Ancestral polymorphism is C, Derived polymorphism is W
  VARIANT 55: note = Ancestral polymorphism is W, Derived polymorphism is R
  VARIANT 76: note = Ancestral polymorphism is L, Derived polymorphism is V
  VARIANT 107: note = Ancestral polymorphism is N, Derived polymorphism is S
MHALVRPWDTLPVLLLSRLCMVLLDALRAGWLGSVDEDEEDFSYRRNAGNGPARWGLIRREWATCNVGLLQSPIGLSDTLAGLADRSGRLGRSYRPAAASLVNRGHSIMVRFNSNPGGVVIDGVAYRLRQMHWHAPSEHAINGRRYALELQMVHQSDTNRYAVVSQLYRISRRRPDRTIHRLERYIRRIARRKNHEELIDEEVDPRRPGTRSNRRPLQEANGRAITFYYTSPAHGRGANGD

SEQ ID NO: 19765 - protein, 481 aa, Zea mays
  VARIANT 69: note = Ancestral polymorphism is D, Derived polymorphism is E
MQSLLVPTAASAPVAAPRARRNLPMRLSVRASATAAAAPRRETDPKKRVVITGMGLVSVFGNDVDAYYDRLLAGESGIGPIDRFDASKFPTRFAGQIRGFSSEGYIDGKNDRRLDDCLRYCIVSGKKALEAAGIAHGSKPMEKIDKTRAGVLVGTGMGGLTVFSDGVQNLIEKGYRKITPFFIPYAITNMGSALLGMDIGFMGPNYSISTACATSNYCFYAAANHIRRGEADIMIAGGTEAAIIPIGVGGFVACRALSQRNDDPKTASRPWDKDRDGFVMGEGAGVLVMESLEHAIKRDAPIIAEYLGGAVNCDAYHMTDPRSDGLGVSSCIKQSLEDAGVAPEEVNYINAHATSTLAGDLAEVNAIKQVFKDPSGIKINATKSMIGHCLGAAGGLEAIATVKAITTGWVHPSINQFNPEEAVEFDTVPNVKKQHEVNVGGYQFQGTLIPPKQDFFLPLIFLCIAMQASQILLDLEVTILS

SEQ ID NO: 19766 - protein, 549 aa, Zea mays
  VARIANT 1: note = Ancestral polymorphism is M, Derived polymorphism is V
MESRRLFLTRRLSISSGAQSSAAFIADEIYALLTTRSFRASVNRTELFIRSKSVTASGVAEMYRSVAVAGPPGQPLYLGRAASVLVEASARAALPDGALRLLDLLILTPKAPLPSGASCGHLMAKLFSLGRHADARRVFETLGDRQRRDAVTTVWRVGRAADAVKVFGETAATTTAPKYSSDRYVTMNMMTDCLMKGDLEAAWKLRTQMVEAGMKLQKHHQKMLQMLEKVLVCPDNNKRNVLIEVCVKAGGMDEAVHWLRQMGYDGMEPPSAHSYNLVIAGLWKAGRGDDAVKVFGEMADMLVAPNHFTYTVMINGHLKRLSSVLSSRKNENGDLEAALALLDQMVRDGFKPHEYTCHLLMAEHCLAEWLGDVTALHKIAHGSLLEFLSRTNEDKLLAIIEESAKNGAAAAGNVCTTFVEELCRIQKVSLAEKVLRTFAEAGLVPTTEMYNIVIDGYCKTRDLQGAFLLCRQMESHDQLVPDEATYKSLLLAVRNDTTSIIYWEDVVELFEKNGISTDALNSGSPAAYGFKYRYSLVTRKFKELASKLF

SEQ ID NO: 19767 - protein, 244 aa, Zea mays
  VARIANT 3: note = Ancestral polymorphism is P, Derived polymorphism is L
  VARIANT 14: note = Ancestral polymorphism is R, Derived polymorphism is L
  VARIANT 38: note = Ancestral polymorphism is C, Derived polymorphism is Y
  VARIANT 45: note = Ancestral polymorphism is S, Derived polymorphism is N
  VARIANT 102..244: note = Derived polymorphism lacks residues 102 to 244
  VARIANT 111: note = Ancestral polymorphism is G, Derived polymorphism is S
  VARIANT 124: note = Ancestral polymorphism is T, Derived polymorphism is A
  VARIANT 134: note = Ancestral polymorphism is N, Derived polymorphism is K
MFPRISRLGARLLRESRAETRAGWLSVSLSVGDRCYFYLAGNLLNSQRIFFQDHVNRHSIPVVTPAVLSMRNALLSTATSGDQDESSQAKDKYHLTQILLTWNSFVIVGRSSPLMIVEVIFLHTVNRISVTFVNKDGSEKTICVPVGMSMLEAAHENDIELEGACEGSLACSTCHVIVMDVKYYNKLEDPADEENDMLDLAFGLTETSRLGCQVIAKPELDGMRLALPVATRNFAVDGYVPKPH

SEQ ID NO: 19768 - protein, 226 aa, Zea mays
  VARIANT 130: note = Ancestral polymorphism is S, Derived polymorphism is L
MGAVLGRHDTHKRSSHGSKLEVKMVDAMQQRASHGTSLKSFDSIIMKFPKIDESFRKCKTIFEQFDEDSNGEIDKEELKHCFQKLEISFTEEEICDLFEACDINEDMGMKFNEFIVFLCLVYLLNEAAVLEAKIKMGLGNLEATFETLVDAFVFLDKNKDGYVSKDEMIQAINETTTGERSSGPIAMKRFEEMDWDKNGMVTFKEFLFAFTRWVGIDENEDEDDDE

SEQ ID NO: 19769 - protein, 230 aa, Zea mays
  VARIANT 207: note = Ancestral polymorphism is F, Derived polymorphism is V
  VARIANT 203: note = Ancestral polymorphism is V, Derived polymorphism is M
  VARIANT 201: note = Ancestral polymorphism is D, Derived polymorphism is E
  VARIANT 14..230: note = Derived polymorphism lacks residues 14 to 230
MELIHFGNVKVAGEEIDSTRTSSAPIILQLDHITPWSSFYDAVSQDFKSESMNCFSVIKATWGWDALDERAASDGGLLDLSKLFRACKTLKYAYSIRNWLWTAFAYTAMVDYPTPANFLQNLPAYPVKEVVVRFYPIFQPNQPQQQQVLRRSSSADVQDHRRVPRGRRRAGQGVRGGELVLQLHRRPDLHGLDGWQWQKIEKVLKRFGSNIIFSNGMRDPWSRGGVLKNI

SEQ ID NO: 19770 - protein, 532 aa, Zea mays
  VARIANT 150: note = Ancestral polymorphism is T, Derived polymorphism is P
  VARIANT 149: note = Ancestral polymorphism is P, Derived polymorphism is R
MATPPVLAFLLLLLVSSFSHASVAAVLPAHSNPNPFPTTTPLHLQARRQQRVRQPNSPADATKLAAAAADDTGTTAGPFTVHYFQQELDHFSFTPNASTVFYQKYLVNDTFWRRPGGGGTAGPLLVYVGGEADIECIAHNVGFMFDIAPTFGALLVFVEHRFYGESLPFGNNSAQALGYLTSTQALADLAILITDLKRNLSAETSPVVIFGGSYGGMLASWFRLKYPHVTIGALASSAPILQFDYITPWSSFYDVVSQDYKSESLNCFSVIKAAWDVLEERGSNGNGLVELSKLFRACKTVKYADSIRRWLRTAFVSIAMMDYPTPASFLENLPAYPVKEMCKIVDGFPADADILEKVFAAASLYYNYTGDQTCNQIEDEGNPRCLNLNYWGWQACTELMMPMSSANDSMFPPHTFSYEDKANYCLQTFGVRPRPHWITTEYGGYRIDEVLKRFGSNIIFSNGMRDPWSRGGVLKNISSSIVALVTEKGAHHLDLRSATKDDPDWVTEQRRQEVEIIHGWIDQYYRDMAQVS

SEQ ID NO: 19771 - protein, 351 aa, Zea mays
  VARIANT 71: note = Ancestral polymorphism is G, Derived polymorphism is D
  VARIANT 27: note = Ancestral polymorphism is S, Derived polymorphism is I
MPSSRARASSGTAAAAMDPWIAQPSLSLDLKVGLPTPAKVVLVEETNNFLAVSRTKDREVEALEAELRRVGDENKRLSEMLRALLANYTELQGQVNDMVVVAAAANRQSSTSEGGSAASPSRKRIRSDSLDTAPHHQQNTRKPSPSPPFAAHDQMECTSAAATAAAAFHHEPGSRVREECKSKVSRRYVHADPSDLSLAVKDGYQWRKYGQKVTKDNPCPRAYFRCSFAPSCPVKKKVQRSADDRTILVATYEGDHNHAQPPRHNGGGSKAATRSTPAATEAARPAPPPLPLQHQHQHQQKQEAATGPSSEVARKNLAEHMAVTLTRDPGFKAALVSALSGRILDLSPPRD

SEQ ID NO: 19772 - protein, 77 aa, Zea mays
  VARIANT 16: note = Ancestral polymorphism is R, Derived polymorphism is K
MVSFLYAIFYSRLRCRSLGGGILIVLDSFLKRQPFSRLAPPTSTTSRQFSRSASSDLARSTHIFITRILQIRMVASG

SEQ ID NO: 19773 - protein, 91 aa, Zea mays
  VARIANT 78..91: note = Derived polymorphism lacks residues 78 to 91
  VARIANT 76: note = Ancestral polymorphism is C, Derived polymorphism is Y
  VARIANT 75: note = Ancestral polymorphism is A, Derived polymorphism is V
  VARIANT 57: note = Ancestral polymorphism is A, Derived polymorphism is V
  VARIANT 55: note = Ancestral polymorphism is R, Derived polymorphism is H
  VARIANT 37: note = Ancestral polymorphism is P, Derived polymorphism is T
MLGFCVQSDGNGQKHLSAIAANDESILSNTNGVPGFTPKKATYSCIQMNRKEVFRFAVRCVPQSIEKALPRSWFACLQYRLIVVTSSGCPN

SEQ ID NO: 19774 - protein, 191 aa, Zea mays
  VARIANT 159: note = Ancestral polymorphism is A, Derived polymorphism is V
  VARIANT 158: note = Ancestral polymorphism is T, Derived polymorphism is I
  VARIANT 91: note = Ancestral polymorphism is S, Derived polymorphism is L
  VARIANT 87: note = Ancestral polymorphism is T, Derived polymorphism is I
  VARIANT 75: note = Ancestral polymorphism is T, Derived polymorphism is P
  VARIANT 72..191: note = Derived polymorphism lacks residues 72 to 191
  VARIANT 67: note = Ancestral polymorphism is L, Derived polymorphism is I
MRIPPLLASSQARESHAAPAPAPSASGHVRRCRSDGGGGITLPSMGVPPLHPTPTSPTARPHHHYYLLSIKQLNTLGAAAVLAFSTTVPLLEIAFAVLLPPTSSSSPGSPSRSARAARDPDPTAPPSSSLYAPSIRHLLLGPPPAPDMEGPRSPLPITADHGFLESVGGNSIPSPTPSSIAILFVLIASSP

SEQ ID NO: 19775 - protein, 154 aa, Zea mays
  VARIANT 127: note = Ancestral polymorphism is L, Derived polymorphism is R
MAVGGGVCVASPSPSSVEAWSWRTSGARRRAAVRCSVVGEAGPGAAGGRVEDPYRTLRLRRGATRGEVKKAFRRLALMYHPDVRKEREREMECDGDSGVQFQRINVAYQRLMSSMREADERLEYWRLKYGLADEDLDRYRRRLNEEDADDWFDM

SEQ ID NO: 19776 - protein, 154 aa, Zea mays; identical to SEQ ID NO: 19775
  VARIANT 127: note = Ancestral polymorphism is L, Derived polymorphism is R

SEQ ID NO: 19777 - protein, 186 aa, Zea mays
  VARIANT 12: note = Ancestral polymorphism is V, Derived polymorphism is F
MNKSHGSVGPIVIIQGSSTVKGLEGAELLDTLVTYLWRIHGVDYYGMSETNEPKGLRHVKADARTYIGASSNGAEWENKLDSLWQDRIQGQNPLEMLKGKEKIDGVATKVLDPYIESQDMPGLSVKTHPNINKDLFISQQILGAKDPNRPFPSGQKETPLVKWRIQGIDEYGVKLVISNFSCKFVL

SEQ ID NO: 19778 - protein, 151 aa, Zea mays
  VARIANT 59..151: note = Derived polymorphism lacks residues 59 to 151
  VARIANT 43: note = Ancestral polymorphism is D, Derived polymorphism is N
MCACRQGRHMRSGGCDAKELWGDNSTKRAKRWGMDSISILLVDEKRRITEDSNMCHQCQMNDSGRVSGGYSVSEQDKIKFSMCIVHFLLPWLKQFHQEQMQEKSAEAATKGIDADKLEVPLTICGKKERIYCNNCRTSIVDFHRTYQPYQT

SEQ ID NO: 19779 - protein, 75 aa, Zea mays
  VARIANT 25: note = Ancestral polymorphism is P, Derived polymorphism is L
  VARIANT 33..75: note = Derived polymorphism lacks residues 33 to 75
  VARIANT 53..75: note = Derived polymorphism lacks residues 53 to 75
  VARIANT 54: note = Ancestral polymorphism is P, Derived polymorphism is R
  VARIANT 58: note = Ancestral polymorphism is K, Derived polymorphism is E
MHSSHPDIILLSGVDPHAFGNVMMPVMYQQMFQVPPKPNETVQDTSANGKSKRPRGQKLTETSQQANGTPASASG

SEQ ID NO: 19780 - protein, 71 aa, Zea mays
  VARIANT 18: note = Ancestral polymorphism is P, Derived polymorphism is H
MLLELGCSSLDSKCGDKHVLQYDDVMKLDFGTHIDGYIVDCAFTVAFNPKFDPLLQATRDATNTGIKVIST

SEQ ID NO: 19781 - protein, 432 aa, Zea mays
  VARIANT 195: note = Ancestral polymorphism is G, Derived polymorphism is S
  VARIANT 358: note = Ancestral polymorphism is H, Derived polymorphism is Y
MDGERKVSFRVREFNMESDLAAVDELERRCQVGLSGDDTTAADDDSSGSKLRKTMKKKKKKKKGMSLSVEQVGDPLARVRHAPEHVMLVAEYGEEAEMVGLIKACVRVVGRGGGKKQKRSSSPNPKQEQEQQPSPPAYVKVACLLGLRVSPSHRRLGIATALVERAEEWCRERGAAHATMATTTSNAASLALFTGRFGYAPFRRPEFLGRPVHAHCLPIPSAHRVFQLPPPLAAAAYARLSPPQATEFLPADMPALLAHKLTLGTFAAIESGPDPSAPPSFAVLSVWDSTRSMRLRVRGAPALLRASLAALRALDRGAPWMRVPSIPDIFRPFGAYLLYGLRMSGPAGPALLRSLCHHAHNVARKNPACAVVAADVAPDDPAAAAVPRWRRFSCDEDVWCIKNLTKTNADDGDGWAAPAPSGTVLFVDPREF

SEQ ID NO: 19782 - protein, 402 aa, Zea mays
  VARIANT 132: note = Ancestral polymorphism is P, Derived polymorphism is S
  VARIANT 41: note = Ancestral polymorphism is S, Derived polymorphism is L
MGVYLSTPKTDKVSEDGENDKLKFGLSSMQGWRATMEDAHSALLDLDNDTAFFGVFDGHGGKVVAKFCAKYLHREVLHTEAYAAGDLGAAVHRAYLRMDEMMRGQRGWRELQALGDKINQFTGIIEGLIWSPKASDSNDRHDDWAFEEVLVELAWFHNSILIFLCLGEHAICLLFINLAQNFFYQGPHSDFTGPNCGSTACVALVRNRQLVVANAGDSRCVISRNGQAYNLSRDHKPELEAERERIQSAGGYIKMGRVNGSLNLSRAIGDMELKQNKFLSPDKQILTANPDINIVELCDDDEFIVLACDGIWDCMSSQQLVDFIREHINTEESLSAVCERVLDRCLAPSTAGEGCDNMTMILVQFKKPFAQVKDASGAEQLTGDAGCSETHGVEENGFDKQI

SEQ ID NO: 19783 - protein, 116 aa, Zea mays
  VARIANT 87: note = Ancestral polymorphism is S, Derived polymorphism is L
  VARIANT 73: note = Ancestral polymorphism is T, Derived polymorphism is M
  VARIANT 67: note = Ancestral polymorphism is R, Derived polymorphism is Q
  VARIANT 65: note = Ancestral polymorphism is A, Derived polymorphism is G
  VARIANT 60: note = Ancestral polymorphism is P, Derived polymorphism is L
  VARIANT 59: note = Ancestral polymorphism is V, Derived polymorphism is I
  VARIANT 42: note = Ancestral polymorphism is L, Derived polymorphism is W
  VARIANT 41: note = Ancestral polymorphism is D, Derived polymorphism is Y
MSPLFINVSGHIEDWDQIRLARAEGRLFNKLKWPNDPKLKDLIKRLYSLLTIKESAATVPKNLEARRRLQFFTNSLFMEMPVARPVSEMVSFIWGSFSLFACSFSCGLATSLLVAI

SEQ ID NO: 19784 - protein, 327 aa, Zea mays
  VARIANT 18: note = Ancestral polymorphism is R, Derived polymorphism is H
  VARIANT 50: note = Ancestral polymorphism is G, Derived polymorphism is D
  VARIANT 82: note = Ancestral polymorphism is S, Derived polymorphism is L
  VARIANT 109: note = Ancestral polymorphism is R, Derived polymorphism is K
  VARIANT 124: note = Ancestral polymorphism is M, Derived polymorphism is T
  VARIANT 125: note = Ancestral polymorphism is T, Derived polymorphism is M
  VARIANT 169: note = Ancestral polymorphism is M, Derived polymorphism is T
MEMLDAHNELVKAFRCARERIEQTHNSDITLRLLGYNTRHDVQYNLPSSGEIAAIIVGYYSSAQYTYDVLVHAKNHGLKRVSHVHPCYMALQYPLLFPYGEHGFHLGIRYADDDVNERTKRRYTTMLEFVRYHTHYRLCDANSYTCYVQGVSDAIDKGLVSADSVGSRMIVPSSFTGGRRYHVMNYQDAMAICRVFGPPDLFVTFTCNTKWKEITDGIRFETGQQPCDRSDVIVRVFHMKVDEFVADIREGKTFGPVLAEVLIGSLMIGNCSDRLCVRVSRMWEFYDPQDESKLLHADMVLIDEETCPCMLLRIWQQLLLENVNMVQ

SEQ ID NO: 19785 - protein, 991 aa, Zea mays
  VARIANT 243..991: note = Derived polymorphism lacks residues 243 to 991
  VARIANT 566..991: note = Derived polymorphism lacks residues 566 to 991
  VARIANT 624..991: note = Derived polymorphism lacks residues 624 to 991
MPLLLYPFSACVPPPRALLRRLSPPPPMAVVAPLPSAVRIIPSVGTLDLPALPPPPTDDFHWLDLFAFLNSPADTYHQIPAQGEEELEAGLELELELELEKHAEVERQRGRARRAQLRRLRQRQVKAETEAWARAAEEYREIEREMLDRRLAPALPYVKALFVGWFEPLRDAIARDQDVQRRKRVKHVYAKYLLLLPADKVAVIVMHKMMGLLMSSKDGTGSVRVVQAAHCIGEAVEREFKVQSFFQKSRKKKIQGENDPALEKEQAKCRKRVKSLVKRRKMSEAQRLVQQELELEEWGTEAQVKLGSRLIELLLDSAFVQPPADQTPDSSPDIRPAFKHVLRQPIIENGRLKKKHWVIECDHLVHEGFESTARHVDIPYLPMLVPPKKWKGYDKGGHLFLPSYIMRTHGVKDQKDAINSVPRKQLRKVFEALDILGSTKWRVNRRVHDVVETIWSQGGGIAGLVDKANIPLPERPESEDPDEMQKWKWSLKKAKKTNRELHAERCDTELKLSVARKMREEDGFYYPHNLDFRGRAYPMHPHLSHLGSDLCRGVLEYAEGRPLGKSGLCWLKIHLANKYGGGIEKLSHEGKLAFVENQLFDIFDSAANPVDGNCWWTNAEDPFQCLAACMDLSDALRSPSPYHAVSHLPIHQDGSCNGLQHYAALGRDYMGAVAVNLVPGEKPADIYSEIASRVLNVVCEDSMKDPATNPTASLARVLVDQVSLLSHPSSVFLNSSKKYPCTHSISSNKTVEDMGIGSLQVDRKLVKQTVMTSVYGVTYIGARQQITKRLQEKGLITDDKLLYDVSCYATRVTLDALGQMFQSARGIMAWLGDCAKMIASKNQPVKWTSPVGLPVVQPYKKYKNYMIRTSLQCLALRREGDAIAIQRQKAAFPPNFVHSLDSSHMMMTAIACKESGLHFAGVHDSFWVHACDVDQMNQILRQQFVELYSMPILENLLEEFQTSFPTLEFPPCPPQGNFDVREVLTSTYFFN

SEQ ID NO: 19786 - protein, 331 aa, Zea mays
  VARIANT 49: note = Ancestral polymorphism is R, Derived polymorphism is W
  VARIANT 74: note = Ancestral polymorphism is G, Derived polymorphism is V
  VARIANT 112: note = Ancestral polymorphism is R, Derived polymorphism is C
  VARIANT 197: note = Ancestral polymorphism is R, Derived polymorphism is H
MAAASAAEANSVSNDEFLVRDDVPGLLAALKEMKDGLDLVRGKVEAITRKVKANQLPAGNGIGYLEAKNHMLLGYCQDIVYYLLRKTKGLSVDGHPVVRSLVEIRLFLEKIRPIDKKAEYQIQKLTNAADNATAREKAGNAEVKGKDGHSDEEDLLMYRPNPEMMDTKPGPDGQDTDGVYRPPKFMPTSMDDEEKRHKKDSRRDKAIARVATENPYIKEIIDDAADRPEEWKETVGDESREFGRYMRQREEQEKQEEELFTRAPVTKRDKQMEKRIRRQLHGLGGLTDGFDLGMNMLLGGDKEDDGGSSKPHGKSGNRKKHLKSSKKRKRH

SEQ ID NO: 19787 - protein, 472 aa, Zea mays
  VARIANT 80: note = Ancestral polymorphism is E, Derived polymorphism is V
MEVDEAPDLTDFMNDWFFGTVGARHSGGGGGGGGGGGYDLTGESSKRPAASPAAGNKKQGKGKGGGGSSSASKQTQDWLEEARRMVGPGSPGRKGVGSPSRQLPRFAGGSGTEPTPTLDRRDPMSRSARRHWQPGGIGDEILQRASIASSPPRSDPFASSAPPSPSPSLPPNPRRKSRFRDAPTPDSPLGRATYTSTSPISATHSRHRRHASASSAPAFAADGSGDGVARLNSFLRRQRAMVADLAAGDRPASRSTKLVLSDPSKSLSSIVAAICYAWMLPSKGDGQATVDTDGLIMDQRVNLLVVGQDILKSKAEVGSVCTTLTHTYCEDAYSLLQNLDIKKLLLAGILLDTNNLSKKCSNRDSDAVQLLLFGTSEHMRHELFQQLMLDHNDHSFVEYLKNTYRYSTINGNEDSPPEQKHSTSASGSSQDVKKSNSTNQRTSRGSGGKASDEASRGKNKFFLAKWFGFGSK

SEQ ID NO: 19788 - protein, 406 aa, Zea mays
  VARIANT 39..406: note = Derived polymorphism lacks residues 39 to 406
MGCAASRLEDEEAVKMCRDRRDLIKQALEQHNRFASSPWDFFWNPFSSLDSFTYPRPRSSYDNVVTDDELVRLQRVREEEGIPELEEEDDECQEHVQMDRKEEKEEHDNADDDEDDDEDDGEECEHSDECMVSNVNFDANMKQETKGFESKGIQCTEAPEPCKTVELEIKAHKKELMRNRVANAEETPGFIVYLNRRPASLVEAMKDIDCQFSGICDAARKISVMLDASRAQYSTSNDLSAKMLNPVALLRSASSHSSSSRFLLAPSSSIDDLFDNETSSCYSEESCSTMSGSHHSTLDRLYTWEKKLYKEVKAGERLRIEYEKRLTHLRNQDVKGEEPTSVDKTCAALRSLHTRLKVSIHTVQSVSRRIEILRDEELHPQLMELILDTETISKHDVIRDFPSHLL

SEQ ID NO: 19789 - protein, 422 aa, Zea mays
  VARIANT 70: note = Ancestral polymorphism is G, Derived polymorphism is D
MAICSTKTPIPYKDDSGNCSTKTRNIVYKEVQQLAMLFTPITELNPQKINVVIRVRVIRKWEFRGATNDGPLRHINLILADEQGTAIHAEIPAALAIEKGSLIQIDKVEENVDNRNYLIDVIGMLTQIGAPHVAGYNNSSIVRDIFIKDISDASLKITLWGDQASGFSIDNVCNESNNKPIVIMFVGCLAKQFKGQSYLSSTTATTWYFNPNIPEAQEYYINHLGLNAPPLYHDSYKITNGGFQLAPNAENLRLKPPVDTATHHVAVQTYKLSFVVTDGTSEAEFFCFDTIAKRIVGKPCDTLITATMTSQGFPPDLAAIVSLKFTFVVTLNMSAFSVTNRVFSILYVLTNHGRQTSVPPTVLNYPQEQLLTQDDIFESTATQDSPATSFAKLSTSARQENTVRRLQYCDASKNSEVISMHL

SEQ ID NO: 19790 - protein, 114 aa, Zea mays
  VARIANT 73: note = Ancestral polymorphism is F, Derived polymorphism is L
  VARIANT 37: note = Ancestral polymorphism is D, Derived polymorphism is G
  VARIANT 19: note = Ancestral polymorphism is V, Derived polymorphism is M
  VARIANT 2: note = Ancestral polymorphism is G, Derived polymorphism is S
MGNIAASGGVQVRRRPPAVDERLTRPRRLVRELPDLDAGRLRRLIRTGDLAPCFDPAEDASAGLTEECPICFFFYLSLNRSRCCGKGICTECFLQLMPSGASKVIQYPTLRLPI

SEQ ID NO: 19791 - protein, 260 aa, Zea mays
  VARIANT 223: note = Ancestral polymorphism is S, Derived polymorphism is L
  VARIANT 202: note = Ancestral polymorphism is G, Derived polymorphism is R
  VARIANT 163: note = Ancestral polymorphism is M, Derived polymorphism is K
  VARIANT 127: note = Ancestral polymorphism is P, Derived polymorphism is L
  VARIANT 93: note = Ancestral polymorphism is L, Derived polymorphism is I
MASPDLLFNLRNLFYLGAYQAAINNIDIPGLDAAAAAERDAIVFRSYIALGSYQVRTHPASGASAATSLQVVKLLALYLTGDKRRYVMKKINISKQNDKFQQTAYQEAFSKPSVGVKVAKYPRCSHPELVMGLREHTDAGGIILLFQDELIPGLEFLKDGRWMAVPPTQGNRIFVNLGDQIEVITNGTYKSICHRVLPNKNGSRLSIATFYNPGADAIICPASKRTYPSQYRFQDYLDFYSTTKFTDKVFRFQTTKAILK

SEQ ID NO: 19792 - protein, 236 aa, Zea mays
  VARIANT 29: note = Ancestral polymorphism is R, Derived polymorphism is Q
MSSSMGHESSGGGADEEDPAGLQRVIWLRQMLHRWQSSSSRIAAERRSSASDDGDRANPDDANATTDQSSNGDPTPAAADNASSSSSSRNQMLPAAPHGAADEEDEDEDRRLLSRVLLVEERRRGCPPDAAACDSPMTPMTPDAPADVPRGCCPVYVGAERRRFVVPTAYLGMPVFRRLLEKAEEEFEFDYHGGAVTIPCDTEAFKYILVVMDRHRHGLVDDDGNEKHEEQDASSS

SEQ ID NO: 19793 - protein, 401 aa, Zea mays
  VARIANT 103: note = Ancestral polymorphism is D, Derived polymorphism is V
  VARIANT 213: note = Ancestral polymorphism is D, Derived polymorphism is Y
  VARIANT 262: note = Ancestral polymorphism is R, Derived polymorphism is W
MGRRLLLLCLVMYVQVALIIGTVVAGGRPPAMYVFGSSILDVGNNNYLLGPAVDRANHPHNGIDFPASIPTGRFSNGYNIADYVGLYHSVHVSFPYSLLSTMDRMLQWYVCWTAGAAAKSMGFACSPPAYLSLAPTTTSSGTLVQAGLSHGVNYASGGAGILESTNAGNTVPLSKQVRYFGATKAKMVAAAGTRAVDALLSSSVFLLGIGNNDMYVFAAAELARNRSAADQRRDAAVLYSNLVSNYSATVTEVCHHKRLASRLRAGGAAVRVFSPVSACSDTLNQLAAGFDVALQSMLASLTPRLPGLVYSLGDAFSFTRDAVADPQVLGYTDVANACCGSGQAPCLPNCNSTLCADRDRHIFWDRAHPSQRTAFLTAQAFYDGPAKYTTPINFMQLAESK

SEQ ID NO: 19794 - protein, 385 aa, Zea mays
  VARIANT 88: note = Ancestral polymorphism is A, Derived polymorphism is V
  VARIANT 48: note = Ancestral polymorphism is Q, Derived polymorphism is K
MATTTVTTTAEAASAPGKRRGGGCCALAAAAAAASVVPVKAAGEQGQQPLPLPRLVRFEELPDYLRDNEFIHAHYRCEWSVRDALRSAFAWHNETLNVWSHLGGFFLFLYLAVAEPTGTVAGAGAGVGAGAAPSIVTFVLASANTSWSSWEASSNSSLTASKGLMAVFGSSDGDAHAVPRWPRTVFLAGAMACLAVSAAAHLLACHSRRFTRLFWQLDYAGIAVMIVASFFPPVYYAFLGRARTQLVYLSAVTLLGLLVVALLLAPARSSPRLRHLRAGLFVSMAFSGVLPALHALWLNWAHRECHLALALELLMGLVYAAGAGFYVTRVPERWSPGRFDCVGHSHQIFHLLVLVGALTHYAATAILIDWREAMAVAAGGASVLS

SEQ ID NO: 19795 - protein, 82 aa, Zea mays
  VARIANT 13: note = Ancestral polymorphism is E, Derived polymorphism is Q
  VARIANT 15: note = Ancestral polymorphism is V, Derived polymorphism is A
MSYLSPSCLIENQHVHACYRMMVGDNNRRGSKRSLPCSGSNEIATSTYHSVLVDDVTDTAAAFATAVSARNKRIRLELTGIS

SEQ ID NO: 19796 - protein, 118 aa, Zea mays
  VARIANT 117: note = Ancestral polymorphism is M, Derived polymorphism is K
  VARIANT 101..118: note = Derived polymorphism lacks residues 101 to 118
  VARIANT 97: note = Ancestral polymorphism is R, Derived polymorphism is Q
  VARIANT 87: note = Ancestral polymorphism is I, Derived polymorphism is K
  VARIANT 81: note = Ancestral polymorphism is V, Derived polymorphism is M
  VARIANT 63: note = Ancestral polymorphism is E, Derived polymorphism is K
  VARIANT 40: note = Ancestral polymorphism is A, Derived polymorphism is V
  VARIANT 39: note = Ancestral polymorphism is L, Derived polymorphism is V
MSEADLEFIDNPKARRYIKSLPYTPGVPLVSMYPHVHPLAIDLLQKMLIFDPTKRISVTEALEHPYMSPLYDPSANPPAQVPIDLDIDENISSEMIREMMWQEMLHYHPEVATAISMS

SEQ ID NO: 19797 - protein, 328 aa, Zea mays
  VARIANT 259: note = Ancestral polymorphism is T, Derived polymorphism is I
MGTVTAADPHPSFLADKDAKVFVAGHRGLVGSAIVRRLLSLGFTSVVVRTHAELDLTRQADVEAFFAAERPRYVVLAAAKVGGIHANSTFPADFIAANLQIQTNVVDAALRCGSVRKLLFLGSSCIYPKFAPQPITEGALLSGPLEPTNEWYAVAKIAGIKMCQAYRIQHGLDAVSAMPTNLYGPHDNFHPENSHVLPALIRRFHEAKATNAPEVVVWGSGSPLREFLHVDDLADAVIFLMDHYSGMEHVNVGSGSEVTIKELAELVKEVVGFQGNLVWDSSKPDGTPRKLMDSSKIQGMGWKPKIALKEGLVETYKWYVENVISNKK

SEQ ID NO: 19798 - protein, 533 aa, Zea mays
  VARIANT 448..533: note = Derived polymorphism lacks residues 448 to 533
  VARIANT 427..533: note = Derived polymorphism lacks residues 427 to 533
  VARIANT 21: note = Ancestral polymorphism is C, Derived polymorphism is Y
  VARIANT 15..533: note = Derived polymorphism lacks residues 15 to 533
  VARIANT 7: note = Ancestral polymorphism is R, Derived polymorphism is C
MMEGGSRADGQNPNQLRLFTCTGNLLHRAHGCARWAQGGIVVLAAVYGPKPGTVRGRTPEKASIEAVWKPRTGQIDTPLFPSSSFCPTAVRVTGSLKWRVVFAGRQEREYEMTLKRTLQSICLLTVHANTTTSVVLQVMFAWLVATMLLLIYFCCSINSSTIVVGCVRDRREKLSEDFYFHILPTDMQDAQGSLDRRSVFSLDTHSPSVCLLIQLEKAATEEGGVTPSVYSHKEPVHLAEKEKQKLQVWSRIMPCKESFAWAMIPLFEAAESNDWMSPGYANAGSSPVPTPPSGKGLKASTKPKATEGQKSGPQTPLGFGSPGNPSTPIGGCRYDSSLGLLTKVLNLLKGAPGGIVDLNNAAETLEDITNVLEGIGLIEKKLKNNIRWKGVDDSRPGEVSDDMSILQTPVVKRLICSCDGDNEIRFWSIKHGNAVRIFKGGSTQLRFQPRYGGLLATASDNVVSILDVERQAFVRRFESHTKGVDSVCWDPTGEYVVSVSEDTVKVWSLNDESFMNELSCGGRKLSRYYMFQM

SEQ ID NO: 19799 - protein, 114 aa, Zea mays
  VARIANT 56: note = Ancestral polymorphism is P, Derived polymorphism is H
MGNVAASGGVQVRRRPPAVDERLTRPRRLVRELPDLDAGRLRRLIRTGDLAPCFDPAEDASAGLTEECPICFFFYPSLNRSRCCGKGICTECFLQLMPSEASKLVQYPTLRLLI

SEQ ID NO: 19800 - protein, 140 aa, Zea mays
  VARIANT 16: note = Ancestral polymorphism is V, Derived polymorphism is I
  VARIANT 51..140: note = Derived polymorphism lacks residues 51 to 140
  VARIANT 62: note = Ancestral polymorphism is S, Derived polymorphism is Y
MMRTTSPVDITQLVTVMQAQNVLGNKGTEIAKVAHRRTDAEAGVEALDAVQQSVVVAASATSFPHQRGRVNGSAHCFLRSHLQCKDETWSECLPYGLAAPNKALDCPIPMTRLCSSPAVKPKKKACYCSSVFMSMQQQVA

SEQ ID NO: 19801 - protein, 162 aa, Zea mays
  VARIANT 3: note = Ancestral polymorphism is G, Derived polymorphism is C
MAGFKQDLLRNLLLGIRACRPFDATSLEDRKRAVKRSADVAMAAARAAAGGGRARWPKAILAAAAASGHSPGGIRKARKSACKRVVRRPRRATASCDVVARRLVRSRTMALRKVIPGADATAAMDDEAVLLRETIDYAVHLRAQVDVLRRVSAAVQRSTFLR

SEQ ID NO: 19802 - protein, 464 aa, Zea mays
  VARIANT 406: note = Ancestral polymorphism is P, Derived polymorphism is L
  VARIANT 183..464: note = Derived polymorphism lacks residues 183 to 464
MHVDDLRALAPLWLSKTEEVRQDKSHWSTNITGDIYGMGWISEMYGYSFGAAEVGLRQKINDDIMIYPGYTPRPGIEPLILHYGLPFKVGNWSFSKLEHHEDGIIYDCNRLFDPPPFPREVNNFQSLFGQGIPISQVVVWLAMERVVDYVSSGPDCAPTSKENTVFPYTGQPVAGKRDLFLPQNAPAIPPDGRMDLDPSFPGPISITPDRQISPLFSDPFSPRAASKLFSSTHPKPLSPTDGRKDRFSSVLTAVSPCTGKRDILSKTPKVASPKAEGNTKLVNGLIAEDQDSGVAEIPQKVEMQTDILWSQANTQNTNALVEPIVSHPLADRMSLNYSSMYGAEDDFRAHVSGIGADMDEGTPPDHECLVIGAGLPISSPLSYHEDYEDHSISNGTNDDWLPIVMPAKKLISDENLKAILRKWRQHAADKRLLREQKNALAVAALCSLSLGPPVHKSTTVIDKV

SEQ ID NO: 19803 - protein, 901 aa, Zea mays
  VARIANT 399..901: note = Derived polymorphism lacks residues 399 to 901
  VARIANT 726: note = Ancestral polymorphism is Y, Derived polymorphism is H
MAAAAAEAEVDSCLQSFELYEAESKFYILGTNSNKTIWRLLKIDRMEPSELNVDEDSTVHSQSDYLDMLKNLDEEHRSTGGVKFVTNCFGIIGFIKFLGPYYMLIITEQRKIGDIFGHPVYQVTKTAMIELSNSKSRPKLINSKDENRYKKLLQIIDLRKDFFFSHSYHIMRSLQKNFNDPQEGWELYDTMFVWNEFLTRGVRDILKTTLWTVALVYGFFKQDKFAICGKDIMLTLIARRSRHYAGTRYLKRGVNEEGRVANDVETEQIVYENMLGPWQISSVVQNRGSIPLFWSQETSKLNLKPDIILHEKDKNYEATRLHFENLRKRYGNPIIILNLIKVSTLMILTMLLMDLLHTSFFFSTKGRDVPLTSFLKKLVSRLEPGLAQQTASLACPADQLHLESVGSFTYKSKVIHENHPFEIYFVLFLKTLEKRPREIILRWEFDRAIKIINSGLPGEDHLRFLHWDLHKNSQSKSTNALQVLLKVAFEALNMTEFFYCQVSPDQRAKGSPNLSPTLKIGFGHHACDDKNCGNADYVDDLDDISQEDTCGSSDPGNGIAEDKFEVNGSAQIKRPKFQKGVLRTNCIDCLDRTNVAQYAYGLAALGHQLHALGSVESPEVHLDSPLSRHLMHFYERMGDTLALQYGGSAAHNKIFSAKRGHLKFAIQSQEFFRTLQRYYSNAYMDAYKQAAINLFLGYFQPQVGKPALWEPESGDEHVLDDETWLYVFVSKLMKRARSDGSILNKSKLSISSNGPNGILKLAFTGSKNEGQRPNRSSDTACDNGMSKSRYTPTLSHIKHISCELDYYNGSGDSNFLDLDWLTASDNERLFILCFPFFGLSGVVSFCAWSKAISTPDVNISTDSGVRDVISGTTDDQASGIHAQGFSKDFVQWLNQGEAFWY

SEQ ID NO: 19804 - protein, 532 aa, Zea mays
  VARIANT 431..532: note = Derived polymorphism lacks residues 431 to 532
  VARIANT 463..532: note = Derived polymorphism lacks residues 463 to 532
MLLSDTQQQQQQSAAPENSSRKQFGRPAVAPATRFTHVEIPIGPGDPPPLVSECEEEPPVEHAFAKCLGGLVSVVMQEVHLELAFPTGEITAVYSCRPGQQAVAVFGGAGVSMRLGEMYAEEERELLVEVRAPLGSHPHSLTVRCMYRNPASQETMNESLFTCELSKQTLSSVKDTVEMAVKKWGEKSLTELEAEKRLSYSCEKVITAGAMGNEKANSHWEAELPPKYDRVGIENFIRAKYEDKRWVPRNGTLRLSSGVRDEKSQESPASANWSGHHRSSFEQNHASPALPSKVAPVASRIPSQASPQPPKVEPPVPKVVSPPQPQKSPAKVEATPPKVEKPSVAPPPKVDYATDLFNMLSMDGTIEKEPESSPNDDNAWDGFQSAQPVPSSEEKDSAKPAESKTQSTSGIEDLFKDSPAVSLSSAPVVSQENAKNDIMSLFEKSDMASPFAVQQQQLAFMSQQQALLMAALKAGNSPQIVPGNANQLNTNVSNPPLGTLPFQNWTNLGYQNPGLTLAAAQNGATMRSISVS

SEQ ID NO: 19805 - protein, 480 aa, Zea mays
  VARIANT 194: note = Ancestral polymorphism is T, Derived polymorphism is M
  VARIANT 201..480: note = Derived polymorphism lacks residues 201 to 480
  VARIANT 252..480: note = Ancestral polymorphism lacks residues 252 to 480
  VARIANT 349..480: note = Derived polymorphism lacks residues 349 to 480
MLPPPPLSFVSSAEPATTPDSRRSTSTSCWPPQMRPPLSDPTTASHPLSPPASRLPAASLRSSASWSSSSPAPAPIGMATSRLLRDRWTLWCCRSRLLWPSSSRSRRGRQLSPSTSLWLLKSNQKLQGLREELNAIVPYLEEMRKKKVERWDQFVDVIEQIKKVASEIRPADFVPFRISMDQSNLSLRKLEELTKELQSLQKEKVHLYDITLQIRPAISVDFGESLIKAAVADPNGHDVYVGTGIGDLCFLRHENRWTLNPYMSGAVDPTLVLVQIEAHIATVKEEAFSRKDILEKVERWLNACEEDAWLEDYNKVAMLDDNRYNAGRGAHLTLKRAEKARILVNKILGLVDVLTTKIVAWEAERGKEFTYDGNQVQSGSSSLGSSGMLYEGSSGDNAPFDINDFPQLTGRPNSAGGGQGQYGSLRKHGVSVNAIVQQNQEFSIQNEDFPALPGNKGVCSPITIASLIMHVIEKKELTLV

SEQ ID NO: 19806 - protein, 222 aa, Zea mays
  VARIANT 183: note = Ancestral polymorphism is A, Derived polymorphism is V
MGHHRGGCRCELCGAPAAVHCAADAAFLCAACDAKVHGANFLASRHRRTRLLLAAPDECGYESGASSCVSTAVDSAAPPPRRTRGGGSPGPRSRGEAVLEAWARRTGLTAADARRRAAAAARALRAHAHGLASARVAPRVAMAAALWREVAGRGGTGGGGHGHGEALRRLEACAHVPAGLVVAVAKSMARARGRGDEADTDAAAEGWDECAWAGPKSSPPRP

SEQ ID NO: 19807 - protein, 86 aa, Zea mays
  VARIANT 15: note = Ancestral polymorphism is A, Derived polymorphism is P
  VARIANT 24: note = Ancestral polymorphism is A, Derived polymorphism is T
  VARIANT 56..86: note = Derived polymorphism lacks residues 56 to 86
MAAAAVGSASSSSGPAVMLLCGKAEKVLGVQKAPGSCPYCGGVVAATDVEAEWALCCLPLCRRTKRRFACTACARRLVTYPAILHD

SEQ ID NO: 19808 - protein, 525 aa, Zea mays
  VARIANT 275..525: note = Derived polymorphism lacks residues 275 to 525
  VARIANT 165..525: note = Derived polymorphism lacks residues 165 to 525
MAVMEKLKIFAASCLIAGFRYTFPSLLNAEIQLFHFPLLTAVLMKRCKLTSSMSIGIFFPPKQIKDPEAKKPKDWDGKEYIPDPADKKPEGYDGIPKEIPDPDAKKPEDRDNEEDGEWTTHLPKIKNPNYQDKWKAHMIDNLDFKDDPYIYAFDSLKYIGIEMWQVKSDALFDNIIITDDLALAKTFAEETWGKHKEAVWNAVTNNEAVQGFRRSLHDDLPTETRLSYMLRTRELLEGKGNRANDLQSASSSEILCSYAWSEDGCHSGVSYCAYQKFSSSFHSTNAAESKVFYLKMKGDYHRKDDAGSTMNSYKAAKVSSECSPLLEAGQAESLGTELLEMVPSREEEIKLKEYRENAVSTFVVDDYVRLEFKGSTFTGSWKSFSSPKISSTFLVVIAIVSNGIVIYVWMMKIVLLDVKSTNTIVQIKSKIGALEGIGNSQQALFFVGIMVRSSRRAVGSSPPRRASGSRHRGLLRSRITLRAATTCSGGATSIAATPVKSPSSSLRSNKCSRTFSHNSISHIYT

SEQ ID NO: 19809 - protein, 141 aa, Zea mays
  VARIANT 12: note = Ancestral polymorphism is V, Derived polymorphism is M
  VARIANT 92: note = Ancestral polymorphism is R, Derived polymorphism is H
  VARIANT 99: note = Ancestral polymorphism is A, Derived polymorphism is T
MGVELDLSDLAVLRPVQTAAAGDGPDAADTGCVTPTAASSLLPRLGLGGGLLDIDSAACVTPTASPCLLRPATVCPPAPRKPVAPGSKRRKRCCRLQRAFFFPVPLDLSTVFVPRGAAAAPADRSSPPPRAAKKIRLHVVG

SEQ ID NO: 19810 - protein, 135 aa, Zea mays
  VARIANT 22: note = Ancestral polymorphism is A, Derived polymorphism is V
MVALLGRRIGVAAAAAAFIALVAFGSASSSPKSFVKSTVSAHDVVIFSKSYCPYCKRAKAVFKELELKKEPYVVELDQREDGSEIQDALLEIVGRRTVPQVFVHGKHLGGSDDTVDSYESGKLARLLNIGVKDDL

SEQ ID NO: 19811 - protein, 208 aa, Zea mays
  VARIANT 66: note = Ancestral polymorphism is S, Derived polymorphism is I
  VARIANT 69: note = Ancestral polymorphism is K, Derived polymorphism is E
  VARIANT 71: note = Ancestral polymorphism is Y, Derived polymorphism is F
  VARIANT 72: note = Ancestral polymorphism is M, Derived polymorphism is I
  VARIANT 80: note = Ancestral polymorphism is G, Derived polymorphism is V
  VARIANT 98: note = Ancestral polymorphism is F, Derived polymorphism is S
  VARIANT 127..208: note = Derived polymorphism lacks residues 127 to 208
  VARIANT 131: note = Ancestral polymorphism is S, Derived polymorphism is L
  VARIANT 138: note = Ancestral polymorphism is A, Derived polymorphism is V
  VARIANT 142..208: note = Derived polymorphism lacks residues 142 to 208
  VARIANT 150: note = Ancestral polymorphism is R, Derived polymorphism is W
  VARIANT 155: note = Ancestral polymorphism is P, Derived polymorphism is S
  VARIANT 157: note = Ancestral polymorphism is R, Derived polymorphism is C
  VARIANT 160..208: note = Derived polymorphism lacks residues 160 to 208
  VARIANT 173: note = Ancestral polymorphism is S, Derived polymorphism is F
  VARIANT 189..208: note = Derived polymorphism lacks residues 189 to 208
MAPRPAANHQATAEQGAKHLGRPSGAPSARAPRPPPAAPERPTGRRAEQSFNSVPDRVFLIQVAASKTKIYMVLELVNGGELLDRILYYVSNPPPVASLLLQRQLTSRRPVRESSRSRMQGGSSSSWLMVSATAMKRASVTETSRCSAGRTFLIPLRSYQLSFAVSVALVLSSTLLTHSSLPGGQTAPQVLIPYAECLQVLQNRGYDG

SEQ ID NO: 19812 - protein, 481 aa, Zea mays
  VARIANT 13: note = Ancestral polymorphism is P, Derived polymorphism is L
MDFSAGSYFTSWPVNSASESYSLADGSVESYGGEGIMPPSSYFMTARSDHNLKFSVHEQDSTMLPNDQLTYAGARQTDLLPGETPSRDKLCENLLELQRLQNNSSLPSNLVPPGVLQHNSTPGAFHPQLNTPGLSELPHALSSSIDSNGSEVSAFLADLNAVSSASALCSTFQNASSFMEPVNLEAFSFQGAQSDSVLNKTTHPNGNISVFDSAALASLHDSKEFISGRLPSFASVQETNVAASGFKTQKQEQNAVCNVPIPTFTARNQIAVAAMPGSLIPQKIPSWINENKSEGPVSHPSDVQIQPNSVGNGVGVKPRVRARRGQATDPHSIAERLRREKISDRMKNLQDLVPNSNKADKASMLDEIIDHVKFLQLQVKVLSMSRLGAPGAVLPLLAESQTEGYRGQLLSAPTNAQGLLDTEESEDTFAFEEEVVKLMETSITSAMQYLQNKGLCLMPVALASAISTQKGVSAASIPPEQ

SEQ ID NO: 19813 - protein, 389 aa, Zea mays
  VARIANT 223..389: note = Derived polymorphism lacks residues 223 to 389
  VARIANT 253: note = Ancestral polymorphism is S, Derived polymorphism is L
  VARIANT 289: note = Ancestral polymorphism is S, Derived polymorphism is I
  VARIANT 324..389: note = Derived polymorphism lacks residues 324 to 389
  VARIANT 329..389: note = Derived polymorphism lacks residues 329 to 389
  VARIANT 337: note = Ancestral polymorphism is A, Derived polymorphism is T
  VARIANT 354: note = Ancestral polymorphism is L, Derived polymorphism is P
MVQLNITKVLIVDIGLLLFSQLSPPSLLLLICGTQNCTASKWRENNGHHVDYDQRPDIFRGTIRYASVHAHLGCTGSRRDDLELLAYTLIFLIRGRLPWQGYQGDTKSFLVCKKKMATTSEMLYCYCTAPFKQFLKIVTNMKFDEEPNYAKLISPFDGLIEAPASRQIRTDGALKVCTKNNIASVHAHLGRTGSRRDDLELLAYTLIFLIRGRLPWQGYQVGQKRGRLLVDLEEDEQPKKKVRLGSLAAQWISVYNARRPVRQRYHYNVADSRLSQHIEKGNDDGLYISSVASSANLWALIMDAGTGFCSQVYELSPVFLHKDWIMEQWEKSYYITAIAGSSNRSSLVVMSKGLDLTFSCYCSALHIDLPFPHYFLVSSAKSYCFSCMS

SEQ ID NO: 19814 - protein, 150 aa, Zea mays
  VARIANT 118: note = Ancestral polymorphism is H, Derived polymorphism is Y
  VARIANT 98..150: note = Derived polymorphism lacks residues 98 to 150
  VARIANT 27: note = Ancestral polymorphism is R, Derived polymorphism is H
MAEEQIEEASMAIAGRGASWRSRSKRRPWPRRRPRRSSSSSTSPSRSRIREGVRKEGAQKSGQKYLSESDLQNADGHPEIDLAFVLLLPRRSLIKMAEWNPEKDLLAMVTDDSKVLLHRFNWQRLWTISLGKCITSICWSPDGKIIALGT

SEQ ID NO: 19815 - protein, 325 aa, Zea mays
  VARIANT 28: note = Ancestral polymorphism is E, Derived polymorphism is D
  VARIANT 50: note = Ancestral polymorphism is G, Derived polymorphism is V
  VARIANT 51: note = Ancestral polymorphism is R, Derived polymorphism is W
  VARIANT 151: note = Ancestral polymorphism is G, Derived polymorphism is D
  VARIANT 172: note = Ancestral polymorphism is A, Derived polymorphism is V
  VARIANT 227..325: note = Derived polymorphism lacks residues 227 to 325
MATIQNKPTPTAPSTTTGGGLRAMDLYEKLEKVGEGTYGKVYKAREKATGRIVALKKTRLPEDDEGVPPTALREVSLLRMLSQDPHVVRLLDLKQGVNKEGQTILYLVFEYMDTDLKKFIRGYRANHEKIPAQTVKILMYQLCKGVGFVHGRGVLHRDLKPHNLLMDRKTMALKIADLGLSRAITVPVKKYTHEILTLWYRAPEVLLGATHYSTPVDIWSVGCIFAELVTNQPLFPGDSELQQLLHIFKLLGTPNEEMWPGVGKLPNWHVYPQWKPTKLSTLVPGLDSDGYDLLEKMLAYEPGKRVSAKKALEHPYFNDVNKEVY

SEQ ID NO: 19816 - protein, 485 aa, Zea mays
  VARIANT 375..485: note = Derived polymorphism lacks residues 375 to 485
  VARIANT 254: note = Ancestral polymorphism is A, Derived polymorphism is S
MDMDMSSAYPHHWLSFSLSNNYHHGLLEAFSNSSGTPLGDEQGAVEESPRTVEDFLGGVGGAGAPPQPAAAADQDHQLVCGELGSITARFLRHYPAAPAGTTVENPGAVTVAAMSSTDVAGAESDQARRPAETFGQRTSIYRGVTRHRWTGRYEAHLWDNSCRREGQSRKGRQGGYDKEEKAARAYDLAALKYWGPTTTTNFPVSNYEKELEEMKSMTRQEFIASLRRKSSGFSRGASIYRGVTRHHQHGRWQARIGRVAGNKDLYLGTFSTQEEAAEAYDIAAIKFRGLNAVTNFDMSRYDVESILSSDLPVGGGASGRAPAKFPLDSLQPGSAAAMMLAGAAAASQATMPPSEKDYWSLLALHYQQQQEQERQFPASAYEAYGSGGVNVDFTMGTSSGNNNNNTGSGVMWGATTGAVVVGQQDSSGKQGNGYASNIPYAAAAMVSGSAGYEGSTGDNGTWVTTTTSSNTGTAPHYYNYLFGME

SEQ ID NO: 19817 - protein, 278 aa, Zea mays
  VARIANT 46: note = Ancestral polymorphism is N, Derived polymorphism is H
  VARIANT 88: note = Ancestral polymorphism is A, Derived polymorphism is V
  VARIANT 155: note = Ancestral polymorphism is G, Derived polymorphism is R
MAPNTSLLVLLFLLPAAATAAAPATGNTAFNVTEILGRYPEFKLFNLLLSKTRVAREVNSRSPVTVLVPGNSAVDWLLRRSARLPRAALVELVSVHVALDYIDAAKLASLPRGQPTVVTTLFQTTGSALGRTGFLNVTAAGRGGASAVFVSAAPGSLVSATLKRAVTAKPYNISVLQISNLVVPPGIITRPRLPLPPSPSPPAPRMTQMAVAPSPPPTLTSPRQSPSTLLPASVGDTAEAPDTAEAPVPSHGHVAQVASWWTAAAVGMAMACILIGYL

SEQ ID NO: 19818 - protein, 599 aa, Zea mays
  VARIANT 378: note = Ancestral polymorphism is A, Derived polymorphism is V
MAAVTFSPPLLLAILLILTTASTTQCHGHKSQRHHTGGTRVAQKTAAAGASPPADTVHHAICHTTPHPVSCLLAVASHLGAVAGAKAAEASAVSVQLLPPNVLSVALASLNGAESALSSLSPALSALSAPAASPAGASLRRGAAQDCQDLHAATLWSLSRSASLLAAPGESLPAVRAHLAAALANKATCLDGLAGASGPRVGGLLASLDDAYEHVSNSLALVARRGGGVSAAGFVDVVAKTIHNRRLLQDDDDDDGNGGDDDNDNGGDDNDGGADNGGNTGQPAAATVITVAKDGTGNFRTVGEAVAAAPNNSEARTVIRVKAGTYEENVEVLPYKKNIALVGEGRDTTVITGSRSAADGWTTFRSATFGVSGEGFLARDITFRNTAGAGKGQAVALRVNADLAALYRCGVEGHQDALYAHSFRQFYRECAVSGTVDVVFGDAAAVLQGCALLARAPVPGQSVVLTAHGRADPNEDTGIALHHCTVSASAADPAPAGTRTFLGRPWGAYARAVVMDSYLGQIVDREGWAEWPGAEPGRADTVYFGEYGNDGPGADTGGRVGWAGVRQMEYDEAAQFAVENFIYGDEWLGATSFPYDDDV

SEQ ID NO: 19819 - protein, 185 aa, Zea mays
  VARIANT 81: note = Ancestral polymorphism is R, Derived polymorphism is H
  VARIANT 8: note = Ancestral polymorphism is S, Derived polymorphism is W
MAAAARVSEVKAEGLLRGACAALAAAAALLVGLSTQTETVLLVRKKATVKDVQALWVLAMAAAAAAGYHLLQLLKCLYLGRVGGARPCRRSSRALAWTCLLLDKACAYTTFATTVAAAQACVVALDGAHAVQWTKLCNIYTRFCEQVAGSLVLGMLAAVGTAVLSAASARNVFRHYSSLETYAAH

SEQ ID NO: 19820 - protein, 394 aa, Zea mays
  VARIANT 4..394: note = Derived polymorphism lacks residues 4 to 394
MSFSSMSKQQVLDAGDGEGEEVVELIPGLPEEVAEKCLLHLPFLYHRLFRTVSSTWNRFLTDSPAKPLLFTPAEGAGAGAGSAAMGSLSLSLPFLFAFAFDPVSRRLQCQALDPFSRRWLLLPPVPGGAAAGSFAVVGLPRRGEIYVIGGVEEGSDKAVTSVAVYSAARNGWEEAAAMRTPRGYMAAGEVGGRVVVAGEDGEAEVFDPDAGRWSPAAPRRGAAVAWYDAAAAGGKLYVTEGWAWPFERAPRGAVYDSATDSWCEMARGMREGWTGSCAVAGGRMYIVAEYGEWRLKQYDEARDEWRMVAGSGVPPEVRRPHVVAGEIGEVAGGRRRIYVVGAGLDVAVGTVSASDTAAAPGVHGVEEEVVEWEVVKGPTEFVGLAPCNAQVLYA

SEQ ID NO: 19821 - protein, 385 aa, Zea mays
  VARIANT 22: note = Ancestral polymorphism is V, Derived polymorphism is G
  VARIANT 65: note = Ancestral polymorphism is A, Derived polymorphism is S
  VARIANT 68: note = Ancestral polymorphism is L, Derived polymorphism is Q
MSFSSMSKQQVLDAGDGEGEEVMELIPGLPEEVAEKCLLHLPFLYHRLFRTVSSTWNRFLTDALAKPLLFPHAAGAGTAATGSVPFLFALAFDPMSRRLQCQALDRFSRKWLLLPPVPGGAAAGSFAVVGLPRRGQIYVIGGVEEGGDKAVTSVAVYSAARNGWEEAAAMRTPRGYMAAGEVGGRVVVAGEDGEAEVFDPEAGRWSPAAPRRGAAVARYDAAAAGGKLYVTEGWAWPFERAPRGAVYDAAADSWCEMARGMREGWTGSCAVAGGRMYIVAEYGEWRLKRYDEARDEWRMVAGTGVPPEVRRPHVVAGELGEVAGGRRRIYVVGAGLDVAVGTVSAAASAAAAVPGVEDEVVEWEVVKGSAEFAGMAPCNAQVLYA

SEQ ID NO: 19822 - protein, 260 aa, Zea mays
  VARIANT 72: note = Ancestral polymorphism is R, Derived polymorphism is C
MAEKGCLKRLQKEYHALCKEPPPQIVARPLPNDILEWRKLYLEDSVFVMLILMQCPFSCFLSMLYLAIWYRRGYYYGKLKFPPDYPFKPPSISMTTPSGRFAPHKRICLSMSDFHPESWNPMWSVASILTGLLSFMMDDALTTGSIKTSDAEKRRLAKASLAYNCESKNCPHFRKLFPEYVEKYNQQQQLENTAAEPVPQENPAPVPSLAVQQAPVVANRAQPLAEVRRDKNQKKAVPFWMVLVMFSVFGAVMALPLMQL

SEQ ID NO: 19823 - protein, 142 aa, Zea mays
  VARIANT 32: note = Ancestral polymorphism is Q, Derived polymorphism is R
  VARIANT 36: note = Ancestral polymorphism is S, Derived polymorphism is L
  VARIANT 50: note = Ancestral polymorphism is D, Derived polymorphism is Y
MGMEHFISSANLSAEGFTSYGNEAAEEMKKLRGLRLETLMETCQNTESRDVAIRCPIPCKSSRRYREHDLRAAQDLSEFIVSKASPPYFMGSPPLRATNPLAHDAQFCAWKVHSVDQSLGIPIPAKSYNARYYARKESFRKA

SEQ ID NO: 19824 - protein, 282 aa, Zea mays
  VARIANT 140: note = Ancestral polymorphism is R, Derived polymorphism is T
MKKCASELELEAFIRESGEDARAAAGGSSPGCGGSSDPGGSGVFSPGFGFADSDTMDGGSWWYGNVRTPNPVMSQAASISASPGLTTSANHALESESDSDSESLYEVEGVPYERGNRSIETKRIRRMVSNRESARRSRRRKQAQLSDLESQVERLKGENATLFQQLSDANQQFSTAVTDNRILKSDVEALRIKVKMAEDMVARSAVSCGLGDLGLAPYVNSRKMCQALNVLTGLDLLGSDAFRGPTAGTRVQNSPVQSTASLESLDNRKSNEVTSCAADIWP

SEQ ID NO: 19825 - protein, 337 aa, Zea mays
  VARIANT 100: note = Ancestral polymorphism is R, Derived polymorphism is P
  VARIANT 117: note = Ancestral polymorphism is L, Derived polymorphism is P
MSTYLKKPPPCSVSLIVLLPLTLILLCFTFLLPLSAYISNPLASTAVATRACVGATAGVVRAAPATTTVGDVDGVVGSQRPAELMSVLVGVHTMPGKHSRRHLIRMAYALQQQTPALRAAARVDVRFVLCARPMPPEHRVFVALEARAYGDVLVLDCAENAEEGKTYTYFASLPTMLGSGSGGGGGRPYDYVMKVDDDTFLQLDALVDTLRSAPREDMYCGVGLPFHDRQFPPFMLGMGYLLSWDLVEWIATSDMVRREAMGVEDLTTGKWLNMGHKAKNRVNIFPRMYDYKSAKGEDFLENTIGVHQLKQDLRWAHTLEHFNVTRLEPSSMLLHNF

SEQ ID NO: 19826 - protein, 599 aa, Zea mays
  VARIANT 156: note = Ancestral polymorphism is S, Derived polymorphism is I
  VARIANT 266: note = Ancestral polymorphism is T, Derived polymorphism is A
  VARIANT 320: note = Ancestral polymorphism is M, Derived polymorphism is T
MVAAASTTQAHWQMTGSSYACTCTAFRSISTKLAARSSAGRRSRGRRSAVDPSAGGPPLPPPPVVIAGAVASPGKRMPPSPIGCTSRAATASSSRQAKEDDGASRNVSGFEPSIWGDFFLTYSSPLATSSLHKAWMVHRAEQLKEEVAAKLVAASSACSLHRRIHLIHVLERLCLDHLFEDEISDMLARMNDVDVSGCDLQTVAMWFYLLRKHGYSVSSDVFAEFRDEQGGGFTANSARDLLSLHCAACLATRGETILDEAISFTAKSLKSTAPYTGAASLACEIKRALEIPLPRRVRIYEAKSRIAEYGREAEADELVMELAKLNYNLVQLQYQQELKIITRWWNGLELQSRLSFARDRVVECYFWIVGVYFEPSYSRARIILTKVIAIVSLLDDTYDVYGTPQECELFTECIERFIIDLVRAYNKEVRWREQGYVPATVEEHLQVSARSGACHLLSCASFVGMGDVAGEEAFEWVCSVPKLVQALCIILRLSDDLKSYEREKMAPHVASTIESCMREHEVPLEVARVKIQEMIDETWKDFNEEWLNMNKHQPAELLERIFNLTRTMVYMYKNDDAYTNCHVIKDTINSLFVEPVSIA

SEQ ID NO: 19827 - protein, 398 aa, Zea mays
  VARIANT 275: note = Ancestral polymorphism is R, Derived polymorphism is M
MPLSSFSFLRHHLPLPLQLPPTSNRQPPHPRLFHLLLPPFTPRRTFVCQPLTAATDDMAAAAAAASPPTLLEHMGQAGTAADLTVLVAHIQSACKRIAALVASPGNAELSRAKARGGAMAAGRDAPKPLDELSNDIILSALQSSGKVAALASEENDLPIWISDGGPYVVVTDPLDGSRNIEVSIPTGTIFGIYNRLVEVDHLPLEERAQLNSLQSGTRLVAAGYVLYSSATILCISFGAGTHAFTLDWSTGEFILTHPSIQIPPRGQIYSVNDARYFDWPEGLRKYIDTIRQGKGQHPKKYSARYVCSLVADFHRTLIYGGVAMNPRDHLRLVYEANPLSFLAEQAGGRGSDGKNRILTIQPVKLHQRLPLFLGSMDDMLELESYGDVQQKVNPGYEV

SEQ ID NO: 19828 - protein, 506 aa, Zea mays
  VARIANT 217: note = Ancestral polymorphism is L, Derived polymorphism is P
  VARIANT 6: note = Ancestral polymorphism is A, Derived polymorphism is G
MAPADGESSPPPHVAVVAFPFSSHAAVLLSIARALAAAAAPSGATLSFLSTASSLAQLRKASSASAGHGLPGNLRFVEVPDGAPAAEETVPVPRQMQLFMEAAEAGGVKAWLEAARAAAGGARVTCVVGDAFVWPAADAAASAGAPWVPVWTAASCALLAHVRTDALREDVGDQGALDSTTTVLLLSLPCPFIARGFDERMAVAFPSFAAANRVDEPLISHPGLASYRVRDLPDGVVSGDFNYVINLLVHRMGQCLPRSAAAVALNTFPGLDPPDVTAALAEILPNCVPFGPYHLLLAEDDADTAAPADPHGCLAWLGRQPARGVAYVSFGTVACPRPDELRELAAGLEASAAPFLWSLREDSWTLLPPGFLDRAAGTGSGLVVPWAPQVAVLRHPSVGAFVTHAGWASVLEGVSSGVPMACRPFFGDQRMNARSVAHVWGFGAAFEGAMTSAGVAAAVEELLRGEEGARMRARAKELQALVAEAFGPGGECRKNFDRFVEIVCRA

SEQ ID NO: 19829 - protein, 366 aa, Zea mays
  VARIANT 27: note = Ancestral polymorphism is R, Derived polymorphism is C
  VARIANT 43..366: note = Derived polymorphism lacks residues 43 to 366
  VARIANT 112..366: note = Derived polymorphism lacks residues 112 to 366
  VARIANT 164..366: note = Derived polymorphism lacks residues 164 to 366
MWSGLGVEKEPTIGPCPCVSSAYGRWRSVVFIVRHRHRLRHVQERRLGDAAADSSGELRDRSQPRAQGSVALLPVPVPSLCSSSSAARRLEKVKDEAEEPGKAVVAVAAASWSFRLRSLRKSLEGEQVAAGWPPWLSAVAGEAIQGWIPLKADSFEKLEKSDSQVEDTFELDHSGDELFAKFYAALDEINFFKTSPAGDEDRGLLSKATQYFDDALLAMQKLGKKMASLVDIAESFKSRENENVGVMGLRQKHRIYENVPPPPPRVDVYHQESSPMKMLPVNVYHHHHQESTLTGNGVATAGEKLGVERFELPLIYISLSRKVKEDDFLAMKGTKLPQRPKKRAKNMDKTLQVLNTWPEIDLILYF

SEQ ID NO: 19830 - protein, 420 aa, Zea mays
  VARIANT 255: note = Ancestral polymorphism is T, Derived polymorphism is M
MRPPGARPGGTPGCPNSRRKPVNVVGTQQYSKFTQQELPACKPILTPKWVVSVFLIVGVIFVPIGVVSLLAARDVVEIIDRYDEACVPVNMTENKLAYIQNETISKECIRNLTVTKYMKQPIFVYYELDNFYQNHRRYVKSRNDAQLRDASKANQTSACEPEKTTANGQPIVPCGLIAWSLFNDTYNFTRGNENLTVDKKDISWKSDREHKFGKDVYPSNFQNGALKGGATLNPKIPLSEQEDLIVWMRTAALPTFRKLYGRLYFDLKENDTITVRLNNNYNTYSFGGKKKLVLSTATWLGGKNDFLGFAYLIVGGLCIFLAFAFTLLYFVKPSPFYLCIFYCQLKVEVALRAKAVGCVGNWETTTTYPGTDARMFRNTKCPYYSKCSLYEMKCSEPEMSMGISKHGSGKNFMYIFYEGV

SEQ ID NO: 19831 - protein, 433 aa, Zea mays
  VARIANT 353: note = Ancestral polymorphism is A, Derived polymorphism is P
MMHQHHPHHLPRFHSPLSSSSEAVDMDPRVWGRLPQPLVDRVLACLPTPSFLRLRATCRRFCSLIYSSPFLHSHLLLSPHLPFFAFAVPSAGYLLLLDPTRQAPSWSRLPLPLPAPGAGQGFSPAAASAGLLAFLSDASGHKTLLLANPITRLLAPLPLCPTARLSPTVGLAAGPTSFIAVIAGDDLVSPFAVKNISADTFVADAASVPPSGFWAPSSILPRLSSLDPRAGMAFASGRFYCMSSSPFAVLVFDVAANVWSKVQPPMRRFLRSPALVEFGGGREREARVALVSAVEKSRLSVPRSVRMWTLRGGGHGVAGGSSGSGAWTEVARMPADVHAHFAAAEGGRGFECAAHGDFVVLAPRGPASPVLVFDSRRDEWRWAPPCPYNPYVGGIAAGGPGFRVFAYEPRLATPAIGLLDATAPAAFLHGMQG

SEQ ID NO: 19832 - protein, 79 aa, Zea mays
  VARIANT 23: note = Ancestral polymorphism is Q, Derived polymorphism is H
  VARIANT 24: note = Ancestral polymorphism is T, Derived polymorphism is A
  VARIANT 39: note = Ancestral polymorphism is G, Derived polymorphism is R
  VARIANT 63: note = Ancestral polymorphism is M, Derived polymorphism is T
  VARIANT 75..79: note = Derived polymorphism lacks residues 75 to 79
MAMMVDPPNGIRNQGKHYYSMWQTLFEIDTKYVSIKPIGHGSYGIVCSSINHETNEKVAIKKMHNVFDNLVDALWTLPE

SEQ ID NO: 19833 - protein, 250 aa, Zea mays
  VARIANT 57..250: note = Derived polymorphism lacks residues 57 to 250
  VARIANT 44: note = Ancestral polymorphism is P, Derived polymorphism is Q
  VARIANT 35: note = Ancestral polymorphism is C, Derived polymorphism is S
MGMRPGWVGGLVEESFFVGCAAHEDRKKNEKNIFCLGCCASICPHCAPAHRHHLLLQVRRYVYNDVVRLDDLERLIDCSFVQPYTINSAKVIFLKPRPQSRPFKGSGNVCLACDRILQEPFHFCCLSCKVDHVMMQGGDLSNILLYVPGGPPDLGCGFPRFENLRFDDDPGQYGQATPSSILEDPVEHGGSASASGGSSNGGSARNHARRDVDVPTRKKKSGGGGGGFFPQIVLSLGNRRKGAPHRAPLA

SEQ ID NO: 19834 - protein, 177 aa, Zea mays
  VARIANT 156: note = Ancestral polymorphism is S, Derived polymorphism is I
  VARIANT 55: note = Ancestral polymorphism is P, Derived polymorphism is T
MARRLCRLPRLFPLVSSASASAAPRPHHLPFAVNPNPAPLAPSFSSSSPPAFPGPHRLFSSTSGSSMVVVGSADSFNSIFSKVQDEKLPAVFYYTAVWCGPCRAIAPLVSKLSSQYPKIPVYKVDIELEGLGNKLRDLNICSVPTFHFYHKGQRISEIVGADAKKIEATMESLHKQQ

SEQ ID NO: 19835 - protein, 226 aa, Zea mays
  VARIANT 10: note = Ancestral polymorphism is D, Derived polymorphism is Y
  VARIANT 21: note = Ancestral polymorphism is T, Derived polymorphism is I
  VARIANT 29: note = Ancestral polymorphism is G, Derived polymorphism is S
  VARIANT 31..226: note = Derived polymorphism lacks residues 31 to 226
  VARIANT 34: note = Ancestral polymorphism is S, Derived polymorphism is A
MEMAIIMARDARMDWIIHLDTDELIHPAGAREYSLRRLLLDVPDNVDMVIFPNYESSIDCMTLRILLLRYNILPSSCALYSSQKCFLMVHSPAYNAFIIASTATEEEMGNWRESCFSYCCYILCPKTLQAIIRGLKEPDVFTNAVTSAKAQSKTKPSNMGLGNKEAMAIQPNVTAGQSTLEGGHERLQATVRKILEMVDAQEQEEAMPPRPSPGLLELSERATALS

SEQ ID NO: 19836 - protein, 77 aa, Zea mays
  VARIANT 6: note = Ancestral polymorphism is A, Derived polymorphism is V
  VARIANT 50: note = Ancestral polymorphism is D, Derived polymorphism is N
  VARIANT 58: note = Ancestral polymorphism is K, Derived polymorphism is N
  VARIANT 59: note = Ancestral polymorphism is E, Derived polymorphism is V
  VARIANT 64: note = Ancestral polymorphism is K, Derived polymorphism is N
  VARIANT 71: note = Ancestral polymorphism is R, Derived polymorphism is K
MVMWRALREKKEKVERLSVLALECLGWCEVDVNIHMFFAGYSSGLVGPDNLPLLLKLKEQKKMNQSTSSNRASEIPD

SEQ ID NO: 19837 - protein, 364 aa, Zea mays
  VARIANT 353: note = Ancestral polymorphism is N, Derived polymorphism is Y
  VARIANT 253: note = Ancestral polymorphism is R, Derived polymorphism is G
  VARIANT 83..364: note = Derived polymorphism lacks residues 83 to 364
MGSSLSNLTDAACIVHQFKINGYSATKSMARTDSLPSKRLAVGGYEWEVHYTPSLLVDGSYMIAFRLVLLGAPRRNDVKAAFRCRLLYPSTNYGHQRGACVSDSMGNVEGQMSHAFKRAKESSGWIPLRKRNVVEAARVIENDSLTAECTITVVTELPEPDTAKTNAVLPRIRRLTGVHSLHHDLGELLGKGTGSDVVLVVCGESFAAHKAILASRSPVFMAQFFGPMKETHSQSQRVEIMDMEAAVFGAMLRFMYTDVVPELERQENGDVIAQHLLAAADRYGLDKLKSMCEDKLCGGTTVETAATTLALAEQHGCPKLKAWCVEFIAANLDAVMVTEGYKHLMTSSPLVLNDLLRAVRGTKN

SEQ ID NO: 19838 - protein, 1298 aa, Zea mays
  VARIANT 1124: note = Ancestral polymorphism is A, Derived polymorphism is G
  VARIANT 420: note = Ancestral polymorphism is P, Derived polymorphism is L
  VARIANT 183..1298: note = Derived polymorphism lacks residues 183 to 1298
MESDGDTSPPRPPTPAPVRACGAGHPASHSLPTSAGGRVCLSCVVALLSSAGNASTPSHHVAHALANLSLALADPAFLRPLRAAHPHLLAAPLAEALEGAAERRDAALAAQACDVAADLAAVVGAPADSELVARLARVLSSGSLVKHLHTLHCLGLLLNSTKDAGAYIGDKCSLFLNLVNDLRLPSDEIRGEILFVLYKLALLNATPWDDICETGDLDLLAIGRSLLQLSLEVLLKTQNDAVRLNCIALLLTLAKKEPFDHLLISNQSSNKCIEAESMQTDYMSLNASLVLFAEAVKGSLLSTNLEVQAGTLDLIFHFLSSDANICALLQTLIDENVADYIFEVLRLSGNNDLLVISSIRVLLLFARSEENFKEKLAIGFSTLLPVLHYVAEIPFHPVQSHVLRLVWICMANCSGILSLPQEEQIACTLTAILRRNLNGELDMSSETFILVCSILIEILKSPHAHDIEKLPSFIEEASKYAISSTLSHGYDSTILSTHSLLLLKEALIFCLEGSKYNIARTKDLEDSIMGTCGTILLQWLESAVVDGNDEETLAEILQIFQIILSRASDKKPLKFAELLASSSWFSLSFGFMGLFPTDHVKSLVCLVTSLIVDRLLGCNYGETIRDAHIYLPSDPTEMMYLLGQCSTEDFNLASCQCAILSILYACSFYNERLCANNQILASVEQYILLNGGTFPYEINGSIMLTLLVHLYAFIRGLSHSCSIPHSPEAENTLFHLIIHKDWDLLVIRVHSVAIKWLFQKQEIMEPLAFQMLKFCRTFCEDETVMLSNSSQLVDMQMIAELALSGETTISSLLVSLLDQMLKEGTEDELFSVVSVIAEILMISPCSSDQFISCANASTFGQEDEWLPLVLKLLEFISSGIDYTSSGQEHKIVVGILCLVLHHSSSNFLIEPAKAIILNSSLVSLTDVVVNNACVKGPSLFQHNQETTFGEFLILVLLLVFFSLRSLHSILEVSIDWQDFLQHSDDVQSFSVLGIPCHDLCRLMHFGSPSIKLIASQCLLELLTRISDQRSCNNAELRCSVGYLKSIIAVTEGLVFSEDSKVAGNCSACLSVILGWEKFGSQEKVAVRESKWFRLIMEEFVVALTAPGLTSKSFSSQQKFAANMAVSLLRLSQVPDWLTSLFDGHLISGIVANLSARNVTAEIINLFSELMARKYLSQEHIVDLHNLLQVCRSQVYEGSSKAPLPEQRVEKVARSTNDVLASLFGLMVNQCTDSGTAQAEQQRLLHAIDVFFQESGRRQQQHATARQETVPGDYGPRQGSRARRPKEKISGPGWIRIRH

SEQ ID NO: 19839 - protein, 848 aa, Zea mays
  VARIANT 626..848: note = Derived polymorphism lacks residues 626 to 848
MVVVDASEFGAEGFDPKRWINAALDARHPSEPLDRFLADAEERLRSAADDAAAALERDSGDALRRVPLACRDALRLRDDAVALRSHLASVLQSLSLAEGSSAESIAALARIDTVKQRMEAAYTTLQDAAGLAQLSQSVEDVFSSGNLPKAAETLATMRHCLSAVGEVAEFANVRKQLEVLEERLDEMVQPRLVDALSNRKVDAVQDLRGILIRINRFKSLEVQYTKIHVKPLKKLWDDFELKQRSSKVDMEKLSGESISGLSFSSWLPNFYDETLLYLEQEWKWCLTAFPDEYKSLVPKVLTETMSELNSSFVSRINIATGDVIPETRSIAKGILDVLSGDLPKSTKLQNKHLQALIELHNMTGTFARNIQYLFSESDLAVVLNTLKAIYSPYETFKARYGQMERAILSAEMTSIDIRGAVPRGVGAQGIELSETVRRMEESIPEMIVLLEAAVERCISLTGGSEADELVLALDDVMLQYISNLQETLKSLRIICGLDSDALKKDAGLEKKEVQRLVDVSEEEEWSIVQGALQILTVADCLTSRTSVFEASLRATLARIGTNFSVSGFGSSLDKSPAATADENADLSFAGRAALDIAAIRLSDLPDKSKKFLTVLEQVGFVVLNFQIFCYNLQHRSHHLCLWVVTSKDPRFHALPLTSQRVAAFSDTVNELVYDVLISKVRQRLSEVARLPIWSSVEEQGGLPLPSFSAYPQAYVTSVGEYLLTLPQQLEPLAEGISGNEAGNDEAQFFATEWIFKVAEGATALFMEQLRGIHYITDRGSQQLAADIEYLNNVLSALSMPIPPFLSTFHACVSTPRDQVRDLIKSDGASQLDLPTTHLVCKIRRITLD

SEQ ID NO: 19840 - protein, 172 aa, Zea mays
  VARIANT 3: note = Ancestral polymorphism is R, Derived polymorphism is G
  VARIANT 18: note = Ancestral polymorphism is A, Derived polymorphism is V
  VARIANT 30: note = Ancestral polymorphism is P, Derived polymorphism is L
  VARIANT 66: note = Ancestral polymorphism is W, Derived polymorphism is R
  VARIANT 73: note = Ancestral polymorphism is R, Derived polymorphism is W
  VARIANT 77: note = Ancestral polymorphism is K, Derived polymorphism is R
  VARIANT 90: note = Ancestral polymorphism is A, Derived polymorphism is V
  VARIANT 119: note = Ancestral polymorphism is G, Derived polymorphism is D
  VARIANT 129: note = Ancestral polymorphism is G, Derived polymorphism is D
  VARIANT 138: note = Ancestral polymorphism is N, Derived polymorphism is I
  VARIANT 151: note = Ancestral polymorphism is P, Derived polymorphism is L
MTRASSTMISVLKKIMLAGLPGINLREELLDVLCKDHSFDIYRDDIVFRDPLNTFKGLGNYKRLFWALRLTGRVFFKASWVEVVSIWQPAENSILLRWTAHGVPRVPWGWWDGHARFDGASVYKLDRNGKIYEHKVHNVATNPPAKSKVLPVHELVRSLGCPSTAEPTCSDF

SEQ ID NO: 19841 - protein, 110 aa, Zea mays
  VARIANT 30: note = Ancestral polymorphism is T, Derived polymorphism is I
  VARIANT 48..110: note = Derived polymorphism lacks residues 48 to 110
MGLIGLENLENTCFMNNSIHKGEMILADDTCRILEILAYEYWSNHLAQNDSVIVDTCHFFRACNLIRCNKIKGIKAPRIMPKSSSVVISDVKCDNPKEEGKVQQTKRCKM

SEQ ID NO: 19842 - protein, 355 aa, Zea mays
  VARIANT 271: note = Ancestral polymorphism is Q, Derived polymorphism is R
MPKHKTKVLAAVVLTWAMTFSPPSISCHHANAYCLTIKLSCYLVHLKPIVGLRYCQCSFGESMSGQQDHASKSSSSSISSSTQESEEEAPVRSVTIGSLLAQANSTSGHSLGKRLSHLGSIPYTPRVNGKIPNVGNATLDHERLLERLGTYGLAEFQIEGDGNCQFRALADQIYHNPDYHKHVRKAVMKQLKEFRKQYESYVPMEYKVYLKKMKRSGEWGDHLTLQAAADRFGAKICLLTSFKDTCLIEIVPRDLTPTKGKGLATLLLSYQMLGSISNFSGTSIAASILLLRQFCIQPLQDANHNSIFRFCRNHYHLIPVMVHIFAELWLSFWCEVHYNSLYGIDGKYFADLVNL

SEQ ID NO: 19843 - protein, 821 aa, Zea mays
  VARIANT 7: note = Ancestral polymorphism is E, Derived polymorphism is G
MGQSKAEFLKQFGGDYGYPDAPRGIDELRAAEFKRLEGMVYLDHAGATLYSEAQMTDVARDLMSNVYGNPHSQNDSSMATIDAVTSVRHQVLKYFNASPRDYKCIFTSGATAALKLVGECFPWSRDSCYMYTMENHNSVLGIREYALSKGATVSAVDVEEVVDPSKNHESDSLFKVSKRSNQRRGDNVLLHNYQNGSLSAISGNNLNLFAFPSECNFSGHKFNLSLVKLIKEGKFMDFSSQQQGQWMVLIDAAKGCATEPPNLTLYPADFVVCSFYKIFGYPTGLGALIVKNVTLWNTYDIGTVAASIADIDFVQKRKGIEQTLEDGTISFLSISSLRYGFKIIDILTISAIARHTASLATYVRNKMLELKHSNEKNVCIIYGQDFKANYLKMGPSITFNLKREDGTWFGYREVEKLASLSGIHLRTGCFCNPGACAKYVGLSHSDLVSNFEAGHVCWDDNDVINGKPTGAVRISFGYMSTYEDAEEFLKFLQSSFVSKPAELNNGYMVNMNTLSLVDDWCQQAISDIRLKSITIYPVKSCQGFSVQSWPLTTGGLKYDREWLLQGSGGEVLTQKKVPELSSICTLIDLKLGKLFLESPKCKDKLQISLLKNLTHLSAEVDVYGQRYEVQSYGENVNSWFSEAIGRPCTFMRCSSSKYRSCVTNGNRDHLCRDTRSKLSFVNEGQLLLVSEESTSDLNSRLSLSNGNGKQQVFADAMRFRPNIVVSGSTPYNEDNWKRLHIGDAYFTSMGGCNRCQMINLYQSSGQVIKSKEPLATLASYRRKHGKILFGVLLNYEDDMEGEDDAIVERWLKVGQEVYPST

SEQ ID NO: 19844 - protein, 315 aa, Zea mays
  VARIANT 59..315: note = Derived polymorphism lacks residues 59 to 315
MLGSHDRAAPDPHPQPPRPPGLGVDADKDDEAVGDLETAAASSSRRLPHPETKKAMPDWLQSVQLWSNQQQPSASPPQHQDELLLPCRPVALNACRKPGGAFQPFEKEEKKKDKEEKQRAELELELPLPAAASSAVVGDSCDRAGATDTDTAENNKASSTKGGKDKEAQLSSQAPSRKARRCWAPELHCRFLQALFLYKPDIHKINRYSSLSSKTQLNSVEQAFDTKPSLVPHENGHGKSLDTKLPKLGSLPSRVLLNGTDGDDHSDHLKQGFVTGDMVARSSNVKWDEKAAIIISTSFVYCDDVVMDKVEDEEP

SEQ ID NO: 19845 - protein, 139 aa, Zea mays
  VARIANT 128: note = Ancestral polymorphism is P, Derived polymorphism is L
  VARIANT 119: note = Ancestral polymorphism is S, Derived polymorphism is P
  VARIANT 117..139: note = Derived polymorphism lacks residues 117 to 139
  VARIANT 85: note = Ancestral polymorphism is A, Derived polymorphism is V
  VARIANT 69: note = Ancestral polymorphism is E, Derived polymorphism is K
  VARIANT 49: note = Ancestral polymorphism is G, Derived polymorphism is S
MKRLLRRLSRVAAADACAAAAAYEPLRPDAAAPGKAAALAAGARRLGGGARVPEGHVPVCVGEEGGPVERYAVRAELLGRPAFAALLRRAAQEYGYGHPGALRIPCPVADFRDLLLQLSSACAAADHPDDDAAALCYYS

SEQ ID NO: 19846 - protein, 200 aa, Zea mays
  VARIANT 58..200: note = Derived polymorphism lacks residues 58 to 200
  VARIANT 57: note = Ancestral polymorphism is R, Derived polymorphism is W
  VARIANT 55: note = Ancestral polymorphism is W, Derived polymorphism is R
  VARIANT 49: note = Ancestral polymorphism is Y, Derived polymorphism is N
  VARIANT 44: note = Ancestral polymorphism is D, Derived polymorphism is Y
MDRGLIPLLDVLANKVKAIRRLRELLTTKLHICHVSSQGTSCEDEMWFYDCCRVRRRGQANAYNVPGCSSELVLQMGAAPMSSDVPVPCVADLADQVADVLHFFRLVQLQLDLCFFPFVRGILFPMVFMQQTYVGNSTDLDDEPDGENPCGVKKDLEAMVFHPEQAGSRFKYDALQPARPSVAATTTPRCGPAVPAVRPS

SEQ ID NO: 19847 - protein, 311 aa, Zea mays
  VARIANT 208..311: note = Derived polymorphism lacks residues 208 to 311
MPRVFPGGDSRGLPSSPSCGITVTAALDARSAKLVAMIGGEYPGGGSRGWWGARSVNLARAGCRGRKGGVGGGLGSIWGSRGRKGTRQRDWWRAGSRLVGARARYRDLGINSFHLHTGATVLSSQHSTTSQSVSADLSVIRLKKAGLASFDENKMESGLASVAQGMEGCVISNKEMGAYGMPSATNNPDASGQSFSEALKSSRKHLLQYDAFESADGGPGGKGAKKKTKKSKEHRIGGGGQCHVAAGMMRHGKGGKCRALCCGASRLSVSSSASCSILSSREQPSSGRRNPAPSYAAATIPMLPIQLLSSG

SEQ ID NO: 19848 - protein, 327 aa, Zea mays
  VARIANT 102: note = Ancestral polymorphism is P, Derived polymorphism is S
  VARIANT 154..327: note = Derived polymorphism lacks residues 154 to 327
  VARIANT 222: note = Ancestral polymorphism is R, Derived polymorphism is W
MYLSKLPIDSCPPTFFKATMAGTGTVKVHNVSLKASEQDISEFFSFSGEIVHVELKSCDERSQFAYITFRDNQGAERDMLLTGATIEDMAVIITPATDYKLPAFVLADLESKNTGGMESALQKAEDIAVSMLAKGFVLGMDAVEKAKAFVEKHQLTSTATAKVASLDRTMGLSQKFSTGTLVVNEKMKEMDEKYQVAEKTKSALAAAEQTVSTASSVIMSNRYILTGAAWVTDAYNKVATTTTDASKSIKERMMAEQEGANQSGETAKVDLLEISEADEQEWKRHEDDSTKNVVQESPEMTCQESEHQAGERQMTNVAGNSKTSIEE

SEQ ID NO: 19849 - protein, 231 aa, Zea mays
  VARIANT 196: note = Ancestral polymorphism is A, Derived polymorphism is T
  VARIANT 170: note = Ancestral polymorphism is F, Derived polymorphism is V
  VARIANT 167: note = Ancestral polymorphism is F, Derived polymorphism is Y
  VARIANT 156: note = Ancestral polymorphism is R, Derived polymorphism is S
  VARIANT 129: note = Ancestral polymorphism is C, Derived polymorphism is S
  VARIANT 121: note = Ancestral polymorphism is R, Derived polymorphism is H
  VARIANT 116: note = Ancestral polymorphism is V, Derived polymorphism is M
  VARIANT 110: note = Ancestral polymorphism is A, Derived polymorphism is V
  VARIANT 99: note = Ancestral polymorphism is N, Derived polymorphism is K
  VARIANT 70: note = Ancestral polymorphism is P, Derived polymorphism is T
  VARIANT 69: note = Ancestral polymorphism is E, Derived polymorphism is K
  VARIANT 64: note = Ancestral polymorphism is V, Derived polymorphism is A
  VARIANT 63: note = Ancestral polymorphism is A, Derived polymorphism is V
  VARIANT 61: note = Ancestral polymorphism is P, Derived polymorphism is S
  VARIANT 57: note = Ancestral polymorphism is G, Derived polymorphism is S
  VARIANT 53: note = Ancestral polymorphism is E, Derived polymorphism is D
  VARIANT 46: note = Ancestral polymorphism is R, Derived polymorphism is L
  VARIANT 43..231: note = Derived polymorphism lacks residues 43 to 231
  VARIANT 29: note = Ancestral polymorphism is G, Derived polymorphism is D
MREILHIQGGQCGNQIGAKFWEVICDEHGIDHTGKYAGDSDLQLERINVYYNEASGGRFVPRAVLMDLEPGTMDSVRSGPFGQIFRPDNFVFGQSGAGNNWAKGHYTEGAELIDSVLDVVRKEAENCDCLQGFQVCHSLGGGTGSGMGTLLISKIREEYPDRMMLTFSVFPSPKVSDTVVEPYNATLSVHQLVENADECMVLDNEALYDICFRTLKLATPTFSVVDLFGII

SEQ ID NO: 19850 - protein, 319 aa, Zea mays
  VARIANT 273..319: note = Derived polymorphism lacks residues 273 to 319
  VARIANT 226: note = Ancestral polymorphism is W, Derived polymorphism is C
  VARIANT 59: note = Ancestral polymorphism is R, Derived polymorphism is W
MVPTPPKRPAPDQEPGAADANKRPRHNAPASPRSIAEFELFEVLGEGAEGVVRRGRDRRTGKNVALKWIFGDGPGGHGHPDRRALAMEAGCLHACRGHPSIIGIHDVAADPKTGDVHLVLELVRGGLTLRESMWRPLSEDVVREMMRQLISAARKIHDAGFIHRDMKPENVLVCPLGALKVCDFGSATRQEPAGKPHEAHPVGTLQYNSPELLDGNWCYGPAVDMWGLGCVMAEVLTAETLFDLETREEMLDEMSKLRDQMASTSAAGKLDPECLAHLSEAGRDVLTGLLAFRPDERLTAAEALEKPWFKNFKSHWIGL

SEQ ID NO: 19851 - protein, 153 aa, Zea mays
  VARIANT 122: note = Ancestral polymorphism is L, Derived polymorphism is P
  VARIANT 119: note = Ancestral polymorphism is M, Derived polymorphism is I
  VARIANT 110: note = Ancestral polymorphism is G, Derived polymorphism is R
  VARIANT 105: note = Ancestral polymorphism is C, Derived polymorphism is F
  VARIANT 88: note = Ancestral polymorphism is S, Derived polymorphism is R
  VARIANT 79: note = Ancestral polymorphism is P, Derived polymorphism is L
  VARIANT 69: note = Ancestral polymorphism is P, Derived polymorphism is S
  VARIANT 53: note = Ancestral polymorphism is S, Derived polymorphism is P
  VARIANT 52: note = Ancestral polymorphism is P, Derived polymorphism is L
  VARIANT 48: note = Ancestral polymorphism is S, Derived polymorphism is R
  VARIANT 27: note = Ancestral polymorphism is R, Derived polymorphism is C
  VARIANT 1: note = Ancestral polymorphism is M, Derived polymorphism is R
MALRASPVSHRMAPTAEGRGSATAAVRAEEDGPWGVSGHGVHHHQQVSTVDPSPLAVFLTYSSRQVAAPSTPSRVPELLDLDYASAVSRMTTNEPRIVFILVIQCVIVQGSADRKQLAMEQLLAGAQGAVTAGHFGRCHSLDIEKKHVNLIDE

SEQ ID NO: 19852 - protein, 100 aa, Zea mays
  VARIANT 73: note = Ancestral polymorphism is A, Derived polymorphism is P
  VARIANT 64: note = Ancestral polymorphism is V, Derived polymorphism is L
  VARIANT 44: note = Ancestral polymorphism is Q, Derived polymorphism is K
  VARIANT 43: note = Ancestral polymorphism is R, Derived polymorphism is S
  VARIANT 41: note = Ancestral polymorphism is Q, Derived polymorphism is K
MEESKTGPGGLTARGKGKAPAPPPPPPSREEENGGGHRRGQRRKVWPRGRRAVVALVAMVAAALYLLLADAVAEPPPGAWVLVAYLLWIVGLIMLFSVMK

SEQ ID NO: 19853 - protein, 61 aa, Zea mays
  VARIANT 39: note = Ancestral polymorphism is C, Derived polymorphism is F
  VARIANT 37: note = Ancestral polymorphism is C, Derived polymorphism is R
  VARIANT 34: note = Ancestral polymorphism is E, Derived polymorphism is G
  VARIANT 19: note = Ancestral polymorphism is T, Derived polymorphism is I
MQRSPEPKPHHYLGVYFHISWLGGEISHQCHLDENYCRCMCCVRPEAQQMKSMKGKLYGLT

SEQ ID NO: 19854 - protein, 88 aa, Zea mays
  VARIANT 77: note = Ancestral polymorphism is R, Derived polymorphism is I
  VARIANT 74: note = Ancestral polymorphism is V, Derived polymorphism is D
  VARIANT 57: note = Ancestral polymorphism is R, Derived polymorphism is Q
  VARIANT 55: note = Ancestral polymorphism is L, Derived polymorphism is V
  VARIANT 45: note = Ancestral polymorphism is R, Derived polymorphism is W
  VARIANT 21..88: note = Derived polymorphism lacks residues 21 to 88
MDLVGRRPHAVDVACEASIGQEAARRHVCRGAQMEAAADPEERERKAAFERLDNLGRCIADVESSGEKVFRALVNTRVSLLNILSPAF

SEQ ID NO: 19855 - protein, 112 aa, Zea mays
  VARIANT 38: note = Ancestral polymorphism is L, Derived polymorphism is I
  VARIANT 35: note = Ancestral polymorphism is A, Derived polymorphism is S
MALQAGMMPDYQREQPEPEQQVAILAGRRERDDGARRLFLDAGRVLMLLGWSALASAAGPKNDDNRPGNSGAAHAYALILALVLWLLGVSLVALVHVERRFPRAAGVGGAAA

SEQ ID NO: 19856 - protein, 703 aa, Zea mays
  VARIANT 653: note = Ancestral polymorphism is D, Derived polymorphism is V
MNLWTDDNASMMEAFMASADLPAYPWGAPAGGGNPPPPQMPPAMAMAPGFNQDTLQQRLQAMIEGSRETWTYAIFWQSSLDAATGASLLGWGDGYYKGCDDDKRRHRPPLTPAAQAEQEHRKRVLRELNSLISGGASAAPAPAPDEAVEEEVTDTEWFFLVSMTQSFLNGSGLPGQALFAGHHTWIAAGLSSAPCDRARQAYNFGLRTMVCFPVGTGVLELGSTDVVFQTAETMAKIRSLFGGGPGGGSWPPVQPQAAPQQQHAAEADQAAETDPSVLWLADAPVVDIKDSYSHPSAAEISVSKPPPPPPPPQIHFENGSTSTLTENPSPSVHAPPAPPAPPQRQQQNQGPFRRELNFSDFASNPSLAAAPPFFKPESGEILSFGVDSNAQRNPSPAPPASLTTAPGSLFSQSQHTATAAANDAKNNNNNNKRSMEATSLASNTNHHPAAAANEGMLSFSSAPTARPSAGTGAPAKSESDHSDLDASVREVESSRVVAPPPEAEKRPRKRGRKPANGREEPLNHVEAERQRREKLNQRFYALRAVVPNVSKMDKASLLGDAISYINELRGKLTSLESDRETLQAQVEALKKERDARPHPHPAAGLGGHDAGGPRCHAVEIDAKILGLEAMIRVQCHKRNHPSARLMTALRELDLDVYHASVSVVKDLMIQQVAVKMASRMYSQDQLSAALYSRLAEPGSVMGR

SEQ ID NO: 19857 - protein, 130 aa, Zea mays
  VARIANT 74: note = Ancestral polymorphism is R, Derived polymorphism is L
MEVVVAFGLINGNLLLARNTCYTQRNHVQLSGYTNARQASLQVALFCMCMGGIMYFLEYEPDTMAPFLRGLIRLFLASKISNPSPLPPNRNASYSYLQTLNALEQSRTQPGVDNGLTTSEKYNLESIPGL

SEQ ID NO: 19858 - protein, 261 aa, Zea mays
  VARIANT 65: note = Ancestral polymorphism is S, Derived polymorphism is I
  VARIANT 66: note = Ancestral polymorphism is D, Derived polymorphism is Y
MAIDHESPFKELRLKNRRIMGGGGPDPEPEEEEEEGVTAAYAERWPRWLQPLLSARFFAQCRTHSDSNRSGECNMFCLDCSAAGGTGTGAGALCSLCLAQHGHRDHHTIQIRRSSYHDVIRVSDIQRFMDIAGVQTYVINSARVVFLNERPQQQKPGGGKAASSSSASANLCEVCARSLLDNFRFCSLGCKVVGCSPDAAKARNWLLRAADGDGSTTSSSAPRNADRKLSFTPPTPQPTLPTKRRKGIPHRAPFGSLIVEY

SEQ ID NO: 19859 - protein, 1642 aa, Zea mays
  VARIANT 584..1642: note = Derived polymorphism lacks residues 584 to 1642
  VARIANT 249..1642: note = Derived polymorphism lacks residues 249 to 1642
MHGWRGAEGCDVRRQRLVRLMWPAARVEAEAPPPPAQGPATSPSGSSVPPSRTTSLPPESAAQQECIDPPRPVSPGSFVKDGREIRVGDCALFRAVDVPPFIGLIRWIEKKEDGHPKLRVSWLYRPTDVKLNKGIQLSAAPNEIFYSFHQDEASAVSLLHPCKVAFLRKGVELPAGISSFVCWRVYDIDNKCLWWLTDKDYINVSSSFISCFVHYYLLFTYEIENQERQEEVNRLLHRTRLEMRAALQSGGRSPKRLNGPSASQQLKTASVGTQNGGLSKGKKRDRSEQGVDPAKRDRDRLLKVDDSEPGIFNLDDIKSEIAKITEKDGLPNAEAVEKLVHLMQLDRTEQKIDLSGRVILADVIAATENPDCLGRFVQSRGLPVLDSWLQEAHKGKSGDGSSPKEADKPIDELLLALLRALAKLPINLSALQSCSIGKSVNHLRSHKNLEIQKKAKCLVENWKKRVDAEMKSNDVKPLVSGQSVSWSGKAGFQEISNAGTKRGGSSENSPKNPVPTLSSSKFLTDKPGGTDAEAKLNPGVSALSNSQHVQPTNVTTNLKDQPCKSTGGTGPELPTVKEEKTSSSSQSPNNSQSISSEPSKDARSSTAASGGASKTSESSSRSHRKANNGLVSGNLKEASVGRSVSLDRSLLQDKSSQTGTASEKGPDMPLDHGNNHRLIVRFPNPGRSPARSASAGSFDDPSVTGGRASSPMVVDRHDQTERKVKGKTENTRPHLASDANTESWHSNDGATGSEEGDKSPCAILDDDNSRTPDDSVKDTHASRVACSSHTNEKGVGETKVGTPFSPMNALIEIKYSEASHSQQAGDDTAMNLLASVAGEISKSELVSPASSPRSSSVKKLARDSDNIGKVKVESDTGPSHPGQADAKKGAMGKEVKIDACLVAKEEQRQTMPSPELPDSKAVVSSAKIEIYEVEAKIANKCNSQHASIDSKGESQDACTAHGKVVDGSIDKDGAMESALGSQCRLVVPSRNSRLVHAGESSLSAADKQAQGLLKSTNHKQLLSVSDNPGAFDRRDSMAGKMDLLAAEVRKTDAVGNSNIVQNEAEKKEHACSSLPDVPKLVVAAASPVGVANVNKEMKESKDSSSESNSHVKSEGVNSQQSEQSAMQSSKKSCDGVSGKEDEKEDHVLSDEGSSLAAHTKSNATAKLDFDLNEGIPGDDGHQSEPTISPVVCSSAINLTGILPFTSPITTGLQPASITVAAPAKGPFVPPENLLRAKPEIGWKGSAATSAFRPAEPRKILEIPAAARDIPVSHAAGKQSRPTLGFDLNVADDQALEEDIPQSSAQTTCSESGNTRSRDGSSRSAGIELDLNRADEVADNGQFAPSASHRVEVPLLSTRSLHGVFSNAGMNSARDFDLNSGPGLDDLGTEPAPKSLPSKSTSSIQFLPQVPVRMNSAAMSNISPWLASASPCPVAIQSFLSTREQPYPIEAAPGAQRIIAPTADAGQFGGDPCRPPVVSTSPAMVFHQPAYQYPGFPFPPSVHLQTPAFSIGSATFNNSASAGVPYFPTVSPSFVGPAGALTPQHLRQYAINLAEGSSSSGRDSNRKWESQGLDLNSGPGSIDLEGKDERVPLPVRQNLIPPPHGFVEDQGRIYQMPVVGTKRKEPDGSWDSERSTYKQLSWQ

SEQ ID NO: 19860 - protein, 174 aa, Zea mays
  VARIANT 28: note = Ancestral polymorphism is S, Derived polymorphism is L
  VARIANT 45: note = Ancestral polymorphism is P, Derived polymorphism is L
  VARIANT 70: note = Ancestral polymorphism is R, Derived polymorphism is H
  VARIANT 75: note = Ancestral polymorphism is F, Derived polymorphism is L
  VARIANT 85: note = Ancestral polymorphism is T, Derived polymorphism is N
  VARIANT 86: note = Ancestral polymorphism is G, Derived polymorphism is E
  VARIANT 119: note = Ancestral polymorphism is L, Derived polymorphism is S
  VARIANT 129: note = Ancestral polymorphism is E, Derived polymorphism is D
MRRGDGSCVPWMGAATRLQLVAPCPTRSWRWQGLALGSSQSAGCPELKIALAGSVGSDPLGSFYRAKLRRANVHFLSKPVKDGATGTVIVLTTPDAQRSMLAYQGTSSTLSYDSDLASSVSKSNVVIVEGYLFELPHTIEAIKQACEDAHQNGALVAVTASDVSCIEHCYNDFR

SEQ ID NO: 19861 - protein, 235 aa, Zea mays
  VARIANT 51: note = Ancestral polymorphism is R, Derived polymorphism is C
  VARIANT 61: note = Ancestral polymorphism is P, Derived polymorphism is S
  VARIANT 147: note = Ancestral polymorphism is N, Derived polymorphism is I
  VARIANT 152..235: note = Derived polymorphism lacks residues 152 to 235
  VARIANT 162: note = Ancestral polymorphism is R, Derived polymorphism is S
  VARIANT 182: note = Ancestral polymorphism is I, Derived polymorphism is T
MVVATEEMVVYCFDTLVAYFTGERPPPPAFEDGNHPLFVTWKKAANGSEPRLRGCIGTLESRQIVSGFRDYALTSALRDRRFPPIQSKELPTLECTVSILTDYEIAEDYLDWEVGKHGLIIEFTAPDSNTKHSATYLPEVAGHEGENFLFHRCDVHLSFLQSWTHVETIDSLVRKAGYQRIITESLRKKIKVTRYQSTLYTMHYGEYVAYLKKNRGAAPSISGAPPVVNGFKPSH

SEQ ID NO: 19862 - protein, 208 aa, Zea mays
  VARIANT 185: note = Ancestral polymorphism is M, Derived polymorphism is K
MANVKRSTPVTVPAPAPAPAPLDPGATAAMAKKSASTGAAITATKSPAAASPLIVIEIPSSPDASTGGRRSTTKARKRPALWPLVLDDEIEMWTPREKRRLDEDCQILAGDPLASNIEVAPAAASDEIAVVAERGKIACRDYPHPRSACAKHPFSRTPHERYCDQALVGTAVLRGEMEMWNNKVMKGLIIIAALCSNLSETSDSLETA

SEQ ID NO: 19863 - protein, 1525 aa, Zea mays
  VARIANT 33..1525: note = Derived polymorphism lacks residues 33 to 1525
MRCAVLGVRGFEGLQTTHAGVLMIQESAEGRSGGRPSGSEQRELASKMEDKAVVRKRLVSSNNTHAKVESGTCNVCYAPCSSCLHPHIRVVDSNVECASSQTCSTRSEVKNNSLVRNEKGLCSKGENDDEFSATSGHVSDSVVARASIADDSSEVNMPSKRRRLLNENTRLPRAEYLEDSNSCVTGISAEGKLHVDKKKLSTSASSRDLTAKDYKVNSMANHSKLRNQCIDESKKGSDGRDMHPSSSGRFSPVDSSVMTKKMLRTQSSVSALSRLSPNRQAHEFGKALDNLSHQPCEKASLLKNNEQLRCGQLNPCIAGENNHGTLAGYSNRHADKDVFSLKDLDNGTLCSKDEIQEHGGIHSNDDVKKNVCGEQALDQDCSRDISSDRKLNIQHDVTDCGNSEGLIDVNVCDICGDVGREYLLATCTRCLEGAEHIYCMRVKLEKVPVGEWFCEECQLKEDQNNTSNYGISVVNVTEGKNQRTESRSKPKTLQIVVPDFDALEVTHSALTADRCDGNSKRLHLASTDTQTRQLKDTTPAAQRLDVKNKKSLSVTNRNKLQVLTSDLDTRPHNYGTSTSGVYTNKSQSSEFLLNHKKLRVSTDMQSPLSSEGLRSPPISCKRHAESMSSPKPRIVKAGTLGKQDVISRANSFKKSNKGGLSSVDNIPVRTTQAVKSSDSQTLSRSYSLGNMVNAKAPVPSPRGFLSKQLSFNSTNNGPKVKQLADGVSSKLRPAEHSPRDPRDKKSIKKIVQSGSFKHEGSDSIVAGSSKKKQTFHLSQDEKPGVLKVIKENNLTERRASFSLKKRNIPSSPRPDSCMKSGERKNDQDISRSGTSILKSSKKPGYAEKKQNNDLSRSDNGKEDVTVHPKTMEVSGKDAYVVKTSDPPVQPQCAKKDRPNDVEDDDLLISVNNVNIAPNEHAEVVPTTFAAMTYESDLQDVPRESTSDDSAPKVVCCQQKLLENTGDDSGKIVEVVQDSGDILSVTPHGLQMAHNLYPPDNKLHKPDLKKEAFADQSSALGNCLKDFVIPEQSYIWQGGFEVSGHGNSPEMFDGFQAYLSTCASSKVREVGEQLPDKIQLAEVPRHSSWPLQFNEVNPTEDNIALFFFAKDVESYERAYGKLLDNMLLGDLSLKANIGGTELLIFPSDKLPERIQRWNGLPFFWGIFYARKASSPLELPTNNCPLEQINEPVIQHDIGSPKAHQPLGIDLNECPNDYISDLSLSLGSESEKSGASLDRNIVLESKREDRSLNASEIHHEETAGTRQIIPGHPSVASCGTNLPTISTGGHDMIQDYLAAAKGSTGTPGGNKMEKTDQNETLFRFSQQLGATRSISHEIELNKHGLLPSHCHLSGSKICDDQTKSTPNSDMGPLDFDITNKRQKTYGKHSCIFGDAMTPMKCLSKIHPLPAGQDNPCDVLQHCHRGPSDPASLKKPLPDHFIHVLSSDDEDSPEPSTSLNKASSKADEGSSILCSLSLSMVATKRNLSGSDIVDDEPLSLSLGLPSVVGGRADQEMKQFLPEKPGINT

SEQ ID NO: 19864 - protein, 534 aa, Zea mays
  VARIANT 25: note = Ancestral polymorphism is E, Derived polymorphism is G
MAAAGPTTSPATAGAVEELTRLYRELPPRPAVEEVEAAAAVLASAAAEEEARLAEIDREEALARGGAPPELLDVLWEARRSSVRLRALQQRKEAAHVLELERRFRLFDDLIQRASRLLSPGGGAGARSGTGGAAVDHDEVVEVDATRNTELDAAPAEIGRGSKGGLGLEPKSVSSLRRAASAGTDTEKLGLIQVASLIESSAKKGTTELNLRGKLVDQVEWLPVSLGKLQDVTELDLSENRIMALPSTIGSLRYLTKLDLHSNQLINLPDTFGELSSLIDLDLRANQLKSLPTSFGNLTSLANLDLSSNLLKVLPDCLGKLKNLRRLIAETNELEELPYTIGSCTSLVELRLDFNQLKALPEAIGKLENLEILTLHYNRIKGLPTTIGHLTRLRELDVSFNEVETIPENICFAASLVKLNVSRNFADLRALPKSIGELEMLEELDISSNQIRVLPDSFGHLSKLRVFHADETPLEVPPKEVVKLGAQELVNYMKNMVAAREVSQNQTDKRSFWTWLRSLFGCYKKNQGLGPVPA

SEQ ID NO: 19865 - protein, 251 aa, Zea mays
  VARIANT 52: note = Ancestral polymorphism is S, Derived polymorphism is C
MREIKHGDSNCTGTALLVGIPNVGKSAIVNAIHQIGRIAAAEKGKLKHAIVSSHPGETRDIRGYKVSSYALGRMTRSAAFPDHLIASHPNIYVLDTPGVLSPRFADDGSGPRLALTVNSGKEYRKWEKLNKAGDSFSCGNTITPRGHNSKEQYASDHTQDSVVKAVRQVLFETISSFNGDLGQVDELRRLIGHQLVNLQQVFKVLTEPSENICKPIATKLVNLYRTGRLGRYTLEHVPDVRQEVVAELPTA

SEQ ID NO: 19866 - protein, 47 aa, Zea mays
  VARIANT 7: note = Ancestral polymorphism is C, Derived polymorphism is R
  VARIANT 34: note = Ancestral polymorphism is G, Derived polymorphism is R
MDEHKTCFKKTIQKMFGMSKAVAEKSAAEAKEAGVESALPLQTSVSQ

SEQ ID NO: 19867 - protein, 146 aa, Zea mays
  VARIANT 126: note = Ancestral polymorphism is T, Derived polymorphism is I
  VARIANT 116: note = Ancestral polymorphism is D, Derived polymorphism is N
  VARIANT 104: note = Ancestral polymorphism is S, Derived polymorphism is F
  VARIANT 98: note = Ancestral polymorphism is H, Derived polymorphism is Y
  VARIANT 97: note = Ancestral polymorphism is G, Derived polymorphism is E
  VARIANT 83..146: note = Derived polymorphism lacks residues 83 to 146
  VARIANT 69: note = Ancestral polymorphism is C, Derived polymorphism is W
  VARIANT 65: note = Ancestral polymorphism is E, Derived polymorphism is K
  VARIANT 61..146: note = Derived polymorphism lacks residues 61 to 146
  VARIANT 55: note = Ancestral polymorphism is S, Derived polymorphism is F
  VARIANT 54: note = Ancestral polymorphism is I, Derived polymorphism is V
  VARIANT 49: note = Ancestral polymorphism is H, Derived polymorphism is L
  VARIANT 39..146: note = Derived polymorphism lacks residues 39 to 146
  VARIANT 36: note = Ancestral polymorphism is L, Derived polymorphism is I
  VARIANT 32: note = Ancestral polymorphism is D, Derived polymorphism is N
  VARIANT 29: note = Ancestral polymorphism is I, Derived polymorphism is V
  VARIANT 13: note = Ancestral polymorphism is A, Derived polymorphism is G
MNGDMASLSTLLANRKKGHFMKGDAVIVIKGDLKNLEGWVEKVEDETVHIRPKISDLPKTLAFNEKELCKYFKPGDHVKVILGVQEGATGMVVKVEGHVLIILSDTTKEHIRVFVDHVVESSEITTGITRIGDYELHDLVLLCSKM

SEQ ID NO: 19868 - protein, 361 aa, Zea mays
  VARIANT 241..361: note = Derived polymorphism lacks residues 241 to 361
  VARIANT 181: note = Ancestral polymorphism is W, Derived polymorphism is R
  VARIANT 152: note = Ancestral polymorphism is R, Derived polymorphism is C
  VARIANT 118: note = Ancestral polymorphism is T, Derived polymorphism is I
MLASLALQRRSMPHSRSSTSFNRPPDRSDEDALFPDHQIAAMEPDPVAAGASSSPARLALHLIYSSSFFPAGFLLCEKKQVTQLAWCASSPQMTWRLVEWDFFLNLIAPVASRVPYMTAIGNHERDYVESGSVYVTPDLGGECGVAYESYFCMPAISKDKPWYSIEQGSVHFVVMSTEHKWSEMSEQYKWMNQDLSSVNRSRTPWIIFIGHRPMYSSHVGIPVNVDLTFVASVEPLLLKHQVDLVFFGHVHNYERTCVVYKNRCKGKPKKDASGIDTYDNNKYTAPVHATVRAGGFSLDKFPRIVLNKWSLSRVSEFGYARVHATRGDMLVQFVSSSTMEVLDQFRIVKPDPARRLWNKPV

SEQ ID NO: 19869 - protein, 311 aa, Zea mays
  VARIANT 29: note = Ancestral polymorphism is D, Derived polymorphism is V
  VARIANT 7: note = Ancestral polymorphism is P, Derived polymorphism is S
MGAMTLPPGFRFHPTDDELVGYYLKRKVDNLKIDLEVIPVVHLYKSEPWELPEKSLLPRRDLEWFFFCPRDRKYPNGSRTNRATSTGYWKATGKDRRIACDGGVYGLRKTLVFYRGRAPGGERTAWVMHEYRLCQDLAHGTCNFIGAYALCRVIKRHEGGLPQGESYAKGAAGSARSGQMSKVSSSSSLVSNDQLSASFTPPPTLDVGTMAGSGNAFQSPVGYGYGVTTTATATATTAGLPSSALATPLLIVPSPHDTFSIGGDGDFLPAAAESRAFARAPVRHRGNGDGRRLGAGAEMGQLRLPKHVLEW

SEQ ID NO: 19870 - protein, 424 aa, Zea mays
  VARIANT 246: note = Ancestral polymorphism is P, Derived polymorphism is L
MACDIQHEEGRRRHRIFEAERWWLLEHGTLPQTDVLADALAGKLDNSGCSLSELKRKVRSLQSQYAKAVKKGAPPSKDQDRRLFDLCKNVWPSVSNTKASANGGAGREPDEMCELYPYLVEEVRALQRPHPGLFKREFGMIDDSKACALDERTTAFTWFSGRLAKSPEYFEDSHLVEKFGHNNIVKACKWTRAKGDEEPVALQAVEFWSAICDEEIALQDEHEGSEDGNSAIHFRFIEKALPLLVPLLLETLLKQEEDQDQDDNAWNISLSGGTCPGLISRTVGDAVVPLVMPFVETNITKPDWHCRGAASFAFGSILEGPSVGKLAPLVQAGLDFLLNTMNDANSQGEGCTVGDPDLPVLMEPAVLNRTRVALDKKNMMPMLFDDYSDEDFYGLQRKYSIVARVEVKFPIGLKGMQRFFEGTL

SEQ ID NO: 19871 - protein, 439 aa, Zea mays
  VARIANT 285: note = Ancestral polymorphism is P, Derived polymorphism is A
  VARIANT 286..439: note = Derived polymorphism lacks residues 286 to 439
  VARIANT 292..439: note = Derived polymorphism lacks residues 292 to 439
  VARIANT 336: note = Ancestral polymorphism is A, Derived polymorphism is V
MDPCPFVRVLVGNLALRMPVAPPAAGAGAGVHPSMSACYCKIRLGKMPVQSVPAPLVVSDGGEQTPASGALAAAFHLSKADLEWFDGKPSLFSSRRGAGEASLKVSVYAGRKGSACGVSSGGLLGKATVPLDLKGAEAKPAVLHSGWISIGKRAGKGSPSAAELCLTVRAEPDPRFVFEFDGEPECSPQVLQVRGSMRQPMFTCKFGCRSNSDLRRPGMRRERDAASAKERKGWSVTVHDLKGSPVAMASMVTPFVSSPGTDRVSRSNLGAWLILRPAADGAWEAWARLECWRDRRGSGASDSLGYRFDLLVPGVDHAAVALADSSIPSSKGGKFAIDLTAAQPLSRGGTPGCSPRGSGDLSKWPLGNYRGFVMSAAVQGEGRCSKPTVEVGVAHVGCAEDAAAFVALAAAVDLSMDACRLFSHRLRKELNSPLLVQIV

SEQ ID NO: 19872 - protein, 336 aa, Zea mays
  VARIANT 189: note = Ancestral polymorphism is D, Derived polymorphism is V
MATNPSNGAGADVPAAPVAVRLSVAAQAAAIQPSSPRFFFSSLAGTNPASPHRRIAIAVDLSDAVSPRPRDGGCWFPVNSTAVELREATAGAETRSVSPRRRSLDPVKFSVEVPTSIIHECYQSTLQEYTKRVKVPGFRPGKTIPENVLINYVGPQHVEERALEDSVRILTQFDDMRNSFSLDNVFRYDVAVDVALEVRWLSEDKYKNLKVVVEIDEVVGAKKAAEKELQRRHKALGLLRIVADRVILSLSRVVASRHKLSTSCDSDLLCLTSSRNAQLHWPRAPMRLYRSSCRPCGGSAAQPSGPPPLQPHSFYSHIMFICRYMLVRNLSLHMLL

SEQ ID NO: 19873 - protein, 193 aa, Zea mays
  VARIANT 155: note = Ancestral polymorphism is S, Derived polymorphism is L
  VARIANT 151: note = Ancestral polymorphism is K, Derived polymorphism is M
  VARIANT 59..193: note = Derived polymorphism lacks residues 59 to 193
  VARIANT 36: note = Ancestral polymorphism is S, Derived polymorphism is Y
  VARIANT 31: note = Ancestral polymorphism is L, Derived polymorphism is H
MAAAWGQKALGALPQLVKSLRSDPVSGSARHRRLPSLRRTFSLYDQINLIDSVPEDELRFQSSVLTGTLDQVSQVWFAVCRYDDTGFKINNVKYEGSVLIVENKIMTWAPKTFSEITPESLSIFKVVHPIPEIFILGCGRHVQLVSPELRMFIRSTGMKLEAVDSRNAASTYNILNEEGRPVAAAVLPYGVTC

SEQ ID NO: 19874 - protein, 140 aa, Zea mays
  VARIANT 3: note = Ancestral polymorphism is A, Derived polymorphism is V
  VARIANT 18: note = Ancestral polymorphism is A, Derived polymorphism is T
  VARIANT 26: note = Ancestral polymorphism is R, Derived polymorphism is P
  VARIANT 50: note = Ancestral polymorphism is N, Derived polymorphism is I
  VARIANT 57: note = Ancestral polymorphism is A, Derived polymorphism is V
  VARIANT 77..140: note = Derived polymorphism lacks residues 77 to 140
  VARIANT 105: note = Ancestral polymorphism is S, Derived polymorphism is F
  VARIANT 109: note = Ancestral polymorphism is T, Derived polymorphism is I
  VARIANT 121..140: note = Derived polymorphism lacks residues 121 to 140
MAATAGGGGGGGAKAAVTEQIAQAVRSTSNLLQLMEQSSPAQIRDSMVRILDGFTFVLKVHLAKLPKNLLEKASFAKNTEHVLHQLPQVISSLDAYMDRSLQSASQIKTVTQLLSNMENTQLRYMLPSSQKKKDQKSTEP

SEQ ID NO: 19875 - protein, 499 aa, Zea mays
  VARIANT 439: note = Ancestral polymorphism is A, Derived polymorphism is T
  VARIANT 355: note = Ancestral polymorphism is E, Derived polymorphism is D
  VARIANT 303: note = Ancestral polymorphism is H, Derived polymorphism is Q
  VARIANT 277: note = Ancestral polymorphism is G, Derived polymorphism is E
MGGQHYLYMVIEGLSRTLNGSLLTTSNLSNKSADAVVTISNRPVIVQSPEPSLDTQFVHNPSGKCTSESILQNNSIPDSALVPSKENDHIVLKGDICEETLMDTKTANGSWDCSELNNDSCGKTSALCMKLNRSALNVTQATSVPDRLSSSLEKASENVAASGVKETKTFGSAVCDVDRSSEPIDRSNNNVTSNTMRHSETIVVDSVNNVGDTASNSSLATKSSSIQSDADTQTSELTPIRSPVILAKEHDNLQLAWELSSQIRNCQRLLSEGAVSERAITKDEAHPIISRLALLIYKAQDSHYDISSTIVILKNHALALEERAKAAIVQSAEFGQLAAKSFPKNLHGLTVKLIEEWLRNPKHRSRSEENQNSTRLVDNNLYHFYIFSDNVLATSVVVNSTVSNANHPQQLVYFFLRPLLHMRRNGFKNFKHKEAKAYAQENGLFFMETSAKTATNVNDVFYEIAKKLLQGQQVQNPQGGMVLNQRPPERMVSSSSCCA

SEQ ID NO: 19876 - protein, 491 aa, Zea mays
  VARIANT 389..491: note = Derived polymorphism lacks residues 389 to 491
  VARIANT 425..491: note = Derived polymorphism lacks residues 425 to 491
MESSSDRSNVSQGNHLGYARSTSMDSTGPQLAGRSSSMLSRRSSRQGSRGSISLSREMGDSILSSMRHSLQSADQLLGDIDSSVLAQLIESGRVLSPEGDVDEDTVRISEHHKVGPVPDDAIKQTSDNFASAPISSAETKDTISNVLADSSTKVEPYKLSLRLDYAAYMIHLAVFGFFGVFTRYGLQKLFGPDCLALTSDQSPLYPDLPSNMLGSFLMGWFGIIFKADIRYISDHLIVGITTGYMGSLTTFSGWNQKMVGLSSKGHWVYAIAGVVLGMFIVNESITVGAETGERLRSLILKYIREKSLIGHKYDWEHWRVNTRAKQSVLLSVMIILMSFFWILSIVLTVVKMHSLADGAVLWMGCSVAPPGVWLRWYLARLNGQGIGKQRSLKWLPTGTLVANVLAAGIMAVLAVTSKAVDTKRSTTILSGIQLGFLGCLSTVSTFAAEVYTMRRSGQIARAFVYAASTFLLSFLLGTLVYSVPVWEKHYK

SEQ ID NO: 19877 - protein, 331 aa, Zea mays
  VARIANT 194: note = Ancestral polymorphism is H, Derived polymorphism is L
MASAARNGAAAAALMVAVSVLALAAAGSAQLQYGFYKGKCNGTDVEALVQSIVRARFARENPIVAYLLRMQFHECAVNGCDGGLLIDGPGTEKTAPPNLSVKGYDVIAAVKAELERKCPGVVSCSDIQILATRDAVALAGGAAYAVRTGRRDRRRSLAPDVRLPAPEFTAAQMVAYFGGLGLSAFDAVLLLGAHTVGATRCSAIKGSRLYRYGGRAGATDPGMDPGYAFVYKNYVCPNVPSSDNNAVFLDDQWSALKLDNHYYRNLQQRRGVLACDQNLYSDGSTRWIVDLLAKDSGLFTSLFPKALVKLSEVNVVTGTQGEIRKVCNRFN

SEQ ID NO: 19878 - protein, 153 aa, Zea mays
  VARIANT 141: note = Ancestral polymorphism is G, Derived polymorphism is W
  VARIANT 137: note = Ancestral polymorphism is D, Derived polymorphism is Y
  VARIANT 135: note = Ancestral polymorphism is P, Derived polymorphism is L
  VARIANT 129: note = Ancestral polymorphism is V, Derived polymorphism is A
  VARIANT 109: note = Ancestral polymorphism is S, Derived polymorphism is L
  VARIANT 93: note = Ancestral polymorphism is P, Derived polymorphism is T
  VARIANT 70: note = Ancestral polymorphism is V, Derived polymorphism is L
  VARIANT 68..153: note = Derived polymorphism lacks residues 68 to 153
MDARTHPLQGKLQPPWTHTHPAAPAQTHSSPPHAAALPSRSPDASAALPPPRALDELMHPLATDLYSQFVATMNQLGGPQEIAIIKLIGGQIPMPKLFPTVNDVNVIGSTCPMPTITLDLKKSLKILQVSYVIDPKDTSSGQESLRPLLSTSK

SEQ ID NO: 19879 - protein, 137 aa, Zea mays
  VARIANT 40: note = Ancestral polymorphism is A, Derived polymorphism is S
MAPSLLAAVSASPFLLPGSSGISRRPLGAAPTRRAGLRVAALKYDPAKGQVAPQNDRVLVRLQQIPEKSAGGVLLPKSAVKFERYLMGEILSVGADVSEVEAGKKVLFSDINAYEVDLDTDEKHCFCRESDLLAVVE

SEQ ID NO: 19880 - protein, 332 aa, Zea mays
  VARIANT 69: note = Ancestral polymorphism is R, Derived polymorphism is C
MAVQAHYHHHHHHHHRESPFLVSGGAPEGSRLAAAMELHQAQKEATTAQQHAPPDFSHGGCGGGKKRQREADPVSRQLLSLQQQQPQAQGPKFINLAQLHKRPATGLRLDLDEGSEHVPCTSSASASCLLLSEELAAQRDQHKDEMERLIQEHAERLRRALADTRRRHYRSLVGAAEAAAARRIREKESEAWEAARRRADLEDRVARLRAEAAAWQAKELADQSTAAALHAQLQQARGKATDAEEGGNAADDAGSCFVDPDRVVEIAPPPARPCRACRRRSASVVLLPCRHLCVCAECEPAVPAAPFAAAAVAAACPVCRGAVTGTVQVFVS

SEQ ID NO: 19881 - protein, 489 aa, Zea mays
  VARIANT 32..489: note = Derived polymorphism lacks residues 32 to 489
  VARIANT 157..489: note = Derived polymorphism lacks residues 157 to 489
  VARIANT 313: note = Ancestral polymorphism is S, Derived polymorphism is F
MDAVAVLDAFSAAPWHQLRPTAWCRSTRFASQACHATAPFARDDWQAACAIHASNSTGGDGHDASSNTQPAPRVNGQKPSPALEATPTLMPDELDLVLVSNLPRPLSINDLSPAPMHTPQLRVAYQGVPGANSEATAAKAYPGCDAIPCDQFEVAFQAVELWITDRAVLPMENPLGGRIHRNYDLLLRHRLHIVGEHHGSMYGPGSYKGCQQGSKFGGSTTSWSSVGRRFGTIDLSGNQQRGNMPFCSHNGSLEFMNEQNHGPHATKPKVQGIENTSRDERSEKIVPLIDSELYNRSDFITEYKDAKFFVIKSYTEDHAHRSIKYKVWASTASGNRKLDSSYHAAKEKEEHCPIFLFFSVNGSGQFCGMADMIGSVDFDRSVDYWQQNKWSGQFPVKWHIIKDVPNNLLWHIILENNDNKPVTNSRDTHEVRLGWHDAGTYDKNIIEWPKCSGANGSLRFKVELKHGANADLVNALKLIPPSTTPEPHP

SEQ ID NO: 19882 - protein, 76 aa, Zea mays
  VARIANT 1: note = Ancestral polymorphism is M, Derived polymorphism is L
  VARIANT 8: note = Ancestral polymorphism is H, Derived polymorphism is R
  VARIANT 11: note = Ancestral polymorphism is T, Derived polymorphism is I
  VARIANT 22: note = Ancestral polymorphism is D, Derived polymorphism is Y
MLREKIFHLITLLVIIKQLSNDFFMWGNGRRMEFVRDAKILRRNFVIDILSYEVNLCCYAIHAIIQQRLINISTKE

SEQ ID NO: 19883 - protein, 323 aa, Zea mays
  VARIANT 37..323: note = Derived polymorphism lacks residues 37 to 323
  VARIANT 72..323: note = Derived polymorphism lacks residues 72 to 323
  VARIANT 123..323: note = Derived polymorphism lacks residues 123 to 323
  VARIANT 130..323: note = Derived polymorphism lacks residues 130 to 323
  VARIANT 167..323: note = Derived polymorphism lacks residues 167 to 323
  VARIANT 305..323: note = Derived polymorphism lacks residues 305 to 323
MGAEAGEPSSILSLASAFSYGVASMAMVFVNKAVLMQYVHSMTLLTLQQIATALLIHFGQVLGMSKRKDFSWITAKKLLPVSIFYNANVGFALASLKGVNIPMYIAIKRITPLAVLVAGCMRGKGKPPTQVILSVICTATGVLIAALGDFSFDLYGYCMALTSVFFQTMYLILVEKSGAEDGLSSVDLMFYNSILSLPFLFFLIIATGEFPHSLTVLSAKAASLTFGVILVISLVMGIVLNFTMFWCTIVNSALTTTIVGVLKGVGSTTLGFVLLGGVEVHALNVTGLVINTFGGVWYSYAKYKQKRKTPRKIQHDVESHAHK

SEQ ID NO: 19884 - protein, 698 aa, Zea mays
  VARIANT 476: note = Ancestral polymorphism is D, Derived polymorphism is Y
MWQRSRVLDGRGHMRFGSGRVEDEMALTRQRTVRFHDERAKATIPIHQKQHGLAASRLGLGSSGKNKVFVAGDDLWYNKIIDPSSDFILTWIYVFRVSCFIALFMDPLYFYVPEIDYRQTFHCVRKDTRLAIIVTVFRSIVDLFYVIQMMIKFRTAYINPSSNLGVFGRGDLITDPKEIAKQYLRSDFVVDLVASLPLPQIIIWSVIPAIKYSSSEHGNDMLLLVALFQYILRLYLIFSLNDKIVKITGVFAKTAWHGAAYNLLLYMIASHVLGALWYLLSVDRQIACWKNFCDETDCHTRYLYCDVKPDSMWNGTSVFSTCNAKNSTKFDFGMFQPLLANKTPNESFLKKYIYCLWWGLQNLSCYGQTLTVSTFIGETLYAILLAVVGLVLFAHLIGKVQTYLQSITARVEEWRLKQRDTEEWMGHRQLPHELRERVRRFVHYKWLATRGVDEESILSALPTDLRRDIKRHLCLYLVRRVPLFSQMDDQLLDAICERLVSSLSTEGTYIVREGDPVTEMLFIIRGKLESSTTDGGRTGFFNSITLKPGDFCGEELLGWALVPKPTVNLPLSTRTVKAVLEVEAFALQADDLRFVASQFRRLHSRKLQHTFRYYSHHWRTWAACFIQHAWRRLRRRKMAKDLSLRESFSSTGPYEGDGDDASSPEQSITLRRGAGSIIRELPKFRKPSEPDFSAEHDD

SEQ ID NO: 19885 - protein, 397 aa, Zea mays
  VARIANT 6: note = Ancestral polymorphism is R, Derived polymorphism is G
  VARIANT 119: note = Ancestral polymorphism is G, Derived polymorphism is S
  VARIANT 273: note = Ancestral polymorphism is R, Derived polymorphism is W
MDKRTRNRREEEDEELMLFLFPALYLITNGGREKRARHASILPGKERLKEILEGHEKNCLVAFCMEPRILKDIATFLREEHILRDTRGVTVEEKLGMFLFILSHNASYEDLQHEFKHSGETIHRHIQSVFHVIPTLMYRFVKPATGISVHWKISTDERFFPYFQNCIGAIDGTHVPITISAEKQAPYRNRKGTLSQNVMLVCDFDLNFTFISSGWEGSATYARVLRSELLAGFHVPEGKYYLVDGGYANTPSFLAPYHGVRYHLKEFGHGHQRPRNYKELFNHRHALLRNHIERAIGVLKKRFPILKVGTHHPIRNQVKIPAAAVLFHNIIRMHNGDEGWLNSQTSNISPETFVDLPGGDNYYSNDVVSLNSQVDNGNSVRDMIALNMWNDYSQHRS

SEQ ID NO: 19886 - protein, 398 aa, Zea mays
  VARIANT 254..398: note = Derived polymorphism lacks residues 254 to 398
  VARIANT 246: note = Ancestral polymorphism is S, Derived polymorphism is F
MMMLIDCSGCRTPLQLPHGAPCIRCAICGAVTHIAPAPPAEPNRGAVQPAPGWAPPPPPVHGRKRAVVCGISYRYSRHELKGCINDAKCMRHLLMTRFNFPDDSIIMLNEEQTDPYKIPTKHNIRMAMYWLVQGCQPGDSLVFHYSGHGSQQRNYSGDEVDGFDETLCPLDFETQGMILDDEINTALVRPLPHGVKLHALIDACHSGTALDLPYLCRMNRSGQYVWEDHRPRSGVWKGTSGGEAISFSGCDDDQTSADTSVSSRSTPQQFIAVMSMCYSLNYEASLFKGLLADHLFMQFLVYYLFDQALSKITSTGAMTFCFIQAIERGQGTTYGSILNSMRSTIRNTGDSAGVGGGAVTSLITMLLTGGSLSAGGLRQEPQLTACEPFDVYAKPFSL

SEQ ID NO: 19887 - protein, 155 aa, Zea mays
  VARIANT 78: note = Ancestral polymorphism is H, Derived polymorphism is Y
MDVLNRTGMADALREYIQRDRPFLGICLGLQLLFDSSEENGPVSGLGVIPHIGWNALQITKDTPLLQGADGQHVYFVHSYRVLPSDANRDWISSICNYGDNFISSISMGNIQAVQFHPEKSGATGLSILKEFLRPNSLGTKVIQRRPRSLVPMLP

SEQ ID NO: 19888 - protein, 126 aa, Zea mays
  VARIANT 5: note = Ancestral polymorphism is L, Derived polymorphism is Q
  VARIANT 6: note = Ancestral polymorphism is K, Derived polymorphism is M
  VARIANT 30..126: note = Derived polymorphism lacks residues 30 to 126
  VARIANT 40: note = Ancestral polymorphism is E, Derived polymorphism is D
  VARIANT 61: note = Ancestral polymorphism is K, Derived polymorphism is N
  VARIANT 86: note = Ancestral polymorphism is G, Derived polymorphism is R
MPKDLKYADSHEWVKVEGDSATVGITDYAQRALGELVYVELPEVGISVSQGKTFAALESVKAASDTYSPVSGEVVEVNEKLSDLPGLVNTSPYEKGWLIKVKLSNSGELNSLMDDDKYSKFCEGNH

SEQ ID NO: 19889 - protein, 375 aa, Zea mays
  VARIANT 271: note = Ancestral polymorphism is D, Derived polymorphism is G
  VARIANT 235: note = Ancestral polymorphism is S, Derived polymorphism is L
  VARIANT 206..375: note = Derived polymorphism lacks residues 206 to 375
  VARIANT 204: note = Ancestral polymorphism is N, Derived polymorphism is T
  VARIANT 201: note = Ancestral polymorphism is E, Derived polymorphism is K
  VARIANT 108: note = Ancestral polymorphism is A, Derived polymorphism is T
  VARIANT 107: note = Ancestral polymorphism is A, Derived polymorphism is T
  VARIANT 61: note = Ancestral polymorphism is K, Derived polymorphism is T
  VARIANT 51: note = Ancestral polymorphism is N, Derived polymorphism is I
  VARIANT 28: note = Ancestral polymorphism is Y, Derived polymorphism is H
  VARIANT 13: note = Ancestral polymorphism is R, Derived polymorphism is G
  VARIANT 11: note = Ancestral polymorphism is E, Derived polymorphism is V
MIPFNPAVAAEVRALIQGVEDSTFDPIYRELSQPWWVRFLLQVCVDEILLNIGGANNHRLKHDLVAIIFRYCVDKPYFSTNFCEALRAMPDSDGLLETLSNELELSTTERVVVGLALSDSENPDLNLEEMCLGRLDDDFDSHISKIGEQISLSDIISELGCGCTCNTTHCKEMLSLLEPLDDMGISKLLGAVVCTRIGVGEAQNTYSIFLLTFGNNQTIDSSQLTSWNIDVLVDSINEIDPFPLHAICGLLWNNIKGQLSFLKHAVALPNDTFTFAHCTRKMVFPDLGNCNQGNQAWYCLVLLEVLCQLAELGYSKPVRAIQPILGYPLINYPEVLLLGVSHINTAYNLIQHEVLSCVFPAVVKNTMHSSLMNYL

SEQ ID NO: 19890 - protein, 413 aa, Zea mays
  VARIANT 89: note = Ancestral polymorphism is H, Derived polymorphism is Y
  VARIANT 167..413: note = Derived polymorphism lacks residues 167 to 413
  VARIANT 169: note = Ancestral polymorphism is P, Derived polymorphism is L
  VARIANT 193..413: note = Derived polymorphism lacks residues 193 to 413
  VARIANT 198..413: note = Derived polymorphism lacks residues 198 to 413
  VARIANT 385..413: note = Derived polymorphism lacks residues 385 to 413
  VARIANT 386..413: note = Derived polymorphism lacks residues 386 to 413
MSRHLHRCFASTGTMFLWALFLVAMTATYLSVHSFVDSTSPRYFAASWGGLHWERQIRASASPRRRSAPGAPAGLSVLVTGAAGFVGAHCSLALRKRGDGVVGIDSFNSYYDPSLKKARRALLGSHGVFVVEGDINDGRLLAKLFDVVPFTHVLHLAAQAGVRYAMENPASYVHSNVAGLVSLLEACKDADPQPAVVWASSSSVYGLNDRVPFSEAHRTDHPASLYAATKKAGEEIAHTYNHIYGLSVTGLRFFTVYGPWGRPDMAYFSFTRNILQGKPITVYRGRDHVDLARDFTYIDDIVLGCLASLDTAGRSTGTGGKKRGPAPYRIFNLGNTSPVTVPTMVSILERYLRVKAKKSVVEMPGNGDVPYTHANISLAREQLGYKPTTSLEVGLKKFVRWYLNYYGYKYTTG

SEQ ID NO: 19891 - protein, 337 aa, Zea mays
  VARIANT 140: note = Ancestral polymorphism is V, Derived polymorphism is I
  VARIANT 108: note = Ancestral polymorphism is R, Derived polymorphism is C
  VARIANT 35: note = Ancestral polymorphism is R, Derived polymorphism is L
MAKITAAAAAVLESRSLRGARAVRLLHRIHHRFLLLLGATAPKAGRRKVARSREPKSLRAADEKQEQDVEAQDPNAAAAVSASDSASEAAVAGKYWAHRYSLFNLYDRGVCMDAEGWYSATPESIAALQAARAAPGDLVVDAFAGCGGNSIQFAARGCYVVAVEIDPRKVELAVHNARVYGVEDRIEFIVGDFFRLAPFLKADLVFLSPPWGGPSYIEAPVYTLDMLKPKDGYATFQAAQKIAPNVMMFLPRTVDVAQLEELSWMSCPPLDFETEENYVQHRCKGITAYFGRRYLRTRIREGEAQKIRRLTQRRSCEAGKLRHVCRKGNRLEDEKAI

SEQ ID NO: 19892 - protein, 286 aa, Zea mays
  VARIANT 24: note = Ancestral polymorphism is G, Derived polymorphism is V
MRQGMSSPSAAAALVLLLALLAGGQCREAQLDAADAGTGTENYTASDAAVYWGPWQRARATWYGQPNGAGPDDNGGACGFKHTNQYPFMSMGSCGNQPLFKDGKGCGSCYKIRCRKDPSCSGRTETVIITDMNYYPVSKYHFDLSGTAFGRLAKPGLNDKLRHSGIIDIEFTRVPCEFPGLKIGFHVEEYSNPVYFAVLVEYEDGDGDVVQVDLMESKTARGPPTGRWTPMRESWGSVWRMDTNHRMQPPFSIRIRNESGKTLVANNVIPANWRPNTFYRSFVQYS

SEQ ID NO: 19893 - protein, 76 aa, Zea mays
  VARIANT 34: note = Ancestral polymorphism is E, Derived polymorphism is G
  VARIANT 45: note = Ancestral polymorphism is Y, Derived polymorphism is H
  VARIANT 49..76: note = Derived polymorphism lacks residues 49 to 76
  VARIANT 50: note = Ancestral polymorphism is D, Derived polymorphism is Y
  VARIANT 51: note = Ancestral polymorphism is A, Derived polymorphism is T
  VARIANT 52..76: note = Derived polymorphism lacks residues 52 to 76
  VARIANT 60: note = Ancestral polymorphism is A, Derived polymorphism is V
  VARIANT 72: note = Ancestral polymorphism is K, Derived polymorphism is N
MKEKQDEVEKRATTNANEDDFPITTCIAIVDGMEELSDDEKVDAYDVFKDAQNRAIFMTAKDATRIKWLRKKIART

SEQ ID NO: 19894 - protein, 270 aa, Zea mays
  VARIANT 19: note = Ancestral polymorphism is L, Derived polymorphism is H
  VARIANT 30: note = Ancestral polymorphism is A, Derived polymorphism is V
  VARIANT 191: note = Ancestral polymorphism is V, Derived polymorphism is D
  VARIANT 202..270: note = Derived polymorphism lacks residues 202 to 270
MAATSSSSSSTVVALAALLFLLLVTCGSCARPASFNASDFTADPNWEAARATWYGAPTGAGPDDDGGACGFKNVNLPPFSAMTSCGNEPLFKDGKGCGSCYQIRCQNHPACSGNPETVIITDMNYYPVAKYHFDLSGTAFGAMAKPGRTDELRHAGIIDIQFKRVPCNYPGQKVTFHIEEGSNPVYLAVLVEFEDGDGDVVQVDLMEANSGSWTPMRESWGSIWRLDSGHRLAAPFSLRITNESGKTLVANQVIPANWVPNTYYRSIIQY

SEQ ID NO: 19895 - protein, 818 aa, Zea mays
  VARIANT 528..818: note = Derived polymorphism lacks residues 528 to 818
  VARIANT 461: note = Ancestral polymorphism is P, Derived polymorphism is H
  VARIANT 247..818: note = Derived polymorphism lacks residues 247 to 818
MDVAATPSRSKSKPRSSLVNPVAAPAESRMDLCTPSKPTPRRNSKSTASPAPMSPSTPYTVRRSRRLLETPTKAALEVQVKATLTPTSKGKRAAPSPKTPAQHEPKRQKRHPRKRAYYRKVVYDGGEFEVGDDVYVKRREAAESDAEDPEEEECRVCFRTGGGVMVECDACLGGFHLRCVRPPLRRVPEGDWACPYCEAERAGKVVERPRPPEGKRIVRTAKEKLLSSDLWAARIESLWREPDGTFWAKVRWYIIPEETAAGRQLHNLRRELYRTNDLADIEMETILRHCSIMCPKDFRDANDGGDDVFYCEYEYDIHWHNFKRLADIGDEPETKEDPSDEPYNASDDYNSDTDEDSEYDEVEEPTSSFSARGNQSHELAANSRKGRIYGLQKIGIRKIPEHVRCHQKTELEKAKATLLLATLPKSLPCRDKEMEEISIFVKDAICNDQCLGRCLYIHGVPGTGKTMSVLAVMRRLRSEFDSGTLRPYCFIEINGLKLASPENIYKVVYEQLSGHRVGWKKALHYLTEHFSGGTKIGKQANQPIILLIDELDLLLTRNQSVLYNILDWPTKPYSNLVVIGIANTMDLPEKLLPRISSRMGIQRLCFGPYNYRQLQEIITSRLKGIDAFEEQAIEFASRKVAAMSGDARRALEICRRAAEFADYRVKQSRQSAQNTVSANKGDGVVSMGDIEAAIQEVFQAPHIQVMKNCPKFGKVILVAIVHELYKSGLGEIMFDKVMKMTQNSPAGLKRTQEQRRRWAPALENSLVPGLCKLGESKIILCEEGTKHKLQKVQLNYPSDDVTFALKESPDLPWLSKYL

SEQ ID NO: 19896 - protein, 264 aa, Zea mays
  VARIANT 20: note = Ancestral polymorphism is V, Derived polymorphism is M
  VARIANT 23: note = Ancestral polymorphism is A, Derived polymorphism is V
MASALTSYSSKVAALAALFVVLAMHAEAGSWLPAKATWYGAPDGAGPDDNGGACGFKHTNQYPYMSMTSCGNEPLFKDGKGCGACYQIRCLNSSHDACSGRAKRVVITDMNYYPVSKYHFDLSGTAFGAMARTGLNDKLRHAGIIDIQFRRVPCNYKGLNVNFRVQVGSNPNYFAVLVQYAGKDGAVVQLDLMETNKDTGKPTGVWTPMHVSWGAVWRLDTKRPLRPPFSLRVRSDSGKTLVASNVIPADWKPMTDYPSSVQFP

SEQ ID NO: 19897 - protein, 279 aa, Zea mays
  VARIANT 7: note = Ancestral polymorphism is I, Derived polymorphism is T
  VARIANT 19: note = Ancestral polymorphism is V, Derived polymorphism is M
MAVAISIKLAALAALVVSVFATHGARAQPSYYNASAARRELYYSSTTGGSWLPARATWYGRPNGAGPDNNGGGCGYSGTNTYPFNSMTSCGNQPLFRDGKGCGACYQIKCVSKNNAACSGEPKTVIITDVNYDTKVAPYHFDLSGTAFGAMAKPGLNGKLRDAGILDIQFRRVPCDYKGLNVKFHVMGGCNPFYFAVIVYYAGSDGAVVQVDLKEANSPAWMPLYESWGAVWRIDPGHPLKAPLSLRVRSDSGKTLVAYDVIPINWRGNADYRTIAQFH

SEQ ID NO: 19898 - protein, 282 aa, Zea mays
  VARIANT 7: note = Ancestral polymorphism is F, Derived polymorphism is C
  VARIANT 8: note = Ancestral polymorphism is K, Derived polymorphism is N
MATALSCKALAVAALLSVVSVVTYGARAQQQPSHNASDSESSQDRSLLSYSSGWLPAKATWYGAPTGAGPDDNGGACGFKGTNQYPFSSMTSCGNEPIFKDGKGCGSCYQIRCLRSNHPACSGVPQTVIITDMNYYPVAKYHFDLSGTAFGAMASSGLNDRLRHAGIIDMQFRRVPCDFPGLTVTFRVQHGSNPMYLAVLIEHANMDGDVVQADIMQNNSGYWEPLHESWGAVWRIDPSRPLCGPFSVRITNESGKQLVAQNVIPANYIADVDYRSFVQYTN

SEQ ID NO: 19899 - protein, 395 aa, Zea mays
  VARIANT 364..395: note = Derived polymorphism lacks residues 364 to 395
  VARIANT 276: note = Ancestral polymorphism is P, Derived polymorphism is L
  VARIANT 8: note = Ancestral polymorphism is L, Derived polymorphism is P
MERQNAMPQEKAKKVEYARVRTLVDNVYKKDPKIQMRKEEQKAEKQRRKEAKYLTKKLQEEEATRAAEEERVRKEEESKKVAEAALHQKKVKEKEKKLLRKEKTRLCTLAAPVVADSHFGMSKEDVESTCASLDMEQLKKLCDGMDGKDAAENARMMSNALRNESSSKEEKKIEANSVECPGGAVVVLRAVPGFFRWSRCGGKEERATGLGKNMWQACGDGGDALVASLYLLGHHWEASCSLLHGALEGVNPVHPWTCDGGAIGVVPSLEAPHLRLVLVRDHAITLKKKPDSSKAFDSFLEKCKQAQSIASPLWTRDEISSSTEGARTASSKAPQPASSQTANGKAVVDPVPDEAPSVADPDAWTEAQVLALLQALKAFPKDASQRWERVAAAVP

SEQ ID NO: 19900 - protein, 341 aa, Zea mays
  VARIANT 257..341: note = Derived polymorphism lacks residues 257 to 341
  VARIANT 244: note = Ancestral polymorphism is N, Derived polymorphism is I
MRNRRWSVMQPIPSLGDHTTPIEDVDKFYNFWYNFKSWREFSDDDEYDLEQAESPEHKRWMERQNAKLHEKAKKVEYARVHTLVDNVYKKDPRIQMRKEEHKAEKQRRKEAKYLTKKLQEEEATRAAEEERIRKEEESKKAAEAAQHQKKLKEKERKLLRKEKTRLRTIAAPVVADSHFGMSKEDVESTCASLDMEQLKKLCVGMDGKDAAEKARLMSNALRNESSSKEEKKIEAMVWNVLLQILTLHEGTKSVLLQKPDSSKSFDSFLEKRKQAQSIASPLSTRDEISSSTDGAGTASSKVAQLASSQTANGKAVADPVPDEAPSVADPDAWTEALYSKL

SEQ ID NO: 19901 - protein, 615 aa, Zea mays
  VARIANT 234: note = Ancestral polymorphism is C, Derived polymorphism is R
MPPTPARPPPAVAAGEPSAMGYDQGLPPHDATWPQRSDYDPYAYARHSAAAASSYYQPPPPGTEHAAPAAAFSSWSSAVGSSNSVIVGGPGAEPLAVPALSQPTGFATSIGWSGGDVGHLPYYDPQYQTAQHPTATRNGINLPKRTGPKGSLFPALEIDDVCFVYEARYVFENIMFFIKAGVLMDSFLYYMKVGGGIGTLNGVSRGRGPSQGGGRGGSPMYHPLIWNAGITSPRGRGRGRGRGSGRGRRNKSSDRQLAIQASGGSFALQAQPETVCAPAHMVQATTSSSTRGTVVPAAWCDICHVGCNSKEILEQHKNGKRHKRSVQRMQDMARLQGTTPAIADMGAPSSSQLAEVEGPSRSVHMVPPLGSTSLSGEHKDLAPENVGASVYGVQITEVPGSSSKQNKTHHTSTVGHGVEAQVELHVAVQACQPSNEMKDGGEAPPNATGPSNAQLVEARMGVNGNNNGSKRKPTGAGRGRKKLRVSQAPQQRRPERVREQPLVCTICNAICDTRAVFDIHLVGKKHQSRLKRSQGPDVLFGPLVGHIPPNQSAAHMTGAPEPLYFGFKSMGASLVEQEAYLAGAMQHVLPVLPQAGPTIMAADYPAQPVASNRCC

SEQ ID NO: 19902 - protein, 756 aa, Zea mays
  VARIANT 72: note = Ancestral polymorphism is R, Derived polymorphism is C
MRAWEMHPLCCLAAGEWPASGAARDDRSPPPEGSGEAPAVAGVLYKWTNIGKGWRPRWFAIRGGVLAYSKIRRRVAAAPPRPASEAAGGVRLIGVARGAGERPIGFVPLKMSSFSESKSDDKRFYIITPTKTLQLRTGCAKDRATWIEALVTARSEYSFNGDLSGDQNVASFSTEKLRNRLHVEGVGEAVIKDCEQIIQSEFSQYQTQMKQRCEEYLSFIGSLPREVEVVNSVDSTVPEKSQLELFKHDCSSSGKCSEYSNTESSDDVGKQEISELSDGDDFHFYDTRQSFSEFTTTPADLRKGCVNTGNEDHKSVESLTVDEAEKYMLSHPKRRSQLPEPIEKEKGVSLWSMIKDNVGKDLTRVCLPVYFNEPLSSLQKCFEELEYSYLLDRAYECGLRGNGLMRIIYVAAFAVSGYASTDSRPCKPFNPLLGETYEADYPEKGIRFFSEKVSHHPMVMACHCEGKGWKFWGDSNLKSKFWGQSIRLDPNGVLTLEFDDGETFQWSKVTTTINNLILGRVYCHHHGTMNISGNRRYSCKLTFKEQSFLDRNPRQVQGVVNDADGSKVATLMGKWDESMHYIINNDASKTNSHGSHEGSGATLLWEKNEPPVNPTRYNLSTFAITLNELTPELKEKLPPTDSRLRPDQRHLENGEYEKANAEKLRLETRQRMFCVVVVCRQGRCRRVAGNQDGSKGTARMGHTATSEATGRQGSREHGLAAMTYLVTCLAAQSCRHPVSTLAQVYRGADIALITWV

SEQ ID NO: 19903 - protein, 296 aa, Zea mays
  VARIANT 225: note = Ancestral polymorphism is A, Derived polymorphism is T
MATAWVRSLSCRSSYAMTDAAIAPSPAKKPPPPPPLPFPCATAAAADVMDAVAYAQRARRKKMEGQRLAREPRPRPKKKPKPMANDAGAEALSTPSPAPVSSAFLTMAELPEGHSSRRVVELIFASGWGGAGSPELSPSPPPSVEALFRVRSAPRAVARFEEARAAAARARGAAARCGADGNEMMRFQCRAPGPGGVFGAGVATCRLGASASAVRTFACSGAAHASAAAAAAAVGRRAMLVCRVIAGRVCPANYPRHGQGQSSAAAAYDSVDMGDGELVVLDSRAVLPCFLIIYKV

SEQ ID NO: 19904 - protein, 253 aa, Zea mays
  VARIANT 127: note = Ancestral polymorphism is R, Derived polymorphism is W
MVRRDAAGLGYYAALDALPSCSIRAAGACDPALDVLPPVVSRAPPRHADALSGRGASRPSRPNIRGSILSECANRTDACVVVDCSGGRCAHDPVRYMRPMLRAVQVLPAAAGGDADAALHVRRHPRRLRARVLRGPAARRQYGWHLPPVRYGEFSVHMPKEAAVFGGVRIVETLEAVPEEEVRRMRQRALEMAPRVVYRRHGSTPELRQAVNDAVDLAVDGVLQRIRRRTHALEEGLPERLYAQEEDSVSVDI

SEQ ID NO: 19905 - protein, 129 aa, Zea mays
  VARIANT 75: note = Ancestral polymorphism is P, Derived polymorphism is Q
  VARIANT 78: note = Ancestral polymorphism is S, Derived polymorphism is L
  VARIANT 88: note = Ancestral polymorphism is A, Derived polymorphism is V
MAARAALLLAIGLVLAGCSRCQRDLLPAAAGPKAADANARRPPPRVVPRDALKLGVCADVLGLVKAKVGSPPYEPCCSLLDRLVDLEVVACLCTAIKANILGINLNLPIDLSLILNNCGKNCPNDFHCA

SEQ ID NO: 19906 - protein, 188 aa, Zea mays
  VARIANT 174..188: note = Derived polymorphism lacks residues 174 to 188
  VARIANT 109..188: note = Derived polymorphism lacks residues 109 to 188
  VARIANT 92..188: note = Derived polymorphism lacks residues 92 to 188
  VARIANT 75: note = Ancestral polymorphism is P, Derived polymorphism is L
MATNQMNAQCCKQIIFDILPHLSVVLCLFGSEEAHAEVGEGEFRGSAYDIAMGKQWMDRSSRFRSSALKLGMKRPEKALQDFYGHVMPNPDQASKLNWDHIAWVKSGQKYLLNNAISDKSRWSFCRRSTRHRVLKNSDISEPETLSSSKAKADITPSNNVYTSTYSYASEKPMQQDKPDEEGSPIHII

SEQ ID NO: 19907 - protein, 126 aa, Zea mays
  VARIANT 26: note = Ancestral polymorphism is G, Derived polymorphism is V
  VARIANT 46: note = Ancestral polymorphism is P, Derived polymorphism is L
  VARIANT 89: note = Ancestral polymorphism is C, Derived polymorphism is Y
  VARIANT 97: note = Ancestral polymorphism is L, Derived polymorphism is F
MAPKVALFLALSLLFAAAAHGCEPYVPGPVVPTPPVVPSHSHGRCPIDALKLKVCANVLDLVKVGLPQHEQCCPLLEGLVDLDAALCLCTAIKANVLGIHLNVPLSLNLILNNCGKICPKDFTCPN

SEQ ID NO: 19908 - protein, 129 aa, Zea mays
  VARIANT 49: note = Ancestral polymorphism is P, Derived polymorphism is L
  VARIANT 55: note = Ancestral polymorphism is L, Derived polymorphism is I
  VARIANT 77: note = Ancestral polymorphism is P, Derived polymorphism is S
  VARIANT 87: note = Ancestral polymorphism is A, Derived polymorphism is V
MAPKVALFLALGLLFAAAANGCEPYCPGPVVPTPPVVPTPSSHSHGRCPIDALKLKVCANVLGLVKVGLPQHEQCCPLLEGLVDLDVALCLCTAIKANVLGIHLNMPLSLNLILNNCGKICPEDFTCPN

SEQ ID NO: 19909 - protein, 216 aa, Zea mays
  VARIANT 107: note = Ancestral polymorphism is P, Derived polymorphism is L
  VARIANT 98: note = Ancestral polymorphism is P, Derived polymorphism is L
  VARIANT 72: note = Ancestral polymorphism is P, Derived polymorphism is L
  VARIANT 49: note = Ancestral polymorphism is P, Derived polymorphism is L
  VARIANT 41: note = Ancestral polymorphism is S, Derived polymorphism is L
MAPKVALFLALGLLFAAAAHGCEPYCPGPVVPTPPVVPTPSSHSHGRCPIDALKLKVCANVLGLVKASPMAPKVVLFLALGLLFAAAAHGCEPYYPVPVVPTPSVVLTPSSHSHGRYPIDTLKLKVCANVSGLIKVGLPQHEQCCPLLEALVDLNTALCLCTTIKANILGIHLNVPLSLNLILNTTAARFAERTSLAPTKLGIPCVLHLVIAILAN

SEQ ID NO: 19910 - protein, 126 aa, Zea mays
  VARIANT 89: note = Ancestral polymorphism is C, Derived polymorphism is Y
  VARIANT 58: note = Ancestral polymorphism is V, Derived polymorphism is M
MAPKVALFLALSLLFAAAAHGCGPYCSGPVVPTPPVVPSHSHGRCPIDALKLKVCANVLGLVKVGLPQHEQCCPLLEGLVDLDAALCLCTAIKANVLGIHLNVPLSLNLILNNCGKICPKDFTCPN

SEQ ID NO: 19911 - protein, 129 aa, Zea mays
  VARIANT 54: note = Ancestral polymorphism is K, Derived polymorphism is N
  VARIANT 43: note = Ancestral polymorphism is H, Derived polymorphism is D
MAPKVALFLALSLLFAATAHGCEPNCSGPVVPTPPVVPTPSSHSHGRCPIDALKLKVCANVLGLVKVGLPQYEQCCPLLEGLVDLDAALCLCTAIKANVLGIHLNVPLSLNLILNNCGRICPEDFTCPN

SEQ ID NO: 19912 - protein, 378 aa, Zea mays
  VARIANT 349: note = Ancestral polymorphism is R, Derived polymorphism is W
  VARIANT 335: note = Ancestral polymorphism is P, Derived polymorphism is L
  VARIANT 324: note = Ancestral polymorphism is G, Derived polymorphism is R
  VARIANT 311: note = Ancestral polymorphism is R, Derived polymorphism is I
  VARIANT 307..378: note = Derived polymorphism lacks residues 307 to 378
  VARIANT 281: note = Ancestral polymorphism is P, Derived polymorphism is L
  VARIANT 276: note = Ancestral polymorphism is L, Derived polymorphism is S
  VARIANT 261..378: note = Derived polymorphism lacks residues 261 to 378
  VARIANT 201: note = Ancestral polymorphism is W, Derived polymorphism is C
  VARIANT 194: note = Ancestral polymorphism is I, Derived polymorphism is S
  VARIANT 192: note = Ancestral polymorphism is T, Derived polymorphism is N
  VARIANT 127: note = Ancestral polymorphism is G, Derived polymorphism is R
  VARIANT 126: note = Ancestral polymorphism is T, Derived polymorphism is I
  VARIANT 124: note = Ancestral polymorphism is G, Derived polymorphism is D
MAAAPRSQITSAPGIRDPRHPPHRALLPKAQIPRALKSRQPLPAVIHCCKSRLLQAKPPVTRRHQRPPSIDPAPAPHPRASVRLSFFLTHLFQCVVHTKDVFEEVKPILRFALDGHNVCILAYDQTGMGKTYTMFVGWSFGRILISVISKTSGNNALLYRRENPLSLRCSFRSLKARNNCSSVVAPKDYCETYIQFLRDKWIVPDSDPPSPKDVDLLYQFIDKSKRLMVVTGAGMSTEFGIPDYRSPNGAYSTRFKPLSHQEPSTLDTGEVVPISLPHGCPVIVGEHHVVVLLQGKKGEDYMLTESQNFTRKQVEDPHFIWQVGYEPYFGKTVYPELERCRRTDDKKWRCSNEAILVSKYCERQMHRGHNRSRKHVKK

SEQ ID NO: 19913 - protein, 238 aa, Zea mays
  VARIANT 7: note = Ancestral polymorphism is D, Derived polymorphism is N
  VARIANT 8: note = Ancestral polymorphism is G, Derived polymorphism is E
  VARIANT 13: note = Ancestral polymorphism is Q, Derived polymorphism is R
  VARIANT 70: note = Ancestral polymorphism is S, Derived polymorphism is L
  VARIANT 91: note = Ancestral polymorphism is C, Derived polymorphism is Y
  VARIANT 117: note = Ancestral polymorphism is S, Derived polymorphism is F
  VARIANT 184: note = Ancestral polymorphism is Y, Derived polymorphism is F
  VARIANT 218: note = Ancestral polymorphism is S, Derived polymorphism is L
MVFTDYDGAAVWQADGNNFTGVQRAGLLNTGNLIIEDSGAHHCLTRLVPTTQSRSPGNYIFRFSDLPQVSDIYWPDPDQNIYQDGRNQYNCMRLGMLTDSRVLASSDFADDQALVASDVGPGVKRRLTLDPDGNLRLYSLNDSDGSWSVSMVAMTQPCNIHDLCGPNGICHYSPRPTCSCPPGYATRNPGISASVTAPVKAFSISKAHDHAIQKLIFSVEEPTQHLTCERYISSFQQG

SEQ ID NO: 19914 - protein, 118 aa, Zea mays
  VARIANT 1: note = Ancestral polymorphism is V, Derived polymorphism is M
  VARIANT 12: note = Ancestral polymorphism is V, Derived polymorphism is A
  VARIANT 15: note = Ancestral polymorphism is A, Derived polymorphism is T
  VARIANT 17: note = Ancestral polymorphism is P, Derived polymorphism is L
  VARIANT 27: note = Ancestral polymorphism is G, Derived polymorphism is S
  VARIANT 38: note = Ancestral polymorphism is C, Derived polymorphism is Y
  VARIANT 40: note = Ancestral polymorphism is H, Derived polymorphism is Q
  VARIANT 43: note = Ancestral polymorphism is L, Derived polymorphism is S
  VARIANT 50: note = Ancestral polymorphism is F, Derived polymorphism is L
  VARIANT 66: note = Ancestral polymorphism is L, Derived polymorphism is S
  VARIANT 67: note = Ancestral polymorphism is G, Derived polymorphism is D
  VARIANT 74: note = Ancestral polymorphism is A, Derived polymorphism is V
  VARIANT 84: note = Ancestral polymorphism is N, Derived polymorphism is S
  VARIANT 95: note = Ancestral polymorphism is A, Derived polymorphism is S
  VARIANT 107: note = Ancestral polymorphism is R, Derived polymorphism is W
MAIHLPAGSAHAAAAMLVVLRLIKRLSARVVVSVDHGYDHMESSFAAHLFQAFQSCVFLLDSVDASDTDVEAVARIERFLVQPSVELRVVSRHHAAAMDKQLAAPSRVVFASAGFVLM

SEQ ID NO: 19915 - protein, 507 aa, Zea mays
  VARIANT 328: note = Ancestral polymorphism is P, Derived polymorphism is L
  VARIANT 410..507: note = Derived polymorphism lacks residues 410 to 507
MGPPRGWTLPAAAVATAGVASVVATIILSAAAADVVEERLTVPMTIVAGAASAGAGKHANKLRRRRLLLLLPLPMATDTDRLSSVRMPFERERQRRLTSLYPAVCLDGSPPAYHLHGGSGAGARSWLLQFEGGGWCNDVRSCAERAGTRRGSTRLMAKAESFSGILSNRPAMNPDFYNWNRVKLRYCDGGSFMGDSAVYINSSSVLYFSGQRIWDAIVADLLRKGLARADKVLLSGCSAGGLATFFHCDGLKQRLGAAATVKCLSDAGFFLDLSDISGSNTIRQFFSSLVSLQGIQKNLNMDCLSSTSTDNAYLCFFPQFALANIRTPFFILNSAYDVYQFHHILVPPSSDPGGHWSRCKSDPGGCNATQIATLQGLRSGMLTSLRQFKSKPEAGMFINSCFAHCQSELQDTWFAPNSPSIDNKKIAEVVGDWYFERGAAVEIDCAYPCDSTCRNLIPIDKGRGSRQLGAPRRWYRTKKIWLATGVAVTVVVILLMVLIACHGFKCR

SEQ ID NO: 19916 - protein, 145 aa, Zea mays
  VARIANT 108: note = Ancestral polymorphism is E, Derived polymorphism is K
  VARIANT 85..145: note = Derived polymorphism lacks residues 85 to 145
  VARIANT 82: note = Ancestral polymorphism is R, Derived polymorphism is C
  VARIANT 63: note = Ancestral polymorphism is I, Derived polymorphism is N
  VARIANT 42: note = Ancestral polymorphism is T, Derived polymorphism is M
  VARIANT 40: note = Ancestral polymorphism is S, Derived polymorphism is L
  VARIANT 20..145: note = Derived polymorphism lacks residues 20 to 145
  VARIANT 5: note = Ancestral polymorphism is C, Derived polymorphism is Y
MSAFCFSITVVIMQPARMPQRDKSIGMSRHGEAVGIIGPSGTGKSTILKVMAGLLALDKGDVIICGKKRHGLVSDEDIEGLRIGLVFQSAAFFYSLTVRENVGFLLYENSSLPEDRIGELVKETLAAVGLKMLYNTLAIPNFKLI

SEQ ID NO: 19917 - protein, 150 aa, Zea mays
  VARIANT 6: note = Ancestral polymorphism is N, Derived polymorphism is S
  VARIANT 8: note = Ancestral polymorphism is P, Derived polymorphism is L
MVFVASKPVGNFFAFDMPLLFVHGEKFNQPIFHCNNISGFVEPVVPDNQNRALYSTHTFKILFKEGGCGTFVPLFLNLTASVRRYNEFEAQSAANMAPRVDPLQAAQTPVDDMMRHAYVDPNDPTKIYLQQPAPESQLRRRNYHGPADAN

SEQ ID NO: 19918 - protein, 269 aa, Zea mays
  VARIANT 9: note = Ancestral polymorphism is V, Derived polymorphism is M
  VARIANT 3: note = Ancestral polymorphism is S, Derived polymorphism is F
MGSLANNIMVVGVVLAALVAGGSCGPPKVPPGPNITTNYNGKWLTARATWYGQPNGAGAPDNGGACGIKNVNLPPYSGMTACGNVPIFKDGKGCGSCYEVRCKEKPECSGNPVTVYITDMNYEPIAPYHFDLSGKAFGSLAKPGLNDKIRHCGIMDVEFRRVRCKYPAGQKIVFHIEKGCNPNYLAVLVKYVADDGDIVLMEIQDKLSAEWKPMKLSWGAIWRMDTAKALKGPFSIRLTSESGKKVIAKDVIPPNWRPDAVYTSNVQFY

SEQ ID NO: 19919 - protein, 426 aa, Zea mays
  VARIANT 341: note = Ancestral polymorphism is I, Derived polymorphism is N
  VARIANT 317: note = Ancestral polymorphism is G, Derived polymorphism is E
  VARIANT 306..426: note = Derived polymorphism lacks residues 306 to 426
  VARIANT 253..426: note = Derived polymorphism lacks residues 253 to 426
  VARIANT 222: note = Ancestral polymorphism is M, Derived polymorphism is T
  VARIANT 170: note = Ancestral polymorphism is E, Derived polymorphism is A
  VARIANT 164..426: note = Derived polymorphism lacks residues 164 to 426
  VARIANT 146..426: note = Derived polymorphism lacks residues 146 to 426
  VARIANT 138..426: note = Derived polymorphism lacks residues 138 to 426
  VARIANT 80..426: note = Derived polymorphism lacks residues 80 to 426
  VARIANT 59..426: note = Derived polymorphism lacks residues 59 to 426
MMELSTLLTSVLTPYFKEEVLFSPEDLHRKNEDDEFRNFLQRIDFKLKDEEELKERMDEICNWASYRGQILTRTVRGMMYYRKALEIQCLQDMTDPAKVDRDRSIGSYQELQSDIEMAQAIADIKFTYVVSCQVYGMQKTSKDLNEKRRYQNILSLMIMNPSLRVAFIDEVEAPTRNGATKKTYYSVLVKGGEKYDEVEDATKVQMLLFSATLSDWVNKLSMRFLKVDRKTVDLVGNEKLKASASVKHLVLPCNKAARAQVIPDIIRCYSHGGRTIIFTKTKDSASELSGLIPGSRALHGDVAQAQREVILAGFCSGKFQVLVATNVAARGLDINDVQLIIQFKLCNGRSVQFDVGNVVMVTGGRNTGRVGVIKNWEKHKGIFEVIDVLLGVFLHSMSSFLLFVVQENIEWNSNLVVAKVWRLEFI

SEQ ID NO: 19920 - protein, 269 aa, Zea mays
  VARIANT 9: note = Ancestral polymorphism is V, Derived polymorphism is M
MGSLVNNIMVVGAVLAALVAGGSCGPPKVPPGPNITTNYNGKWLTARATWYGQPNGAGAPDNGGACGIKNVNLPPYSGMTACGNVPIFKDGKGCGSCYEVRCKEKPECSGNPVTVYITDMNYEPIAPYHFDLSGKAFGSLAKPGLNDKIRHCGIMDVEFRRVRCKYPAGQKIVFHIEKGCNPNYLAVLVKYVADDGDIVLMEIQDKLSAEWKPMKLSWGAIWRMDTAKALKGPFSIRLTSESGKKVIAKDVIPANWRPDAVYTSNVQFY

SEQ ID NO: 19921 - protein, 488 aa, Zea mays
  VARIANT 296: note = Ancestral polymorphism is H, Derived polymorphism is R
MPEMKAATALGSWLLPAAPAIRPTLVNLRSRGFCSHGYFPSASRISCSSELSDSDRGLAKEMESEFSDEICAENGAEEDDETEDLIWSKEEIDAISALFDRPMRQKPLKPRNPARQRALPLPLPHKTRLPVAPAPKQHVRLAARAGLSSRACFSDQVRKKPEFLLGIAREIAALPPEHDVSTVLDRWARFLRKGSLSLTIRELGHMGLPERALQTLCWAQRQKAVPLFPDDRVLASAIEVLARFERLRVESALEQCVPTASRAVLEAMASGFIRAGKVDRVRKLLELARINNRTLHPSIYVKLMLEATRTPEGYGLASALVDELGERPELELRPQDCTAVMKVCIRLRRYAAVESLFSWFRGAIGSPTVVMYTTVIHSRCRDGRHREALSLVWEMEQAGCLLDLPAYRVIVKLCVALHDPGRALRYLSRMKEAGFIPTGDMYDSLIEGYLADGRLAKCRQLIRDAESAGVKLDRRLLSRLSETGGRHP

SEQ ID NO: 19922 - protein, 315 aa, Zea mays
  VARIANT 52: note = Ancestral polymorphism is R, Derived polymorphism is C
  VARIANT 152: note = Ancestral polymorphism is M, Derived polymorphism is T
MWWFYRKGPSGFSGASTAEEVTAGVDGHLLVAVITGATSGIGLETARVLALRGVRVVMAVRNVSAGLMAKDAIVAKTPDARIDVLELDLSSIASVRRFASEFDSLKLPLNILINNAGVMTRNCTRSCDGLELHFATNHIGHFLLTNLVLENMKSTCRDTGTEGRIVNVTSAGHVMTYPEGIRFETIRDPSGLNDFIAYGQSKLANILHTNELSRIFKEEGVNISANSVHPGLIATNLFRAFGRTIIAAFFNTVGRIVRRSVEQGAATTCYVAVHPQVKGLSGKYFANCNIASPSSQASDAELAKKLWEFSLQTVS

SEQ ID NO: 19923 - protein, 217 aa, Zea mays
  VARIANT 70: note = Ancestral polymorphism is C, Derived polymorphism is Y
MVMEAVTAASRAEVDTSRPFQSVREAVKVFGERRHAGRSGSSNGSSASSSVKLGASDPAPASPASVMLEYLKKLEDDLAEAKGEVVELRQRQAQMEVAVSSLSEQFSKGLAVYSSLSKGKEVAAAVGEGDSICGGHGRVRSHRWDESRAEEWVASLEYLPRLSEALAIKMVEDDLGHRKERKVKNKAGSRAKKHKSGIALRLIGGMFCSKKARSSRW

SEQ ID NO: 19924 - protein, 1196 aa, Zea mays
  VARIANT 16..1196: note = Derived polymorphism lacks residues 16 to 1196
MSRVNRHRPSGRLGERVEFNFCSLCAVQVPVVSDRLLLSIISVDTGKTIARSSKAAARNGICQWPDSILESIWFSRDEVSKEYEDCRCRIVVSMGSTRGAILGEVFLNLNNYLSSDGSTAISLPLKKCNSGTILQLKIQCLGTKSKSSPRNDDMDNKSDGSNSLITRNAHFSSRNDLGGFHQDEVGIRDSSFSPSQRNDSDGGLYIESSQTSGQNMLQESIDESSLSGFNHLSSGASGSSKDLLDAAEETIEELLIEAQMWESHYQKLKIDLEKLQKESDEKSKNQTEILLELSASQAEQESLRQEIEELKLSLKVATERQTVGGISKSGDAIDVQFELKDEVHFLRESNENLTMQLKKSQDANIELVSILQELEETIEAQRTTISNFTQMSNMIDQDIPTNALSAQEDAEWERKMSLKEDEIIALREKLDRVLSIENPGGVGSDAIYLELEKENDFLKVKMQDLENDCSELTEENLELIHKLKEVSGVEEQDSCLSDIEVMLNATGLSGTSKSRAKYLERKCADLEQKMLNFQSESRELEEKLKKSHEDLKGQTLELSELRENLSRFRAMELERGEINFSRGYQLRSEELGDIETELKLLKSTVQLKEKEIEGLQHSKLEMETFIDSVLGPKIHELEIYKVELELHISRLEDEKIELLESISGMEVELTNLTSEYESCIVQMDDSRTMIIDLKDKVERNQMELEAQKVELKKKQLEFQKIFLEAQDDSEALRRLNAKLQAKVHNLTEEYNSLQELTDDLKKEKLELHSFAKQLEQKLEHSKRRTTDFCTTVDLLEVKLSSIQKDISLKEQSFLLELDNIFHEHKDHEEKINRAHFLLNKIDKEKAIEIENLEREVISLTAQLSSTHGEQASSMVDTIREASILRADKAKLQANLHDVNEQLRHYESLLEDIHKESKRKIKSLTDSLNVSKQNEEMLKIDAEAVRRLMEAAKSNEENLRITSNELELKYKSSDYEKQQIMEENYGLKIQVRKIAGVQDELLEVQSSLDEAQFEKERLEGILRLISEECDELKVQNAMLTDKVSMMQDTSNNIIEEKQTKTSMQTKMSTINEGNNDLATDNRGCCLVNEEPDLQVKVQSLESGLAEVLEKNSMYMTQVKRGSVIHIRKKRTHLPLGKHVVKTARGIQILEVTIARIEQAQQEPQVFCSLRNKSDNEYFENLGCPGRLELPILYDYVG

SEQ ID NO: 19925 - protein, 141 aa, Zea mays
  VARIANT 63: note = Ancestral polymorphism is V, Derived polymorphism is A
  VARIANT 25..141: note = Derived polymorphism lacks residues 25 to 141
  VARIANT 16: note = Ancestral polymorphism is T, Derived polymorphism is A
MMTTRVNSRMCFPAPTRFARVYGMESISEVVVEGLSRVKRCTDEGRVLMSLDLQVLNFQFNYVTYLEVKMARHSDSFDVLSVLVPIKQAYYLPETEYVHWARSHPEYSKSQVVGLVNLVATMKGWKRKTRLETVEKIEAGP

SEQ ID NO: 19926 - protein, 69 aa, Zea mays
  VARIANT 43: note = Ancestral polymorphism is N, Derived polymorphism is S
  VARIANT 13: note = Ancestral polymorphism is T, Derived polymorphism is P
  VARIANT 3..69: note = Derived polymorphism lacks residues 3 to 69
MSSTFGQMDVVPTAPPSSMFISYGLKERCAAAETLSLVARVLNRSKAHLHSVLPKNNSSVVEDFFRTLI

SEQ ID NO: 19927 - protein, 248 aa, Zea mays
  VARIANT 198..248: note = Ancestral polymorphism lacks residues 198 to 248
  VARIANT 191: note = Ancestral polymorphism is A, Derived polymorphism is T
  VARIANT 180: note = Ancestral polymorphism is L, Derived polymorphism is P
  VARIANT 164: note = Ancestral polymorphism is S, Derived polymorphism is Y
  VARIANT 153: note = Ancestral polymorphism is L, Derived polymorphism is F
  VARIANT 43: note = Ancestral polymorphism is K, Derived polymorphism is N
MAARVPGSLLALLLLILATASPTGALRFDLRSGHTKCISDDIKVGAMAVGKYQVMAPDGVASSSSSPQQLPDSHRISLRVTSPYGNSLHYAENVHSGNFAFTASEAGDYLACFWAPDHRPPAIVAFEFDWRSGVSARDWSAVAKKGQVQMMELELRKLEGNIKSIHDEMFYLRERHALCLKKTQNTLFCFTEFITCHRSYAVLSFFQGSRDAGTEQENKLKDGLAWFPLARHLPISGGLSVMAPEELL

SEQ ID NO: 19928 - protein, 336 aa, Zea mays
  VARIANT 133..336: note = Derived polymorphism lacks residues 133 to 336
  VARIANT 149..336: note = Derived polymorphism lacks residues 149 to 336
MRPGPPPRPPPTPASPIRLSPVDIPTVAPLLASPSPVSAASTGVASPTVAFPIRASLAVIPTAAPLSASPLLRLASASSIVDASGSSPASATPASPIRLSPVDIPTVAPLLASPSWRLARHLPPSTRPGPPLRPPPTPEPAFRPRRLGGTLLASRSEEYMLLFRLPPDKNNPDAKGLYGVSFPYYDELSMVYSKDMATGEGAEDMTDAVKNLEEELVCVNANDEEVGEDMTFVETPRRYVDSTSSSSKKRKKEWKGMKTASSDPLLDVFNEVSGDLKVATMSIGKMAQAMDREASNQEKARDEDPQQKLREKAINEMKQQGERERGQSEGASLAVE

SEQ ID NO: 19929 - protein, 509 aa, Zea mays
  VARIANT 365: note = Ancestral polymorphism is A, Derived polymorphism is T
MATVSLTPQAVFSTESGGALASATILRFPPNFVRQLSTKARRNCSNIGVAQIVAAAWSDCPAARPHLGGGGRRARGVASSHAAAASAAAAASAAAEVSAIPNAKVAQPSAVVLAERNLLGSDASLAVHAGERLGRRIATDAITTPVVNTSAYWFNNSQELIDFKEGRHASFEYGRYGNPTTEALEKKMSALEKAESTVFVASGMYAAVAMLSALVPAGGHIVTTTDCYRKTRIYMETELPKRGISMTVIRPADMDALQNALDNNNVSLFFTETPTNPFLRCIDIEHVSNMCHSKGALLCIDSTFASPINQKALTLGADLVIHSATKYIAGHNDVIGGCVSGRDELVSKVRIYHHVVGGVLNPNAAYLILRGMKTLHLRVQCQNNTALRMAQFLEEHLKIARVYYPGLPSHPEHHIAKSQMTGFGGVVSFEVAGDFDATRKFIDSVKIPYHAPSFGGCESIIDQPAIMSYWDSKEQRDIYGIKDNLIRFSIGVEDFEDLKNDLVQALEKI

SEQ ID NO: 19930 - protein, 108 aa, Zea mays
  VARIANT 61: note = Ancestral polymorphism is G, Derived polymorphism is D
  VARIANT 37: note = Ancestral polymorphism is R, Derived polymorphism is K
  VARIANT 32: note = Ancestral polymorphism is P, Derived polymorphism is L
MYLRPVVASHSSRRCASESISSSAASIPKQWPPLPCRTSSSRRSGTAAHALGSKIGLVVAGIVLSLLDYTGHGWYESWEQVMKDLVGLNRSYYMDSQPSSSHEWHHFE

SEQ ID NO: 19931 - protein, 576 aa, Zea mays
  VARIANT 325: note = Ancestral polymorphism is A, Derived polymorphism is D
  VARIANT 306: note = Ancestral polymorphism is A, Derived polymorphism is E
  VARIANT 65: note = Ancestral polymorphism is T, Derived polymorphism is I
  VARIANT 41: note = Ancestral polymorphism is S, Derived polymorphism is F
MADLVLGLAMSAVEGTLTAAKSAIEEKKLEKNIQRDLMLISDEFEMMHSFLNVSKERGSDEMVRTLVRQVRNMALDVEDCIVLVDMKFHRWWSPLLGWFPSCCSKLAAPPPMDLIDDEAVTAIELLKSRVEAMGQRNERYMQIGDCGAPKLSEKTHQQTGADATAGKTCPARLTGRLSEYTYPTTRPQSTQGALIEFVKEVMSNQRYLVFLENLTSMDDWEAVRELLPDGHNSSCIVVHTTTLNLAKSCVVAHHQELEPQQFSTDRSVRIFYEYCESMDGNNAEMALKTKAAKQWIHRFKFVGRQEDIWSLAGISRMVQSVYGVDGVGKSYIVKHVYYKQGLGRLEDFDDNFMGLLETHPAFGSLRGLFDWVHSYFNSCPDWLKPCIFYLSIFPLDHKIRRRRLVGRWMAEGYSRDTKERTAEDNGEEFIVHLRKLNTNELAAHGTTPHLTIGETWDRDRIVYESTGLGRLRSLTVFGRWKPFFVSDKMSVLRVLDLEDASSDSVRNADLEQMVKLLPRLKFLSLRGCKEITRLPDSLGGLRQLQTLDIRHTSVLALPRSVTSLLSTEATAYSCRH

SEQ ID NO: 19932 - protein, 113 aa, Zea mays
  VARIANT 32: note = Ancestral polymorphism is R, Derived polymorphism is L
  VARIANT 51: note = Ancestral polymorphism is C, Derived polymorphism is Y
MYCDRKFYTSQALGGNQNQNAHNYERTLAKRRREIATAVTRTHEDRLGRRYRHEDRLRWACQRRCWRWPCQREAAGSAASRSGAARTIVSPAAARHEEHVVGVRRRAPPTSWT

SEQ ID NO: 19933 - protein, 171 aa, Zea mays
  VARIANT 134..171: note = Derived polymorphism lacks residues 134 to 171
  VARIANT 103..171: note = Derived polymorphism lacks residues 103 to 171
  VARIANT 85..171: note = Derived polymorphism lacks residues 85 to 171
  VARIANT 67..171: note = Derived polymorphism lacks residues 67 to 171
  VARIANT 55: note = Ancestral polymorphism is G, Derived polymorphism is S
  VARIANT 54: note = Ancestral polymorphism is R, Derived polymorphism is C
  VARIANT 52..171: note = Derived polymorphism lacks residues 52 to 171
  VARIANT 47..171: note = Derived polymorphism lacks residues 47 to 171
  VARIANT 44: note = Ancestral polymorphism is D, Derived polymorphism is Y
  VARIANT 15: note = Ancestral polymorphism is S, Derived polymorphism is L
  VARIANT 12: note = Ancestral polymorphism is A, Derived polymorphism is T
  VARIANT 11: note = Ancestral polymorphism is A, Derived polymorphism is T
MLQNSLATVIAALLSAANSPFLGCTALSPLMHLFDLTGLRSALDCRRSATMGTRGVALLLLTVVLLQALLPASSEGLVRVALKKQPVDQNGRVATCLSVEERQRLLLRGANALGSGGEDDSDVIALKNYMNAQYFGEIGVGSPQHKFTVIFDTGSSNLWVPSSKCYFLIAC

SEQ ID NO: 19934 - protein, 211 aa, Zea mays
  VARIANT 137: note = Ancestral polymorphism is A, Derived polymorphism is D
MSSGGGGGQQFRYTQTPSKVLHLRNLPWECAEEELVELCKPFGRIVNTKSGVGANHNQAFVEFTDVNQAISMVSYFASSSEPAQIRGKTVYIQYSNRQEIINNKSPGETAGNVLLVTIEGVQSSDVTIDVIHMVFSAFGYVHKIATFEKAAGFQALIQYTDAATASAAKESLDGRSIPSYLLPEHVTSCCLRISFSAHKDLNIKFQSNRSR

SEQ ID NO: 19935 - protein, 78 aa, Zea mays
  VARIANT 55: note = Ancestral polymorphism is P, Derived polymorphism is L
MYSSPSQYAASGGFPNTPSTAPPHYAASGGFPNTPLPALPGAPTQQLHASQQMLPQHGNQSGGASGTSQPAPPASYYR

SEQ ID NO: 19936 - protein, 147 aa, Zea mays
  VARIANT 130: note = Ancestral polymorphism is R, Derived polymorphism is C
  VARIANT 117: note = Ancestral polymorphism is E, Derived polymorphism is K
  VARIANT 76: note = Ancestral polymorphism is P, Derived polymorphism is S
  VARIANT 56: note = Ancestral polymorphism is P, Derived polymorphism is S
MASSQGEPVPPWLKFLPLAPEFRPTVAEFADPIAYLLKIEPAAAPFGICKIVPPLSPPPKRTTLGNLSRSFVALHPDDPTPTFPTRHQQLGICPRGPCPALKPVWLSPHRYTLPKFEAKVGASRKALLARLNVPASKQRRRMDHHEV

SEQ ID NO: 19937 - protein, 155 aa, Zea mays
  VARIANT 50: note = Ancestral polymorphism is K, Derived polymorphism is T
MDVNDVIKDEDLLAQKNYWGSHVQNNGFHSFNSGHNIQQLVSTMVPRYPKHSNFRSRRLSARELNMLKRKAKSNAKDHTKAVSEDDEVTLKGSVPSNGASSEQVGPQNGVFDTAVEEDNLEYNENGRWPFQQFVDQLIHDMFDPKCRRMNKKRTG

SEQ ID NO: 19938 - protein, 139 aa, Zea mays
  VARIANT 103: note = Ancestral polymorphism is T, Derived polymorphism is M
  VARIANT 91: note = Ancestral polymorphism is G, Derived polymorphism is D
  VARIANT 46: note = Ancestral polymorphism is R, Derived polymorphism is Q
  VARIANT 20: note = Ancestral polymorphism is V, Derived polymorphism is M
  VARIANT 1: note = Ancestral polymorphism is M, Derived polymorphism is V
MINMVKVRHNNVVPTMALGVQQLKKELGRSRKVPFEFDEIHEFLDRFYMSRIGIHMLIERYMNSDKDVPPVRIIVADGEVDVTIKVSDEGGGIPRSGLPRIFTYLYSTAKNPPELDRPNTEGVTMEYHICWREWPSRAQ

SEQ ID NO: 19939 - protein, 624 aa, Zea mays
  VARIANT 76..624: note = Derived polymorphism lacks residues 76 to 624
MLLLLLPPLSWRHAACAACCCALALAAWLMQYNHQSQHCPVCRYSTTTPRPRRVPKHNKGARDGTTCLRLLIEGSETLTGCGMARNLTENRTRNTLIVIVVFGLCSFFYLLGAWQKSGSGGGDRIQNWVNEQTKCAQLPNLSFETHHSASNLPNDTGSSKIEPFKPCDEQYTDYTPCEEQKRAMTFPRDNMIYRERHCPPDKEKLYCLIPAPKGYVAPFRWPKGRDFVPYANVPHKSLTVEKAIQNWVHYEGNVFRFPGGGTQFPQGADKYIEQLASVIPIAEGKVRTALDTGCGVHGMYMMEVDRVLRPGGFWVLSGPPIGWKIHYKGWQRSKEDLRNEQRKIEHFAQLLCWKKVSEKDGIAIWTKRLNDKSCSMKQDNPNGGKCDLTSDSDVWYKKMEVCMTPLPEVNSVDEVAGGQLEPFPKRLYAVPPRITDGSVPGFSVESYEEDNNLWRKHVKAYKKINNLLDTGRYRNIMDMNAGLGSFAAALESPKVWVMNVIPTIANTSTLGVIYERGLIGMYHDWCEGFSTYPRTYDLIHSNDIFSLYQNKCQFEDILLEMDRILRPEGAIIIRDKVDVLVKVEKIANAMRWKTRLADHEGGPHVPEKILFAVKQYWTAEKTSS

SEQ ID NO: 19940 - protein, 396 aa, Zea mays
  VARIANT 204: note = Ancestral polymorphism is T, Derived polymorphism is I
MHSLRCALRYPIPSTAASLSTSGLRRLSSHHRTPPPLRSATTGEDEWNDAWETAWLPGDSPASSPAPAAPWESPASASESAIPVISAEVDPDTKAFVADMDERWAERRIASRRGQQQRASRAAEGGEGGVVARKKAQADDYRTRKQRVHAALWVKEIEKMEEARLGGGGGGADDIDRLLDSCSEEVMLNPAPLSQWKGFSPVTTVLDMSSRLKKMKGRVLCSGEILPGSLKKEIVLVSTTVDGLLLLPHTSFIQILIFMAYLERIFDSGNTDFGDSKIPNTTEIKTKPDGWETTSRGQDGNIWDISQREDDILIQEFERRIAFSKQQIASFIKTHIFSRRRPIDGWKYMIEEIGPNARKGKGSVQRLPSVSDPATQPYREETPAIASSSSFRGNRP

SEQ ID NO: 19941 - protein, 176 aa, Zea mays
  VARIANT 64..176: note = Derived polymorphism lacks residues 64 to 176
MSRHPITKWAQRSDRVFLTIELPDAQDVKLNLKPEGHFNFSAKGSDDLRYEFDIELFDAVNVEESKAAIAPRTICYLIKKAKSGWWPRLLKQEGKPPVFLKVDWDKWQDEDDEDAGFNDFGGMDFSKLDIGGADDDDIGDDEDDVVESANKDEEGGKTEESKEEEAAPAAAEEVKP

SEQ ID NO: 19942 - protein, 366 aa, Zea mays
  VARIANT 100: note = Ancestral polymorphism is A, Derived polymorphism is D
MALSTQDLLEAHVELWHQSLCYAKSLALAVALDLRIPDAIHHHGGSATLPQILAETAAHPSKLRALRRLMRVLTVSGTFSVEQQPPAGGDDSTVDAPDEAVYRLTAASRFLVSDEVSSSTLAPFVSLALHPIAVSPHTMGICAWFRQEQREPSPYGLAFQQTFPTIWEHADDVNALLNKGMVADSRFLMPIMLRECGEVFRGIESLVDVGGGHGGATAAIAAAFPHLKCSVLDLPHVVAGAPSDVNVQFVAGNMFQSIPPATAVFLKTTLHDWGDDECVKILKNCRQAISPRDAGGKVIILDMVVGYGQPNITHLETQVMFDLYIMTVNGAERDEQEWKKIFIEAGFKDYKILPILGALSVIEVYP

SEQ ID NO: 19943 - protein, 362 aa, Zea mays
  VARIANT 335: note = Ancestral polymorphism is K, Derived polymorphism is N
  VARIANT 54: note = Ancestral polymorphism is Q, Derived polymorphism is H
  VARIANT 9: note = Ancestral polymorphism is Q, Derived polymorphism is H
  VARIANT 5: note = Ancestral polymorphism is E, Derived polymorphism is G
MAFTEESSQDLLQAHDELWHQSVSYLKSLALTVALDLRIPDAIHHHGGGATLLQILDKTALHQSKLRALRRLMRVLTVSGTFSVVQQPPCGDDDSTVYRLTAASRFLVSEEVSSATLAPFMSVVLHPISQSSHARGICAWFRQEHHDPSAFGLAFGQAPTIWEHADDTNAILNKGLAAQSRFLVPVMLRECGEAVFRGIDSLVDVGGGHGGAATAIAAAFPHLKCSVLDLPHVVAGAPSDGNVQFVAGDMFQSIPPATAVFLKTALHDWGDDECVKILKNCRQAISPCDEGGKVIIMDMVVGYDESNTKRLEVQILFDLFIMMVNGAERDEQEWKKIFIQAGFKDYKILPVVGSLSVIEVYP

SEQ ID NO: 19944 - protein, 330 aa, Zea mays
  VARIANT 226: note = Ancestral polymorphism is S, Derived polymorphism is F
MKKVLIVLGRQRSFPPFGSKRDDSLSCPGFYRCLNSVDWMNGPVRPNFLDFQGVDFEATFGVRRAYSVRDIQDYSNPFDLFESLFEGFGEMGGMGGGRAARNRPMQGDDESYNLVLNFKEAVFGVEKEIEITRLEGCNTCDGSGAKPGTKATTCKTCGAQGQVVSSTRTLLGIFQQVSTCNTCGATGEFSTPCNTCGGDGRVRRTKRISLKVPAGVDSGSRLRVWFEGNADGTNILYTCKVSYIDAILGTTVKIPTVDGTVDLKIPSGTQPGTALVMSKKGVPLLGKSIAHGDQLVRVQVEIPKRLSSDEKKLFEELANLNKAQTTNSRR

SEQ ID NO: 19945 - protein, 159 aa, Zea mays
  VARIANT 22: note = Ancestral polymorphism is P, Derived polymorphism is L
  VARIANT 34: note = Ancestral polymorphism is A, Derived polymorphism is V
  VARIANT 54: note = Ancestral polymorphism is G, Derived polymorphism is E
  VARIANT 67: note = Ancestral polymorphism is D, Derived polymorphism is N
  VARIANT 135: note = Ancestral polymorphism is R, Derived polymorphism is Q
MLVTPAVSSQGMAYNLSRDHKPELEAERERIQSAGSFILMGHVNGNLNLSRAIGDMKFKQNKFLPPDKQILTANPDINIVELCDDDEFIVLACDGIWDCMSSQQLVDFIREHIDTVSTKQFNIICPFENCKHHLRIAFGLSLAIAHADVVLAICFLETE

SEQ ID NO: 19946 - protein, 274 aa, Zea mays
  VARIANT 112..274: note = Derived polymorphism lacks residues 112 to 274
  VARIANT 119..274: note = Derived polymorphism lacks residues 119 to 274
MERAAPVRSSHTSTAGLLAWPHPDGAGSLPARRPNQPTEEFRNVVFGGQLTEGADGLNKTKRKTGSSPKGKETTGTGISKAESAVATASRDRQASQITFSQDGTVPTRKATSVAGVARQRELSHTVESEGDSKMKRQVSSTKSKELSGHDIFADHEDPKPNRSRRSDYGSSAAQSPVKNANVSSFSFGEADIDSTVKTAKKKGSSNLSTDLNGKTMPKKDSASAEKQPPNRARPKGMSGSSNFADGKASTSTTGDHEGRRTRQPPGGDSSILLG

SEQ ID NO: 19947 - protein, 86 aa, Zea mays
  VARIANT 37: note = Ancestral polymorphism is G, Derived polymorphism is W
  VARIANT 21: note = Ancestral polymorphism is P, Derived polymorphism is L
MISQAISTDGRSVMVNSSPPPSRDQASPRGPGVMPTGLRTGQEGLVFVTYGSTEEPENALSNLNGAMSSKSLFFLPLATRVIAFGN

SEQ ID NO: 19948 - protein, 787 aa, Zea mays
  VARIANT 478..787: note = Derived polymorphism lacks residues 478 to 787
MSPSRLVLPPPAGDPGGGLRRSYLRLVALSSTPRHLDQLLAVSLASGHYALDPAPATALLLRYASLRAPPSHLLRLFRAFPCPDRFLRNALLRSLPSLRPHLLFPSPDSFSFAFAATSLSSSCSSRGNDAAAARTLHGLSVAAGYAADTFVASALAKLYFKLSRGDDARKVFDTVPSPDTILWNTLLAGLPGSEALEAFVRMVDAGRVRPDSTTLASSLRAAAEASHMAMGRCVHGYGVKCGLAEHEHVVTGLMSLYSKCGDMDSAQFLFDRMDNPDLVAYNALISGYSVNGMVESSVELFKELTASGWRPNSSTLVAVIPVYSPFGHELLARCLHAFVVKARLDADALVSTALTTLYCRLNDMESARSIFDAMLEKTMESWNAMISGYAQNGLTEMAVALFQLMQELNVQPNPITISSTLSACAHLGALSLGKWVHRIISKEKLELNVYVMTALIDMYAKCGSIAEARSIFDRMDNKNVVSWNAMISGYGLHGQGAEALKLYKDMLDARILPTSSTFLSVIYACSHGGLVDEGQKVFRVMTNEYRITPGIEHCTCMVDLLGRAGKLNEALELISEFPQSAIGPGVWGALLGACMVHKNSDLAKLASQKLFELDSENAGYYVLLSNLYTSKKHYSEAAVVRQEAKTRKLVKTPGCTLIEIGDRPHVFMAGDHLHPQSEAIYSYLERLTAKMIEAGYQPVTEAALYDVEEEEKEHMVKVHSEKLAIAFGLLSTEPGTEIRIIKNLRVCLDCHNATKFISKVTQRLIVVRDASRFHHFRDGVCSCGDYW

SEQ ID NO: 19949 - protein, 180 aa, Zea mays
  VARIANT 35: note = Ancestral polymorphism is G, Derived polymorphism is V
MEAVVATTTTRVSFPLLPTAGRPLLPPVLARPRRGFASVSATSTSGAGGGGGRSSAGGCGGDGGGDDSGAGAAAAAAAVAALGESEQQEDGDSDAIVLHVGGMTCGGCADKVKRILESQPEVAAATVDVEKATAIVWTTPEAKATKDWQKQLAEKLANHLTSCGFQSHLQDEGEAEQTDA

SEQ ID NO: 19950 - protein, 388 aa, Zea mays
  VARIANT 325..388: note = Derived polymorphism lacks residues 325 to 388
MGGGDDRRAAALQRSSSPWSVGERWRAHAGMVLVMLAYSGYHVLAKSVLNVGMNQVVFCVYRDLLALLVVAPVAFLRERRVRPPVTPQLLASFALLGFTGLYGNPLLCLVGLRYTNASYAAAFQPSIPVLTFLLAAIVGVEAISVFTKDGILKVTGTAVCVSGAILMALYRGPSLIALLRSMPTAWTSAPYHPATPDWFTPAVPVLEQGVEAWQLGVLCLIGNCLLVAVYLVVQAPVMIKYPASLSVTAYSYFFATTFMVLTGVCATSGLHEWALTKAEVIAVLYAGIVASCLSYSIMTWANKVLGPSLVALYNPLQPAFSTALSTVFLGDPVYLGSVIGGVSIIAGLYLVIWARYNQGQRAPTDGCLDPLIIVDNPRIHKTQESPFV

SEQ ID NO: 19951 - protein, 716 aa, Zea mays
  VARIANT 12..716: note = Ancestral polymorphism lacks residues 12 to 716
MGPREPHTAICYTDGPKGPKRNIANQLRNYLAHALFVSAAATRRRRRRRALCVGNLARALSAGDLLRLLPSCGTLLSLRVLHARLLTHPQGLLLGSLRARTKLLSCYAALGDLASARMVFDGTPRPDAYSYGAMLWCLVQTERHADAVALHHDMRRRRPCPEAQDDFVLSLALKACIRSAEYSYGRSLHCDAIKVGGADGFVMNSLVDMYAKAEDLECARKVFERIPDRNVVSWTSMISGCVQNGFASDGLLLFNKMRQDNVPPSEYTIATVITACSALFGLHQGRWMHGSVIKQGLMSNSFISAALLDMYVKCGELDHARCVFDELSYIDLVLWTTMIVGYTQNGNPLDALRLFLDKRFANIAPNSVTTATVLSASAQLRDLSLGKSIHGLAVKLGLVEYNVVGNALVDMYAKCQAVSEADRIFGRISNKDVVAWNSMISGYAENNMGDDALMLFKQMSLQGSSPDAISVVNALSASVCLGDLLIGKSIHGYAVKHAFVSNIYVDTALLNLYNKCGDLLSARRVFDEMNDRNSVTWCAMIGGYGMQGDSAGSIHLFGEMLKDGVYPNDIAFTSILSTCSHSGMVTAGKRYFDSMAQHFNITPSMKHYACMVDVLARAGNLEDALEFIDNMPMQADTSVWGAFLHGCELHSRLQFAEEAIKRMMVLHPERPDLYVLISNLYTSNGMWDKSLAIRRWMQEKGLVKLPGCSSVGHENG

SEQ ID NO: 19952 - protein, 1098 aa, Zea mays
  VARIANT 450..1098: note = Derived polymorphism lacks residues 450 to 1098
MADTRKFVLPGQPPDISQILQEAQNRWLRPTEICEILSNYKLFSIAAEPPNMPRSGSLFLFDRKVLRYFRKDGHNWRKKKDGKTVKEAHEKLKAGSIDVLHCYYAHGEENENFQRRTYWLLEEDFTHIVLVHYLEVKVHSFHSRLTFSLIFPLFVYFLVGYGLQLPFHPILGFTSRLGSSFAFCGDHFATADNTPHSLQGCKQSFNRVKEELMQLSNVDSPSCSNSITSQNQMGPQNMEAAESPISGQISEYEDTESADNCRASSRYHPLAEMQQLVDGVITENMLYPSASTVGSRQGKSYHGEMLPITDNLDNRSFSNHDIARMLDGANIGLSDVSSTLFDSVPFNEPFTNYSAGFTEPTLHSSFACLEANDLDDSSCLQTFTSEALYTNHLNQKEADALGFTGILASEVNRDRYNDGSIKHSLLKQSSLDLLTIEAPGLKKNDSFSRWMSKELEEVVDLGIKSTSDAFWSSIETVKVPDGSNVLTNEQLDAYVVNPSLSQDQLFSILDVSPSCAYIGTNTKVSVTGTFLVNKKHVESHRWSCMFGDVEVPAEVLTDGTLRCYAPAHQSGRVPFYVTCSNRVACSEVREFEYRDSEAHYMETSRSQANGVNEMHLHIRLEKLLTLGPDDHQMLVISSGNEKYEIMNAINSLMLDGKWSNQESSVKEVVSTARVQSLKKLVKEKLHQWLICKVNDDGKGPNVLCKEGQGVIHLVAALGYDWAIRPIMIAGVNVNFRDAHGWTALHWAASLGRERTVSVLIANGAAAGALTDPTSEFPSGRSPADLASVNGHKGIAGFLAESALTSHLSALTIRESNDSTVEACGLPFAEDLTGIDSVHLAGEGPDAESLEGSLSAVRKSTQAAARIFQAFRVESFHRKKVVEYGDDTCGLSDECTLSLVSLKNVKPGQHDTHLHSAAVRIQNKFRGWKGRKEFMIIRQRIVKLQAHVRGHQVRKNYRKVVWSVGIVEKVILRWRRKRPGLRGFRPEKQLEGPSQIQPAKAEDEYDFLHDGRRQAEARLQRALARVHSMSQYPEAREQYHRLTTCVAEMKQSRMMQDEMLSQAAGGADDFMAGLEDLICIDDAPPRCLPFGEAEPFYIR

SEQ ID NO: 19953 - protein, 397 aa, Zea mays
  VARIANT 42: note = Ancestral polymorphism is G, Derived polymorphism is V
  VARIANT 75: note = Ancestral polymorphism is S, Derived polymorphism is F
  VARIANT 82: note = Ancestral polymorphism is P, Derived polymorphism is Q
  VARIANT 87: note = Ancestral polymorphism is I, Derived polymorphism is T
  VARIANT 93: note = Ancestral polymorphism is G, Derived polymorphism is R
MDFSAGGSGSGGGGGGAGDGRAQAERWLEIAEKLLAASDLVGCKRFAERALEADPLLPGADEILAVADVLLASQSMGPSGHQDPLAILQLPPGVNPDQASVSRAFRRLALLLGPRNPHHGAEMALRLVNDAYAFLSDPSRRPPPPANPATGTPSSSHYAAAPAPDPREFWTACPFCCYVHQYPRDLVGRALKCPNEGCRRGFVASEIPTPPTVVPGTDMYHCAWGFFPLGFPNAADLGANWKPFYKAFPWNTAPSGQGADGRSHGNRGGRQAQNDSARGGSSRGRIKKTTARKKVGAGLRRRSLGGGVESGIDSSMLGQEGWAGDEDGGDGRTEEVRGININEAAQATDGTGRVNVSGAGGVEDMGNFHIDVDATEDILGNLHNLPFLRVDNLGRMI

SEQ ID NO: 19954 - protein, 189 aa, Zea mays
  VARIANT 164: note = Ancestral polymorphism is L, Derived polymorphism is S
MEPSTFDDSMDYQILACLVTNKTLAKDRSSWDPTDDEVQRVVLSLLEGSKDIDANKLKQYIAEFEMIVKNNWECSERIVANKEMMLDVFDYVVADFVPNFYQEPTLRLPSISPRSNGCWTKEQLFKKLTGPISMNHCTEKLKKCGFSKQQLWDAIDILKADLELRRVFIRLEDSEARGYMIHALRNSNV

SEQ ID NO: 19955 - protein, 354 aa, Zea mays
  VARIANT 158..354: note = Derived polymorphism lacks residues 158 to 354
MERYEVIRDIGSGNFGVTKLVRDVRTKELFAVKFIERGQKIDEHVQREIMNHRSLKHPNIIRFKEVISQTSWKGNVLVVLTPTHLAIVMEYAAGGELFERICSAGRFSEDEARFFFQQLISGVSYCHSMQVCHRDLKLENTLLDGSVAPRLKICDFGYSKSSVLHSQPKSTVGTPAYIAPEVLSRKEYDGKVADVWSCGVTLYVMLVGAYPFEDPDDPKNFRKTITRILSVQYSIPDYVRVTMECGHLLSRIFVGNPEQRITIPEIKKHPWFLKNLPIEMTDEYQQSMQLADMNTPGQSLEEVMAIIQEARKPGDAMNLAGQLPCLGSVDLDDIDFDDIDDIDTENSGDFVCAV

SEQ ID NO: 19956 - protein, 460 aa, Zea mays
  VARIANT 17: note = Ancestral polymorphism is I, Derived polymorphism is T
MDRSFSPLLALLSLACIGLSSLRSGSAATTTAGTPDGSELWGYVEVRPKAHLFWWYYKSPQRTATPTKPWPTVLWLQGGPGASGVGLGNFQEIGPLDVNLQPRNSTWLQKADLIFVDNPVGVGYSYVEDDSLLVTTDWQQAADATTLLKALVTEVPTLQSSPLFLVAESYGGKYAATLGASVARAARAGELNITLGGVALGDSWVSPEDFTLSYTPLLLSVSRLDDNAGDEANTMAETVKEQIAAGNFSNAEASWNDLLHFIKHRSGDVDVYNFLDGSLDQGTPAAASSPGTVKALMKYSRYLSGREDLAAGSNNITGIMNGVIKEKLKIIPKDLEWEELNEAVYNALVNDIMKPKIEEIDELLSYGVNVTVYNGQLDIICSTIGAEAWVQKLKWDGLKTFLSLPRQTLYCGLSKGAKAFVRSYNNLHFYWILGAGHYVPIDQPCVALDMIGNITQSPAT

SEQ ID NO: 19957 - protein, 365 aa, Zea mays
  VARIANT 157..365: note = Derived polymorphism lacks residues 157 to 365
  VARIANT 152..365: note = Derived polymorphism lacks residues 152 to 365
  VARIANT 38..365: note = Derived polymorphism lacks residues 38 to 365
  VARIANT 2: note = Ancestral polymorphism is G, Derived polymorphism is A
  VARIANT 1: note = Ancestral polymorphism is M, Derived polymorphism is I
MGCYLLAALERANVDPALVQEVYFGNVLSANLGQAPARQAALGAGIPNSVVCTTINKVCASGMKATMFAAQSIQLGINDIVVAGGMESMSNAPKYIAEARKGSRFGHDTLVDAMLKDGLWDVYNDCAMGMCAELCADNHALTREDQDAFSIRSNERGIAARDSGAFAWEIVPVEVPVGRGKPPTLVEKDESLDKFDPVKLKKLRPSFKENCGTVTAGNASSISDGAAALALVSGQKAQELGLQVLARIKGYADAAQAPELFTTTPALAIPKAITNAGLESSHVDFYEINEAFSAVALANQKLLGIPSEKTNVHGGAVSLGHPLGCSGARILVTLLGVLRAKSGKIGVAGVCNGGGGASALVVELA

SEQ ID NO: 19958 - protein, 188 aa, Zea mays
  VARIANT 145..188: note = Derived polymorphism lacks residues 145 to 188
  VARIANT 133: note = Ancestral polymorphism is V, Derived polymorphism is L
  VARIANT 125: note = Ancestral polymorphism is K, Derived polymorphism is N
  VARIANT 109: note = Ancestral polymorphism is G, Derived polymorphism is C
  VARIANT 56: note = Ancestral polymorphism is H, Derived polymorphism is N
  VARIANT 35: note = Ancestral polymorphism is G, Derived polymorphism is S
  VARIANT 29: note = Ancestral polymorphism is T, Derived polymorphism is I
  VARIANT 28..188: note = Derived polymorphism lacks residues 28 to 188
MSLAVDIRKSINRQHDIGFRELLEPKVWTDKHLAGEVQSFAALMKQALTKMTDEYHVANAMAKIHQAPSSDLVSTTNLSLPLLGHENGTDTKLVHTIENNLDIYDNALGFHFISKVFIPLQAYLKVLKFIECVQYGKKERGHEPKRDGMINYHSLSNGTHAEIRNLFTLVVFDTLYPTNTEDENDCSS

SEQ ID NO: 19959 - protein, 96 aa, Zea mays
  VARIANT 2: note = Ancestral polymorphism is A, Derived polymorphism is T
  VARIANT 14: note = Ancestral polymorphism is S, Derived polymorphism is Y
MALNKNTSALLLLSLAILFSQFLASQGRPVHGRNLVLHGTGSVSKGMLAGTVSPSSEIHGDNGSMVGADDVRPSNPGHSPGIGHAFINEKGLGRKL

SEQ ID NO: 19960 - protein, 214 aa, Zea mays
  VARIANT 55..214: note = Derived polymorphism lacks residues 55 to 214
  VARIANT 67..214: note = Derived polymorphism lacks residues 67 to 214
  VARIANT 104..214: note = Derived polymorphism lacks residues 104 to 214
  VARIANT 105: note = Ancestral polymorphism is E, Derived polymorphism is D
  VARIANT 116: note = Ancestral polymorphism is L, Derived polymorphism is V
  VARIANT 135: note = Ancestral polymorphism is L, Derived polymorphism is S
  VARIANT 140: note = Ancestral polymorphism is P, Derived polymorphism is A
  VARIANT 153: note = Ancestral polymorphism is A, Derived polymorphism is P
  VARIANT 158: note = Ancestral polymorphism is R, Derived polymorphism is K
  VARIANT 171: note = Ancestral polymorphism is A, Derived polymorphism is V
  VARIANT 183: note = Ancestral polymorphism is M, Derived polymorphism is T
MARPSGINMASFSAVSNSGGAWRVFLYIFMVFLVTGRRKKNRPVRVFPTDKGTLWKTRSADGHAESWGRLISQSRLVRRFVWSANLFIRSLEERVKVPWPVLKKEVLLHYFELEYLKDVVVLIMKNVQIDYVKVSNTILPRDIRVLGWCHVPAYFNARLERKTRLCKRVLATLKVLWSVIEDMTKYISPEDAKRLISKETVFCNVTFGVVDAIP

SEQ ID NO: 19961 - protein, 398 aa, Zea mays
  VARIANT 20: note = Ancestral polymorphism is S, Derived polymorphism is F
  VARIANT 45: note = Ancestral polymorphism is H, Derived polymorphism is R
  VARIANT 308: note = Ancestral polymorphism is V, Derived polymorphism is A
MDRYAPALLCLCLGALRAGSAAPTTTGTPDGSELWGYVEVRPKAHLFWWYYKSPHRTSTPSKPWPTILWLQGGPGASGVGLGNFLEVGPLDVDLKPRSSTWLQKADLIFVDNPVGVGYSYVEDDSLLVTTDWEQAADATALLKALAKEVPTLQGSPLFLVAESYGGKYAATLGVSVARAVRAGELKVTLAVSWPSILAASVVINLSLFLSQQDVYNFLLDSGMDPVSTDSSPSSSSPSSVLQALRYSTYLGSQLGDSSAGSSNTIDGIMNGVIKEKLKIIPKDVRWVEVSNAVYYALIDELLSYGVNVTVYNGQLDVICSTDGAEAWVQKLKWDGLKTFLSLPRQPLYCGPGKGTKAFVRSYKNLHFYWILGAGHFVPADQPCIALSMIGSITQSPAS

SEQ ID NO: 19962 - protein, 316 aa, Zea mays
  VARIANT 266: note = Ancestral polymorphism is W, Derived polymorphism is L
  VARIANT 203: note = Ancestral polymorphism is A, Derived polymorphism is S
MPLIDAAASAVAPPPPRRVAQLRFFSTRRPGILSLTATSCSPSPPPPVAAEVPAPPQEAKSKPRPRRYPKQYPGESVGVAEEMRFVAMRLRNPKRTTIKDKSGTEDADAGAGVSEGEAEEDDGGGVKEEHEEEDEGELEEGEWMPSMEGFVRYLVDSRLVFGTIERVVAESTDVAYVYFRKSGLERSASISKDLEWFRKQGIAIPEPSTSGSTYAAYLTELAESNAPAFLSHYYNIYFAHITGGVTIGNKICEKILEGRDLEFYKWDTDAELLLKDAREKLNELSKHWTRKDRNLCLKEAAKCFQYLGKMVRLIIL

SEQ ID NO: 19963 - protein, 467 aa, Zea mays
  VARIANT 100: note = Ancestral polymorphism is L, Derived polymorphism is Q
MEVHADVDGSGVPLAVLLKRELCNQKVERPDILFGEANKSKKGEDFTLLLPRCHRTTGEGGGSGGGENAGGGDDDDTISVFAIFDGHNGSLAAIYTRENLINNVLAAIPPNLTSEEWTAALPRALVAGFVKTDKDFQTKAARSGTTVTFVIIDGWVVTVASVGDSRCILESAEGSVYFLSADHRLDANEEEVERVTASGGEVGRINIAGGAGVRYFYFMYVVSYQVDHLFHPPHPSTQCCIHVSGLCLSRSIGDIDVGEFIVPVPHVKQVKLSNAGGRLVIASDGVWDALCFQEALNYIRGLPAEAAANRIVKEAVTSKGLRDDTTCIVVDILPPEKLSPPLKRPGKGVIKTLFRRRPSDEMSEDQMDRGCLEPDVVEEIYEEGSAMLARRLNINYPSGNMFKLHDCAVCQLEMKPGEGTSVHGNMPKHSRVDPWGGPFLCSSCQLKKEAMEGKLHSRSMDVFTQKL

SEQ ID NO: 19964 - protein, 394 aa, Zea mays
  VARIANT 63: note = Ancestral polymorphism is T, Derived polymorphism is M
  VARIANT 232..394: note = Derived polymorphism lacks residues 232 to 394
MALLAAAARRHHRLLLRTRFLATTSSTYPLPPDPVPDPDPDPITPAPSPVRTPPDEQFAAWVTRLRPGFTASDLAAAITAEEDPDLALALFRWAALRPGFRHAPESYLAALTAASSGRRPAAAEALVHDVFAGACAPDLRLFNACLRFCCARRSLFQLAFDMFNKMRAMPAAAGCRPDVETYTLLLTAVVRRVRRPPASMVYLHAVRSLYRQMKASGVVPDTFLLNLIIKAYARCVEVDEALKVFREMPLYGCEPNEFTYGYIVKAMFQKGRSDKGMEYFAEMREKGFVPSGGVYMIAVSALALEWRFDESRRVLLDMLDCGRKPDMITYRTLLEEMCRAGRTEEAFDVLEELKGRKRGTLDQRMYSELLDGLHWISQPRQNNSQPALDKGSDD

SEQ ID NO: 19965 - protein, 224 aa, Zea mays
  VARIANT 83..224: note = Derived polymorphism lacks residues 83 to 224
MGLQPRSAISRFAKIDGVCAALSMEGSPRYTLIPCSALYPVLALYMEGEDREPAVRGSPSTVGRLQGHERRLGGAYQRLQRRQKHVQHVHVLGVFLEEGYLPPVTFIVVQKRHHTRFCPKDHRSHKQTDRRGNILPGTAVDTKICHPSESDFYLCSHSGIHDELDAKPEELEGEELESQLLEPVADLSMHPVHVPGNKQPAHPASQKATAKDDKLATPQAEMAL

SEQ ID NO: 19966 - protein, 1464 aa, Zea mays
  VARIANT 791..1464: note = Derived polymorphism lacks residues 791 to 1464
  VARIANT 686..1464: note = Derived polymorphism lacks residues 686 to 1464
  VARIANT 616..1464: note = Derived polymorphism lacks residues 616 to 1464
MDFVCPGDPAVWDVDGRRFGPCFADLVLGFAGNAIAAVAALGLFLAKRNTNRAQNVTRSLSEKLLAFGVPGFAACLSLLGLTMLAKKKFEGKDVKNYELFFTCSQFIAWMSLSLVRVSGAWFEILYNPIMCFFWILKVILEIPHLQYKLILLKAASSFIEIISFCTATIFGLFVTVAAVIGQSGIKREANSIEAPLIPNNEKAEGETTDMIKDYSLWELLTFKFVNPVMDIGITRQLDFTDLLELPNELRATSCYDKLLSSWTAEYQNHHDNSSLLRAMSNSYGWTYLRLGLLKVLNDSIGFVSPLLLNKFIRLLQQGSDGMDGYILAISLGLTSIIKSFLDSQYSFRLAKLKLMLRSSIMGIIYWKCLCLSLAERSRFSEGEIQTFMSVDADRTINLCNSLHDAWSLPLQIGVALYLLYTQVNYAFLSGLAITIILIPVNKWISTRIAGATEKMMKQKDRRISCAGELLAHIRTVKMYSWEKLFTERLVERRESEVKHLATRKYLDAWCVYFWATTPTLFSLSTFSIFAITGHALDAATVFTCVALFNTLISPLNSFPWVINGMIDAVISSRRLSNYLSTPEHHSSELNASADLLNHHFKRYTKVTHNPMAIVFQNVSCSWSSSSVAELNIVLRDISLQLQKGFFIAIVGEVGSGKSSLLNTVIGETRVISGSISSCGSIAYVPQVPWILSGSLRDNILLGKEFDPRRYEEVIEACALHVDISAMTRGDMSHIGEKGTNLSGGQRARLALARALYHNSDVYLFDDILSAVDSQVASCILEKAIMGHQLMQKTRLLSTHNLQAIFAADMIVVMANGLIKWFGTPKSFLATPYSRTSKPDNSSPTSFAASVKDKTPMVTCELKPDAVLEDSVVCYEETKDRVEEEARKQGKVELGVYKKYAAFVGWSTVVLIFLSAFLMQTSRNGNDIWLTYWVDTSTGTNNTRFYLIILAMFGIINSLFTLGRAFSFAFGGLRAAIHIHASLLENIISAPICFFDQNPSGRILNRLSSDLYAVDDSLPFILNIFVANFFSLFGTLVVLSYSQVSFLLVLLPLWLIYRKLQFYYRSTSREVRRLDSVARSPIYSSFTETLDGSSTIRAFQNEGFFFERFIQHVTLYQKTSYTELVASLWLSLRLQLLAGFIILFIAMMATISFHSSSLVNFATPGLVGLALSYAAPVVSLLNGFLTTFTETEKEMISVERVDEYIGIPQEELQGSEPPPRSWPTEGKIEFEHVTLKYKPELPPALSDVSFLIASGMQVGIIGRTGAGKSSILNALFRLVPIWNGRILVDGIDLAKVAVRELRGHFAVVPQSPFLFDGSLRENLDPFNTKTDLRIWEVLENCHMKGQVESIGGLDIHVKESGASFSVGQRQLLCLARAILKSSKVLCLDECTANVDNQTASLLQNTISAECKGMTVLTIAHRISTVMKMDNILVLDQGKLVEEGNPEALMNHRHSRFAQHVKASQM

SEQ ID NO: 19967 - protein, 131 aa, Zea mays
  VARIANT 38: note = Ancestral polymorphism is S, Derived polymorphism is F
MSSASVDEARCGGGATAAAGAGGSPLPAPPHECAVCLSELPAGAEAAVPVRRRTLPACGHAFHADCIGRWLPLRPECPLCRRPVLLAGGGGQRAAAGAPAAWARPAATIACGFGDGRVVWSRSPVPPPDSD

SEQ ID NO: 19968 - protein, 178 aa, Zea mays
  VARIANT 4: note = Ancestral polymorphism is K, Derived polymorphism is E
  VARIANT 5..178: note = Derived polymorphism lacks residues 5 to 178
  VARIANT 9..178: note = Derived polymorphism lacks residues 9 to 178
  VARIANT 37: note = Ancestral polymorphism is R, Derived polymorphism is Q
  VARIANT 57: note = Ancestral polymorphism is R, Derived polymorphism is W
  VARIANT 113: note = Ancestral polymorphism is L, Derived polymorphism is P
  VARIANT 116: note = Ancestral polymorphism is N, Derived polymorphism is S
  VARIANT 121: note = Ancestral polymorphism is S, Derived polymorphism is I
  VARIANT 141: note = Ancestral polymorphism is A, Derived polymorphism is T
  VARIANT 159: note = Ancestral polymorphism is S, Derived polymorphism is N
  VARIANT 165: note = Ancestral polymorphism is P, Derived polymorphism is L
MQKKYFEKQFELAEAVKQPMFLHMRAAGENLCEIMTRNLHRFPGGVTHSFTDSTEDRDRLPCFEKMFIGVNGCSLKTNENLEVLRGIPVERQVLEVVAGSKGISDIEGLSRTLYHNTCISSSMVFDKSSFNRCEYMINGSTNLASSSFLRILTCLLMRSLRVVLPSRIADKYPTETMP

SEQ ID NO: 19969 - protein, 199 aa, Zea mays
  VARIANT 51: note = Ancestral polymorphism is K, Derived polymorphism is E
MGSAVKIGTWGGDGGSPCDITVAPRRLESITIRWGKVLDWIAFSYRDQSGELHTAGPWGGNGKGEGTETITLEASEYVTGVAWSVGPFKFKNVERCITSFKVVTNLRSYGPFGHGVDSTHHSLPVLDGSVVGMFARAGDFLDAIGFYVLPDALPALKPTTDPAEQEEKEKDSGHQQNGKAKSNQEENEDSKNEKDKPLS

SEQ ID NO: 19970 - protein, 637 aa, Zea mays
  VARIANT 48: note = Ancestral polymorphism is P, Derived polymorphism is L
MKFMKLGSKPDAFQTDGGGGDARYVLSDLPSDIVVHVDDARFYLHKFPLLSKSGLLQRLIVEASQNGSDEVAIQDVPGGAKTFEICAKFCYGMVVTLNAYNVVAARCAAEYLGMTEDVEKSNLVFKIEVFLSSGIFRSWKDSIIALQTTDALLPWSEELKLVGRCVDSVAAKATVSASNVVWSYTYNRKSASSDEIVEARRSSQAVPKDWWVEDLCELDVDLYRRVMVAVKSRGRIPSDAIGEALKAYAARWLPECCDALVDDAYSGAYKHLLETIVWLLPSDKGSSGISCRFFLKLLKFTVLVGAGELLKEELMDRTVLQLHKASVSDLLIPSRPPAQTVYDVQLVQTLIGRYMSHAGVSQGGIFLNDLDQEMFETNVDGESLLALCKLVDRYLAEVASDPNLSVSSFVDLATSMPETARPTHDGLYTAIDVYLKLHPGLPKMEKRKISNLMDVRKLSKGACIHAAQNDRLPLRVVVQVLFFEQLRAAGAAAAAGTPSASVARCIARLAEQEEEEERWNDGRALPEPPTPGALKRQLGSLKLQGDHHQGAGDDGRRLVARSNSVANQSSRMSLSSRSRRIFDRLWVGGAKLPGEAAAAGKGSSDTSGSSQSPRSSAKPPESKSSSSSSRNRRYSVS

SEQ ID NO: 19971 - protein, 540 aa, Zea mays
  VARIANT 53: note = Ancestral polymorphism is D, Derived polymorphism is Y
  VARIANT 213..540: note = Derived polymorphism lacks residues 213 to 540
  VARIANT 286..540: note = Derived polymorphism lacks residues 286 to 540
  VARIANT 512..540: note = Derived polymorphism lacks residues 512 to 540
MGGPVKDANDMLTRWLEKSTELRTSLQTSLLPIGCIKIGLSHHRALLFKILAYSVGIPCKLVKGSNYTGGDDDDAINIIKMDNEREFLVDLMAAPGALIPADILSWKGNSLNSNRKLGLNRTAGSSSTVDANVDPTVLPLEPKGGQLPLFSSGDWMSDIDSGYEAAEIAASTQTSSGVTPYLCSAGSVFGSSWMLVNHDQSDGPSTSAGTSSQQKVVPQSEHQRNLNRLPDLQEIPESKNLFADLVPSGDNKSKKTSVPFKGPDHRNNELQKRRENIVPNAGRPHQRLVMKNWSPYNDVSNNKQYNYVEDSFARRNVGNNAAPSSSQMPRPAARSNLNSRLHNDASYHNYDSIMAGTSAMNITSTAETGKVPERVMRGDLDKGQTNYRLEDQHVIVQPPQGRLPWGIPAEGSVPMNRVQSQAKQHLENMDAKQDHKKLLPDPKKSPLDKFMDTSLPSRNMDMRSQRLDFDDVSECEIPWEDLVIGERIGLGSYGEIYCADWNGTEVAVKKFLDQDFYGDALDEFRSEVGELLSVSILEFS

SEQ ID NO: 19972 - protein, 183 aa, Zea mays
  VARIANT 106: note = Ancestral polymorphism is K, Derived polymorphism is N
  VARIANT 93: note = Ancestral polymorphism is G, Derived polymorphism is R
  VARIANT 83: note = Ancestral polymorphism is T, Derived polymorphism is I
  VARIANT 65: note = Ancestral polymorphism is S, Derived polymorphism is I
  VARIANT 58: note = Ancestral polymorphism is R, Derived polymorphism is W
MRPPARRPPLHVSTLQQLTIQLQPPPKESASLLDHLLTLEPLTFSHIDPGGKLVMGCRKATNTVSLLDSQISAIADGSLLSETLFSTANESIGVVSGYPGFLHSIKGAADFHPSSLYDHHMNSVDGDVSWNKADKFGSRPDEGSLRFLQKRSRNIGSKSRRFLIDAEDAMELKLTWEEAQELY

SEQ ID NO: 19973 - protein, 126 aa, Zea mays
  VARIANT 5: note = Ancestral polymorphism is Q, Derived polymorphism is E
MPLQQVINKFIITRRVPASVRMHLLRLRSGHNRDTDQPIPDPYMDQTQRRLDDHGHAPVVSAHAQQAGPDKSRQQEQPPPPPSSLNQTAARLLREATVSRPDGEKPASSDILAFARSVDRVDSPLE

SEQ ID NO: 19974 - protein, 372 aa, Zea mays
  VARIANT 34: note = Ancestral polymorphism is R, Derived polymorphism is L
  VARIANT 68: note = Ancestral polymorphism is A, Derived polymorphism is T
MGGAAGEAMWAAVVAATVVFLAVEVSGAASALPRFAEAPEYRNGEGCPAAAAGVCDPGLVHIAMTLDTHYLRGSMAAVYSLLKHASCPESIFFHFLAAEAGAVDGADPEPELLRRAVAASFPSLRFEIYPFRAEAVAGLISASVRAALEAPLNYARNHLADLLPRCVPRAIYLDSDVLAADDVRRLWETRLPAAAVVAAPEYCHANFSRYFTPAFWSDPVLGARVFAGRRRPPCYFNTGVMVIDLRRWRAGNYRQRIERWMEIQKQKRIYELGSLPPFLLVFAGEVEAVDHRWNQHGLGGNNVHGSCRPLHAGPVSLMHWSGKGKPWDRLDAGRPCPLDHTWKSYDLYIPGDSGGAASPASGPALSASVFSW

SEQ ID NO: 19975 - protein, 129 aa, Zea mays
  VARIANT 49: note = Ancestral polymorphism is F, Derived polymorphism is I
MGRRILNDALRTMVNADRRGNASALLRPISGVMVSFLNIMKYRGYIKKFEVIDENRVGKIRVELDGRLKDCKALTYRQDLKAKEIERYRVRMLPTRQWGYVVITTPNGVLDHEEAIRQNVGGQVLGYFH

SEQ ID NO: 19976 - protein, 250 aa, Zea mays
  VARIANT 66: note = Ancestral polymorphism is G, Derived polymorphism is R
  VARIANT 71: note = Ancestral polymorphism is Y, Derived polymorphism is C
  VARIANT 88: note = Ancestral polymorphism is A, Derived polymorphism is T
  VARIANT 137: note = Ancestral polymorphism is R, Derived polymorphism is G
MDAGAARPSAPSTAAVAGASVADEPRDARVVRELLRSMGLREGEYEPRVVHQFLDLAYRYVGDVLGDAQVYADHAGKAQIDADDVRLAIQAKVNFSFSQPPPRESHLSSHEVLNIEEDEDINEDVNRTIKVLLELARSRNRMPLPKSIAPPGSIPLPPEQDTLLAQNYQLLPPLKPPPQYEEIEDETEEPNPSNPANSNPSYSQDQSSKEQQQQHTPQHGQRVSFQLNAVAAAAAAAKRPRMAIDQLNMG

SEQ ID NO: 19977 - protein, 535 aa, Zea mays
  VARIANT 454: note = Ancestral polymorphism is T, Derived polymorphism is A
  VARIANT 371: note = Ancestral polymorphism is L, Derived polymorphism is F
  VARIANT 296: note = Ancestral polymorphism is S, Derived polymorphism is L
  VARIANT 48..535: note = Derived polymorphism lacks residues 48 to 535
MKPMSCHEQEQHAELAAATTNSGFDWLDDPISFLTADVDAAGCGGYGWWSDDPAAAQQDNIGSVVAQTLSPPAAPLLTTSPPLAHTSPSIASPAVSEPSSKKRKSPAHRASAHSGSNQRRRADQADRPGAGGGKKGGGAGSDDRDTRWAEQLLNPCAAAVEAGNLTRVQHLFYVLGELASFSGDANHRLAAHGLRALARSRLPAAVGPAAAAAVRVPPCDCPTPAFAGAEPRLFRASLIRFHEVSPWFALPNALANAAIARAASRGGSTPAEQPRPLHVVDLGVSHGVQWPTLLESLTRLSGGRAPPSVCLITVAAAPPAPFSASPPGYDFSPHLLRYAKSISLQLAISRAASLDSVRGLASPSASGEEALVVCIQFRLGHASADERTEILRKVRGLDPELVVVSELDGGGDGTAAGEFTARLELLWRFLESTSAAFKGRDGDERRLLEAEAGASLVASEAPALEGREAWREAMAAAGFEEASFGDEAVESAKSLLRKYDGGWEMSASGAAGAVALRWKGQPVSFCSLWRPACSG

SEQ ID NO: 19978 - protein, 126 aa, Zea mays
  VARIANT 41: note = Ancestral polymorphism is A, Derived polymorphism is V
  VARIANT 71..126: note = Derived polymorphism lacks residues 71 to 126
  VARIANT 102..126: note = Derived polymorphism lacks residues 102 to 126
MGSMAITMSNNYFTHHNKWLDFSSNGEGQDNAGDSYVEDKAMQVTIAFNHFCEGLIPDNAKDSVLLRSALQATTSEVLKVVEDGLREASFEIVLDDRKVHKEMDEIYTLATIISRIPWSPRSGSLS

SEQ ID NO: 19979 - protein, 790 aa, Zea mays
  VARIANT 522: note = Ancestral polymorphism is A, Derived polymorphism is T
  VARIANT 421..790: note = Derived polymorphism lacks residues 421 to 790
  VARIANT 412..790: note = Derived polymorphism lacks residues 412 to 790
  VARIANT 365..790: note = Derived polymorphism lacks residues 365 to 790
  VARIANT 346..790: note = Derived polymorphism lacks residues 346 to 790
  VARIANT 323..790: note = Derived polymorphism lacks residues 323 to 790
  VARIANT 73: note = Ancestral polymorphism is D, Derived polymorphism is Y
  VARIANT 50..790: note = Derived polymorphism lacks residues 50 to 790
MTAQPMKRAIVESGDGGLGLGIATFIANGEDLGPIIRHSFESGKPEALMQNLRSIVKKKEVEIEELCRLHYEDFILAVDELRGVLVDADELKGMLYGENSHLQEASADQLLKLDELLELYSVKKNVGEAITTLKICVEVFSLCMTCNNFIAEAKFHPALKTLDLIQKGYLRNIPLKLVKKVVARQIPLIKLHIEKKVCSEFNDWLVHIRRMAKQIGQASISQASSARQKGEEMRARQREAEGHSHAGPDEHLYALDLENTEEESALHFDLTPVYRAHHMHTCLGMEDKFRDYYYKNRLMQLNLDMQISTSQPFLESHQPFLAQVAGFFIVEERVLRTADGLLLESQVETTWETAIGKITSILEEQFSRMRTASHLLLIKDYVTLLGAAVNKYGYRITQLIEVLEKSRDKYHQLLLLDCRKQIDDVLTNDSYEQMVIKKEYEYSMNVTAFHLEHDDAIPDFPYVTSFSSSVPDVCRIVRSFIEDSVSYLSYGGLMNIYDVVKAYLDRLLIEVLNDSLLNMIYARSLGMSQMMQLAGNISVLEQACGMYLLHSAQLCGIPKRVAERSHSGLTARAVLKASQNAVYNALINLTNFKVDEFMVLLEEVNWIAEEAPDNANDYMNEVLIYLETLVSTAQEILPLEALYKVVSGAMSHISDSIMTTLLNDGVKRFTVNAVLGIDIDLKTLEAFADDKFDSTGLSDLGKETTFRDCLVEIRQLTNLLLSSQPENFMNPVIRQRNYGSLDYKKLAIICEKYKDSADSLFGSLSNRNTPQQSARKKSMDVLKRRLKDFS

SEQ ID NO: 19980 - protein, 118 aa, Zea mays
  VARIANT 67: note = Ancestral polymorphism is R, Derived polymorphism is K
MEGGDGETTLSGFGVGGVDTKVLHAFQTSFVQVQTLLDQNRLLISEINHNHESKVPGDLSRNVGLIRELNNNIRRVVDLYADLSSLFAASDGASEGGSVGTVRQAGAAGHKRIRSGLD

SEQ ID NO: 19981 - protein, 80 aa, Zea mays
  VARIANT 17: note = Ancestral polymorphism is K, Derived polymorphism is M
  VARIANT 43: note = Ancestral polymorphism is V, Derived polymorphism is I
  VARIANT 53: note = Ancestral polymorphism is D, Derived polymorphism is E
MSRSGQPPDLKKYMDKKLQIKLNANRVVIGTLRGFDQFMNLVIDNTVEVNGNDKTDIGMVVIRGNSVVMIEALEPVAKSQ

SEQ ID NO: 19982 - protein, 340 aa, Zea mays
  VARIANT 20: note = Ancestral polymorphism is G, Derived polymorphism is S
  VARIANT 22: note = Ancestral polymorphism is G, Derived polymorphism is S
MTVGDDAAAPGRGQTVCVTGAGGYVGSWIVKLLLERGYAVRGTVRNPDDAKNAHLLALPGAAERLALCKADLLDYGALRAAVAGCHGVFHAASPVTDDPEEMVEPAVRGTRYVIDAAAESGTVRRVVLTSSIGAVAMDPRREPDAVVDESCWSDLDFCKKTKNWYCYGKAAAERAAWEAAAARGVDLVVVVPVLVQGPALQPSVNASLMHVLKYLNGSAKTYANAVQAYVHVRDAADAHVRVFEAPRAAGRYICADAVLHREDVVRTLRKSFPGYPVPERCSDEVNPRKQPYKISNQRLRELGLEFTPAAQALYDTVVCFQEKGILPLPVPAPTPASPDA

SEQ ID NO: 19983 - protein, 204 aa, Zea mays
  VARIANT 43: note = Ancestral polymorphism is R, Derived polymorphism is Q
  VARIANT 191: note = Ancestral polymorphism is N, Derived polymorphism is S
MKAVPADSAAPPVPMPMPMPATKITIPVSAVGGTEAALLGKGRYKVWALAAIALLALWSMSAASVSLRWSSSGDLASVYGDLDVPLADDLDSLEMEEREKLVGRMWDMYTRTSDEVRLPRFWQEAFEAAYEELAGDDVQVRDAAISEIARMSAHKLELEQTLNENELYQVDQQGAFMAHCVTVAMPMKLHNLVTAVRMNRIAMM

SEQ ID NO: 19984 - protein, 543 aa, Zea mays
  VARIANT 514..543: note = Derived polymorphism lacks residues 514 to 543
  VARIANT 513: note = Ancestral polymorphism is P, Derived polymorphism is L
  VARIANT 409: note = Ancestral polymorphism is N, Derived polymorphism is I
  VARIANT 265: note = Ancestral polymorphism is Q, Derived polymorphism is L
  VARIANT 207: note = Ancestral polymorphism is K, Derived polymorphism is N
  VARIANT 152..543: note = Derived polymorphism lacks residues 152 to 543
  VARIANT 146: note = Ancestral polymorphism is R, Derived polymorphism is W
  VARIANT 125: note = Ancestral polymorphism is L, Derived polymorphism is F
  VARIANT 121: note = Ancestral polymorphism is C, Derived polymorphism is R
  VARIANT 117..543: note = Derived polymorphism lacks residues 117 to 543
  VARIANT 109..543: note = Derived polymorphism lacks residues 109 to 543
  VARIANT 79..543: note = Derived polymorphism lacks residues 79 to 543
MLRGTGHGGGDARRRALRSSRRRLPGWIWWLLGIFLLVGLMLFVLHHNQKEQFRPPVVDNGSEMEEVPREKVNFSEELLSSTSFARQLADQMTLAKAYVILAKEHDNLQLAWELSSQIRNCQRLLSEGAVSGRAITKDEAHPIISRLALLIYKAQDSHYDISTTIVTLKNHALALEERAKAAIVQSAEFGQLAAESFPKNLHCLTVKLTEEWLRNPKHRSRSEENRNSTRLVDNNLYHFCIFSDNVLATSVVVNSTVSNANHPQQLVFHVVTDRIHFGAMSTLFLINDFKGCTVEVRCIDEFSWLNASSSPLVRQLSEVETQGYYYSAGSKNPEREIKFHNPKFVSLLNHLRFYIPQILPNLEKVVFLDDDVVVQKDLTQLFSIELHGNVIGAVETCLESFHRYHKYLNFSHPTISSKIDPHTCGWAFGMNIFDLIAWRKANATSLYHYWQEQNSDLLLWRTGTLPAGLLTFYGLMEPLDRRWHVLGLGYDVDIDDRLIESAAVVHYNGNMKPWLKLAIRRYKYIWERYVNISHPYVRECMLH

SEQ ID NO: 19985 - protein, 647 aa, Zea mays
  VARIANT 253: note = Ancestral polymorphism is R, Derived polymorphism is M
MEPFVAAQGLVIVLQRSHARAYDDPLNKPNVQTTKNLRENKSTGAELPSLLPPAPPPSVPPPRYIATTGSTARNVSSLPDSSSPTRFGYPAGRRVLCPVPASAAGRMSLFRRLFYRRPPDGLVEISGNILVFDHCYSTDLLEEDELMPYIGGILKQLLGRHSIDSFMVFNFEGSKKDNQIASIFSYYDMSVMGYPRNYEGCPLLTMEMIHHFLRSSESWLSLSQDNFLLIHAEHGGWPILAFALAALLVYLKRYNDERKALEAVCKQAPDGLAEFFSPLDPVPSQLRYLKYVSKRHKSLESWPPVDRMLNLNCIIIRKVPNFDGQGGCRPIFRIYGLDPLAPNDRGTKLLFLTPKTSDFVQLYTQEDCEIIKVNVHCPVQGDIVIECVSLDEDFEHEVMMFRAMFSTAFIEDNLLVLDRNEIDILWDTKHRFPVDFRVEVIFSDMEIGTAVHKSGLSSEEKESLSKVGDAFSHLEWSSKSVHITNEDSKQKGLQTEHDGFEKIPLEETGTSSASAGNSSRTVQIHHIEPAENHSSLASVHSSPEPEASGSGPNFQGGQLSNDTSAQEEHEVDDTKVEPNPEIPRDAEAGDADAAATAAEWSDNNSDVFLSDTHTPSSSTPSSPPKFDEDILEAGMVGTRSQLTELKI

SEQ ID NO: 19986 - protein, 547 aa, Zea mays
  VARIANT 153..547: note = Derived polymorphism lacks residues 153 to 547
MAALFSSLLALVMGTVSAAKAVVTEIIPPAAALVANIMAIATTTASASVAWFIYYVCAVAAAAVDVATDTLPYAVAVARTAACSAVQSSRLALQVLLSYLWSLSSAAVAGAARLATVMLPAAVALAESLVGAAWSLLAAAAAVVVHTLPYAVRASQPWLEMTSNLLRQLYGWSLAAAAQEPPDMAQAFKDVVESATRLSQSLRRLYGWLVATAAEKLETDAAYACAAAASEKLNPSDADASAVVSRMEAEASAMIQHGWRSWFLHDRGVAVCVLLALALLAVAFICGGVCALTLSSRLAGRQDHGDRRRSGFASSSATPNQTPESRAHESKSLAMATPIANLSAVVTGAIAAARAVATEMLPAAVTRHAVAEASRAWVAWLTSHLWAWLAAARAVAADNIPVGAAADAWGPCLQTAAKLSHDLYGWLAAAVVQKLPDVAAEKLLDDAAAWLVRGRGVAAYSTLALALLAVAFLGGAVCALTCRSMKGPALGGARVPRAVFEANPKRYYATVRTARKARRRAGGAGCKLIPAGLLVAFAAYLAAKMLY

SEQ ID NO: 19987 - protein, 371 aa, Zea mays
  VARIANT 169: note = Ancestral polymorphism is A, Derived polymorphism is V
  VARIANT 32: note = Ancestral polymorphism is G, Derived polymorphism is E
MGRSFSSTAAPVRPAALAAPPLLLFLLLGLLGAAAANVGDSCSTSADCGAGQWCFDCEPQLSGSHCVRSAATNPFQLINNSLPFNKYAYLTTHNAYAIVGEPSHTGIPRVTFDNQEDTVTDQLNNGVRALMLDTYDFKGDVWLCHSSGGKCNDFTAFEPALDTFKEIEAFLAANPSEIVTLILEDYVHAPNGLTNVFNASGLLKYWFPVSRMPPSGQDWPLVSDMVATNQRLLVFTSVSSKQSAEGIAYQWNFMVENNYGDDGMDAGKCSNRAESAPLNDNTKSLVLMNYFPSLPVKFTACLQHSQSLVDMVSTCYGAAGNRWANFVAVDYYKRSDGGGAFQATDLLNGRLLCGCQDIRACSQGSGVVCSA

SEQ ID NO: 19988 - protein, 233 aa, Zea mays
  VARIANT 173..233: note = Derived polymorphism lacks residues 173 to 233
  VARIANT 14: note = Ancestral polymorphism is R, Derived polymorphism is Q
MALLASRPPAALGRLNNLRALSLRSNRVLETIPNDVLQLPGLEALFLQHNLLSGPIPPGIQRLGGLERLVLSCNNLSGPIPFALNSLTALRVLRLDGNRLSGAFPASASRVSAPSTSPTTTSTAPSPNRSRTSRGNPSSGTSSSAGTCFRPVAARSFPSAVARRARPRAGLIQEAEALRGHNRGHRRGRRSGGAPPPHRHRALRGVQTSWRRRPRHPRQPGGSPHRRPTWAAS

SEQ ID NO: 19989 - protein, 377 aa, Zea mays
  VARIANT 193: note = Ancestral polymorphism is R, Derived polymorphism is C
  VARIANT 150: note = Ancestral polymorphism is G, Derived polymorphism is V
  VARIANT 127: note = Ancestral polymorphism is E, Derived polymorphism is K
  VARIANT 69: note = Ancestral polymorphism is A, Derived polymorphism is V
  VARIANT 54: note = Ancestral polymorphism is V, Derived polymorphism is L
  VARIANT 45: note = Ancestral polymorphism is L, Derived polymorphism is F
  VARIANT 5: note = Ancestral polymorphism is P, Derived polymorphism is S
MGFAPSGDYWRALRRISSAYLFSPRSVSATAPRRVAIGERMLRDLSAAPSGEVVMRRVLHAASLDHVMATVFGARYDAASPEGAELEEMVKEGYVRPARLVQLGRPPAVAQVAGPARRQEEVQEPGEQSEVFVARIIEEHRRKKKEAASGESEMIFRGTDTVAILLEWVMARMVLHPGIQSKAQAELDAVVGRGRVSDADVVRLPYLQRVVKETLRVHPPGPLLSWARLAVHDAVVGGHLVPAGTTAMVNMWAIAHDPAVWPEPSAFRPERFEEEDVSVLGAGRRVCPGKTLALATVHLWLAQLLHRFRWAPADGGVDLAERLGMSLEKPLVCKPTHSPLSTSGSRSCCTASSGRRRTAASTWRPPRSAPSGSRRRT

SEQ ID NO: 19990 - protein, 213 aa, Zea mays
  VARIANT 12..213: note = Derived polymorphism lacks residues 12 to 213
  VARIANT 37: note = Ancestral polymorphism is R, Derived polymorphism is C
  VARIANT 51: note = Ancestral polymorphism is R, Derived polymorphism is C
  VARIANT 65: note = Ancestral polymorphism is A, Derived polymorphism is T
  VARIANT 151: note = Ancestral polymorphism is I, Derived polymorphism is N
MRAHGRPVSHPQLTLPVRLHTTACRPLRALHALRRFRHEFDVQPQVHACNRVLGALAAAGHVEDALKLFDEMSEGGVQPIPVTFAIMVRALAHAGMVDRLLEMIGRMQNEVCRLMLQHHDEGKLDTKSKSPEKVINVVYEMIEVGCSMEEIVYSAIIYGFYKYASSTEAKQNFEIDEESEEYLELHPQAATKDPRLTEEHFYSLSEDDPFAIN

SEQ ID NO: 19991 - protein, 759 aa, Zea mays
  VARIANT 460..759: note = Derived polymorphism lacks residues 460 to 759
  VARIANT 396..759: note = Derived polymorphism lacks residues 396 to 759
  VARIANT 346: note = Ancestral polymorphism is R, Derived polymorphism is W
  VARIANT 246..759: note = Derived polymorphism lacks residues 246 to 759
  VARIANT 177..759: note = Derived polymorphism lacks residues 177 to 759
MAVVPAAETLDGLKDRFDLGVFVGDLALDEEVTSDDESLEGLQQELDNCKNDQEVANILASGIKLREYTKGVENNIRQIELDSIQDYIKESENLVSLHDQICDCDNILLQMETVLTGFQTEIGSISSEIKVLQEKSMDMGLKLKNRKVWFTAYIVYIFIHSYLYDSYVGSLLENKLQAAESKLSKFVEDIIVPPRMIDIIVDGEVNDEYMKTLETLSKKIKFIDADPMVKSSKALKDVQPEVERLRQKAVSKIFEFVIQKFYALRKPKTNIQILQQSVLLKYKYTIFSCQIPILACSLVLLFLISVPVSLNMYTINFLKEHAKEIYAEVRTAYIDTMNKVLSAHFRAYIQALEKLQMDIATSTDLLGVETRSTGFIFSIGKEPLKTRPSVFALGERINILKEIDQPALIPHIAEAKSQKYSYEVLFRSLQKLLIDTATSEYLFTDDFFGEESIFHDIFAGPIQVVDEHFNTVLLNCYDAIGIMLMIRIIHQHQLIMFKRRIPCLDSYLDKVNMSLWPRFKMVFDLHLNSLRNANIKTLWEDDVHPHYVTRRYAEFTASLVHLNVEHGDGQLDLNLERLRMAIEDLLVKLAKMFSKPKLQTVFLINNYDLTISILKEAGTEGGKAQQHFEEVLKSNIAIYVEELLLEQFSSLIRFVKSRPADETAANSEKASIAEVEPLVKDFASRYKAAIELMHYDVITSFSNFLCGMEILRATLAQLLLYYTRLSECVKRINGGSALNKDLVSISSILFEIKKYSRTF

SEQ ID NO: 19992 - protein, 327 aa, Zea mays
  VARIANT 75: note = Ancestral polymorphism is F, Derived polymorphism is L
  VARIANT 84..327: note = Derived polymorphism lacks residues 84 to 327
  VARIANT 135..327: note = Derived polymorphism lacks residues 135 to 327
  VARIANT 140..327: note = Derived polymorphism lacks residues 140 to 327
  VARIANT 256..327: note = Derived polymorphism lacks residues 256 to 327
  VARIANT 262..327: note = Derived polymorphism lacks residues 262 to 327
MGDREDDRSPLAQPKPKHWRSVRSSPDRGMGIMSFVPEEAGRALSSCFVQGTELTPDVSHRKELFKKFIRLCFGFRHEARDADRWDSEADDLAPHHPQHARVRTELEDQLLYTYRCHFLDGEFSDFKALPRASGELSDFQELLHYLYELTLSDHKWDDANYLEPRRPKQNSPGRYGGEKPQREATKAIDRKNQSSMLKCLHSAPPKRPRAQFARLSAETEAAGKAPAEPKPRVERICAMRASPIHTKTARKKQSAQIDVTAQQLGEPRPAFNNGIQRKAVEPERVSRAASSTRTTKPARGLPAPPPSRTGKERNVAVKLSRFQTAAA

SEQ ID NO: 19993 - protein, 194 aa, Zea mays
  VARIANT 11..194: note = Derived polymorphism lacks residues 11 to 194
  VARIANT 17: note = Ancestral polymorphism is G, Derived polymorphism is R
  VARIANT 22: note = Ancestral polymorphism is A, Derived polymorphism is V
  VARIANT 50: note = Ancestral polymorphism is R, Derived polymorphism is C
  VARIANT 73..194: note = Derived polymorphism lacks residues 73 to 194
MFCHPWLEELWQTKYGGKKVMAGAAALWSLATILTPWAASRSTLMLLVVRALFGLAEGVAFPTMSTFLPKWFQTHERATAVDISMGGFHLGNVISFLATTIIMSHIGLSGTFTFFVSLGYLWLSVWMVNVESEPIDSRTISKCELQLILDGRIGSKVQGSKFPYVRELFSKTQFLAVTLANVVNNWVRMGLWAK

SEQ ID NO: 19994 - protein, 202 aa, Zea mays
  VARIANT 72: note = Ancestral polymorphism is A, Derived polymorphism is T
  VARIANT 86..202: note = Derived polymorphism lacks residues 86 to 202
  VARIANT 119..202: note = Derived polymorphism lacks residues 119 to 202
  VARIANT 121..202: note = Derived polymorphism lacks residues 121 to 202
MGLLSCMSGKSEAAASDPGPRGEGGGPMRGRLQCVGGKKGCSRGPAVRVARERVGLDVEWRPSFSGAYSKTAIHQLCVGRRCLIFQLLHADYVPNTLDEFLSDPDYTFVGVGSRTTTTWRWRTRGTWPNSWRRRWGARTSATRACRASREPSWTPTSRSRSGLEVANAEDLAELAAKEMGRPDLAELAAKEMGRPDLRNTGL

SEQ ID NO: 19995 - protein, 160 aa, Zea mays
  VARIANT 27: note = Ancestral polymorphism is P, Derived polymorphism is S
  VARIANT 33..160: note = Derived polymorphism lacks residues 33 to 160
  VARIANT 35: note = Ancestral polymorphism is R, Derived polymorphism is W
  VARIANT 39: note = Ancestral polymorphism is A, Derived polymorphism is T
  VARIANT 42: note = Ancestral polymorphism is P, Derived polymorphism is L
  VARIANT 45: note = Ancestral polymorphism is A, Derived polymorphism is V
  VARIANT 52: note = Ancestral polymorphism is V, Derived polymorphism is I
  VARIANT 58: note = Ancestral polymorphism is G, Derived polymorphism is D
  VARIANT 68: note = Ancestral polymorphism is Q, Derived polymorphism is H
  VARIANT 85: note = Ancestral polymorphism is T, Derived polymorphism is M
  VARIANT 101..160: note = Derived polymorphism lacks residues 101 to 160
  VARIANT 130: note = Ancestral polymorphism is R, Derived polymorphism is C
MKESSPPPPDPAASAVAVKEDEWEVRSGGMLVQRWSPDADAPAGAPVPTIRVKVKFNGVYHKIYIKSQASFDKYSELKKMLSSRMGLHPEDQNLVYKDKEWDSKAFLDMADVKDRSKMVLLEDPAAQAKRLLEQRHADKAERAAKSISRISLDVDKLTKA

SEQ ID NO: 19996 - protein, 143 aa, Zea mays
  VARIANT 3: note = Ancestral polymorphism is P, Derived polymorphism is S
  VARIANT 60: note = Ancestral polymorphism is L, Derived polymorphism is V
  VARIANT 122: note = Ancestral polymorphism is A, Derived polymorphism is T
  VARIANT 130: note = Ancestral polymorphism is I, Derived polymorphism is T
MAPREHHQPQEEEEEDTAGVVKLISAEGFEFVVDKKAAMVSNTLRNMLTSPGRYPSILHLFRSLVRRPRITSQPPPSSSSPGGFSETRQGEVRFPEIPTNILEKICQYFYWSLHYSSGKETAEFLIEPEITLELMMAANYLDT

SEQ ID NO: 19997 - protein, 196 aa, Zea mays
  VARIANT 17: note = Ancestral polymorphism is S, Derived polymorphism is C
MEASSLALVAAVLLLSSTLAASDFCVCSSDQPTAVLQKAIDFACGPQGGADCTAILQGGGCYSPNTVAAHCSWAANSYYQNNKARGATCDFGGAAAVSTTDPSFSGCTFASSATSAGAGTGTAGTTTGTTTAGGATTGTLSPGVGIGGLNGTGMGGSTGLGPADNTLDAAAPGLLPGAASLAAAAAALSLLALLQH

SEQ ID NO: 19998 - protein, 152 aa, Zea mays
  VARIANT 18: note = Ancestral polymorphism is P, Derived polymorphism is L
  VARIANT 54: note = Ancestral polymorphism is R, Derived polymorphism is I
  VARIANT 87: note = Ancestral polymorphism is L, Derived polymorphism is M
MGPLSHNYLLRAAHLSNPIMVDIRVQAKRLKIQMEGETIRYIQLQSGAKIQVTRDHEAEPGALTRQVELSGKPEQISKAEQLIKEVLAEADAGSSGARSGGRKYNATQQGAEMYQMKIANNKVGLIIRKGGETIKSMQTKSGARIQVCYLVI

SEQ ID NO: 19999 - protein, 422 aa, Zea mays
  VARIANT 16..422: note = Derived polymorphism lacks residues 16 to 422
  VARIANT 60: note = Ancestral polymorphism is P, Derived polymorphism is S
MEAIGITNYRETIVIWSKSTSYPLCDAIVWMDARTSPVCRRLENELSGDRTHFVETCGLPISTYFSAMKLLWLMENVVAMLLLLYRLRKPFFWYHILVYLGQLGIGLLVLQNLSGINGVLFYASSIFKAAGVTNSDLATCSLGAIEISTSGITLCLLVVSVVFFLKDNISEDSNSYYILTMISLVGIVSFVITFSFGMGAIPWLMMSEEDVRGRTTARDGYTGRLGGGDAGRRKERKGESVRRKKSPKAEMHRLNGSWTDIFITDFGLSSFPVLFYQWRHGDWRTEGRSTGLQRGGKARSSRKQQEDVIDGDLCEQYPSLPADMQRKIADELDRTPTPAALLGEDCQGGRLEQARAALISDRACCHPDGTRYLFSVPTVVLYEPSLWARYGVLWFVIENSFLFREGFHQWLVTTGCRTVFVF

SEQ ID NO: 20000 - protein, 131 aa, Zea mays
  VARIANT 51: note = Ancestral polymorphism is S, Derived polymorphism is P
MSGVQEQFEIKFRLPDGIDIGPRRFPPASTVATLKETIIAQWPKGESPHCPYCSFSTDKEKGPRTVNDLKLINAGKILENNKTLSECKSPICDFSGMTTMHVVVRAPTSSKQSGKRAATKAKGFRCGCAIM

SEQ ID NO: 20001 - protein, 974 aa, Zea mays
  VARIANT 568..974: note = Derived polymorphism lacks residues 568 to 974
  VARIANT 577..974: note = Derived polymorphism lacks residues 577 to 974
  VARIANT 592..974: note = Derived polymorphism lacks residues 592 to 974
  VARIANT 653..974: note = Derived polymorphism lacks residues 653 to 974
MAAAPPLSADVLSFLTSAPAAPTPVVAAAWGAARAGPVRGKAALRTTRGGRGGVLAPLVGRRPRRTPLSVRCNATSRDGRITQQEFTEMAWQAIVSSPEVAKESKHQIVETEHLMKSLLEQRNGLARRIFSKAGVDNTRLLDATKKFIQRQPKVLGEEPGSMLGRDLEALIQRARDFKKEYGDSYVSVEHLVLGFAEDKRFGTQLFKDFQITVKTLKSAIESIRGKQNVIDQDPEGKYEALDKYGKDLTAMARQGKLDPVIGRDDEIRRCIQILSRRTKNNPVLIGEPGVGKTAIAEGLAQRIVQGDVPQALTNRRLIALDMGALIAGAKYRGEFEDRLKAVLKEVTDSDGQTILFIDEIHTVVGAGATNGAMDAGNLLKPMLGRGELRCIGATTLDEYRKYIEKDPALERRFQQVYVDQPSVEDTISILRGLRERYELHHGVRISDSALVAAAVLSDRYISGRFLPDKAIDLVDESAAKLKMEITSKPTALDEIDRAVLKIEMERLSLTNDTDKASKDRLSRLEAELSLLKDKQRQLTEKWEHEKSVMTKIQSIKEEIDRVNVEIQQAEREYDLNRAAELKYGSLNALQRQLQTTEKELDEYQSSGKSMLREEVTQDDIAEIVSRWTGIPVSKLKQSDREKLLYLEEELHKRVVGQDPAVKAVAEAIQRSRAGLSDPNRPIASFMFMGPTGVGKTELAKALASFMFNTEEAVVRIDMSEYMEKHSVSRLIGAPPGYVGYEEGGQLTEAVRRRPYSVVLFDEIEKAHLDVFNVFLQILDDGRVTDSQGRKVSFTNSIIIMTSNVGSQYILNMDEEDGSSDSAYENIKRRVMDAARSVFRPEFMNRVDEYIVFKPLEREQINSIVKLQLARVQKRIADRKIKLDVSPGAIEFLGSLGYDPNYGARPVKRVIQQYVENELAKGILRGDFKDEDSIFVDTQVTVPSNGQLPLRKLVFQKVGEQSKPAAEGEKFLPAV

SEQ ID NO: 20002 - protein, 1031 aa, Zea mays
  VARIANT 890..1031: note = Derived polymorphism lacks residues 890 to 1031
MAFSSPASARPQRSPDEVEDIILRKILLVSLTPLANPGPAVAYLELTAAELLSESRPLLALRDAAERLLIDRLSLPDPPAGSPTPFAFLVSAFRRAADEARKISTIRDAALRARLAASIAHLRALILSYARIVAGNPDTFPSQPGAQHPAAELLVFLLAEAADPLDPTPGPGAPPPPGFIDEFFSGADYDSIETAMGELYELLRQSVDKVSALGDFQRPLRVLRRLVGIPNCAKALVNHPKWIPKNQIMFIGEGRVMELYSVLGAFFHVSAIRDREFASKPDVGQQCFSEASSRRPADLLSSFTTIKSVMNGLYDGLKDILLTLLKNLDTREKVLEYIAEVINKNASRSGMQVDPLKCASSGMFVNLSAVMLRLCEPFLDNMESKKDKIDVKYLFCNNRIDFKDLTAINASSEEVSSWIESINNEHAQNNASGEARFVESQEATSSGKNSASSQLRCSKKNFSFVCECFFMTSRVLNLGLMKAISDFKHISQQLARFEDDLESNRAVRDQGGGSPQLEQDITRLEKIVEILSQDKLCYEAQILRDGAFLQRALSFYRLMILWSVNLVGGFKMPLPSQCSKEFACIPEHFLDDAMDLLVLTSRIPKALESFVLDDFLSFIIMFMGSTSYIKNPYLRAKMVEVLNCWMPQRSGLSSTASLFEGHQLCLDYLVRNLLKLYVDIEFTGSHTQFFDKFNIRHNIAELLEYLWDVPSHRNAWRQIAKEEEKGVYLNFLNFLINDSIYLLDESLNKILELKEIEAEMTNTVEWERRPAQEREERLRVFHQWENIVRFDMRLANEDVGMLAFTSEQIPAPFLLPEMVERVASMLNYFLLQLAGPQRKSLTVKDPEKYEFKPKQLLKQIATIYVHISRGDKESVFPAAISKDGRAYNDQLFASAANILWKIGGDPKIIQEFMQLAGRAKAAASEAMDAEAILGDIPDEFLDPIQLQYTLMKDPVTLPSSKVTVDRPVIIRHLLSDSTDPFNRSHLTQDMLIPNTELKLQIEEFVQSQQLRKRTAAVSEIGQADGADDMAE

SEQ ID NO: 20003 - protein, 177 aa, Zea mays
  VARIANT 61: note = Ancestral polymorphism is M, Derived polymorphism is V
MSAPNSDSNMQQLVPIAPPGKASGGDSGKELVVADPAGKRSGGVKLREDEEDLEVKLRRIMENVPVRVSNTSGSSAGSGSGDFHQYRQMRRREQDRLARMDADYQKRKEIAEFELRREERMKAAEERTAKKRLKRQKKKQRKKEKRAKTGDNGGEEPNRVESSDDDEGSDDDDKSKQ

SEQ ID NO: 20004 - protein, 180 aa, Zea mays
  VARIANT 151: note = Ancestral polymorphism is L, Derived polymorphism is I
  VARIANT 138: note = Ancestral polymorphism is V, Derived polymorphism is L
  VARIANT 134..180: note = Derived polymorphism lacks residues 134 to 180
  VARIANT 129: note = Ancestral polymorphism is A, Derived polymorphism is S
  VARIANT 128: note = Ancestral polymorphism is I, Derived polymorphism is N
  VARIANT 83: note = Ancestral polymorphism is E, Derived polymorphism is K
  VARIANT 82: note = Ancestral polymorphism is S, Derived polymorphism is Y
  VARIANT 81: note = Ancestral polymorphism is S, Derived polymorphism is R
  VARIANT 80: note = Ancestral polymorphism is A, Derived polymorphism is V
  VARIANT 79: note = Ancestral polymorphism is A, Derived polymorphism is T
  VARIANT 62: note = Ancestral polymorphism is V, Derived polymorphism is G
  VARIANT 59: note = Ancestral polymorphism is G, Derived polymorphism is S
  VARIANT 51: note = Ancestral polymorphism is A, Derived polymorphism is T
  VARIANT 2: note = Ancestral polymorphism is A, Derived polymorphism is V
MAVNWELQGCCHRDQRIFITGVSTIVILLLRTFLLKPFKLITVFLHETSHTLVCKLTCSDGVSSMVRYAELRLMATFQAASSELECFTDCLVLLPTICLEEVLRGFRSVFSGTSFVTYFGFEQHGHNIAVLFHSYVRVNLFSSKMPRKMILYVHYILHYVLRVTGQTKHLGVQRRQELPL

SEQ ID NO: 20005 - protein, 170 aa, Zea mays
  VARIANT 3..170: note = Derived polymorphism lacks residues 3 to 170
  VARIANT 8..170: note = Derived polymorphism lacks residues 8 to 170
  VARIANT 23..170: note = Derived polymorphism lacks residues 23 to 170
  VARIANT 25: note = Ancestral polymorphism is E, Derived polymorphism is K
  VARIANT 26: note = Ancestral polymorphism is G, Derived polymorphism is R
  VARIANT 36..170: note = Derived polymorphism lacks residues 36 to 170
  VARIANT 36: note = Ancestral polymorphism is Q, Derived polymorphism is H
  VARIANT 37: note = Ancestral polymorphism is N, Derived polymorphism is I
  VARIANT 40: note = Ancestral polymorphism is P, Derived polymorphism is S
  VARIANT 40: note = Ancestral polymorphism is P, Derived polymorphism is L
  VARIANT 45: note = Ancestral polymorphism is S, Derived polymorphism is L
MLSASDLQSRMQSSSQLQDQIAEAEGAGIFSTIPAQNLQPETWPSTLAQHISPLRTHPNERIQIGLQPNTTPVPELLGQLSTLTPAGLLSSNEPLMNELEKLKYCNVVLCKNHEQKKSQLQTECNQEIEKVKEKYELLRQEEDSVYHRLTTDLNRGTNIYIEILLCSPVC

SEQ ID NO: 20006 - protein, 88 aa, Zea mays
  VARIANT 85: note = Ancestral polymorphism is N, Derived polymorphism is I
  VARIANT 79: note = Ancestral polymorphism is A, Derived polymorphism is T
  VARIANT 67: note = Ancestral polymorphism is V, Derived polymorphism is L
  VARIANT 55: note = Ancestral polymorphism is R, Derived polymorphism is G
  VARIANT 36: note = Ancestral polymorphism is Y, Derived polymorphism is F
  VARIANT 32: note = Ancestral polymorphism is P, Derived polymorphism is T
  VARIANT 25: note = Ancestral polymorphism is S, Derived polymorphism is P
  VARIANT 19: note = Ancestral polymorphism is I, Derived polymorphism is N
  VARIANT 18: note = Ancestral polymorphism is L, Derived polymorphism is S
  VARIANT 14: note = Ancestral polymorphism is R, Derived polymorphism is T
MTDNDGAAASSWKRLLALIRQWEVPWDDTLDTVVSYKISQVVDAKVIHLDYNNSRIFLSLKDVKVMLETTLGKEELKETILMCTNRVS

SEQ ID NO: 20007 - protein, 514 aa, Zea mays
  VARIANT 70: note = Ancestral polymorphism is G, Derived polymorphism is D
MDRHSLLYQSLIFSVVTIALIRVLKLFLTTRAPKVRLPPGPGKLPVIGSMHHLMNALPHRALRDLARVHGPLMMLQLGGTPLVVVSSKEMARKVLKTHDANFANRARLLGGDIVLYGWSDIVFSPTGEYWRKLRQLCIAEILGPKRVLTFRHIREQEMAAEVARIRAAGPSTPVELNAMFINLANTIVARASFGNVQGNAENFLSAISAGVVLTSGFTVPDLFPTWRPVLAAVTGMRHALEQVHRTVDTTLQGMIKERRRIRGTKRQGEQDENLVDVLLGLQERGGLGFNLTENSIKAVLFDMFSAGSGTLAASLSWGMSELMLNKRAMSKLQGEIRQAFHGKATVTEADIQASSLPYLKLVIKETLRLHPPAPLLVPRESIEACEIEGYTVPARSRVVVNVWAIGRDPKCWDDADEFKPERFEDGMVDFNGTCYEYLPFGAGRRMCPGIAYALPVMETMLVQLLYHFDWLLPDGVSELDMAEMRGLGARRKSPLLLCATPFAIPESTTSEVPR

SEQ ID NO: 20008 - protein, 326 aa, Zea mays
  VARIANT 289: note = Ancestral polymorphism is S, Derived polymorphism is L
  VARIANT 281: note = Ancestral polymorphism is R, Derived polymorphism is C
  VARIANT 279: note = Ancestral polymorphism is R, Derived polymorphism is C
  VARIANT 252: note = Ancestral polymorphism is P, Derived polymorphism is L
  VARIANT 220: note = Ancestral polymorphism is P, Derived polymorphism is L
  VARIANT 216: note = Ancestral polymorphism is L, Derived polymorphism is R
  VARIANT 101: note = Ancestral polymorphism is S, Derived polymorphism is L
  VARIANT 61: note = Ancestral polymorphism is F, Derived polymorphism is S
  VARIANT 50: note = Ancestral polymorphism is M, Derived polymorphism is K
  VARIANT 22: note = Ancestral polymorphism is P, Derived polymorphism is L
  VARIANT 6: note = Ancestral polymorphism is P, Derived polymorphism is L
  VARIANT 2: note = Ancestral polymorphism is T, Derived polymorphism is M
MTLQLLESMGLYSPVTGIALDPHKLEVEYSPAIGICNTLFVLANANFLGMVTILLCKFYPFPWRTSNTTRCLNLGSYNYLGFAAADEYCTPRVIESLKKYSATTTKLHNELEELAARFVGKPPAILFGMGYVTKSAIIPCLIGKGVLIISDSLNHNSIVNGARGSSAIVRVFQYNSPAHLAEVLREQIAGGQPRTHRPWKKIIVIVEGIYSMEGELCKLPEIIAVSKKYKEIIQHLKHSCPVHLYATSMSPPAVQQVISAIKVILGEDGSNRGAQKLARICENSNFFRSELKKMGFEVLGDNDSHVMPIMFYNPAKIPAFSRECLR

SEQ ID NO: 20009 - protein, 138 aa, Zea mays
  VARIANT 23: note = Ancestral polymorphism is Y, Derived polymorphism is D
MLKNSGFTWDDNKKMIQCERSQYEAHCKKHPEARGLYDVAFPYFDALSTIYGNDIATGEGAEGIDEAVGNLEQELATGYASSSVKRRRTSGKEKSGSSDPLLDMLNEVQGDLKGVAMNVGKMTAVMEREAELQEKIKG

SEQ ID NO: 20010 - protein, 198 aa, Zea mays
  VARIANT 29: note = Ancestral polymorphism is N, Derived polymorphism is D
  VARIANT 120..198: note = Derived polymorphism lacks residues 120 to 198
  VARIANT 178..198: note = Derived polymorphism lacks residues 178 to 198
MVSAHTIVRASCGYPCSTYFIEDVMERLNEGLSLFDAILIVPMFQIVWTFFSICTGFVYFQEYQVFDTLRIIMCVLGMTFVFVGISLLAPDDSKGWKDGSSTSEDSIIDIDRNGKMPMEETDTDDSISFVTSVKVSAKHVLSKAKSACSMSLGLGESTISASSVLVMLMVSSRTTGFRGIRNDRPKYAPLRTTDWSNL

SEQ ID NO: 20011 - protein, 490 aa, Zea mays
  VARIANT 269: note = Ancestral polymorphism is P, Derived polymorphism is A
MEKESKQGFFSALKGEVVRGLSPGRSRGKSLLLPRSRKTAAAEEVAPPEKLAQYAPDPLVTHSGSLRLAGEVLAPLMEGPDVAEDDTFAEDSGRRDGFGQWVRGHLTRAPLIAGGGDGSFRRSDLRLLLGVMGAPLAPVSVSTAEPLPLAPVKGAPIESSSAQYILQQYLAASGGAKVLRSARNAYAMGKVRMVASEFETATRVVKNRGAAAAAAVEQGGFVLWRMSPDMWYVELAVGGSKVRAGCNGRLVWRHTPWLGAHAAKGPVRPLRRALQGLDPLSTAGLFAEARCVGEKKVGDEECFILKLSADAETLRQRSEGPAEIIRHVVFGYFSQRTGLLVQVEDSHLTRIQPHAGGDAVYWETTISSFLEDYRAVDGVAIAHAGRSAVTLFRFGETAMSHTKTRMEEAWTIQEAAFDVPGLSTDCFIPPADVRRDSDSVGEPCELPPRGAKAGAVHPACDAVHSRRRRDVAPADGELATRSTGRWRCDF

SEQ ID NO: 20012 - protein, 235 aa, Zea mays
  VARIANT 160: note = Ancestral polymorphism is R, Derived polymorphism is G
  VARIANT 142: note = Ancestral polymorphism is C, Derived polymorphism is F
  VARIANT 111: note = Ancestral polymorphism is V, Derived polymorphism is L
  VARIANT 95..235: note = Derived polymorphism lacks residues 95 to 235
  VARIANT 91: note = Ancestral polymorphism is R, Derived polymorphism is W
  VARIANT 73: note = Ancestral polymorphism is K, Derived polymorphism is N
  VARIANT 69: note = Ancestral polymorphism is R, Derived polymorphism is P
  VARIANT 56: note = Ancestral polymorphism is W, Derived polymorphism is L
MAEMVGSVVVGEVVNRTFSFLISKHSRERLSTREGVERLEMAHIKMEAALELSSRWQHHATDADASLLRWRRKLRRAADECDAALHRWKLRELQEEDARERLARAPLPRRVAHAVLCFLSALLLLARARGGGGDDDACSHACAAVRRFERLASGAAEFLRCVEFGSAPRRCGGLFGGGPVAGRLASYERLQLGAPQQHRFLGVGPASPAEVWADSKPCRAYPNRRPSSGKKLLLV

SEQ ID NO: 20013 - protein, 143 aa, Zea mays
  VARIANT 143: note = Ancestral polymorphism is A, Derived polymorphism is T
MAHLREVQQREAGDDDVDECIPEEWGKRRDMRDTRRHCRRVHHRQDSSVGGKPYSTVGGWVEDSGGGGIRPVRSRLATSSFAGAGRSTACELTTTLWGTRVREWEELRRGTRHGGGGGQEQVGWSRERPWVLALPAGANGVDA

SEQ ID NO: 20014 - protein, 122 aa, Zea mays
  VARIANT 34: note = Ancestral polymorphism is A, Derived polymorphism is V
MAHDHPFSLRLPVHASDHLEGSWLLPLSHLQIYASTPFAPAGSAKTHGLSRDHPTCSCPPPPPCRVPLRSSSHSLTRVPHNVVVNSQAVDLPAPANDEVARRDRTGLMPPPPESSTHPPTVE

SEQ ID NO: 20015 - protein, 233 aa, Zea mays
  VARIANT 4: note = Ancestral polymorphism is R, Derived polymorphism is P
  VARIANT 6: note = Ancestral polymorphism is T, Derived polymorphism is I
MAARATVVLYAALLCLLFATSSVAQSPAAAPAKAPPKPSKDTPTAAPSATPAAPAPKSSSKASSPSAAPAAAPTTPAPAAAPAKPQPKAPAPHTKAAAPAPAAAAPAPVATPPAATPPAAAPPAPVPEVPSAAPAPETKPAEAPAPAPAKKKKPSSSSKDKTKKKKGASAPAPAPVAKKPKTADAPTSAAEAPGPSGDAAAAADTAGAAGRTQAGVMVSSAVAVALGAAALLA

SEQ ID NO: 20016 - protein, 330 aa, Zea mays
  VARIANT 1: note = Ancestral polymorphism is M, Derived polymorphism is I
  VARIANT 64: note = Ancestral polymorphism is C, Derived polymorphism is S
  VARIANT 117: note = Ancestral polymorphism is D, Derived polymorphism is G
  VARIANT 126: note = Ancestral polymorphism is A, Derived polymorphism is G
  VARIANT 162: note = Ancestral polymorphism is L, Derived polymorphism is P
  VARIANT 169: note = Ancestral polymorphism is T, Derived polymorphism is R
  VARIANT 182: note = Ancestral polymorphism is A, Derived polymorphism is T
  VARIANT 183: note = Ancestral polymorphism is F, Derived polymorphism is L
MARELAAACVAAALVALCAAALGVAAQPPAPRPLPSNYQMITPGRYKRDQQLACDNPKDNKAKCMAKCDKRCPNQCIVLCPGCKTFCMCDFYPGVSCGDPRFTGGDGNNFYFHGKKDQDFCILSDAGLHINAHFIGKRNPAMSRDFTWIQALGIRFAGHHRLYLGAQRTARWSDDVDRVELAFDGAPVSVPAEAGAAWESAAVPGLTVARTAAANGVRVQLRGAFDIVANVVPVSDEDSRVHGYGVAEDDCLAHFDLGFRFFGLTDDVHGVLGQTYRSDYVNQLNVSSKMPVMGGAPSYVSSDIFATDCAVARFGARRAGIAMVTGAESS

SEQ ID NO: 20017 - protein, 338 aa, Zea mays
  VARIANT 257: note = Ancestral polymorphism is S, Derived polymorphism is F
  VARIANT 231..338: note = Derived polymorphism lacks residues 231 to 338
  VARIANT 197: note = Ancestral polymorphism is A, Derived polymorphism is T
  VARIANT 169..338: note = Derived polymorphism lacks residues 169 to 338
  VARIANT 25..338: note = Derived polymorphism lacks residues 25 to 338
MDDNNVSGHEPIFNSSPTENANVDEQSDFIEDICDPRNWNNLDNKSRDILVEKGAIREENIVFPLDDNGRHFSYKHYFRKLSNEEVHDRKWLVYSKHVDRVFCFCCKIFNSEKCKSSLAHDGFRDWKHINDKLKEHEASMDHITNMNSWNELRARLNKHETIDKEFHHQITKEKERVRQVLLRIIVVVKFLGKRNLAFRGSSEQLYNDQNDHLRRIKNNEVHYHYLSHKIQNELVYLLASDITKSIIKTVKEAKYFSVILDCTPDVDDTSGEGLFNSLIDSIKYFGLNIEDVRGQGYDKVEEYFLGFIKVDDTSGEGLFNSLIDSIKYFGLNIEDVRD

SEQ ID NO: 20018 - protein, 165 aa, Zea mays
  VARIANT 40: note = Ancestral polymorphism is P, Derived polymorphism is L
MHRRLAALARTRRFGFGRGRDDDQVAPEPDPRTRAGASVPVRGKAFASHQALGVGGHKSSSSGGERWAAPVRRLPEGARHGSGARRPHALPLAHYWYGMSAPISVSVSTSVVRNRVVRRHRLGSDFDLNLTPLPENDAGMMKRWAEERGEVQSPSPIKNRRVSDY

SEQ ID NO: 20019 - protein, 225 aa, Zea mays
  VARIANT 42: note = Ancestral polymorphism is A, Derived polymorphism is V
  VARIANT 23: note = Ancestral polymorphism is G, Derived polymorphism is A
MDGGFPALLDPTALSLALPVTQGPQGLNKLSKDDYLAICLAALAGTRGSSLVVKAAAGFGRQETGGINKQSWCPPQPAPAAHDEALRLRFRCAVCGKAFPSYQALGGHKSSHRKPPTAEQQAVVSAADSEDETTTSSGGGPHRCTICRRGFATGQALGGHKRCHYWDGASASVSLSASGTGSSGVTLRNFDLNLIPVAENAGMKRWVEEEEVQSPLPIKKRRILD

SEQ ID NO: 20020 - protein, 271 aa, Zea mays
  VARIANT 214..271: note = Derived polymorphism lacks residues 214 to 271
  VARIANT 193: note = Ancestral polymorphism is T, Derived polymorphism is M
  VARIANT 192..271: note = Derived polymorphism lacks residues 192 to 271
  VARIANT 69: note = Ancestral polymorphism is A, Derived polymorphism is S
  VARIANT 15: note = Ancestral polymorphism is E, Derived polymorphism is K
MGIVEEAHNLRVVGEGKRGVIVLAHGFGTDQSVWKHLVPHLVADYRVVLFDTMGAGPTNPDYFDFSRYSTLEGYALDLLAILQELGVQSCIYVGHSVSAIIGALASISRPDLFTKLVLLSASPRYLNDVDYYGGFEQDELDELFEAMQSNYKAWCLGFAPLCVGGDMESVAVQEFSRTLFNIRPDIALNVAQTIFQSDVRSLLPHVSVPCHIVQSTKDLAVPVVVSEYLHRHLGGDSIVEVMPSEGHLPQLSSPDIVTPVLLRHIQHDIAV

SEQ ID NO: 20021 - protein, 233 aa, Zea mays
  VARIANT 68: note = Ancestral polymorphism is P, Derived polymorphism is Q
  VARIANT 72: note = Ancestral polymorphism is P, Derived polymorphism is L
  VARIANT 83: note = Ancestral polymorphism is T, Derived polymorphism is I
  VARIANT 96: note = Ancestral polymorphism is C, Derived polymorphism is R
  VARIANT 99..233: note = Derived polymorphism lacks residues 99 to 233
  VARIANT 126: note = Ancestral polymorphism is L, Derived polymorphism is P
  VARIANT 151: note = Ancestral polymorphism is G, Derived polymorphism is D
MMCVYLSGGSACRWYFNPKIPEAEPYHTSHQTRTIALQLSHALNHPPTIEHKQAIESKSLYELTRINPYDFPETGYECTVTITEIPGENKWWYPACTKCFKTSTPQNTVYHCNDCNWDKYTFRYKLKFLASDGTETTEMFCFNNVGKQIVGKSCEIVLRGVSEHSPIPPDLAQIISLKFTFRVTVDDQSFFQQNNHPNVLRINSIITAHGRQQSLPLQARNLQQQGPSTPPNT

SEQ ID NO: 20022 - protein, 451 aa, Zea mays
  VARIANT 157..451: note = Derived polymorphism lacks residues 157 to 451
  VARIANT 176: note = Ancestral polymorphism is G, Derived polymorphism is D
  VARIANT 310..451: note = Derived polymorphism lacks residues 310 to 451
MVLSAEIRFGHQIPYPTTTLTPTRRRKKRKRKTRRSSRGWRAEEMDEATVSSPLMLPATKARGGVSVVEMVMGALRRSLMLCSSSASAGVREPEQEEEWVTPPGGMQIGGPTDVRHASHVTFDRFIGFLDLPADLEPDVPRPVPSASFLHGIRRRPWGKWAAEIRDPSKGVRVWLGTYSTAEEAARAYDAEARRIRGKKAKVNFRDEAAAAGAQKPTATATTPTACASAARLGPPPPKFRADEVFGNMNGGNNDLFMIMFTFSDSSSKVVRVEPGEGAAGFLPAVEVLDDEPLLPGSKRSAANMMLLSDQSSDSYGSCDLGWDWDDDTMTSDYASVFAPAAPSNVVPAWYTQGGPVSKRTRSSYGYGVAMLQQGDGAQAMPGGFDPETNYQYQPLPYVVESSPSDGVSTHDMDCLQMMRAGDVPQDGASSGGGGGGDIWSLDELLMAAVAY

SEQ ID NO: 20023 - protein, 249 aa, Zea mays
  VARIANT 134: note = Ancestral polymorphism is V, Derived polymorphism is L
  VARIANT 31: note = Ancestral polymorphism is G, Derived polymorphism is V
MAAALRSPASAKVSSPAAASKVRQASRVAVGGFRQHPRSRVGPVAVRASLFSPKPAAAKDARPTKVQELYVYEMNERDRESPAYLRLSAKQTENALGDLVPFTNKPLFLPTHPCTQVYNGSLDKRLGITAGICVLIQHVPDRNGDRYEAIYSFYFGDYGHISVQGAYLTYEESYLAVTGGSGVFEGAYGQVKLHQIVFPFKIFYTFYLRGIPDLPRDLLCTPVPPSPTVEPTPAARAAEPHACVNNYTN

SEQ ID NO: 20024 - protein, 322 aa, Zea mays
  VARIANT 79..322: note = Derived polymorphism lacks residues 79 to 322
MHKQAQAHPVSGSLPPPNQDSKKPSMACRQGAGDARTHIGAEDRLAPDDDFEFCILSSGGLAPVGDDAPGMCVADEVFYGGKLLPLRLSSADAAALLLLRSDSLDGAATASASASTTTSSGFSSRSVSRGSSSSSCCVSRSTSSNSARSDHAGPAGSGSSSSGKSASSAVPVPVPPRRSPSGSVFYAHPSPSPQRRSRTAAPAPPRRSTGSAPPVAWGVIRLGVVGAPEVYAPRPRAPASRSARFEQRRPADKKLALGLLGAGLVCSCSPDAVAPVGSAEVAATRRQRKKAEEKRSATEQSGKGTARRSRILEWLDDLSVSK

SEQ ID NO: 20025 - protein, 328 aa, Zea mays
  VARIANT 103..328: note = Derived polymorphism lacks residues 103 to 328
MLLRLKIVVGVHSVVLPVPVPGGYGHGACYAAVEPCWRRSRRPALAAAGGLVARRPRQSATVVMALKEEPEGSSRRGFAGGGPSWDPGLEIQVPFEQRPVNEYSALKDSALYSWAELSPGSFFLRLGGLCLVTFTVLAAPIAAASFNPGKDPLKFVLAAGIGTLLLVSLAVLRIYLGWSYVGDRLLSAVVPYEETGWYDGQMWVKPPEVLARDRLLGSYKVKPVVNLLKQTLVGTGALLVGAVSLFAFAAPVEDFLHALSQPPSSATASSKPSLRKEELLRLPVEVMQDDDLAAAAAEAADGRPVYCRDRYYRALAGGQYCRWDDLLN

SEQ ID NO: 20026 - protein, 275 aa, Zea mays
  VARIANT 23: note = Ancestral polymorphism is G, Derived polymorphism is E
  VARIANT 45..275: note = Derived polymorphism lacks residues 45 to 275
  VARIANT 136: note = Ancestral polymorphism is G, Derived polymorphism is R
  VARIANT 145: note = Ancestral polymorphism is A, Derived polymorphism is T
  VARIANT 213: note = Ancestral polymorphism is S, Derived polymorphism is C
MSRRRGAGGGLCIRKKARGFMCGCGGTKAISISDGSDKSPTATPQTAASTTPLTGMSVTTTTTTTTKPTRGGGGGGYRPAAAPSTTEAPSLFSSSSLYADTTDDGPSSMESTPSLSALLRQLGELERSVRFLHSAGAGAEEEADAGKLQGSGGRRQRRAVGEGGSGRVEESVAVVKESANPLGDFRRSMLQMIVEKEIVDGAGLRELLHRFLSLNSPQHHHLILRAFAEIWEEVFAGHERTPDDDFLVSHHHHRNKKHHLATRGGVVLESSGLLS

SEQ ID NO: 20027 - protein, 289 aa, Zea mays
  VARIANT 253: note = Ancestral polymorphism is A, Derived polymorphism is V
  VARIANT 226..289: note = Derived polymorphism lacks residues 226 to 289
  VARIANT 219: note = Ancestral polymorphism is A, Derived polymorphism is T
  VARIANT 218: note = Ancestral polymorphism is H, Derived polymorphism is Y
  VARIANT 214: note = Ancestral polymorphism is W, Derived polymorphism is G
  VARIANT 213: note = Ancestral polymorphism is D, Derived polymorphism is H
  VARIANT 211: note = Ancestral polymorphism is A, Derived polymorphism is V
  VARIANT 206..289: note = Derived polymorphism lacks residues 206 to 289
  VARIANT 202..289: note = Derived polymorphism lacks residues 202 to 289
  VARIANT 193: note = Ancestral polymorphism is R, Derived polymorphism is W
  VARIANT 182: note = Ancestral polymorphism is C, Derived polymorphism is Y
  VARIANT 177: note = Ancestral polymorphism is H, Derived polymorphism is Y
  VARIANT 176: note = Ancestral polymorphism is T, Derived polymorphism is A
  VARIANT 174: note = Ancestral polymorphism is T, Derived polymorphism is A
  VARIANT 171: note = Ancestral polymorphism is A, Derived polymorphism is V
  VARIANT 156: note = Ancestral polymorphism is D, Derived polymorphism is Y
  VARIANT 149: note = Ancestral polymorphism is A, Derived polymorphism is V
  VARIANT 134: note = Ancestral polymorphism is L, Derived polymorphism is P
  VARIANT 125: note = Ancestral polymorphism is S, Derived polymorphism is L
  VARIANT 110: note = Ancestral polymorphism is R, Derived polymorphism is T
  VARIANT 101: note = Ancestral polymorphism is L, Derived polymorphism is W
  VARIANT 96: note = Ancestral polymorphism is R, Derived polymorphism is I
  VARIANT 94: note = Ancestral polymorphism is A, Derived polymorphism is V
  VARIANT 93: note = Ancestral polymorphism is S, Derived polymorphism is L
  VARIANT 85: note = Ancestral polymorphism is R, Derived polymorphism is W
  VARIANT 71: note = Ancestral polymorphism is R, Derived polymorphism is W
  VARIANT 70: note = Ancestral polymorphism is C, Derived polymorphism is Y
  VARIANT 53: note = Ancestral polymorphism is Q, Derived polymorphism is K
MMARGSGTRPRRLLSRGTRSSAATQIFNLKSLLGKFFNESFRVESSHKWGDEQPRVAEHLLSCIRAEGSCRDYVAIKMDGSSILRLLQSKVLLVRITAVGLLMELVCLRRREMVELLLHGSRAELIVEAMDVLLKYLRSLPAEEQAPIAVLLMCLDALVEPNRNNTYREEAIKTITHSLRCCLSEDTAVPSTRRALLLLGGQFNFSGDLHAEDWMLEHAGFVDHSQATTATSDAVVHDKEAAENDAWLRHVAATLLGSRSRIKRPFLEALSRCLGSPDVGLVGACLTMA

SEQ ID NO: 20028 - protein, 160 aa, Zea mays
  VARIANT 110: note = Ancestral polymorphism is V, Derived polymorphism is I
MSGGIARGRLAEERKAWRKNHPHGFVARPESLTDGSVNLMVWNCTIPGKHGTDWEGGYYPLTLHFSEDYPSKPPKCKFPQGFFHPNVYPSGTVCLSILNEDSDWRPAITVKQILVGIQDLLDQPNPADPAQTDGYHLFIQDPAEYKRRVRLQAKQYPALV

SEQ ID NO: 20029 - protein, 277 aa, Zea mays
  VARIANT 138: note = Ancestral polymorphism is G, Derived polymorphism is S
  VARIANT 60: note = Ancestral polymorphism is A, Derived polymorphism is P
MEFTPAHAHARVVEDSERPRGGVAWVEKEHMFEKVVTPSDVGKLNRLVIPKQHAERYFPALDASSAAAAAAAAAAGGGKGLVLSFEDRAGKAWRFRYSYWNSSQSYVMTKGWSRFVKEKRLGAGDTVLFARGAGGARGRFFIDFRRRRQDLAFLQPTLASAQRLLPLPSVPICPWQDYGASAPAPNRHVLFLRPQVPAAVVLKSVPVHVAASAVEATMSKRVRLFGVNLDCPPDAEDSATVPRGRAASTTLLQLPSPSSSTSSSTAGKDVCCLDLGL

SEQ ID NO: 20030 - protein, 464 aa, Zea mays
  VARIANT 304: note = Ancestral polymorphism is S, Derived polymorphism is L
  VARIANT 94..464: note = Derived polymorphism lacks residues 94 to 464
MEPPASYMAPPPRHRVIKGLRYQTTDKQYGKWSNPDDKATVGNYFLNSCGEIHLNPEHLGNERLMWGSSEMKHDLGSFSSKVSSAESRFIQTCEGSSEFPDVNNTSVDSPCWKGTPASYQCSFGIMENNGVPPVAIRTAGYINSHKNQKPPELGSGYPWRFCEHQVALSSEIDPFKVFKLPERCKISKDHKEVPPIDVKVLNDMTTHACCLPDKQHSATQKCYDSREDSQNVITSSQRESLCPASKPKLLVVEKEESTHTRGEDPSQCYPGVEGNMMNMASESSSSTRAIFLKLMHNLSVVLLLTCKGGSLLHEDEEDLLQSVIQNLTAASSKRSKIDEPFLFQALTHFMSPRLNKKTGDGLSNSSQMKLKNINCARNNFWRSMHEDSVRENADSEFKATVSQYITAGSLTNHQEDKMLDNTKVSQASIYRNLWIEAEASACKLKYELQHAHLGLRQQKASMSQ

SEQ ID NO: 20031 - protein, 357 aa, Zea mays
  VARIANT 324..357: note = Derived polymorphism lacks residues 324 to 357
  VARIANT 292: note = Ancestral polymorphism is A, Derived polymorphism is D
  VARIANT 272: note = Ancestral polymorphism is V, Derived polymorphism is L
MVSAAAQAGVVAACVVLFVPMGLAGWHLSRNKVLFFSGALFISLAVGVHLSPYLPSLPHLASSFLLPHSGAASASASSSSGSSCVPFLHRVSWSDAAGAADDGSGGGKARAWSWPPSLASACGFARLSRDDASLLLNGSWVMVAGDSQARLLVLALLRLLLDPAAAAAAEPELFRRHSDYHAAVPARGISVDFVWAPFESNLTRLLREDLRLAPRLPDVLVLGSGLWHMLHVTDAASYGDALASVAGAAESLRSQLPVPPPHMFWLGLPHLLNHMLNTDAKRAHMNGTMLHAYDREVDRRGVLRRDGGPFLLLDVGKLTQGCGQQCTADGMHYDGGVYDAVMHIMLNALVIESQQRI

SEQ ID NO: 20032 - protein, 426 aa, Zea mays
  VARIANT 158..426: note = Derived polymorphism lacks residues 158 to 426
  VARIANT 194: note = Ancestral polymorphism is R, Derived polymorphism is M
  VARIANT 199..426: note = Derived polymorphism lacks residues 199 to 426
  VARIANT 216: note = Ancestral polymorphism is G, Derived polymorphism is C
  VARIANT 253..426: note = Derived polymorphism lacks residues 253 to 426
  VARIANT 397..426: note = Derived polymorphism lacks residues 397 to 426
MPDSILLPEIPVARRSSPGSSPAQTTCAPSTHGIPKSRPRFLSLPVRGRRFRALTYASPNPRFPSLPVRGWRFRALDPWRPQIPGSSPFPFADGASARRRSCPQFLPRFGASPHRGTTPSPWGIDNVDSVWPHRSQTNPATVALLLTDKDLESEESMYERWSSVHTVSRDLTEKQSRFEAFKANSRHIGEFNKMKDVPYKLGLNKVDNTVVLIFDGRTAYVRALQPINKDEEVSISYIETAAVTKKRNNDLKQYFFTCTCPRCVKGFDEDALLEGFRCKSQACDGFLLPNSGSAAGAVACIACPTLYAYLKKTDPGVPAQLLEYDERFGQYGCDFTFYDYNRPEELPAAMKHAYRVIVADPPYLSKECLEKVAKTVSFLARPEGSFLLLLTGDASPSDAQPVKKESESQAWLGLGPNAVKSNLNLS

SEQ ID NO: 20033 - protein, 276 aa, Zea mays
  VARIANT 170..276: note = Derived polymorphism lacks residues 170 to 276
  VARIANT 174: note = Ancestral polymorphism is P, Derived polymorphism is L
  VARIANT 219..276: note = Derived polymorphism lacks residues 219 to 276
  VARIANT 266: note = Ancestral polymorphism is A, Derived polymorphism is V
MPRHRHPRVAAPRKEGTGNLSISATRSCNARPSPRPLCAPTPSPPPPLLLIPSLPPNPRRKSRFRDAPTPDSPHGRATSISPISAVHSRHRCHTSASFAPAFAADGSSDGVARLNSFLRRQRAVVIVLAAGDRTASRPTKLVLSDASKSVSSIVAAICYAWMLPSKGDGQAAVPVVNMPQSRMAWCRQAAWLLYHVGVDASALLFTDEVDMDGLIMDQRVSLLVVGQDVLKSKAEVASVCTTLTHTYCEDAYSLLQNLDIKKLLLAGILLDTSNLS

SEQ ID NO: 20034 - protein, 184 aa, Zea mays
  VARIANT 21: note = Ancestral polymorphism is W, Derived polymorphism is C
  VARIANT 23: note = Ancestral polymorphism is I, Derived polymorphism is V
  VARIANT 36: note = Ancestral polymorphism is E, Derived polymorphism is K
  VARIANT 137..184: note = Derived polymorphism lacks residues 137 to 184
MAGECKLVGSASCCDYREIVWKIMEQVKVESDQWTEMQDMLEQVRLEMQELQASRDAWQHRAMASDISLRSLNSQVLEWKNRAQASEQRVEELHMEISELESKLHTFKAHLPAPAAIPNQKQWSDACKMEYPRAKPQHPQSQESGKEEIKKHVLICRVKRSPSSMLSERSPFQEIGNISLPRHR

SEQ ID NO: 20035 - protein, 91 aa, Zea mays
  VARIANT 12: note = Ancestral polymorphism is A, Derived polymorphism is T
  VARIANT 27: note = Ancestral polymorphism is A, Derived polymorphism is E
MESSRGKLSAAAVLLLMTLLMVAAMRAVEARDCLTQSTRLPGHLCVRSDYCAIGCRAEGKGYTGGRCLISPIPLDGILCYCVKPCTSTTTE

SEQ ID NO: 20036 - protein, 98 aa, Zea mays
  VARIANT 81: note = Ancestral polymorphism is T, Derived polymorphism is I
  VARIANT 39: note = Ancestral polymorphism is P, Derived polymorphism is L
  VARIANT 32: note = Ancestral polymorphism is W, Derived polymorphism is C
  VARIANT 22: note = Ancestral polymorphism is R, Derived polymorphism is M
MVNQKPLFPGDSEIDELFKIFRVLGTPNEQSWPRVSCLLDFKTAFPRWQSQDLATIVPNLEPAGLDLLSKMLRYEPSKRITARQALEHEYFKDLEMVQ

SEQ ID NO: 20037 - protein, 252 aa, Zea mays
  VARIANT 89: note = Ancestral polymorphism is G, Derived polymorphism is E
MAVGFRRTLTTLASPKSVAPSFLLGCARTRKLSYARARSSSSLPVRLHPLAAALHESARALLAWADAPARTGPAWVADGAGRAGRVLAGLADLLHHPQARDALRRRHGHRWATEERLLDDLLLLADLHGSFRDSLVALRQVLSETHAALRRRDGARLAAALRAQRRAAPTPTPYSPGSPMWLVTDLLRRRRAVSFDDSSCGAEEEEEERKAAMGRVRGLEECVDAAEAGCEEVYRALVNARVSLLNLLTPRF

SEQ ID NO: 20038 - protein, 172 aa, Zea mays
  VARIANT 154: note = Ancestral polymorphism is T, Derived polymorphism is A
  VARIANT 102: note = Ancestral polymorphism is A, Derived polymorphism is T
MASSAMLQVFGQPASTDVARVMACLLERQLEFELVRTDTFKRGRNNKLPELVKMRARSQSPPPPPPQIPGTYAGTCARSSRGGAPGTCTARARIEQWLQAEAHSFDAPSSALVLHLALSPATAAESERQLLRVLDVYDGALGRSAQVVAAQARTAHYYPAAFDPPASGHAAV

SEQ ID NO: 20039 - protein, 504 aa, Zea mays
  VARIANT 108..504: note = Derived polymorphism lacks residues 108 to 504
MRRPWRHSGPGSAVAARHGAADLCLREVGDLLPRRFARRAAGSEDLVMRLQIHRKLDRHTGCVNTVGFNEVGDTLISGSDDQKVMLWDWDTGTVKLEFHSGHGGNVFQARFMPCSDDRTIVTCAADGEVRLAKIQDAGDVSTTLLGEHEGRAHNLAIEPGSPYIFYSCGEEGFVQHFDLRTNTASKLFLCRNSTKSVYSSLVHLNALAIDPRNPNLFVVGGSDAYARVYDIRKCKWDGSSDFSHASDCYCPPHLVDNKSVGITGIAFSHLSELLVSYNEENIYLFSKDGGLGPDPKKSVRIGAIEGCKSTMLASGHDVSQPAPQTYVGHVNRETVKRVSFIGPNDEYVASGSDCGRIFIWRKGDGKFLRAMEGDECIVNCIEPHPHAMAIASCGIDNDVKVWTPSAIERAPMIHVDELQLRPRKRRAKLWRFGIRDLLIQQILVSENRQQSAEEGSSEDHEDNIELLDLVLQAAVEGVSSSSDEEEEDDDDGDNEEAAASDGSE

SEQ ID NO: 20040 - protein, 361 aa, Zea mays
  VARIANT 87..361: note = Derived polymorphism lacks residues 87 to 361
  VARIANT 22: note = Ancestral polymorphism is P, Derived polymorphism is L
MPKLRAGIPTQYLVVVLGMQVPYHAASSVININRVGRTLYKLGVCQKLRLSTYKKVSALPVLDLHRPRVPTRPPLPENLPLRRSHHQRLRRIRCPLAHADLAPRPPPLLPSPPPPPPPASPLRPLLPPCATPLRTRWDLGASRPPLQSTSTTHAFFSGPTSKSRGRGHSLGGAKYGDGVLARSCPSSMTPSSNAPNPHALSPKRQAPGDTVVYLSPAYLLSSHIDIQAAVAKAAELRALHASLLQSGSAAAYNVRAYASCSPPIRAPHHRQRRCRPHRVDGHRITFRRPRHVAAPGGGVGRRHRRRGARDGGSGGPPLQAQSHSPLLRLTKMASLLEDLIWYSLSSSHASPCLPPPTFPPL

SEQ ID NO: 20041 - protein, 313 aa, Zea mays
  VARIANT 276: note = Ancestral polymorphism is I, Derived polymorphism is N
  VARIANT 192..313: note = Derived polymorphism lacks residues 192 to 313
  VARIANT 137..313: note = Derived polymorphism lacks residues 137 to 313
  VARIANT 123: note = Ancestral polymorphism is R, Derived polymorphism is C
  VARIANT 107..313: note = Derived polymorphism lacks residues 107 to 313
MDAELEAKAVEAKAETVATESEAKPDASDEEAGGTGSDREADVKGADPKAKAEESDGEDEGATAVTDDDSEEEAAETVEEDGGESDTEGDAEESPPSPPRRSRRRKRAATPDDETEENPTPSRRRCRRKSGERGDSQPPLPDHLRCRRSDGKKWRCSGRALPTVSFCEYHYTRASKGKKLPADEEVLVVVLQRHKNKRKGRRSINPPTSPQAATSDPQTRDLPNGLMTISPASSGPAALSTPVKIGVEIPAPIQRCYRSKNVEPLHVGPVKVTQLIFKLLLGCSSCDECDKNNKNMSLLWNEEGCTCGQLQEL

SEQ ID NO: 20042 - protein, 398 aa, Zea mays
  VARIANT 233: note = Ancestral polymorphism is R, Derived polymorphism is M
  VARIANT 257..398: note = Derived polymorphism lacks residues 257 to 398
MLSALMDYLKSCWGPASPAGRPRKGSDATGRQDGLLWYKDGGQVVDGEFSMAVVQANNLLEDHSQVESGPLSTSEPGLQGTFVGVYDGHGGPETARYINDHLFNHLRRFASEHKCMSADVIRKAFRATEEGFISVVSNQWSLRPQLAAVGSCCLVGVVCSGTLYVANLGDSRAVLGRLVKGTGEVLAMQLSAEHNASYEEVRRELQASHPDDPHIVVLKHNVWRVKGIIQITRSIGDVYLKKPEFNREPLHSKFRLQETFRRPLLSSDPAITVHQIQPTDKFIIFASDGLWEHLSNQEVVDMVQSSPRNGIARKLVKSAVQEAAKKREMRYSDLKKVDRGVRRHFHDDITVIVVFFDSNAMTTAAWSRPSVSLRGGGFPIHSNTLAPFSVPTELNNSY

SEQ ID NO: 20043 - protein, 242 aa, Zea mays
  VARIANT 40: note = Ancestral polymorphism is S, Derived polymorphism is L
  VARIANT 51: note = Ancestral polymorphism is A, Derived polymorphism is V
  VARIANT 53: note = Ancestral polymorphism is S, Derived polymorphism is L
  VARIANT 72: note = Ancestral polymorphism is G, Derived polymorphism is R
  VARIANT 172: note = Ancestral polymorphism is Q, Derived polymorphism is L
  VARIANT 188..242: note = Derived polymorphism lacks residues 188 to 242
MMSDAIDETLDKDEAEEETEELTNQALLYRLSGDYNPLHSDPDIAQLAGYVSSECYSIIVFIVIFDIEEVKGSLGLDFAIATLNYWVHKGIAFICEIRFSFLSCFDLSWFNVVEALHYDHMVLVDYLISRDVGVLCAQYLLRCLSLVSQSWHAFVDDLVYSTKIEKLNCKRQRIFGDKDSNRANSSNQYKNGSGCDKEVEDSRKLFLNAKKCLYLLKRTLEDLQKKDLFPYNPKPLLRRSVV

SEQ ID NO: 20044 - protein, 43 aa, Zea mays
  VARIANT 3: note = Ancestral polymorphism is L, Derived polymorphism is F
  VARIANT 10..43: note = Derived polymorphism lacks residues 10 to 43
MWLDGQKVHYQMNLVVGEACATNQTCSYRGRFGHMLGHLEIKE

SEQ ID NO: 20045 - protein, 567 aa, Zea mays
  VARIANT 347: note = Ancestral polymorphism is G, Derived polymorphism is S
MPSRSGSRGRRPRPAPEVAAPTAVQVSSSGSSEEGSDEEEEEGSEGSGDGARSPGGSASKYKAAESEAEAEDPCLPSCPICMVAWTADGSHRVSCIPCGHVYGRHCLEMWLLQYGKKKAPCPQCGKRYTQNNIINLYVPEIVVPNNDLEKQVLSLRERNEYLEKQQAKLLEEIKEHKRQIMLQQNIIYESNKKRQRVTEQSSDGILGAELIASHTKDIDHNNLSSFALQNEFLVDGARVMGIDASSQIILTSGRAHGVSAEHILTKVSMFHGHGMEKIHLPPDTKAIRDICVLPGGHVVFASLGRKLSIFSMATNNVVLQYDLPAPGWSCSGDYTTSSHIYAGLQNGMLLVFDIRQTSAPLHSSMGLSTHPVHTIHCAVDGSGSRKVFSASSIGPCVWDASENRPSLVSGMENQGVCISLACSSPSSDVLVASYRPRVELPDAIATSQASTPQSPAPTGSGKLGCHTLLRRTTATSFARDHICSGSVSELRMSKSAIIPCRDNQHLFAYGDESLYGVRTWRLPSFQRYTDLKPHRQPVLDLRYAESSTGERYLGCLSAEKLQVFTIR

SEQ ID NO: 20046 - protein, 522 aa, Zea mays
  VARIANT 5..522: note = Derived polymorphism lacks residues 5 to 522
MPSRSGSRGRRPRPAPEVAAPTAVQVSSSGSSEEGSDEEEEGSEGSGDGARSPGGSASKYKAAESEAEAEDPCLPSCPICMVVWTADGAHRVSCIPCGHVYGRHCLEMWLLQYGKKKAPCPQCGKRYTQNNIINLYVPEIVVPNNDLENQVLSLRERNEYLEKQQAKLLEEIKEHKRQIMLQQNVIYESNKKRQRVAEQSSDGILGAELIASHTKDIDHSNLSSFALQNEFLVDGARVMGIDASSQIIFTSGRAHGVSAEHILTKVSMFHGHGMEKIHLPPGTKAIRDICVLPGGHVVFASLGRKLSIFSVATNNVVLQYDLPAPGWSCSGDYTTSSHIYAGLQNGMLLVFDIRQTSAPLHSSMGLSTHPVHTIHCAVDGSGSRKVFSASSIGPCVWDASENRPSLVSGMENQGVCISLACSSPSSDVLVASYRPRVELPDAIATSQASTPQSPAPTGSGKLGCHTLRDNQHLFAYGDESLYGVRTWRLPSFQRYTDLKPHRQPVLDLRYAESSTGESSFAV

SEQ ID NO: 20047 - protein, 131 aa, Zea mays
  VARIANT 90: note = Ancestral polymorphism is S, Derived polymorphism is L
  VARIANT 63: note = Ancestral polymorphism is G, Derived polymorphism is V
MARSVSYVSAAKLVSMARGNPRLAIIDVRDEERSYQAHIAGSHHFASGSFEARMPELVRAASGKDTLVFHCALSQVRGPTCARMFSDYLSETKEDSGIKNIMVLERGFNGWEVSGQPVCSCTDAHCKGTCS

SEQ ID NO: 20048 - protein, 92 aa, Zea mays
  VARIANT 59: note = Ancestral polymorphism is E, Derived polymorphism is D
  VARIANT 52: note = Ancestral polymorphism is C, Derived polymorphism is S
  VARIANT 42: note = Ancestral polymorphism is P, Derived polymorphism is L
  VARIANT 28: note = Ancestral polymorphism is A, Derived polymorphism is E
  VARIANT 27: note = Ancestral polymorphism is R, Derived polymorphism is Q
MEPSRGKLSAAAVLLLMTTLLVVAAMRAVEARDCLTQSTRLPGHLCVRSDYCAIGCRAEGKGYTGGRCLISPIPLDGILCYCVKPCPSNTTT

SEQ ID NO: 20049 - protein, 451 aa, Zea mays
  VARIANT 16..451: note = Ancestral polymorphism lacks residues 16 to 451
  VARIANT 2: note = Ancestral polymorphism is L, Derived polymorphism is S
MLQKRWKGCIFFLLLSGALGVLMASESSSSEFAKIVQSKQTRQARLCGADSELLSSLAGSDAEVMVTIPNEQLEHVAEFQEEADLWVAANVARFLPSTRITHVVAGDDVPANSPGSAHFLVPAMLNLRSALVAAGLGGRVKVSSAMSGEALSAPAWSGVVGHVLRFLESAGSPLLLKSSSRPSEEASDARVGRAYAAMRALGVSGVPVIATDLAAGGDAVPYYYSYYGYGYPGGHGRRRSLATTGTFCVALQDADPAALQAGLNWACGPGHADCSAIQPGGACYQQNNLPAIASYAYNDYYQEMASTGATCSFNGTATTTTNDPSSGSCVFAGSSTAGGSSNSSVPVGASPPTSLSPPTGFAPPVGSSPPSSSSEFSPPAVGTAPLSGFTPPDGGGFGTPPGSFNGTGTFGPSGTLSPYNGGAPGLSRAGLSLTALSAAAVAVLLASIDAM

SEQ ID NO: 20050 - protein, 216 aa, Zea mays
  VARIANT 52: note = Ancestral polymorphism is P, Derived polymorphism is S
  VARIANT 71: note = Ancestral polymorphism is P, Derived polymorphism is S
  VARIANT 156..216: note = Derived polymorphism lacks residues 156 to 216
  VARIANT 170..216: note = Derived polymorphism lacks residues 170 to 216
  VARIANT 173..216: note = Derived polymorphism lacks residues 173 to 216
MGRSYNHSPSPPRGYRRRTRSPSPRGRYGGRDTDRDLPTSLLVRNLRRDCRPDDLRRPFGKFGPVKDIYLPKDYYTREPRGFGFIQYFDPEDASDAKYYMDGKMLLGREIAVVFAEENRKKPSDMRAREKISGRGRSYDGRLRSRSPGLNGSPRGRSRSQSRSYSPAPKRKHYSRSPAPRPRERSLSRSPAVNRSRSASPIVSRSPHRQGSLSVSE

SEQ ID NO: 20051 - protein, 89 aa, Zea mays
  VARIANT 3: note = Ancestral polymorphism is V, Derived polymorphism is G
  VARIANT 9: note = Ancestral polymorphism is N, Derived polymorphism is T
  VARIANT 10: note = Ancestral polymorphism is I, Derived polymorphism is M
  VARIANT 14: note = Ancestral polymorphism is C, Derived polymorphism is Y
  VARIANT 38: note = Ancestral polymorphism is P, Derived polymorphism is L
  VARIANT 46: note = Ancestral polymorphism is R, Derived polymorphism is P
  VARIANT 65: note = Ancestral polymorphism is A, Derived polymorphism is P
MLVPGILVTIYTYCFRMAAEDSKDILKKRLPKKIREVPDCYFLPRRSWPSALAIYGAVCAASFGAGMLLEVWINKKIKEDSGIVWEMDK

SEQ ID NO: 20052 - protein, 538 aa, Zea mays
  VARIANT 58..538: note = Derived polymorphism lacks residues 58 to 538
  VARIANT 107..538: note = Derived polymorphism lacks residues 107 to 538
  VARIANT 118..538: note = Derived polymorphism lacks residues 118 to 538
MGVLFSCPADDYDPLHLVEEEAAPPSAGGAGEEPAVFTAALGSGKLRIEGSLSFKRAQAALQVETEISIRTAAMPAPGPGPLPRGARFAGPAAADSPKHEAAALRLQKVYKSFRTRRQLADCAVLVEQSWWKLLDFALLKRSSVSFFDIEKQETAVSKWSRARTRVAKVGKGLLKDENAQKLALQHWLEAIDPRHRYGHNLHCYYDCWLHSESKQPFFYWLDVGEGREMNLEGKCSRSKLLSQCIKYLGPKEREDYEVVIEDGRFLHKKSRRILDTSSGPRDAKWIFVLSTSKNLYVGQKKKGTFQHSSFLAGGATSAAGRLVVENGTLKAIWPHSGHYRPTEENFQEFKSFLKDNSVDLTDVKMSPEEEDEEFWGRGGSAAGGRDPSEDVDQDAAAAAAGEQQQQAAEAEEEEEERQAPVPREKILQRINSKKGAKSYQLGKQLSFKWTTGAGPRIGCVRDYPSELQLQALEQVNLSPRCAAAAASRVASPLARSFNNHPAPATTAARGCEASTPKEALRSPLQHGALAVAAAVESE

SEQ ID NO: 20053 - protein, 332 aa, Zea mays
  VARIANT 187: note = Ancestral polymorphism is V, Derived polymorphism is I
MQPSGRAMAGGEGGGGAQQQTDDFFDQMLSTLPSAWADLGAGAAEDLAAQSHFGDDSSALLASRLRQHQIGGGDVKSSASHQSQVMLQLSDLHRHGGLGGEESGLFTDRSAPAPEEMEGGFKSPNSAGGDHSLFNGFGVHGAATVQPPFGQLRRERIAERMKSLQELVPNANKTDKASMLDEIIDYVRFLQLQVKVLSMSRLGGAAGGMAPLVASMASSEGKSNGSGGGGNTNATTKSGNGGGLRVAEHQVAKMMEEDMGTAMQYLQGKGLCLMPISLASAISSATSSASLLSRPPPAAAAGGGGGQMHGANGGAAAAATTISSPASANSSG

SEQ ID NO: 20054 - protein, 1005 aa, Zea mays
  VARIANT 626..1005: note = Derived polymorphism lacks residues 626 to 1005
MRGRLARGCRPPGALGDGHWGALFPRAAETRTRRATSLPPAMGNSTSRVVGCFAPPDKAGGVDLDFLEPLDEGLGHSFCYVRPGGGAAADSPAITPSNSERYTLDSSVMDSETRSGSFRQEPADDLAAAAAAAAGLQRPCRSFGETTFRTISGASVSANASSARTGNLAVSLAGDVQEPAAAFESTASFAAVPLQPVPRGSGALNTFLSGPLERGFASGPLDKGSGFMSGPLDKGAFMSGPIDGGSRSNFSAPLSYGGRKARLGRLVHRISRPMKTALSRTFSRSSQNPGWVQKFLSHPMTQLPWARDAKSRSEGSQNGLEPGIPEHEYNVTRNLQWAHGKAGEDRVHVVLSEEQGWLFIGIYDGFSGPDAPDFLMSTLYKAIDKELEGLLWVYEDSSERSDHVSTHEEGESVAASVDAPHGDSDQFQSDSGKQEQVGNFGKQNISPGKGCDESVLQVQPNCTSSEEKNLATQGSTSEKLARDEIVEEMAGADLGNDLQSRESQNSNRGLSDTDLNNNCSCATETTSYCDQHAKFLKENRKSKRLFELLEMELLEDYNKRLSKASPKERKIPNLHVTQAGTAEVFSRNTAEVSRCSLAATGECFDDSEDLGSSRHADSVLGIDIKECTGCSISTSSSGHKQVTRRFVFGSKLRKMYKKQKMLQKKFFPWNYDWHRDQPHVDESVIKSSEVTRRCKSGPVEHDAVLRAMSRALETTEEAYMDIVENELDRHPELALMGSCVLVMLMKDQDVYVMNLGDSRAILAQDNDQYNSSSFSKGDLRHRNRSRESLVRVELDRISEESPMHNPNSHLNSNTKAKELSICRLRMRAVQLSTDHSTSIEEEVLRIKVEHPDDPHSVFNDRVKGQLKVTRAFGAGFLKKPKFNEALLEMFSIDYVGTSPYISCNPSVLHHRLCANDRFLVLSSDGLYQYFSNDEVVSHVLWFMENVPEGDPAQYLVAELLCRAAKKNGMNFHELLDIPQGDRRKYHDDVSVMVISLEGRIWRSSG

SEQ ID NO: 20055 - protein, 90 aa, Zea mays
  VARIANT 55: note = Ancestral polymorphism is R, Derived polymorphism is S
MGLPLEQWRGGEADGRKVVDGDATAAGCRTPDAANGQAAGRRAGGGDCPAAPRKRRAAPAAAGVVAQQQQRRRDYYTGDDVEAFFAAHNL

SEQ ID NO: 20056 - protein, 176 aa, Zea mays
  VARIANT 105: note = Ancestral polymorphism is W, Derived polymorphism is R
  VARIANT 79..176: note = Derived polymorphism lacks residues 79 to 176
  VARIANT 74..176: note = Derived polymorphism lacks residues 74 to 176
  VARIANT 39: note = Ancestral polymorphism is R, Derived polymorphism is Q
  VARIANT 34: note = Ancestral polymorphism is G, Derived polymorphism is D
MVTLRRVAADRVAAAEVAQFVVLVPAWEEVTAKGVFSARREGGGTWSAVGHWPRRRCVWRRWWCSRRAAADAGQGPRGRPGRMRCGATRLEGIPEEDATTGLCGWCRCECDDDRWEVVGGGGGAGGRDGDGALGNGGGRVGRVPRRWPPRFPSVWGRWGIACGRRGHGRAAPTLHS

SEQ ID NO: 20057 - protein, 106 aa, Zea mays
  VARIANT 18..106: note = Derived polymorphism lacks residues 18 to 106
MSTSHSQTHSWGETRTPESEIVDNDPPFPNPPAPAPAMMVPKKEWVDDGSDRTSDLFVDLSYDDIQGMYSGLDMLPPAGEDFYSSLFVSPRVRGNQPTGTAGLGPF

SEQ ID NO: 20058 - protein, 541 aa, Zea mays
  VARIANT 182: note = Ancestral polymorphism is S, Derived polymorphism is L
MGADQWPWPWPWATPPPPALLLLASLLPALLLALWRLVWQPRAVARSFARQGIRGPPYCFLAGSLSEAKRLARASRRRVPQLDVASHDIMPILLPPFHRWVVEYGRTFLYWIGPTPAIFSVDLELIKEVLTDRTGLFGKDFMIPVFKVLLGNGLILANGDDWKRHRKVVLPAFNHERIKSMSAVTAEATEQMAQRWCEQLILHSGARQAAEIQVDRAICDLTAEIIGRAAFGTSLQEAGEVLLLMHEMQKMGAAAMVDAPILWYLPTRRNLTVRRLDKLLRAKITAMMAARVAANCGGGYGDDLLGLLLEAWSPEPGRRHAGSDDEGTTTTTLTTGEVIDECKTFFGAGQETTATLLVWTMFLLSTHPQWQDKVREEVLREFRGDVPTTDTLSRLKLLHMVLLETLRLYPPIVYIQRRTASDVVLRGMLQVPEGTVVSIPIGLLQRDREVWGSDADEFNPLRFSNGVARAATDPHALLSFSLGPRACTGKSFGIIEAQIVMAVILRNFSFSLSPTYVHKPKYVVSLTPKCGMPLILKNIHA

SEQ ID NO: 20059 - protein, 60 aa, Zea mays
  VARIANT 5: note = Ancestral polymorphism is M, Derived polymorphism is V
MADNMVTLVRLVLAIILPPLGVFLKHGLKIEFWICLLLCFFGYLPGVIYAVWVIIRKEDD

SEQ ID NO: 20060 - protein, 188 aa, Zea mays
  VARIANT 161..188: note = Derived polymorphism lacks residues 161 to 188
  VARIANT 38: note = Ancestral polymorphism is T, Derived polymorphism is S
MAAPRSLADRALRGVADLIKLLPSGTVFLFQFLSPLASNNGHCATLNKALSGALVALCGASCAFSCFTDSYVGADGRVYYGVVTRRGLRTFTPDPDAAARDLSAYRLRAGDFAHAALSLLVFATLALLDADTVACLYPALELAEPTMMAVLPPVVGAVAGYVFMVFPNNRHGVGYQPTPATEDFQHKY

SEQ ID NO: 20061 - protein, 375 aa, Zea mays
  VARIANT 301: note = Ancestral polymorphism is R, Derived polymorphism is H
  VARIANT 302: note = Ancestral polymorphism is A, Derived polymorphism is T
  VARIANT 337..375: note = Derived polymorphism lacks residues 337 to 375
  VARIANT 358: note = Ancestral polymorphism is R, Derived polymorphism is S
MFPTVDEPSAAGAMVSSSFPDADAYGNGDSDGLDFPVDPNPNPVFSSPAAAAAPGSAGAAGERRQLFQRLWTDEDEIVILRAFAEFTAQRGTSFASHQYDTTPFYEDMRRRLNTGFTKNQLAEKIRRLKRKYRNCVERLRVAGSGFTFRSPHEQAIFEIARTIWRPASDKHGRDSDDEGGGGNVHDATFAPFAIDAAANGESAKSSRPRRGRRRRTGDFPADAVALPPAPMPMQVMTEDALPSFPQATAAAVMNGGCGLIVDPASGLPTALSSAAAAATAVSGGSTTENPILTALFKEMVRAMLSVVGSGGGTTALQGLEPPPPIAGVPMEGEKWRQQRIRELEVYLRRMDLLQDQARAALEELRSAPHAGGMNT

SEQ ID NO: 20062 - protein, 378 aa, Zea mays
  VARIANT 345: note = Ancestral polymorphism is R, Derived polymorphism is G
  VARIANT 307: note = Ancestral polymorphism is I, Derived polymorphism is N
  VARIANT 262: note = Ancestral polymorphism is A, Derived polymorphism is T
  VARIANT 243: note = Ancestral polymorphism is Y, Derived polymorphism is N
  VARIANT 198: note = Ancestral polymorphism is G, Derived polymorphism is R
  VARIANT 172: note = Ancestral polymorphism is M, Derived polymorphism is I
  VARIANT 42: note = Ancestral polymorphism is L, Derived polymorphism is F
  VARIANT 27: note = Ancestral polymorphism is L, Derived polymorphism is F
  VARIANT 26: note = Ancestral polymorphism is S, Derived polymorphism is N
MALEPVARAVAEEVARWGAMRQTGVSLRYMMEFGVRPTERTLLLAAQFLHKELPIRIARRALDLDSLPFGLSTKPAILKHPLTGLIFGLFASAKVRDWYVESFRDIRSFPEVKNQEDELAFTQMIKMIKVRHTNVVPAVALGVQQLKKDLGGPKAFPPGIHEIHQFLDRFYMSRIGIRMLIGQHVALHDPDPEPGVIGLINTKMSPMTVARIASEDARAICMREYGSSPNVDIYGDPGFTFPYVTPHLHLMIFELVKNSLRAVQERYMDSDKLAPPVRIIVADGAEDVTIKITDEGGGIPRSGLSRIFTYLYSTAENPPDLDVHNEGVTMAGYGYGIPISRLYARYFGGDLQIISMEGYGTDAYLHLSRLGDSEEPLT

SEQ ID NO: 20063 - protein, 217 aa, Zea mays
  VARIANT 189: note = Ancestral polymorphism is F, Derived polymorphism is S
  VARIANT 142: note = Ancestral polymorphism is K, Derived polymorphism is E
MGSEGPSPVTVHVTGFKRFHGVAENPTERIVRGLQPFMETRGLPKGLVLGSCTVLEAAGQGALGPLYELLESTVSGRERQERVILLHFGANSGSHRFALENQAVNEATFRCPDELGWKPQRTPIISSDGSILHARQTTLPVEEISKSLQQMGYDVVPSDDAGRFVCNYVYYHSLKFAEKHGIGSLFVHFPLFLAIDEEVQMQFVASLLEVLASLNFQ

SEQ ID NO: 20064 - protein, 525 aa, Zea mays
  VARIANT 94..525: note = Derived polymorphism lacks residues 94 to 525
MQLAALCIDPVVLSSAFLCLLLHLALRSLLHPSSASSSSSGRRGHLPPGPRGLPILGALPLVGPAPHAGLAALARKYGPIMYVKMGTAGVVVASSPGAARTFLKALDARYANRPAVASTADITYGCQNMVFANYGPKWKLMRKLASVHLLGARAVADWAHVRRDEAGHLLRGVAEAAAAGRPVVVPEVLVCALANIVGQITVSKRVFDAQGDDSNRYKDMIVSLMTGTGLFNISDFVPALARLDLQGVQAKLRRVHHQFDGLITKMLAEHAATAADRARQGRQDFVDRLRDAMDAGADDESGETITEVNIKGLIFDMFTAGTDTSSIIVEWAMAEMLKNPAVMARAQEELDHVLGRGRRLEESDLPSLPYLQAVCKEALRLHPSTPLSLPHFSFDACDDVDGYRVPANTRLLVNVWAIGRDPATWEAPLEFRPERFLPGAAAEKVDPLGNYFELIPFGAGRRICAGKLAGMVFVQYFLGTLLHAFDWRLPDGEELDMRETFGLTVPKAVPLRAIVTPRLLPEAYA

SEQ ID NO: 20065 - protein, 656 aa, Zea mays
  VARIANT 443..656: note = Derived polymorphism lacks residues 443 to 656
MAQDAGDGGGELPPPVKKKSPAEEEAEKRRKKLTPGSLMKGIIRSGSGDATPAEGDQVERTACPLCLHISCNEIVEVHTIRNVILHCTTRTIDGIVVNSTRREHGGKGIPLRFVLGKSKMILGFAEGFPTMLKGEIAMFKMQPKIHYAEDDCPVATPDGFPKDDELQFEIEMLDFFKAKVVADDLGVVKKIVEEGKGWETPREPYEITARITARTADGKEIIPSKEEAYFFTIGKSEVPKGLEMGIGTMSHKEKAIIFVSSTYLTKSSLMPQLEGLEEVHFYIELVQFIQVRDMLGDGRLIKRRVFDGKGEFPMDCPLHDSLLRVHYKGMLLDEPKSVFYDTRADNDGEPLEFCSGEGLVPEGFEMCVRLMLPGEKSIVTCPPDFAYDKFPRPANVPEGAHVQWEIELLGFEMPKDWTGLTFEEIMDEADKIKNTGNRLFKEGKFELAKAKYDKVLREYNHVHPHDDEEGKIFANSRSSLHLNVAFCYQKMGEYRKSIETCNKVLDANPVHVKALYRRGTSFMLLGDFNDARNDFEKMITIDKSSEQDATAALLKLKQKEQEAEKKARKQFKGLFDKKPGEISEVGVESDGGKDAGDARVNGGEATSADRGVNTNDSPTSESEYAFEEERPGLLGSLWPSARMIFSSLGMNRCAIL

SEQ ID NO: 20066 - protein, 165 aa, Zea mays
  VARIANT 7: note = Ancestral polymorphism is L, Derived polymorphism is R
  VARIANT 12: note = Ancestral polymorphism is I, Derived polymorphism is V
  VARIANT 54: note = Ancestral polymorphism is K, Derived polymorphism is R
  VARIANT 95: note = Ancestral polymorphism is E, Derived polymorphism is G
  VARIANT 117: note = Ancestral polymorphism is A, Derived polymorphism is T
  VARIANT 118: note = Ancestral polymorphism is T, Derived polymorphism is S
  VARIANT 135: note = Ancestral polymorphism is D, Derived polymorphism is E
  VARIANT 159: note = Ancestral polymorphism is P, Derived polymorphism is R
MDQPLHLVHVKILAADLLSLTVRHTSPTTFLRCGRRVARAELVGVVVSRDRREKFLRFLVDDGTGCVPCILWLNHQYLNARTSSGPSSDHDPTAEMALKMSEEVRLGTLLRVRGKIASYRGAIQITVRDVVPEKDPNSEVLHWLQCVRLAKECYDLPPRSAQGRT

SEQ ID NO: 20067 - protein, 598 aa, Zea mays
  VARIANT 496..598: note = Derived polymorphism lacks residues 496 to 598
MGLCYGKSAAVQEPAVAEENNKADGAAAGRGDGPPASPVKVPRTPKQPKLSFYLPSPLPPSSYKGSPANSSVASTPARGGFKRPFLPPSPAKHIRALLARRHGSVKPNEASISEGGEPDLGLDKSFGYSRHFAAKYDLGREVGRGHFGFTCAAKCKKGELKGEDVAVKVIPKAKMTTAIAIEDVRREVRILSSLADHNNLVQFHDAFEDEENVYVVMELCKGGELLDRILARGGKYSEEDAKVVIHQILSVASFCHLQGVVHRDLKPENFLFMSKDENSALKVIDFGLSDFVKPDGRLNDIVGSAYYVAPEVLHRSYGTEADMWSIGVIAYILLCGSRPFWARTESGIFRAVLKADPSFDEIPWPTLSAEAKDFVRRLLNKDYRKRMTAAQALCHPWIRGTQEVKIYLDMIIYRLMRAYISSSSLRKSALRVTFALAKALTTDQLFYLREQFTLLDPNKSGHISLQNMKAALMKNSSGAMNDSRVLDFVNSICNIQYGNIDFEEFSAAAISVYQMEGLETWQQHAQQAYELFDREGNRPIVIEELASELGLGPSVPLHVVLQDWIRHSDGNLSFLGFIKLLHGVSSRTIPKVQDNRLH

SEQ ID NO: 20068 - protein, 99 aa, Zea mays
  VARIANT 63: note = Ancestral polymorphism is S, Derived polymorphism is L
  VARIANT 69: note = Ancestral polymorphism is G, Derived polymorphism is S
MDRKTMALKIADLGLSRAITVPVKKYTHEILTLWYRAPEVLLGATHYSTPVDIWSVGCIFANSFILTISVTDYSVTGSKSKGILAAQTSKSTELTAFLA

SEQ ID NO: 20069 - protein, 82 aa, Zea mays
  VARIANT 2: note = Ancestral polymorphism is M, Derived polymorphism is V
  VARIANT 11..82: note = Ancestral polymorphism lacks residues 11 to 82
  VARIANT 15: note = Ancestral polymorphism is K, Derived polymorphism is N
  VARIANT 19: note = Ancestral polymorphism is S, Derived polymorphism is N
  VARIANT 20: note = Ancestral polymorphism is K, Derived polymorphism is N
  VARIANT 25: note = Ancestral polymorphism is A, Derived polymorphism is V
  VARIANT 31: note = Ancestral polymorphism is R, Derived polymorphism is H
  VARIANT 39: note = Ancestral polymorphism is P, Derived polymorphism is H
  VARIANT 50: note = Ancestral polymorphism is V, Derived polymorphism is I
  VARIANT 52: note = Ancestral polymorphism is R, Derived polymorphism is G
  VARIANT 56: note = Ancestral polymorphism is A, Derived polymorphism is T
  VARIANT 57: note = Ancestral polymorphism is Q, Derived polymorphism is L
  VARIANT 76: note = Ancestral polymorphism is K, Derived polymorphism is N
  VARIANT 78: note = Ancestral polymorphism is T, Derived polymorphism is I
MMIMLFVDICQLLKKLKLSKLELTALWRYWRHYNLDACPNPYREQLLDAVQRHFIAQQLDELQVIVGFMQVAKRLKTTMKVA

SEQ ID NO: 20070 - protein, 556 aa, Zea mays
  VARIANT 158..556: note = Derived polymorphism lacks residues 158 to 556
  VARIANT 423..556: note = Ancestral polymorphism lacks residues 423 to 556
MTKAATIYGSKTQSDALRPGPLRPANIIRNKFPTYKNGSNGIVIKLADGPEIPPLKEIVAKETADLLDRRQRLSVRELAMKFEKGLSTATLLSNEVKWRQVALMERDILLKNLKSVLESLRGQVTGKTKDEIEESISMVEILTVQLSKREAELVQQKEEVTKLAKSLKQASEDAKRIVEEERANAHTEIETAKGAVQRVQQAVQEHEKMSQNTGKQKQDMEELKKEVREARRIKMLHQPSKAMDLENEIRILRNTFAEKSKDCVSLLKELETHKRLKENGTIPSFDLEGLQCLGSMLRIVGLSGTHMDLSNISIQWFRIHPKESNKEIISGATRPVYALEPHDVGRYLQAEIDVGGEIAVAKTAGPVDPDAGLVDYVETLVRKPETEFNVRIQHPLPLYGISFAQTCHVCSLFTKQAQPLKPRTGVFLTAPWPLLCVLLQQVVVLQSNGVDQPKESVHVLNVGRLRMRLTKGKSVVAKEFYSSSMQLCGVRGGGEAASQAMFWRPRNDLSLVLAFESTRERNAAIMLARRFAVDCNVCAFTKRYIILAGPGDKTPW

SEQ ID NO: 20071 - protein, 346 aa, Zea mays
  VARIANT 263: note = Ancestral polymorphism is A, Derived polymorphism is S
MSIYYPAKSPKGPVAAFPLRSALVFFVTSFGFYVCYFSSRQIIALETEAETTASGGGAEPTETRCTNRPAIIPHGPQTRYVHFPRPATYDRGECVCNPVRFFVIVSTQRSGSGWVEALLNSHPNVSSNGEVFSMRERRQNLSSVLGTLDRLYGMDWLTSAAKNECTAAFGFKWMLNQGLMENHRDIVNYLNRKGAMVVFLFRRNTLRRLISVVANNYDRRARQLNGVHKSHVHSKEEAEVLARFRPELDAPALIPSIRTAQRAVRACLRRFGSTRHMVLYYEDVVRDSRKALSRVQEFLGVPARELSSKHVKIHTRPLPDLVGNWEEVRRTLRGTEYSRFLDDDAE

SEQ ID NO: 20072 - protein, 297 aa, Zea mays
  VARIANT 125: note = Ancestral polymorphism is E, Derived polymorphism is K
  VARIANT 268: note = Ancestral polymorphism is I, Derived polymorphism is N
MGERANFLKGEVRKKFEAAAMSAIDAAMLVDAVVHLGIDHCFREEIATALRSVHEDEEGEFGSCDDLHTVAVRFLVLRQHGLWVSADVFDKFRDDKGSFSKSLLCSNPRGLLSLYNAAHMAVTPEEKVLDDAIAFARSHLVEAMIGELRSPMVEQVSRSFDIPLPRFSRRLESMHYIAEYGQEEEGHDAQILELARLEFELVRSLHLRELREICSAEYGATGEEAFAFIANMTENAWRKINQACMEMDPAMLPAFKVAVVDLSRSIEIIYLGGKRDAYTFGSNLKDLVTSLFLKPCA

SEQ ID NO: 20073 - protein, 200 aa, Zea mays
  VARIANT 9: note = Ancestral polymorphism is V, Derived polymorphism is I
  VARIANT 64: note = Ancestral polymorphism is G, Derived polymorphism is R
  VARIANT 158: note = Ancestral polymorphism is A, Derived polymorphism is S
MEAPAAKRVLRVAAISGSIRKASWHSGLIRAAAEVCEDCIPGLRVDHLDVADLPMLNTDLETNGGTGFPPAVEAFRAKVRHADCFLFASPEYNYSITSPLKNALDWASRGVNCWADKPAAIVSAGGNFGGGRSSYHLRQVGVFLDIHFINKPELFVFAFFEPAKFFDSDGNLIDADTRERLKQVLLSLEAFTRRLQNNKD

SEQ ID NO: 20074 - protein, 298 aa, Zea mays
  VARIANT 213: note = Ancestral polymorphism is A, Derived polymorphism is G
  VARIANT 127: note = Ancestral polymorphism is S, Derived polymorphism is C
  VARIANT 115: note = Ancestral polymorphism is P, Derived polymorphism is Q
MSGTRTALAHEGLDYGPRLVAPRRSRLSVVAVAVRTRPASLAVPGLPPPTPEPVLPSPPVAAGVAAVLLEAGVPPADLRRAAGMCPELLSVPAEAVAAALRFLTEEAGVPEAELQRVLRRRPRLLVCPVAARLRPTLYFLRALGVPDLHRRADLLSFSVEDKLLPRIEFLESLGLPARAARSMARRFPALFGYGVDGNMRPKAEYLLGVGAMGRRADELYEFPEYFSYALAARIVPRHEACAASGVAMPLPAMLRPGEAKFRATLDSCVGSTLPRRRSALWHATWVDDDATAAKETMV

SEQ ID NO: 20075 - protein, 212 aa, Zea mays
  VARIANT 45..212: note = Derived polymorphism lacks residues 45 to 212
  VARIANT 57: note = Ancestral polymorphism is T, Derived polymorphism is M
MLGSPRRSPSPSSSCGDETRMSQAMSSSIINSWNSSIHSPRGSFQKRVADVWSCGVTLYVMLVGSYPFEDPEDPRNFRKTISQFQCLLCLAENSWRVILHPGLCESVFRLQTPSVSDIRCRSFKEGHDPTDKASPVVPEDPPEGDLGEGEGQLQGRGCRRAGAAAQAVDKIMRIVEEAKTPGDMSKVVDPALLAEMAELESDEEEADTDDTY

SEQ ID NO: 20076 - protein, 349 aa, Zea mays
  VARIANT 233..349: note = Derived polymorphism lacks residues 233 to 349
  VARIANT 308..349: note = Derived polymorphism lacks residues 308 to 349
MSASAAPAPAAGGRFFTGFTRLCKGLAVVLLLAHILVHLFPSAATYLTLIPARTIPFAWNLVTAGYIEQTIPGVCLLSTSPIYFRQWHPYLTRLPCFQVIVSIVGLLLFGKVLEPLWGAKELLKFIFIVNLSISACVFVTMIVLYYITQEESYLYTPVSGFYGVLSGLLVGIKQILPDQELNLFVFKISAKWIPSIVAFISVAVSFFMKEVMSYLPIILFGIYMSWIYLRYFQRRLEVGLKGDPSDEFSFSSFFPGFLRPILDPIASVFHKLFCGRSARPEGTGQTLDGSQFPGSGSTEANRRRERGQKALEQRLAEKLAAVRKAEGTPPPKQQQEEEEDAENDASDKV

SEQ ID NO: 20077 - protein, 665 aa, Zea mays
  VARIANT 80: note = Ancestral polymorphism is G, Derived polymorphism is R
MTTYRVCCFLRRFRAASNEPSEAVGDVFRAYADGGGGLLGEEALRRFLREVQRETDAGADAAAKEVVAFAAEHRLLSKGRGLTAEGFLRWLFSDANAALDPRRGVYQDMGLPLSHYFIYTGHNSYLTGNQLSSGCSERPIVKALHDGVRVIELDLWPNAAKDDVEVLHGRTWTSPVELIRCLEAIKEHAFATSPYPVILTLEDHLNRDLQAKVAKMLKETFGEMLYVSESEHMAEFPSPDELKGKIVISTKAPKECFQTKSSKDAAATEEEEGVWGEEISDDKATARQARPRSPPTATLCLHLHACCSTKAPKEYFQTKSSKDAAATEEEEGVWGEEITDDKATARQMSEQSSGKYTADEETAGAGAEDEMEVEAEAEAEKKSRQGTEDNEYRRLIAIQLTRRKHDIEQDLRVDPDKVTRVSLGEKAFEKAIVSHGDHVVRFTQRNLLRIFPRSTRITSSNYNPLMGWRYGVQMVAANMQGHGRKLWLTQGMFRANGGCGYVKKPDALMRSKPLDFDPRAELPVKTRLRVTVYMGDGWRFDFRKTHFDRCSPPDFYARVGVAGVPADTRMEQTRVAMDSWVPAWDHEFGPFPLAMPELALLRVEVHESDNHQKDEFGGQTCLPVWELRPGIRSVRLSDHKGQPLPSVKLLMRFDFFPASDSNSTQ

SEQ ID NO: 20078 - protein, 170 aa, Zea mays
  VARIANT 114: note = Ancestral polymorphism is P, Derived polymorphism is L
  VARIANT 35: note = Ancestral polymorphism is L, Derived polymorphism is V
  VARIANT 31: note = Ancestral polymorphism is K, Derived polymorphism is N
MGAAESVPETSIHEFTVKDCNGKEVSLETYKGKVLLVVNVASKCGFTETNYTQLTELYQKYRDKDFEILAFPCNQFLRQEPGTDQQIQDFACTRFKAEYPVFQKVRVNGPDAAPVYKFLKASKPGLFGSSRIKWNFTKFLVDKDGKVIERYGTSTAPMAIEKDIQKALEE

SEQ ID NO: 20079 - protein, 1501 aa, Zea mays
  VARIANT 582..1501: note = Derived polymorphism lacks residues 582 to 1501
  VARIANT 769..1501: note = Derived polymorphism lacks residues 769 to 1501
  VARIANT 799..1501: note = Derived polymorphism lacks residues 799 to 1501
  VARIANT 835..1501: note = Derived polymorphism lacks residues 835 to 1501
MAPAKRKRAAAAAAAAAAAKWKVGDLVLAKMKGFPAWPAMISEPEQWKMPSTKKKPLVYFYGTKQIAFCNYADLEAFTEEKKRSLLAKRHGKGADFLRAVDEIIEVYDSLKDIGSNKVDLPAEEVKPGVEKFAENNSRMDTEDLVSSSYMHNDRKIEDHYVTTRSHDMVNSDRPSVDERCVVNSAPDEPIENVSILDEMRDISLRTNSFSNKQRDAQPQNCYTRTRVPSLRKSRSSLSLESRKAQGSGNFFDHTNLASINLVPGEHKEPSHHRHEDDKANSSSVSTSDNVWLHSGEGTSNQPVTLGASNGNRMLNTPAEVDSTSNREASENGTTETELKSNGTSDLPMNTAVNFKRKRKSDRKPGPHYRDCTTPNKDDQLCAEYSEILPDSPNSKNEVSKSDGDEHLPLVKRARVRMGRSQLEDSPVDEIDVSNKKPELATALDQCDRNGKPASPANDYSADQVSAVVSSAPNLSCKLDTTILSKEGHLPWKNKEYHPKILALDVEAALPPSKRLHRALEAMSANVAENTKNIPEVTGPNEMTLNGSLLTASSLSNKSADAVVTVSNRPVIVQSPEPSLDTQFVHNPSGKCTSESILQNNSIPDSASVPSKENDHIVLKGDICEETLMDTKTANGSWDCSELNNDSCGKTSALCMKLNRPALNVTQATSVPDRLSSSLEKASENVAASGVKETKTFGSAVCDVDRSAEPIDRSNNNVTSNTMRHSETIVADSVNNVGDTASNSSLATKSSSIQSDADTRTSELHTFSSLALKELNHRKIKDRSTSPDSMPMKELIAVAQARRFSRSTSFPDNFLNAKYIPETSINIPSKEGPHRQLSPSNRIIRSTSGNDNVNSRSPFDNIQQKKLAAHGANAARRSFKDFLSTLTRTKESISRATRLAMECAKFGIAGEAVLPRILYAAAPPGNSAWENRKQCLKVLKLWLERKTLSEYIIRHHIREIETINEASFGSSRRPSRTERALNDPLRDNEGMLVDEYGSNAGFQLPNLICTKVLEEEEENSSEGRSLSFEAVTPEQDAPYNDDNEESQMPVEKHHHILEEVDGELEMEDVAPPSDIGATTKCQPEQSDTNRAPSDQRPSDAGPPLPVDRPPSPPPLPSSPPPVPVPQSAQMQPKLQMASDPMAPHPQRATYSVQSQQQHSIAEHPGNMNSSVAPLPPPPFNSSGYGGQQNQIPPPPPMAPLNPPGPHGSFPAPPAPYHGNNYHRPPTTSMPNEGYHQQPPPPPPPPNQFPSVPPEHQHRPHHWGNNCPPYPERYRYNGHDRGNHRHDRRHHGHDRQHHYDDRGYHYDDRGYHYDDRGHYFDDRRHHFDDRGHHFDERAIRGPMHNDAADQGRYSFPPGTFLAMVMNLFLLTMVLLGFLTILKLHQPQCTMGDHQILRQGLVQAGLGRLGYLITILPRDILWSLQFHIQLEVMVDGDLDNLFRYRSGALMLSLVCGGLTCGRVCLVSLLQVEGTHGGGALQESGSWYLPPCTDVSHGFYGGRAA

SEQ ID NO: 20080 - protein, 523 aa, Zea mays
  VARIANT 70: note = Ancestral polymorphism is Y, Derived polymorphism is D
MEADAAAASGGLALLPAVLLLVALSTLVFSTWSNRNSRLPPSPMALPLIGHLHLIRPPPHRAFDRILARYGPLVYLRLGPSTHCVVAGTADAARDLLKHEASIPERPLTAVTRHLAYDDAGFAFAPYGPHWRFMKRLCMSELLGPRTVDQLRPVREAELAAVLEAARQAAAAREPIDVSRHLISMSNNAIMRMVASALPGHMTEAARDCAKHVAELVGAFNVEDYVGLCRGWDLQGLTRRTREVRDKFDALLEIMITGKEESRRRRHATTDTGGGTKDLLDILMDAAEDANAEVRLTRENIKAFVLDIFTAGSDTTATSVEWMLALLINHPACMDKLRAELDAVVGASRLVGEQDVPRLPYLQAVFKETLRLQPPAVFAQRETIEPVHVRGYVIPPKTSVFFNIFSIGRDPGCWEDPLQFRPERFMPGGAGAGVDPKGQHMQLMPFGSGRRACPGMGLAMQAVPAFLAALVQCFHWEVPIPPGQSTAPPLDMEEAAGLVTARKNHLLLIPTPRLNPLPARAAT

SEQ ID NO: 20081 - protein, 961 aa, Zea mays
  VARIANT 695..961: note = Derived polymorphism lacks residues 695 to 961
MSNAKAVLEPAFQGAGHKPGTEIWRIEDFKPVPLPKSDYGKFYCGDSYITTCKGGAYLFDIHFWIGKDSSQDEAGTAAIKTVELDSMLGGRAVQHREPQCYESDKFLSYFKPCIIPMEGGFASGFKKPEVDKFETRLYICKGKRAIRVKEVPFARSSLNHDDVFILDTENKIYQFNGANSNIQERAKALEVIQHLKEKYHDGVCAVAIVESDSGEFWVVFGGFAPIGKKAVSDDDVVLETTSPRLFRSTELLAYYLYKYSNNFIRRFLKKTLFFIVNFYVCSISNGQLKLEDTVLTKSILENTKCFLLDCGAELFVWVGRVTQVEDRKAASAAVEKFIIKENRPKTTRITQVIQGFENHTFKSKFESWPVSNTAGSASTEEGRGKVTALLKQKGVDVKGISKTSVPAVNDEIPPPLLDGGGKLEVWCINDSVKIALPKEELGKFYSGDCYVVLYTYHSVDKKEEFYLTYWIGKNSVQEDQESAFQIANTTWNSLKGRPVLGRIYQGKEPPQFVALFQPMVILKGGTSSGYKKYVEEKGLKDETYCSDGVALIQISGTAVHSNKTIQVDAVPASLSSTDCFVLQSKNSIFVWNGTSSSVEQQQWASKVAEFLKTGVAVKHCKEGTESSIFWSSLGGKQSYTSRNVVPDVVLREPHLYTFSLRNGKLEVTEIFNFSQDDLLTEDMMILDTHSEVFVWMGQCVETKEKQKAFDIGQKYVQNAVAFEGISPDVPLYKVNEGNEPCFFRTFFSWDSTRSLVHGNSFEKKLSVLFGMRSEGGNKSSGDGGPTQRASALAALSSALNPSSQGKQSDERPTKPSSTQAQSHSGQGSQRAAAVAALSNVLTAEGSHSPRHSRSSPTADAEKTELAPASPHQLETGPAEDVRTEPDVSQEQTANENGGQTTFSYDRLVSKSTDPVSGIDHKRRETYLVDNEFETVFGMTKEEFYEQPRWKQELQKKKADLF

SEQ ID NO: 20082 - protein, 141 aa, Zea mays
  VARIANT 69: note = Ancestral polymorphism is G, Derived polymorphism is R
  VARIANT 101..141: note = Derived polymorphism lacks residues 101 to 141
  VARIANT 135..141: note = Derived polymorphism lacks residues 135 to 141
MSLWWWCPRSIDRLSHRTAREEVAAAEQAAATNESEAATLRSEVERLEGLLTAEKASHEEEMCRGAWLGDQLQTAYQEKVAPEEEIETLKGSATTEGKGMEEGCDSVAARAGTPKDQGVVPPTLVRGCWSSCHGWHRSGLV

SEQ ID NO: 20083 - protein, 894 aa, Zea mays
  VARIANT 319..894: note = Ancestral polymorphism lacks residues 319 to 894
MMRPSPPRRLSLAAPFLILLLLTLLSPPRAAAAGGSSAWVALRGAAGSRKASPAEQEGAAAGLLRRLLPFHSGSFSFQIDSKGGVCGQSSCFRISNVVDGSGKGGAEILIQGTTAVELASGLHWYLKYWCGAHISWDKTGGAQLASIPSPGSLPRVQGKGVKIERPVPWNYYQNVVTSSYSFVWWDWKRWEKEIDWMALQGINLPLAFTGQESIWQKVFKSFNVTDRDLDDFFGGPAFLAWARMGNLHGWGGPLSQNWLDQQLALQKKILSRMIELGMVPVILMTHYYSTVLPSFSGNVPAIFAKLFPSANITRLGDWYHTFLYFMFSVIKLLTENILCCYDFLRDIFYFRNTVDANPKWCCTYLLDPSDSLFIDVGQAFIRQQIKEYGDVTNIYNCGLSSFGHPVYILVLTCCFYFLHHVDIAHFTVIVVTFSDTFNENTPPTDEPAYISSLGSAIYEAMSRGNKNAVWLMQGWLFYSDAAFWKEPQMKALLHSVPIGKMIVLDLFADVKPIWKVSSQFYGVPYIWCMLHNFGGNIEMYGILDSISSGPIDARTSYNSTMIGVGMCMEGIEHNPVVYELMSEMAFHNKKVEVEDWLKTYSCRRYGQANADIEKAWRYLYHTIYNCTDGIADHNKDYIVEFPDISPSSVTYQVSKRRGMSITRNHRRFFLSEVSGILPQPHLWYSTKEAVKALELFLDAGSTFSESLTYRYDLVDLTRQCLSKLANEVYLDAISLYQKKDSHGLNAHARKFLEIIVDIDTLLAADDNFLLGPWLESAKSLAITEKERQQYEWNARTQVTMWYDNTETEQSKLHDYANKFWSGLLKSYYLPRASKYFAYLTRSLQENRSFQLEEWRKDWISYSNEWQSGKEVYAVKATGDALAIARSLYRKYLRP

SEQ ID NO: 20084 - protein, 380 aa, Zea mays
  VARIANT 307: note = Ancestral polymorphism is V, Derived polymorphism is A
MLNLQLGIRHAVGKQGPITLDLKSSAFDPKEKVWTRFPPEGSKYTPPHSSCDFKWKDYCPQVFRTLRKLFKVDAADYMLSLCGDQALRELSSPGKSGSFFYLTSNDQYMIKTMKKSEVKIFLKMLRAYYNHVRSFESTLVTKFFGLHCVKLAGANQKKVRFVIMGNLFCSDYSIHRRFDLKGSSLGRTTDKPQTEIDEYTTLKDLDLNFIFRLQKHWYQEFQRQVDRDCEFLEQENIMDYSLLVGVHFRDTRDRLLTGGSFDSDCSRGSSPQLSRGDTDPNRLAKIKLGSNMPTRAERTIRKGDCEVQIMGEPTGEFYDVILYFGIIDILQDYDISKKLEHAYKSFQYDPTSISAVDPKQYSRRFRDFVFRAFQEDKFDL

SEQ ID NO: 20085 - protein, 240 aa, Zea mays
  VARIANT 32: note = Ancestral polymorphism is T, Derived polymorphism is I
MGNNGCLLLAPRCFLLSCRRRKARLVLWGGETRAARHGKLAGQVMMDVAGTVVCRADAFYLGRPAPVLAIEDRLLGGATYLVLPVDRLPQGYDALTAASLAALSYGSRRPGGGSGSASSPSIAGGARSPFEYVKGDDGRTVIKVTPEFLVGAITAADTKEAGEACAGGALCSTPELRKHYEQLVGAARGRAWSPRLDTIKERKGRRALALAAVVSPGRLSPVAVTRLLGLDAAKAETTTR

SEQ ID NO: 20086 - protein, 78 aa, Zea mays
  VARIANT 59: note = Ancestral polymorphism is V, Derived polymorphism is F
  VARIANT 38: note = Ancestral polymorphism is R, Derived polymorphism is W
  VARIANT 30: note = Ancestral polymorphism is V, Derived polymorphism is L
  VARIANT 29: note = Ancestral polymorphism is V, Derived polymorphism is M
  VARIANT 28: note = Ancestral polymorphism is A, Derived polymorphism is V
  VARIANT 27: note = Ancestral polymorphism is T, Derived polymorphism is A
  VARIANT 19: note = Ancestral polymorphism is A, Derived polymorphism is V
MTEKASKLCDPDAENVFKALRKAGVKTAVVSNFDTRLRPLLQALKCDHWFDAVAVSAEVAAEKPNPIIFLKACEFIGV

SEQ ID NO: 20087 - protein, 170 aa, Zea mays
  VARIANT 84..170: note = Derived polymorphism lacks residues 84 to 170
  VARIANT 97: note = Ancestral polymorphism is R, Derived polymorphism is H
  VARIANT 99: note = Ancestral polymorphism is R, Derived polymorphism is I
  VARIANT 120..170: note = Derived polymorphism lacks residues 120 to 170
MDTHVGKLIDSVGSIFRGSDVLPWCDPDIIAGFESEVAEAANEEQKTESLMRLSWALVHSRQPEDVNRGIGMLEASLDRSSSPEETREKLYLLAVGRYRTGDYTRSRQLLERCLEIQHDWRQAITLQRLVEEKTKRDGMIGMAIITGAFGVVGLVAGGIIAAASSSSRKR

SEQ ID NO: 20088 - protein, 298 aa, Zea mays
  VARIANT 60: note = Ancestral polymorphism is T, Derived polymorphism is I
  VARIANT 188: note = Ancestral polymorphism is T, Derived polymorphism is M
MCKLRPERQDKNRAPAGSCSCDCERPSNGVPLPFPPPPLSNQNSVKCSQQAAASSCISVTVGTRKSTSIFGGQYCISSGIPICSNSRTGFLGKTRGIRPCVFPAGRVGFVRTVVECKESRIGKQPIEVPSNVTLTLEEQFVKAKGPLGELSLSFPGDLKIVKEESGNLRVYKTAETKRANQMHGLFRTLTDNIIVGVSKGFDKKLQLVGVGYRAAVEGNDLVMNLGFSHPVRMAIPEGLAVKVEENTRIIVSGYDKSAIGQFAATIKKWRPPEPYKGKGIRYMDEVVRRKEGKAGKKK

SEQ ID NO: 20089 - protein, 283 aa, Zea mays
  VARIANT 153..283: note = Derived polymorphism lacks residues 153 to 283
MSSEKLVLLAQDGKTISLAVIPAAASSEATATFRLIVEQRYRSGGAGGDANEVDKIEDVVCRVAVGELCAAAVDRAFEDLVARLEHPTLRPEVATSARDATARVRARYAEEGAQLSGVEFVNSFKTDSEETGSDLELDEESWAHGWRSGSDCQYDQDPAALISDDEDGAQFSARPYDGALAREGGPSDGTLLLSGFQARSDGPELADQHELTPRDVQRLVRLAFDGGDVDSDDAYQRALDGGAPVSRVTRAVVLDQGLRSATARQQQPTPPSGMPPRMRTGWW

SEQ ID NO: 20090 - protein, 327 aa, Zea mays
  VARIANT 46: note = Ancestral polymorphism is D, Derived polymorphism is G
MATTQFAMVEELASLIKDNLHSKHLILSTEESLVAALQELHCREEDDGAADTIELQPAGAYHRLLLHRLAEIYGFAHESAGEGEDRHLVLQRCPETAIPSVLVSDMIWKFDNSDDFMSVVLTRNDTDFQKPQKADIVQKDISVKSSRLKDNTDSKPLRQPAVHPAASLKEREAAYRAARERIFSVDDAKGNDRSYVKCRQVPVVAQRMIAHALGQKVQNTTEAVASTESRGKHKQLPNGKSIPTHSRNNFCPVTPDNKEAVRNGRPNSAGCNSYQTPSSQRRHTTNTRAVTAEGLKKEQTGAAKRMFAHALGLSAARGSNGALPKPK

SEQ ID NO: 20091 - protein, 389 aa, Zea mays
  VARIANT 318: note = Ancestral polymorphism is S, Derived polymorphism is L
  VARIANT 303: note = Ancestral polymorphism is L, Derived polymorphism is S
  VARIANT 262: note = Ancestral polymorphism is G, Derived polymorphism is R
  VARIANT 238..389: note = Derived polymorphism lacks residues 238 to 389
  VARIANT 111: note = Ancestral polymorphism is I, Derived polymorphism is T
  VARIANT 107: note = Ancestral polymorphism is C, Derived polymorphism is W
  VARIANT 28: note = Ancestral polymorphism is A, Derived polymorphism is V
  VARIANT 26: note = Ancestral polymorphism is A, Derived polymorphism is V
  VARIANT 18: note = Ancestral polymorphism is E, Derived polymorphism is K
MIKNFIMNHSMRLSMFNEQSNLKFLAIADTRFSSAIVMLKRFIAIKDALSVMVVSEKWSAYREDNPRQAQFVKKIVNDLWWDKVRYFLSFTEPIYTMIRATDTDKPCLHLIYEMWDTMIEKVKSVIYRHEMKETHEESIFYSAVHDILVSRWTKSNTPLHCLAHLLNSKYYTDAWINEVLNRQAPHNDEEISEMRNTCFRRYFSGAELKKIKLQYANFSLFGPGFNSFDSLEDRSYMEPKMWWGIHGHSAPELKKLALKLLGQPASSSCAERNWSTYGLIHSSLRNRLNPGRAEDLVFTHQNSRLLSRKSDEYRCGPLAMWDVGADTFEADFEGGADFLEQADRYWMSHNLKKDCLKILRHWLWSARDYKAIKSLVGHESKVTSLDISE

SEQ ID NO: 20092 - protein, 288 aa, Zea mays
  VARIANT 107: note = Ancestral polymorphism is M, Derived polymorphism is T
  VARIANT 183..288: note = Derived polymorphism lacks residues 183 to 288
MGEAADRERPPWRCTVAVQAALCLALYAAFSLGEPQLIPRGGVDALGRGARGGGVAFLSVAGGARGPIDQERLLRQMETTAKLYEVKFVLDVTQLGADDPLWQNGSMYFQALNIPWYSTSSHGRTVGNFLKKVKMPYDQVLDIIGLGTWPLQEPLHGGRISTSYKGQIKWLDRLLALTESNWKIVVGYNPLLVCNGKETTKLDVPFQHIFAKYEVNAYISMGGSCGYFHRDNSILYIGHPRSPGGAQTSVDGFFLHRVRPLEMESMLINVEGKLVQRSDVQQHGTGAM

SEQ ID NO: 20093 - protein, 147 aa, Zea mays
  VARIANT 89: note = Ancestral polymorphism is A, Derived polymorphism is T
  VARIANT 31..147: note = Derived polymorphism lacks residues 31 to 147
  VARIANT 1: note = Ancestral polymorphism is M, Derived polymorphism is L
MSAVAVSSSLNPNAPLFIPAALLQVEDFSPQWWDLITTTAWFRDHWSREHAHLDEIAEQLELVALLAYDEDEDLFYGEQAPAAAALKTAARFGAQGAELGFPEERRRPAGVPGETQALREADQVRRQPQEQRSSRDPPASLGSLAGP

SEQ ID NO: 20094 - protein, 178 aa, Zea mays
  VARIANT 134: note = Ancestral polymorphism is G, Derived polymorphism is R
MAAVQPRVAPRRHRPPPLLVPPLPAAPSQEPVARPQLPCKRSRSDAVAVVAHGRKERVAESCCPSSRLDQLELVLLDDDSGDEDDGCGSCVDGAGGAGCGQDEDEEESGSRGVAVAWWSQDTGGGGRRSLWANGSIATEGGHLPTDGEHDDEDPTVAAARRQEEDRKFWEACLASGYP

SEQ ID NO: 20095 - protein, 187 aa, Zea mays
  VARIANT 131..187: note = Derived polymorphism lacks residues 131 to 187
MVKAVAVLGSSDGVKGTIFFTQEGDGPTAVTGSVSGLKPGLHGFHVHALGDTTNGCMSTGPHYNPASKEHGAPEDENRHAGDLGNVTAGADGVANINVTDSQIPLTGPNSIIGRAVVVHADPDDLGKGPIQSRSSKWSISDINSCWFSVCTFRWARAQQEHWKRRWPCCLWDHWTPGLKTIAGLGGA

SEQ ID NO: 20096 - protein, 408 aa, Zea mays
  VARIANT 205: note = Ancestral polymorphism is Y, Derived polymorphism is H
  VARIANT 66..408: note = Derived polymorphism lacks residues 66 to 408
MVLRSCSPSSWSAAGAAVATRASANPPPPRPSSPPSRPSRRAMDSAAGAGRHRVRIAVVGDVHNDWALEEDSKALRFLQPDLVLFTGDYGNENVELVRSISDLQLPKAAILGNHDCWHTHQFSEKKVDRVRLQLASLGEQHVGYKCLDFPSIKLSVVGGRPFSCGGDRLLRPRLLSKWLVRDMTTNTYICFYGVNDMAGSAKKIYDAAAGAPEGHSVVLLAHNGPTGLGSRMDDICGRDWVPGGGDHGDPGPWFMAILFPLLTLPLLHTAISYATCLNKNHVDLERAISDLQREARVSIPLVVFGHMHKSLAYGRGLRKMIAFGANHIIYLNGAVVPRVKFAQTTPGHEQNQPEGSGSRAPTLRAFTIADLYEGRVEKISEVWVLVSGARTEVEEEIVLYKHPREQHM

SEQ ID NO: 20097 - protein, 896 aa, Zea mays
  VARIANT 690..896: note = Derived polymorphism lacks residues 690 to 896
MEAALMHQTAATVPARWRCVGDASRAGRGQQLAGVVRLGAARRAASGALPVLRGSRLPGPVRALVSESESEAAAERAADGAVRLFVGLPADAVVSDGRGVSRSRAVSAALRALKLLGVDGVELPVSWAAVQPGSGAWFEWAGYRAVAAMVRDAGLDLRVSLRTDGDALPEWVADAAAADPDVLFTDRSGRRRVGCISFAVDELPVLVGRSPLQAYEAFFRSFAEEFNDLLGSTVTRPVNRFHPIHHKQLERRPNEDFHDCFDSSQKFRNAYNDKVVKRKFIKQDFLGNTYNGACVGKYDRNSCRKRNAYHFGGEKTRKNDTNKDRSKRLRCPLEQDQRQQVECNEMRNDSREGNVEMTRLVCQDGAKRNFNQKKNATAPASSDSTKCDGKNILSPKCSKTIASSHTPNLSEGSNDMDPKSDNYVDGCTERGILQHIPVTHTERNIQLKISDNFTQSEAFRRDCLILWRERQLRKDSAAKADNIVKPDQQQTAQRSKMSTGRRVGSGGSAASSCSKSDNKDDSAPECSDQFSGATSSDKLQKFGEGRANKKLEQTIKFPSNSKCNKRPQDATAEKVLKCSLKLLSEADPLEIAQPKGKEKLVDRRQDVTVSLGPNGELRYPPYPPGNQGADGYAGIGELQCYDKYMLARLKRHAELSGQPLWGLSGPHDGPRYDESPETSAFFREPGGSWKSAYGEFFLSWYAGELLAHGDRVLAAASRAFGGKPVELSAKVPLMRGPSPADATAGLYGGYSPVAEMFARHRCAVIASGVEARPDAAAEGRLARVKAACAEHGARLAAESAPLSVARGGASAGSPGVVWLSAGRTRPCQFTYQRMGAEFFSPGHWPLFVQFVRALECPEEAHEDDLPVSAGGGERLTVPSASAPTSEATRTREVQTV

SEQ ID NO: 20098 - protein, 548 aa, Zea mays
  VARIANT 476..548: note = Derived polymorphism lacks residues 476 to 548
MGCVHGRPPASSPDHPPQLPEPPAPAATQEAAGKAEQPAAPAEKPAWRERRSRSSRNAPAPSFANRARGEQVAAGWPAWLSAVAGEAIDGWTPRRADSFEKIDKIGQGTYSNVYKARDTVSGKIVALKKVRFDNLEPESVRFMAREILILRRLDHPNVVKLDGLVTSRMSCSLYLVFEYMEHDLAGLAASPEIKFTEPQVKCYMHQLLSGLEHCHDRGVLHRDIKGSNLLLDNNGMLKIADFGLASFFDPDRKQPMTSRVVTLWYRPPELLLGATDYGVGVDLWSAGCILAELLAGRPIMPGRTEVEQLHKIFKLCGSPTEEYWKKSKLPHATIFKPQQPYRKRIRETFKDFPQSALQLIETLLAIDPADRLTASSALRSDFFTTEPFACEPSSLPKYPPSKEIDVKRRDEEARRLRAAGGRANGDGAKKTRTRDRPKAVPAPEANAELQVNIDKRRFITHANAKSKSEKFPPPHQDGAVGVPLDASNHMDPLYEPPDPSSFSTVFTYEKGAVPTWSGPLVDPAAVVNQKGKHKSGRSSKQPATARAR

SEQ ID NO: 20099 - protein, 907 aa, Zea mays
  VARIANT 37..907: note = Derived polymorphism lacks residues 37 to 907
MAAVPEDLRCKRSDGKQWRCSAPSMPDKTVCEKHYVQAKKRSASSALRASLRRSSASSLAPVFPFSSSPSSAARLRAADEDPPMAVARPLYGRVAGEAVYVAEPVPAPARREVAYEGLPRGNAAGGRTAAGLVGRGPLWFPGGGSEGIRSCHQCRKAGGVIWCTSCDRRGYCARCISRWYSDIPMDEVRNVCPACRGICNCKVCLQGDNLIKARVQEISAVDKLRYLHCLLVYVLPVLKGIYSDQCFEIGVETRSSGPKTDVLRAKITSDEQMCCDFCKVPVFDYHRYCPRCSYDLCLDCCHDIRHSRANVARGEYTEGYVEDKGRDSFNRRARLEPSAESVNDKSLSWPIDINNIDIKSLFPTWRVNNDGSITCGPHEAGGCGSSKLVLRRIFKINWIAKLVKSSEEMVNGCKVHDLEDGCLSCSDGRRSEFTGQQNLGLSKCSNSDEIGRNCLYSPVLEDLKYEGIIHFRKHWKNAEPIIIREAFEPSLSSSWDPLSIWRGIQEIMDEEMDEDVIVKAVDCSNQSEVDIELKQFIKGYSDGSKGGDGHLLMLKLKEWPRPSVLEAFLLCQRPEFIVNFPLVDFIHPRWGLLNLAAKLPPDALQPELGMKLLIAHGSHRELGKGDSMTNLMINMSDVVHMLMHATEVHYQCPKRVRVQSDVSEMIANGTSVHVNAHTPVQNLNLDIEEQSHKHSKSHIEEPNTNNSEGSLAGAVWDVFRRQDLPKLNEYLAAHREECAARCQAVSSVKYPIYDQTVYLNDYHKKMLKDQYGKPTTPFTSVLAGIEPFTFHQHIGEAVFIPAGCPFQLKNLQSTVQLALNFLSPESLPESVRLSQEIRCLPNGHLAKLKMLEVKKISLYAASSAVREIQRITLDPKFNLDPSFEDQNLTRAVSENLARVNKRKVSCS

SEQ ID NO: 20100 - protein, 347 aa, Zea mays
  VARIANT 198: note = Ancestral polymorphism is D, Derived polymorphism is Y
MASGAAAAPVVQTVVLKVAIHCHGCKKKVRKVLRGIEGVQDVTVDASQHKVTVTGTVDADTLIKRLYKSGKKGVPWQCHPPAKNSEPAPEAPPAPQPAGDGGKDAAAAAAVAAADKKSEEAVKEPQGESSEEEKKKPEQEDGAAEKKQPEAESSKEVEKVEAKTDGGDSEGAETKQAKGAAEPAKEAPAAAGAANDEDEAKKSDKAKDAGTAEPAAVTTERSLPLAPAPKHAYEHEYRPPYYVAPAQPVLSYHAAQRSSSVSHFAPQAQPAYSTQQAHPHQAYYSAQPQPGKQWSPSYLYMPYPHAAAPEPYYQQDYYGPPGMHASPMHDSSYRIFDDENPNSCSVM

SEQ ID NO: 20101 - protein, 1106 aa, Zea mays
  VARIANT 248: note = Ancestral polymorphism is C, Derived polymorphism is F
MVETRRSAAAKRSAAVVEEEKGSLASPALEPAEDAPAGLGAGDDVASSQPPKRAKVGCTESDTAKPSVAPAAGAVAGPLPNTAGLQARTGAMDKLEAFLKSKEAQSNPAGHKQGTNDKDLSAKMKRVMDLSEDISEKIKRSKDRLAVLLNKPAAGTSRRQEPWCRLISQHSMHPTLSIYGAIFTIGHGAHHDFRLDESSTASSVCRLKQAKRGALLEIFESKVVRVNGKSLDKAAKVTLNGGDEIIFCSPVRHAYIFEQLHEEKSSTSVLSSTCTCSSIQLGQHSHFNDIQDHVSSKGRKASSFLFGRGRCSLLSCGLSADPLNICKTTEGRSQFISEDNISSGRCQLLKEDLINATVDVSDISESFDSCPYYLSEHTKHALMSAAFVHLHCKNYFKFTKDISSLSQRVLLSGPTGTDMYQEYLVKALAKYFGARLLTIDSSMLFGGQTSKESESYKKGDRVRYIGSGIILDGQSPPDFGSQGEIFLPFEENRSSKVGVRFDKKILGGNNLGGNCEVDHGLFCSVDSLCPDIPGWEVTFKHPFDVIVEFISEEIRHGPLILFLKDTEKICGNNDSYHGLKSKLKHFPAGAFIIGSQIQPDNRKEKANVSSPFLSKFRYSQAILGLTLQDIDGGNDNNKETSKAIMKHLIKLFPNKVTLEAPQAEMELSRWNQMLNRDIEVLKGNANISKIRSFLTRLGLECTDPEAILVTDRILTNECIDKIIGFALSHQLKNCTNPDPPLGSVQFALSSGSLKHGVDMLKSIQSGSKSSTKRKSLKDIATENEFEKSLLADVTPPHEIGVTFEDIGALESVKDTLKELVMLPLQRPELFNRGQLMKPCKGILLFGPPGTGKTMLAKAVATEAGANFINISMSSISSKWLGEGEKFVKAVFSLASKIAPSVIFVDEVDGMLGRRENPGEHEAMRKMKNEFMVNWDGLRTREKERVLVLAATNRPFDLDEAVVRRLPRRLMVNLPDASNRRKILSVILAKEDLADDVDLETIANLTEGYSGSDLKNLCVTAAHRPIREILEKEKKERASAEAENRSLPPSHTSNDVRALRTSDFIHAHEQVCASVPSDSSNMSELVQWNDLYGEGGSRKKTTLSYFM

SEQ ID NO: 20102 - protein, 469 aa, Zea mays
  VARIANT 239: note = Ancestral polymorphism is V, Derived polymorphism is L
  VARIANT 244..469: note = Derived polymorphism lacks residues 244 to 469
  VARIANT 262: note = Ancestral polymorphism is I, Derived polymorphism is T
  VARIANT 278: note = Ancestral polymorphism is E, Derived polymorphism is G
  VARIANT 321: note = Ancestral polymorphism is M, Derived polymorphism is T
MDVYIYQALLLSVLAVALLQLVKMALKPRPRLPPGPWKLPVIGSMHHLVNVLPHRALRDLADVHGPLMMLQLGQTPLVVASSKETARAVLKTHDTNFATRPKLLAGEIVGYEWVDILFAPSGDYWRKLRQLCAAEILSPKRVLSFRHIREEEKRKNAAEFLAATKAVVGLSSGFNIPDLFPAWTTVLAKLTGMTRSLKEIHKTVDTILEEIIEERKRIRDEKIMGGAAAEDVDENLVDVLIGLQEKGGFGFQLTNSIIKAIILDMFAGGTGTSGSAMEWGMSELMRNPPVMKKMQALIREAFRGKTVVTEGDLQASNLQYMKLVIKEALRLHPPAPLLVPRESIEECELDGYTIPAKSRVIINAWAIGRDPKYWNDADEFKPERFEDGSRDFTGSSYEFLPFGSGRRMCPDFNYGLASMELAFVGLLYHFDSSLPDGVKEVNMGEVPGLGVCRRTPLMLCATPFVPVPA

SEQ ID NO: 20103 - protein, 285 aa, Zea mays
  VARIANT 150: note = Ancestral polymorphism is T, Derived polymorphism is I
MSRRWSRTIYVGNLPGDIREREVEDLFYKYGKIVDIDLKVPPRPPGYAFVEFEDPRDAEEAIAGRDGYNFDGHRLRVEAAHGGRGNASSHDRSSGFGGGGGARRGVSRHSEYRVLVTGLPSSASWQDLKDHMRKAGDVCFSEVYREGGGTVGIVDYTNYDDMKYAIKKLDDTEFRNAFGRAYIRVKEYNGKRGRSYSRSRSPSRSYSKSRSPSKSPRTRRSSSRSRSRSVSSRSRSPSKGRSPSRSPARSKSPNVSPANGEAASPKKQSPNRSPSGSRSPDAKPE

SEQ ID NO: 20104 - protein, 134 aa, Zea mays
  VARIANT 28: note = Ancestral polymorphism is L, Derived polymorphism is P
MAGAGDEYYYGGPGQGQGPRGAPHGLLLAVVVGLVVAGPLFLGDGGEALTEAVAELLSPVGLLLLPVCLLFLIRLLSSDRGAAALADVFAFGGSPDAVHRVGGSPVGVALMLLLILALLYYRSSLFGGGGDDDE

SEQ ID NO: 20105 - protein, 130 aa, Zea mays
  VARIANT 4: note = Ancestral polymorphism is G, Derived polymorphism is R
  VARIANT 35: note = Ancestral polymorphism is E, Derived polymorphism is D
MARGVVAGAKGGAAAGGGKKKGSVTFTIDCTKPVEDKIMEIATLEKFLQERIKVAGGKAGQLGEGVTVTRDKSKVTVTSDGPFSKRYLKYLTKKYLKKHNVRDWLRVVAASKDRSVYELRYFNIAENEEE

SEQ ID NO: 20106 - protein, 446 aa, Zea mays
  VARIANT 106: note = Ancestral polymorphism is R, Derived polymorphism is C
MATASDSDAGAQPRDDPSLLPFASFSFALSIRAPATPTLASVPSTIHLPTQISTLAVCLHPSAAQPLPRRPTRLNSATYSVISPLPSSTPGLSRSFPSGAPAASGRRRTLVWFRADLRLHDHEPFHAAAGASSSLLPVFVFDPRDFGKSPSGFDRTGPYRANFLLDSVADLRRSLRARGGDLVVRVGRPEVVIPELARAAGAEAVYAHGEVSRDEVRTEERVQKAVEKEGINVKYFWGSTLYHVEDLPFRLDDMPSNYGGFREAVKRLDVRKVLEAPEEVKCVPMKNVLEPGDIPTLAELGLTAPPAMAQDSKPAVGSTLIGGETGALERLKKFAAECSMQPNKADKSNTQDSIYGANFSCKISPWLATGCLSPRFMYEELKKHATRAISSESTPKNNDGTSDAGTNWLMFELLWRDFFRFITKKYSSVQKTSEVATGCTPAPALA

SEQ ID NO: 20107 - protein, 209 aa, Zea mays
  VARIANT 1: note = Ancestral polymorphism is M, Derived polymorphism is I
  VARIANT 6: note = Ancestral polymorphism is G, Derived polymorphism is V
MIIQPGTPQMLTCNLHMAPMQGWMAHTTARVIAHSRKVKLVGTHTSPLLHLPGTHTCFQCNLSLVADKSAGKRPVGRDRAKAANKKSKSVSGDTSSSEYASRMQDLSIQKINIMQEESVRKGERFQQLATIDEKRYQEMRSHNQSVLDIEQEKVRIMREKHDREEKKEDERILSINLDSCTPSLRMYYEALQEDIMAKLAARRQGRHAP

SEQ ID NO: 20108 - protein, 957 aa, Zea mays
  VARIANT 565..957: note = Derived polymorphism lacks residues 565 to 957
  VARIANT 558..957: note = Derived polymorphism lacks residues 558 to 957
MRLRRPAPCRPRRPPCPGLMLLWCPRAVECVSSCRSASWKGGGRPYECSVLLCAWNAPRALTGALASTAQCSSCGHAEAGSSWRRRGRSSRSNNSLLCITLDEEINRGKFGYDPSPAYSASFVRPWSTIVNRTWRAHCYSSSESFSISPETFWEDLKPAVSYLQPEELTFVHDALKLAYEAHSGQKRRSGEPFIIHPVEVARILGEHELDCESIAAGLLHDTVEDTDVVTFERIENEFGPTVRRIVEGETKVSKLGKLQCKSEGSSKQDLKAEDLRQMFLAMTEEVRVIIVKLADRLHNMRTLTHMPQHKQYAIAMETLQVFAPLAKLLGMYRIKSELEYLSFMYVNPTGFAELRKRVEDLYKAHEQELEEANRILRQKIADDQFLDLVSVETEVRSVYKELYSIYKTTLKSKSSINEVNQVAQVCIFSIHTIYITLNILLFVKLLTLLPYTIFLAEDHHKTKILQWCWAIVHCTTGTTNNKLLYCLYSGFVIGSQVYSIQICYHVLGLVHGIWTPVPQAVEDYIATPKPNGYQSLHTTVIPFLNESMFHLEVQIRTEDMDLIAERGIAAHYSGRGVVSGPVRPGISSGRNAKGKVICLNNTGFALRIGWLNAIREWQEEFVGNMSSREFVDTITRDLLGSRVFVFTPKGEIKNLPKGATVVDYAYLIHTEIGNKMIAAKVNGNLVSPIHVLANAEVVEIITYDKLSSKYAFQRHQQWLQHAKTRSARHKIMKFLREQAALSAAEITADAVNNFVADLEDESDSELSLPSTKNEDSKFNWEKILSSDKLFFVNKSSDGFLPVNNVHTKVNGKQNKTVKDLGIKINGHSTIRGDSFSELMHPGNSTCKEVFPGLDHWKSGKISGWHNTEGNSVQWLCIACVDRKGMMAEVTSALTACGITIWSCVAEVNKRRGMGVMLFHFEGSYENVVSACSSVDMILGVLGWSVGCSWCPLGVLEC

SEQ ID NO: 20109 - protein, 99 aa, Zea mays
  VARIANT 3..99: note = Derived polymorphism lacks residues 3 to 99
MSQRGAQGLPIDLRGDQDCDDIYHSSFYCWPDNWGQGLSAVLRNQVTKGTGDSSTNTAIQPIKNGHCSNTEGKAWDPLATKITCSIARGSPALTPSMCF

SEQ ID NO: 20110 - protein, 114 aa, Zea mays
  VARIANT 12: note = Ancestral polymorphism is D, Derived polymorphism is Y
  VARIANT 19..114: note = Derived polymorphism lacks residues 19 to 114
  VARIANT 24: note = Ancestral polymorphism is D, Derived polymorphism is Y
  VARIANT 28: note = Ancestral polymorphism is V, Derived polymorphism is A
  VARIANT 65: note = Ancestral polymorphism is D, Derived polymorphism is N
MPLQDAFQGISDIITVPHQSDFAYVKVAMKNLELPCPVLVFLPTKIGPKKLLRSEQEYKMSELTDIKIDIKCVPKKTTLIKAMEEADVKTKWENSSWGKKLIVQKRRASLTQRT

SEQ ID NO: 20111 - protein, 240 aa, Zea mays
  VARIANT 90: note = Ancestral polymorphism is I, Derived polymorphism is T
  VARIANT 122..240: note = Derived polymorphism lacks residues 122 to 240
MSHDELADKEPSSSEEFQLALTDSKFRSLSPAPIPIPASPGIRSFVDSEWVMLTRVAKPDQLGVRFLGRPMVRPQRVEQSKASCFDVGAIVDAWWHGGWWEGIVLCQVGSGRLQVYFPGENRTTEFGEDELRCSLEWVGNKWNPLKGRKDVTSKLTSTADCGSEYNLRWRPRKRSRRSGSRKQSDTSSGSSSGDMDLFSPSPSGSFGQHNLVPDEETCKRSGEQTFMGVPVQVLNLVMSR

SEQ ID NO: 20112 - protein, 169 aa, Zea mays
  VARIANT 74: note = Ancestral polymorphism is T, Derived polymorphism is S
  VARIANT 145: note = Ancestral polymorphism is A, Derived polymorphism is T
MMSRERKKAAAALQEKLKILRSITHSHALSNTSIIMDASAYIKQLQQKVVRLNQEIACAQDALRHKSSSYPTVTVETLGVQGFLVNVFSDKSCPGLLVSVLEAFDELGLSVLQATASCAADSFRLEAVGGENVVDNVDEHVVKQAVLQAVRSCPESGCGGEHDDEESLG

SEQ ID NO: 20113 - protein, 331 aa, Zea mays
  VARIANT 302: note = Ancestral polymorphism is A, Derived polymorphism is P
  VARIANT 193: note = Ancestral polymorphism is L, Derived polymorphism is P
  VARIANT 9: note = Ancestral polymorphism is R, Derived polymorphism is P
MVVSILTHPFMAAAACVAVALALLATTSSAQLDPHFYDKACPAALPTIKRLVEEAVAAEPRMGASLLRLHFHDCFVNGCDGSILLDDTPFFTGETMAAPNANSVRGFDVIDRIKGAVNAACRGNVVSCADVVAIAARDSVVALGGPSYDVPLGRRDARTASQAAANSSIPAPTFGIDRLASNFASHGLSLQDLVALSGAHTLGFSRCTNFRDRLYNETATLDGSLAASLRAACPRAAGTGDDSLAPLDPTPARFDAAYFASLLRNRGVLHSDQQLFAGGPGVADALVRLYAADTDAFRRDFADAMVRMGSLSPLTGSNGEIRYNCRKVNYS

SEQ ID NO: 20114 - protein, 228 aa, Zea mays
  VARIANT 33: note = Ancestral polymorphism is S, Derived polymorphism is Y
MDAAGGVEAAANGGIEGSADPCSSGGAGGYRRSVHQIAGGGKAADIILWRRARVTFGVIFGATLAWWLFEKSGLSLLTICSDILLILIVLQFIRVKIAGLLDRQPRPLPELVLSEEMVSNAAASFRVKVNSMLMIAHDITLGKDFRLFFQVVIVLWLLSVIGNFCSSITLAYIGTVALVTMPALYNKYQRPVDRYAGMVYRNISRHYKIVDENVISRLPRRFIRDKED

SEQ ID NO: 20115 - protein, 1036 aa, Zea mays
  VARIANT 471..1036: note = Derived polymorphism lacks residues 471 to 1036
MAAAVSRDDELVIKSPNDKRSYRLLRLGNGLRALLVHDPEIYADGYPPQTSKPCEDEEMEEVDEEDEDGDDDSEEYSDEEGEDDDEEDGEDDEEEDEGEPKRRKEKVGAEPIVKKAAAAMCVGMGSFADPEKAQGLAHFLEHMLFMGSTEFPDENEYDSYLSKHGGASNAFTETEYTCYHFEVKREYLKGALDRFSQFFVSPLVKAEAMDREILAVDSEFNQVLQSDTCRLYQLQSHTCSQGHPLNRFTWGNKKSLVDAMGSGINLREEILEMYMRNYHGGAMRLVIIGGEPLDILEGWTMELFSKVKTGPLLDIGPKTDIPFWKPGKLYKLEAVRDLHSLFLSWTLPCLHKEYMKKPEDYLAHLLGHEGKGSLLYFLKAKGWASSLSAGVGSGGSQRSSYAYIFEMSICLTDSGLKNVFEVIGAVYQYIKLLKQSEPQEWIFKELQDIGYMEFRFAEEQPPDDYVVDLAENMLFYSEKHIVCGEYIFEDWDSELVKHALSFFNPDNMRVDVLSKSFDKQSQAIQCEPWFGSHYIEEDIPSSLIESWKNPVQVDDNLHLPRKNEFIPGDFTLRNANSPGSSSDDNPRCIVDEPFIKLWYKMDMTFNVPRANTYFLIYVKDGYSSLENSVLIDLFANLLKDELNEVLYQAYVAKLETSTSVVASKLEIKLYGYNDKLPILLSNILSTVRSFSPKTDRFEVIKEDLERAYKNTNMKPMSHSTYLRLQVLREIFWDVDKKLELLMKLTFTDLVAFVPKILSQLHIEGLCHGNLSEDETINISKIFLNTLSAQTLPEEARHEERVICIPNGANLVRSVRVKNDLEENSVVEVYFPIEQDVGKEATRLRAITDLFSNIIEEPCFDQLRTKEQLGYTVDSSPRMTYRMLAYCFRVMSSKYSPIYLQSRIDNFIDGLSALLDELNEETFEHHRSGLIADKLEKEPSLSYQTSDYWSQIADKRYMFDMSKLEAEELKTVQKADVIAWYNTYIRSSSPKRRRLAIHVYGCNSDIAEAAKLQEQSWTIIDDVESLKASSQFYSSLC

SEQ ID NO: 20116 - protein, 236 aa, Zea mays
  VARIANT 97: note = Ancestral polymorphism is R, Derived polymorphism is C
MADPSASSVPPVVTTGSVVTPSLWPRRPPGGGSTVSADKFAHAHRVFGTSNVIKILNDLQPYYQREDAVNSLIYEADMRVRNPVYGCIGVVSILQHCLLRLKKALERASLELSKYQVLDSLHKAAAAASASVAVGSHGVAAAGMADFVGNAVPNNCTQNIVNVGHSTIASINGAGPFMQQDNFASVQMLARSFEGENGAAARVGMNGGGGYGFAYSPAMGVGHGVVSGHVQQINGG

SEQ ID NO: 20117 - protein, 325 aa, Zea mays
  VARIANT 65: note = Ancestral polymorphism is S, Derived polymorphism is R
MASFGSDDHVPAAMAVNDLVEARDGVARLRILLLQLDEQRAAWAQLEIDAVLAKLSSAISALDTSEVGRSRAAGPDGARPQRQQSGRSGGNKRKQGSSRSRSQRPSDKKITATLEDGHEWRKYGQKEIQDSPYPRSYYRCTHKADQGCNAKRQVQRCETDASTYVVTYYGEHTCRDLSSIPLIHQAAAARAEEPDDDRANNLISFGSNSNNAASNGASSSQQQYQLAMGRSAADHHQQLSTSWCTSDDVFSSSAGSFMQVADDQLIGAVVVGSAGVASSAPDRAAGTLLGGGVASGGGGAAAAGSFPPSPNSLDFVVGSLGSIGG

SEQ ID NO: 20118 - protein, 202 aa, Zea mays
  VARIANT 127: note = Ancestral polymorphism is L, Derived polymorphism is P
MKQPQLILSHTLVQSIMRYWDVWSIKIRISILTIDNGVFEVLATNGDTHLGGEDFDQRIMEYFIKLIKKKYSKDNRALGKLRREAKRAKRALSNQHQVRVEIESLFDGTDFSEPLTRARIPKVQQLLKDYFNGKEPNKGVNPDEAVAFGAAVQGSILSGEGGDETKDILLLDVAPLTLGIETVGGVMTKLIPRNTVIPTKKS

SEQ ID NO: 20119 - protein, 675 aa, Zea mays
  VARIANT 71..675: note = Derived polymorphism lacks residues 71 to 675
MCSCACARLLPPLFSPAPSPNLRPAFPHSPTPARSRAVVALAGAASRDDAPAPLSSFDFLALKRELDEEEEAVVAVDAKEGAGAVNEDDGELGAEWSAGGTRRRRRRQMARRSALLAKQVISVTSARSLGFVSQLWIDTASWAVALVEVKPSLLSGEAEKFLFEDIYQVGDVVLVANESVIDNEHKLVGLHSLVGYNVVTSRRRNVGKVRGFTFDISSGAMESLELDSFGLSIVPSSLVSTYCLFVEDVLDIVSDTVVVHEDAVSRVQRLTQPQRLGAELLTAEPHNVTVYRCGGCGTTLRAKICASGGRHASAKQARQDSDSYSVATAVSNGNGAPPQIKDQGSESSFGADAPSTEHGSNGAGSGENGGGILAVQNAVVVAHDAENKENHTVEQPTENSETCRAVSGHDDDTERRLNASEIKTVPSEMSKAAVSAQDPEQKEEGGGEHAANKKGYLVRVLSRSCDLRSSRDSTDFQSARTSLQSKSFSASEPLQSKIMNTVDELKGDLSELFSNKPADDCKPKAHQPPRPSNSKQDGRTTRAAIASSAPLAAYHPAAKHSGYVSRPSKSGQVAAASRGLPSLRDGKLHRLMGYSSASEVLQHSPDLFESFGRRAADAGRAHVGGKGKGVCVAENDACERDGGAVERSKVRSGGWPVHGILKKGIHGLESLKLRS

SEQ ID NO: 20120 - protein, 213 aa, Zea mays
  VARIANT 54: note = Ancestral polymorphism is S, Derived polymorphism is F
MAEISPCSVLYGRASMESCHGEENFWYKCKHNVSTCWIDFGKQLNGHHFSQLCSVIGDSRTSLEADTYASYMKGALFSEQDKNIDAAIINFKNTRAIYEEPRKYGSIENELLCYQCIEEVEPMIDLCSHKLGGSYLQAHELLDTANDLLNEDGCPQPHWVLPSAIYEPERSGGHPISLGKKMQDIHAEAVKKRRCPTKKPYSRSIVGASLEVI

SEQ ID NO: 20121 - protein, 187 aa, Zea mays
  VARIANT 91: note = Ancestral polymorphism is S, Derived polymorphism is C
MESAAPVIARPSLPKKPSPSFRLRNGSLNVLRLRRVFDLFDRNGDGEITLDEMAAALDALGLGADRPGLQAAVGAYIPAGAAGLRFDDFQSLHRALGDALFGPIPETVPEEDVEGDMEEAFRVFDEDGDGFISAAELQAVLRKLGLSEARNLATVQEMICSVDSNCDGRVDFREFKNMMMQGVTVLI

SEQ ID NO: 20122 - protein, 1084 aa, Zea mays
  VARIANT 197: note = Ancestral polymorphism is S, Derived polymorphism is Y
MDRELASDMELDSVVFQVSSPDNRYEAIACSKGKTELIASGPFDQLVLHLEDAKTFQSCSSSGTFKLLLAGDGKDSSWFTKSTLQRFLHIISSFDTSKSVNGVLDEMSQLEETRKFHQSLYVKEQQNVISGALTGGLFGTGAIAQQGNDGPNSSDTTKNELLRALDLRLTALKEEILVVLNRAVGSNLSAREISDLSAFVQRFGTSEFCWSFLFASWLMRCTLLISDCKPSELPLQQNSTTEKVDKDENAHKPCISPQTNLQMPIANNVSPAKLAQIERESSTESDDSSESSDEGEAIVERSRPLVRSASPRRSASPMRRVQIGRSGSRRSTAIAIKSLSYFPPSQRIPMDKDDESSTFNGETDQPPKKSDTNVRRMSVQDAINLFESKQKDQNPDSQNKKAGLFATKSVLRRWSAGMGDSLNENSEGKVSDSTSESKSNNIASETEKVEAEMKAELGNIPNFFVTPEAEDLTFHANSHEIRVSETESAVCSNVCAEQAKPGLEESSDRAMASAEWNRQKEAELNQMLLKMMEVMPGKFAGANATATGLSSTNQQKAVSHGQHTEKRDTKVRTEKGTRRPAKEPSTKPLKETAGKNKPAMTSKSGSSTERRISPVPQRARRNSSPPVLPKEVASKTPPVRKSSPKPSPAPASVPTTRSSWSGGSLTKATTTQKTKRSPGMASTSTQTSRRTPTTPSSSQPASKAERAIQSVKNKKETITATKPAIKGQEEKKTKTATKTSRITKVSPSEEKSGVKTKQSLQKVSNKSSVVPLESKTLKKTTGISQSIRSGMVKNKVPQPNDFSKDTGSVNQAEDKEQSPVTTEPTTKVLEADLAQPAHDVDENLEISLDNDLNIEKTEKPASSLTATEMGSSIQVEPSTDELDEAIQPPDDDMGISSSAWVEVERQELEVTVSSENVVVEDVTSPGIAPLPSSSPRVRHSLSQMLQADSNEPEIIEWGNAENPPAIVFHKDSPKGFKRLLKFARKNKGDNNANGWASPSVVSEGEDELEEPRGTSDGTNSSRRTFDGSKTNSILSAQSTTGSFNSLNSDKLRERSGAATSTRASRSFFSLSNFRSSRSNESKLR

SEQ ID NO: 20123 - protein, 351 aa, Zea mays
  VARIANT 280..351: note = Derived polymorphism lacks residues 280 to 351
  VARIANT 194: note = Ancestral polymorphism is L, Derived polymorphism is F
  VARIANT 143: note = Ancestral polymorphism is R, Derived polymorphism is L
MPLSCFAGGDPSAAPPSSSATSVYWTHLGGVTLTWSRAPIGLLLAAELSLRPAGDVHGGEDATPARFAFRPWLPWRRRGSKRFAAPGGRAVKFSWDLSRARFAATGRRPEPVSRYSLRVWVDGELALAVGDHAPAAGLLLSRRESAAVVADGRGEAYSTAVDVAGERHDVSLAVEGSTMWVAIDGEKALQVRRLRWKFRGSERLDLPTGRRVRVTWDLHGWLFCPDAAAAVFVLRFETSDAAEADDEGDADESEAGPHVLRQPSFSFRNHQAHGSGGDSWFSSDSDRRGWMRGPFRSGGSDTSPSVSVASTSAASSAASVATVSEWAAAEEAATLKDGGGFSLVVQLWKKR

SEQ ID NO: 20124 - protein, 629 aa, Zea mays
  VARIANT 401: note = Ancestral polymorphism is P, Derived polymorphism is L
  VARIANT 411: note = Ancestral polymorphism is P, Derived polymorphism is L
  VARIANT 420: note = Ancestral polymorphism is S, Derived polymorphism is G
MKATAPPAKRRRGPRLAVLALVFCSLLVPIAFLFNRFPAVYVTDERPQQEIDLPSFDRVAFESGGSVNEDVFKKTSGSSSVSHHGIDTGPSIVRTEPKVIVLPPPKIELVLPPPKVEPKPEVKPVPVSVPVHHNKKINVDKIRPPRVQSADEVEKAKACQLEFGSYCLWSIEHKEVMIDTIVKRLKDQLFVARSYYPSIAKLKGKETLTRELKQNIQEHERVLSESIVDADLPSFIKTKVERMDQSIARAKSCTVDCNNVDRKLRQILHMTEDEAHFHMKQSAYLYNLGVHTMPKSHHCLNMRLTVEYFKSMPLDPNDSSAHTFNIPDNRHYVILSKNVLAASVVINSTVSSSEDTENIVFHVLTDAQNFYAMKHWFARNSYRESAVNVINYEQIIFENFPEFGTQQLYLPEEFRVFISSLERPTEKSRMEYLSVFSHSHFFLAEIFKDLKKVIVLDDDLVVQHDLSFLWNLDMGDKVHGAVRFCGLKLGQLRNLLGRTMYDQQSCAWMSGVNVIDLEKWRDHNVTENYLQLLRKFGNNGDEASLRSSALPISLLLFQHLLYPLDERLTLSGLGYDYGIKEKLVQSSASLHYNGNMKPWLELGIPDYRKYWKRFLTRDERFMDECNVSP

SEQ ID NO: 20125 - protein, 721 aa, Zea mays
  VARIANT 177..721: note = Derived polymorphism lacks residues 177 to 721
  VARIANT 66: note = Ancestral polymorphism is P, Derived polymorphism is L
MDAYEATKVVFSRIQALDPDHAAKIMGLLLIQDHGEKEMIRLAFGPESLLHAVMAKARKDLGLLLPASPTSVAAAGHAPFLQLPRQNSGRAGAPSPLSVSSPSSWGHAPAFSRSNSTSNGTGTAEEAAGAGEELPSPVNGGAAPFFPHQSGDALLDDLQLQEQLAFLNEGSANPAHQLPGFVGGECRSPGPGDASGMFAFGLGWPNGGPAHRRSSSVNEFCLGGGGGGDGFGWKPCLYYARGFCKNGGSCRFVHGGLSDDAAAFAGAKMEAAADQQQQQQCQDFLIRSKSQRLGSAAFPYSSTGSLPGSPSAASKCLSFLLQQQQQQHDRAAAAASLMLGGGDEAHKFMGRPRLDRADFANMMNPGSRQIYLTFPADSTFREEDVSNYFSIYGPVHDVRIPYQQKRMFGFVTFVYPETVKLILAKGNPHFICDARVLVKPYKEKGKVPDKCRHALRVHPLLAPSDRNGGRPTCMQLLRGLTDLLFSLRRKPQQGDFSGCTTPTGGLDGGYPFDLHQLGGRMLQHSSSANELLLRRKLEEQQQAIELQSRRLMGLQLLDLKARAAAAAASPLPTPIGDAFASSQPVSTTAVESPSPPESGQQLLKLRSGFALEGKVNGGDKEESAREASPDAADSDQSGGEHNLPDSPFASPTKSAALLHDSFTATETESTAASRVGVDAGVGSKIDGGSNHLRPPALEIPSPSSYFFPMHRLSSDHGAMGM

SEQ ID NO: 20126 - protein, 51 aa, Zea mays; identical to SEQ ID NO: 13223
  VARIANT 14: note = Ancestral polymorphism is A, Derived polymorphism is T

SEQ ID NO: 20127 - protein, 1846 aa, Zea mays
  VARIANT 572..1846: note = Derived polymorphism lacks residues 572 to 1846
  VARIANT 559..1846: note = Derived polymorphism lacks residues 559 to 1846
  VARIANT 511..1846: note = Derived polymorphism lacks residues 511 to 1846
  VARIANT 283..1846: note = Derived polymorphism lacks residues 283 to 1846
MTGQVTVMEPAVATAGEGQRFKRISRQAWSGNLELDPLLNESLDQWPHLNDLVQCYKADFVKDDCKYGRYESVAPPSFQNQIFEGPDTDIETELQLCNARHFKPEDPTEDDMPSTSGRQMYETESSASSSKVHCSLSPLPAYEPAFDWENERSLIFGQRVPESIPAISNSGLKITVKVLSLSFQAGLVEPFSGTICLYNRDRREKLSEDFYFHILPTDMQDAQGSLDRRGVFSLDTPSPSVCLLIQLEKAATEEGGVTPSVYSRKEPVHLAEKEKQKLQVWSRIMPCKESFAWAMIPLFEGNHAGGLSDAASPSSPLATSLPGSTSQDSIVDPILKLTLDGKVNHYSSGSSVIVEISNLNKVKESYIVDSLQDPKRKVHKPVKGVLRLEVEKLHGGHNDVDNTSEGGSMANDLNDAGDINNGRSNRSSFDGIHSFVNSIAIAQKDAHHNGIISNAENGDNFEAFDFRMLTRSEPFSQLFHCLYVYPLTVSLSRKRNLFVRVELRKDDSDIRKPPLEAVHPRERNMMLQKWGHTQIAVGTRMASYHDEVKISLPALLTPQHHLVFTFFHVDLQMKLEAPKPVIVGHSVLPLSTHIQLLSDVSLPILRELVPHYLQGSGKERMDYLEDGKTVFKLRLRLCSSLFPVNERIRDFFVEYDRHTLHTSPPWGSELLEAINSLKNVESTALLQFLQPILNMLLHLIGDGGETLQVAAFRAMVNILTRVQQESSDGAERNRFLINYVDFAFDDFGGRQAPVYPGLSTVWGSLARSKAKGYRVGPVYDDVLAMAWFFLELIVKSMGLEQSRLFYHNLPLGEDVPPLQLKEGVFRCIMQLFDCLLTEVHERCKKGLSLAKRLNSTLAFFCYDLLSIIEPRQVFELVSLYMDKFAGVCQAVLHDCKLTFLQIICDHDLFVEMPGRDPSDRNYLSSVLIQEIFLTLDHDDLSQRAKAARILVVLICKHEFDARYQKSEDKLYIAQLYFSLIGQILDEMPVFYNLNAIEKREVLVVILQIVRNLDDATLIKAWQQSIARTRLFFKLLEECITHFEHNKTGGSMLLGASSRSPDVERPAPPKYSERLSPSVNAYLSEASRHEIRPQGTPENGYMWNRVSPQLSSPNQPYSLREALAQAQSSRIGSTARALRESLHPVLRQKLELWEENLSTAVSLEVLRITEKFSAAAGTRSITTDYAKLDCVTSIVMGLLSRSQPLAFWKAFLPVVYNIFNLHGATLMARENDRFLKQIAFHLLRLAVFRNDSIRKRAVVGLQILVRNAFNYFKNTTRLRVMLTITLSELLSDVQVTQMKSDGSLEESGEARRLRKSLEEMADVRSKDLLKDCGLPVTALEAAPDGSSDNMWSWAEVKHLSKCLVQALDAGLEHALLDSVVTVDRYAAAEGFYKLAMAYAPVPDLHIMWLQHLCDAHQEMQSWAEAAQCAVAAAGVIMQALVGRNDAVWSKEHVTSLHKICPIVNTDVSAEASAAEVEGYGASKLTVDSAVKYLQLANKLFTQAELYHFCASIQELIIPVYKSRRAYGQLAKCHTSLTNIYESILEQEASPIPFIDATYYRVGFYGERFGKLNKKEYVFREPRDVRLGDIMEKLSHIYEVKMDGSHTLHIIPDSRQVNADELQPGVCYLQITAVDPVMEDEDLGSRRERIFSLSTGTVRARVFDRFLFDTPFTKNGKTQGGLEDQWKRRTVLQTEGSFPALVNRLPVTKSESLEFSPVENAIGMIETRTAALRNELEEPRSSEGDQLPRLQSLQRILQGSVAVQVNSGVLSVCTAFLSGEPATRLRSQELQQLIAALLEFMAVCKRAIRVHFRLIGEEDQEFHTQLVNGFQSLTAELSHYIPAILSEL

SEQ ID NO: 20128 - protein, 132 aa, Zea mays
  VARIANT 79: note = Ancestral polymorphism is A, Derived polymorphism is V
  VARIANT 100: note = Ancestral polymorphism is D, Derived polymorphism is Y
  VARIANT 101: note = Ancestral polymorphism is E, Derived polymorphism is K
  VARIANT 111: note = Ancestral polymorphism is G, Derived polymorphism is C
MHEGAVMRPVPYNPSYPYPASPFVVKVLDSPLPALKRRYLGASSSPPPRQELSQVPSAGTHRHLAALYRVAVPPPRFLAVNMHDLLAHIASFDYRPGMIDELDAQMGFVVGGTILMLLTVVFYEIQVKLRVF

SEQ ID NO: 20129 - protein, 160 aa, Zea mays
  VARIANT 36: note = Ancestral polymorphism is G, Derived polymorphism is S
  VARIANT 88: note = Ancestral polymorphism is V, Derived polymorphism is M
  VARIANT 95: note = Ancestral polymorphism is R, Derived polymorphism is P
  VARIANT 139: note = Ancestral polymorphism is V, Derived polymorphism is A
MDARMFGLENPLVAALHHLLDVPDGDAGAGGDKAGGGATRTYVRDARAMAATPADVKELAGAYAFVVDMPGLSTGDIRVQVEDERVLVISGERRREEREDAKYLRMERRMGKFMRKFVLPDNADVDKVAAVCRDGVLTVTVEKLPPPEPKKPKTIEIKVA

SEQ ID NO: 20130 - protein, 302 aa, Zea mays
  VARIANT 11: note = Ancestral polymorphism is S, Derived polymorphism is N
  VARIANT 19: note = Ancestral polymorphism is T, Derived polymorphism is M
  VARIANT 33: note = Ancestral polymorphism is P, Derived polymorphism is L
  VARIANT 52: note = Ancestral polymorphism is A, Derived polymorphism is T
  VARIANT 57..302: note = Derived polymorphism lacks residues 57 to 302
  VARIANT 59: note = Ancestral polymorphism is A, Derived polymorphism is V
  VARIANT 100: note = Ancestral polymorphism is Y, Derived polymorphism is N
  VARIANT 126: note = Ancestral polymorphism is V, Derived polymorphism is M
  VARIANT 141: note = Ancestral polymorphism is S, Derived polymorphism is A
  VARIANT 161..302: note = Derived polymorphism lacks residues 161 to 302
  VARIANT 205: note = Ancestral polymorphism is P, Derived polymorphism is R
  VARIANT 250: note = Ancestral polymorphism is E, Derived polymorphism is K
  VARIANT 271: note = Ancestral polymorphism is N, Derived polymorphism is S
  VARIANT 283: note = Ancestral polymorphism is L, Derived polymorphism is P
MRAAYDNARSSLTMYLLATEIIGYGDHDFAFAPYGAYWRALRKLCTLELLSARKVRQLAPIGDIETMSLVREICCCSCGARGEPAAAVNLGSMLVSCANYITGLATFGDRFSSEHKAKFLSAMAVVLSSGSGFCVSNLFPSMRFLDVATGMRRHLQVAHEQLDQVLDHIIKACEARQKVKNAEAAEDDDILSTMLRIKDEEFDFPFNITHIKAVIIDLFIGGTETTSSVAEWVMSEFMRNPEAMAKPQAEVQRALDSKNPGDHESLMGCLSYTGMVIKETMRPHPSLPLLLPRLCSYSHVGE

SEQ ID NO: 20131 - protein, 132 aa, Zea mays
  VARIANT 92: note = Ancestral polymorphism is L, Derived polymorphism is S
  VARIANT 83: note = Ancestral polymorphism is R, Derived polymorphism is W
  VARIANT 82: note = Ancestral polymorphism is V, Derived polymorphism is I
  VARIANT 68..132: note = Derived polymorphism lacks residues 68 to 132
  VARIANT 57: note = Ancestral polymorphism is G, Derived polymorphism is R
  VARIANT 47: note = Ancestral polymorphism is T, Derived polymorphism is I
  VARIANT 44: note = Ancestral polymorphism is R, Derived polymorphism is Q
  VARIANT 42: note = Ancestral polymorphism is R, Derived polymorphism is T
  VARIANT 39: note = Ancestral polymorphism is W, Derived polymorphism is S
  VARIANT 38..132: note = Derived polymorphism lacks residues 38 to 132
  VARIANT 35: note = Ancestral polymorphism is T, Derived polymorphism is A
  VARIANT 23: note = Ancestral polymorphism is P, Derived polymorphism is L
  VARIANT 10: note = Ancestral polymorphism is D, Derived polymorphism is V
MPPHMDRALDYKKCMSKDLRRAPVAEPCRPIDGSTQKWWLWRPRQRTRPSLGYGGAGEMSGGDWESDEPFFVIETDSTKIWVRSLSSQSNDLRSSEDKLFIKMALVVRSLYPILPWTPVATTEAKYYCIYVA

SEQ ID NO: 20132 - protein, 295 aa, Zea mays
  VARIANT 22..295: note = Derived polymorphism lacks residues 22 to 295
  VARIANT 27: note = Ancestral polymorphism is R, Derived polymorphism is H
  VARIANT 160: note = Ancestral polymorphism is W, Derived polymorphism is C
  VARIANT 161: note = Ancestral polymorphism is Y, Derived polymorphism is H
MAYGGGGFAISRPLAEALAQMQDGCLRRYPALYDSDDRIQACMAELGVPLTKHLGFHQYDMYGDLLCLLASHPVAPIVTLHHLDVVKPLFPDARSCPSVVRRLFDGPVKLDTAGLMQQSICYDSTNRWTVSVAWGFTVLVVRGIMSPREMEMLARTFLNWYRRADYTTYAFNTRPLARSPCQKPAVYYLSSARHEALRGGETTVTRYERWRHPNETRPACRWDITDPDAHLDHIIVLKKPDPGLWERSPRRNCCRVVSSPKDGKSWEKTMTIDVGICREGEFSQVAGALAFIRDR

SEQ ID NO: 20133 - protein, 154 aa, Zea mays
  VARIANT 82: note = Ancestral polymorphism is V, Derived polymorphism is M
  VARIANT 133: note = Ancestral polymorphism is V, Derived polymorphism is A
MDARMFGLETPRVAALHHLLDVPDGDKAGGGATRTYVRDARAMAATPADVKELAGAYAFVVDMPGLSTGDIRVQVEDERVLVISGERRREEREDAKYLRMERRMGKFMRKFVLPDNADVDKVAAVCRDGVLTVTVEKLPPPEPKKPKTIEIKVA

SEQ ID NO: 20134 - protein, 241 aa, Zea mays
  VARIANT 9: note = Ancestral polymorphism is R, Derived polymorphism is C
  VARIANT 25: note = Ancestral polymorphism is G, Derived polymorphism is D
  VARIANT 44: note = Ancestral polymorphism is R, Derived polymorphism is H
  VARIANT 66: note = Ancestral polymorphism is G, Derived polymorphism is S
  VARIANT 70: note = Ancestral polymorphism is S, Derived polymorphism is P
  VARIANT 74: note = Ancestral polymorphism is P, Derived polymorphism is S
  VARIANT 75: note = Ancestral polymorphism is S, Derived polymorphism is A
  VARIANT 76: note = Ancestral polymorphism is M, Derived polymorphism is T
  VARIANT 87: note = Ancestral polymorphism is R, Derived polymorphism is C
  VARIANT 88: note = Ancestral polymorphism is R, Derived polymorphism is C
  VARIANT 140: note = Ancestral polymorphism is P, Derived polymorphism is R
  VARIANT 148: note = Ancestral polymorphism is A, Derived polymorphism is T
  VARIANT 195: note = Ancestral polymorphism is P, Derived polymorphism is L
  VARIANT 198: note = Ancestral polymorphism is H, Derived polymorphism is Y
MSLVREICCRSCGARGEPAAAVNLDSMLVSCANYITGLATFGDHFSSEHKAKFLSAMAVVLSSGSGFCVSNLFPSMRFLDVATEMRRRLQVAHEQLDQVLDHIIEACEARQKVKNAEAAEDDDILSTMLRIKDEEEFDFPLNITHIKAVIIDLFIGGTETTSSVAEWVMSEFMRNPEAMAKPQAEVQRALDSKNPGDYESLMGCLSYTGMVIKETMRLHPSLPLLLPRLCSYSHVGGMIVK

SEQ ID NO: 20135 - protein, 86 aa, Zea mays
  VARIANT 18: note = Ancestral polymorphism is R, Derived polymorphism is H
  VARIANT 28: note = Ancestral polymorphism is K, Derived polymorphism is N
  VARIANT 37..86: note = Derived polymorphism lacks residues 37 to 86
  VARIANT 46: note = Ancestral polymorphism is L, Derived polymorphism is R
  VARIANT 50: note = Ancestral polymorphism is H, Derived polymorphism is R
  VARIANT 53: note = Ancestral polymorphism is E, Derived polymorphism is D
  VARIANT 56: note = Ancestral polymorphism is S, Derived polymorphism is P
  VARIANT 61: note = Ancestral polymorphism is P, Derived polymorphism is H
MSLALRSTYIVAYAACTRANLVAIVGQKVVKGRGCGSSSEGFPRGLVQWHIEEAFSVLRCPLLQVQWYGFKIWRFIEVCWLPEFWL

SEQ ID NO: 20136 - protein, 154 aa, Zea mays; identical to SEQ ID NO: 20133
  VARIANT 82: note = Ancestral polymorphism is V, Derived polymorphism is M

SEQ ID NO: 20137 - protein, 348 aa, Zea mays
  VARIANT 41: note = Ancestral polymorphism is T, Derived polymorphism is A
MSEVSVINQAEVEDAGAGQLDLPPGFRFHPTDEEIISHYLAHKALNHRFVSGVIGEVDLNKCEPWDLPGRAKMGEKEWYFFCHKDRKYPTGTRTNRATETGYWKATGKDKEIFRGRGVLVGMKKTLVFYRGRAPRGEKTGWVMHEFRLEGKLPERLPRSAKDEWAVCKVFNKELAARTEPIMAAAGAGELERVGSLGFLSELLDSAELPALIGADVDEVIDFNGPASTSGAPGTSHSHLPVKMEEHALLHMQYQPPPPPTSYYSSQYFSLPAMNSGDVLPPAIRRYCKAEQQVVSGQTAASEVSPSRETGLSADPNAEISSAVTPSSSHQFLPEFDDPVLNLADLWKY

SEQ ID NO: 20138 - protein, 281 aa, Zea mays
  VARIANT 35..281: note = Derived polymorphism lacks residues 35 to 281
  VARIANT 175: note = Ancestral polymorphism is R, Derived polymorphism is I
MAAAQVVAKGSVVSPCGNRAVPGLLGRRRDAVAAQMTPSAVRIGGSWRKNAFPGVRLALGTRRSRPASRSFSASPVQMNMNLAIGKSMRWWEKGLQPNMREIESAQDLVDSLTNAGERLVVVDFFSPGCGGCRALHPKICQFAERNPDVLFLQVNYEEHKSMCYSLRVHVLPFFRFYRGAQGRLCSFSCTNATIKKFKDALAKHKPDRCTFGPTRGLDESELLALAANKELQFTYTREPELTPMGDTPGEVIAPEPAKLPAATKPLVKLGSEERSLVSPGR

SEQ ID NO: 20139 - protein, 315 aa, Zea mays
  VARIANT 60: note = Ancestral polymorphism is P, Derived polymorphism is S
MEGSRNSPDRQSSGGSPEERGSGGSGGRGAGEPVRSRWTPKPEQILILESIFNSGMVNPPKDETVRIRKLLERFGAVGDANVFYWFQNRRSRSRRRQRQMQAAAAAAATAAAASSAANSSPGASATVGLPSGALQYPLVMSGSGTACQYEQQASSSSSSGSTGGSSLGLFALGAGVPSTGGGFFQESCGASSPLATGLMMGDVDRSGGSDDLFAISRQMGFAAASPVASASVAPPSTTAHHQQYYSCQSPTGTITVFINGVPMEVPSGPIDMRAIFGQDVLLVHSTGALLPVDDYGILTQSLQTGESYFLVARPT

SEQ ID NO: 20140 - protein, 194 aa, Zea mays
  VARIANT 37: note = Ancestral polymorphism is N, Derived polymorphism is K
MEEEVTGSGGGIGRKMAAGEVDLKEKSGTAWSHSYLNQKPWHPLSYPNQRRKWIAEQVHANHARRQEEVQREFAQEQEFFQQTALFSKKDKEKIMPQVVRTPGTGANVNRAHAQHGTRLVHCLCFDVLLMSQLMVVGVREAVAVGSAWECERRRASGTRGGGVADREVVVGANMDPMGWNDVTVAAGGEARLPY

SEQ ID NO: 20141 - protein, 462 aa, Zea mays
  VARIANT 415..462: note = Derived polymorphism lacks residues 415 to 462
  VARIANT 283: note = Ancestral polymorphism is L, Derived polymorphism is P
  VARIANT 201: note = Ancestral polymorphism is V, Derived polymorphism is G
  VARIANT 108: note = Ancestral polymorphism is G, Derived polymorphism is W
MAAAAACRSPLVWLFALVTALFFFSWYLLLDSAAGPAAARRPNQWLRLGGGGRRSGPGRKCDPAEALLRVFMYDLPPEFHFGLLDWKPPGFGGGVWPDIRDGVPDYPGGLNLQHSIEYWLTLDLLASEQGAPTPCAVARVRHAADADVVFVPFFASLSFNRHSRVVPPARDSEDRALQRRLLEFLAARPEWRRTGGRDHVVLAHHPNGMLDARYRFWPCVFVLCDFGRYPPSVANLDKDVIAPYRHLVANFANDTAGYDDRPTLLYFQGAIYRKDGGFIRQELYYLLKDEKDVHFSFGSVAGNGIEQATQGMRSSKFCLNIAGDTPSSNRLFDSIVSHCVPVTISDEIELPFEDVLDYSKFSVIVRGADAVKKGFLMNLIKGISREEWTRMWNRLKEVEKHFEYQYPSQTDDAVQMIWKAIARKVPSIRLKINRLQRFSLFETNRTDETLPPSSSWLQNQAP

SEQ ID NO: 20142 - protein, 181 aa, Zea mays
  VARIANT 51: note = Ancestral polymorphism is A, Derived polymorphism is T
MMPVEEVSGENPATAQLLGLSALFAQLAAYSRAVSSPQFFTAPNSPARSRAPNLPARPSAPAPPCAPPPLLPVASTGTPRAGARRRARAEKVVQPERHSTRLAQKASSNFVNMTDKAVQRKEIQNSLQPCSAAVKKEVQKMGLLNKTKAPISVAALRKLVRAAGLGCSAADAVGVVPPAMG

SEQ ID NO: 20143 - protein, 70 aa, Zea mays
  VARIANT 39: note = Ancestral polymorphism is A, Derived polymorphism is T
  VARIANT 14: note = Ancestral polymorphism is P, Derived polymorphism is S
  VARIANT 5: note = Ancestral polymorphism is G, Derived polymorphism is S
  VARIANT 1: note = Ancestral polymorphism is M, Derived polymorphism is I
MRIAGGALCHDRAPGPNLISPAAGWDWRADFVDSLVRTARRSICLLLIIVVFRGGFAFCTNQIWTTTTAT

SEQ ID NO: 20144 - protein, 206 aa, Zea mays
  VARIANT 77: note = Ancestral polymorphism is C, Derived polymorphism is Y
MDAVSSAGVAPQSAFLSHSSFADAAIARALHSSLSDHAPEPPATAAAAAMLMHGAVAGTDCPPAAAPSPSQSSSARCRVGPAAGRAGKRRRPRPSKRAPTTYISADAATFRAMVQRVTGADEDDLQPQQQDRDSLGLLLPHLGVEQFLQAAGPASPVAAAAAAPYATASPAAAAYQHQQPLFPTLDSWNVMYGKKDEVVSVLTAGQ

SEQ ID NO: 20145 - protein, 1045 aa, Zea mays
  VARIANT 825..1045: note = Derived polymorphism lacks residues 825 to 1045
MRLILLWLSIWAVCSAASAGAGSDMEALLEFSRGIRQDPSRRQAIPWNPTSALDSDDCPVDWHGVQCIGGQILSIAFDGIGLVGNASLSVLARMPVLRNLSLSDNKLEGFLPGELGSMASLQLLDLSNNRFSGSIPSELTKLAGLGYLNLSSNGFRGALPLGFRNLRKLKYLDLHDNGFTGKLDDVFAQLQSPVHVDLSCNQFSGSLASISDNSSVVSTLQYLNVSHNVLSGTLFDSVPMPLFDSLEIFDASFNMLSGNIPQFNFVISLKVLRLQNNNFSGSIPEAFFRETSMVLTELDLSCNQLTGPIRRVTSTNLKYLNLSHNNLQGTLPITFGSCSVVDLSGNMLYGNLSVARTWGNYLQMVDLSSNRLTGSWPNETTQFLRLTSLRISNNLLSGELPIVLGTYPELIFIDLSINQLHGPLPGNLFTAVKLTFLNLSGNSFTGTLPLRNSDTKNSTSIDLSILPVQTSNLSYVDLSSNFLHGSLPMGIGDLSALTLLNLRQNNFTGEIPRTITKLKNLLYIDLSSNNFNGSIPDGLPDDLVEFNVSYNYLSGSVPSNLLKFPDSSFHPGNELLVLPRSESLNGSDKSDEARHGLKRGILYALIICVVVFVTGIIALLLVHWKISSWKSREKGTGQGKHVGQVQSAQRSAEISTTEMHDVALESSPSAEYGAVSLPGKERRHEAQDAPIDAAYFNEPAGSSSARKDSTKSSMPSLSSSPPDARSQHHHSILRVHSPDKLVGDLHLFDNSVVFTAEELSCAPAEIIGRSCHGTSYKATLDNGYMLTVKWLKEGFAKSKKEFSREIKKLGSVRHPNLVPLRGYYWGPKEHERIMISDYADATSLSTYLSEFDERNLPPLSAGQRLNIAIDIARCLDYLHNERVIPHGNIKSSNVLIQNSTPSALVTDYSLHRLMTPIGMAEQVLNAGALGYSPPEFSSTSKPCPSLKSDVYAFGVILLELLTGKIAGEIICMNDGVVDLTDWVRMLDLEERVSECYDRHITGVESSEGAPQALDGMLRIALRCIRSASERPEVRTVFEDLLSLSS

SEQ ID NO: 20146 - protein, 117 aa, Zea mays
  VARIANT 20: note = Ancestral polymorphism is S, Derived polymorphism is F
MANVNPMVVPMLLLMARFTSTTTLLPHLLSARVRHGRARRHLHSPDIRPCGSTLQHLRRDVSGDVCREAELTTTRRYDDEVELLAGDIVQQRVSDNPRVVARRHQQVYGHEHRPPSS

SEQ ID NO: 20147 - protein, 435 aa, Zea mays
  VARIANT 305: note = Ancestral polymorphism is R, Derived polymorphism is S
  VARIANT 360: note = Ancestral polymorphism is M, Derived polymorphism is K
  VARIANT 371: note = Ancestral polymorphism is S, Derived polymorphism is L
  VARIANT 373: note = Ancestral polymorphism is G, Derived polymorphism is D
MDFNKRSVSVSSVVAFISASATPSLATTILFLPQLLPSLPHLRAVSCGKDPSHRQDRMQSKHRVFAEDLLLAAEGEDHFDRVPDSLVLLIFNKVADARSLGRCSAVSRRFNALVPLVDDACLRIDRVIPAGDGDGDALLGLAGAPRPRAVLSHLLKAVLLAVLKPFAHCDAKSAAAAHKHAQAQAQQQHHSPAQVLKNFSSIRNLRMELPVSDVGTDDGVVLRWKAVFGSTLQSCVILGGTKVDRAAAGPRAPTGADADAEDAGDGGGGGGSIPESFYTNGGLKLRVVWTISSLIAAATRHYLLREIVKEHPTLEQVALTDANGQGTLSMGREQLKEFRDKPLAAAAAAANRTQVPACNMKLRYAPLLELSDGTRIHGATLVVIRPVGEATAGTGGGGGRKGLDEFAANAFDGPLREAVAALSKRRTYLLEMNGF

SEQ ID NO: 20148 - protein, 322 aa, Zea mays
  VARIANT 10: note = Ancestral polymorphism is C, Derived polymorphism is Y
MAMGLPGLRCHRLLARGSLPPLGPALYRRPLERTSALRYSSLQAQAGDSIGEEALRMFLEDRQLHGDFVTKVSDMVWRRNGANVGAAEATTGQGSAIDVAQPEDVREDAVDEGMLRLAAITSDWVSGDSSPPLSKRLSAEERQNESNKRKELNLLKYEALKDELLLLTAGTGAACSLYCLLVFSLETAVSYALGVGFSSCLYLQLLYQHADNLSKEDIPEVFLKKKVKKIGITSEDLKNTIEKTLGGAGLALSSPRLIIPAVIYGLSALSHHFQNSFFSFEVLPGMMGFLAYKAAALVQVYRDNEDLRLILPDEEAADSDST

SEQ ID NO: 20149 - protein, 138 aa, Zea mays
  VARIANT 69: note = Ancestral polymorphism is R, Derived polymorphism is W
  VARIANT 54: note = Ancestral polymorphism is R, Derived polymorphism is W
  VARIANT 32: note = Ancestral polymorphism is S, Derived polymorphism is F
  VARIANT 28: note = Ancestral polymorphism is C, Derived polymorphism is Y
  VARIANT 26: note = Ancestral polymorphism is P, Derived polymorphism is S
  VARIANT 12: note = Ancestral polymorphism is R, Derived polymorphism is S
  VARIANT 9: note = Ancestral polymorphism is A, Derived polymorphism is V
MTDDKETAASTRLSLRLGHVGVMQSSSYSSSSGAAVHPRHIMLTEAEKEAKRLRRVLANWESARQTILRRQAITSFPSNSSRLLSVHAAVSLFSAATGAPLASVDGSALTLLRTAAVSALAAPSVLVLEIWRFCFHVP

SEQ ID NO: 20150 - protein, 419 aa, Zea mays
  VARIANT 103..419: note = Derived polymorphism lacks residues 103 to 419
  VARIANT 102..419: note = Derived polymorphism lacks residues 102 to 419
MASLAQHVAGLPCPPLSGASRRRPAAQRRPPSALVCGTYALTKDERERERMRQVFDDASERCRTAPMEGVAFSPDDLDTAVESTDIDTEIGSLFMVSQNVKWYIMQGMCSKIKGTVFMTTSNGAYIDIQSKSTAFLPLDEACLLDIDNVEEAGIRPGLVEEFMIIDENPGDETLILSLQAIQQELAWERCRQLQAEDVVVTGKVIGGNKGGVVALVDGLKGFVPFSQVSSKTTAEELLEKELPLKFVEVDEEQGRLVLSNRKAMADSQAQLGIGSVVLGTVESLKPYGAFIDIGGINGLLHVSQISHDRVADISTVLQPGDTLKVMILSHDRERGRVSLSTKKLEPTPGDMIRNPKLVFEKADEMAQIFRQRIAQAEAMARADMLRFQPESGLTLSSEGILGPLSSDAPSEDSEEPTDE

SEQ ID NO: 20151 - protein, 345 aa, Zea mays
  VARIANT 29: note = Ancestral polymorphism is V, Derived polymorphism is E
  VARIANT 75: note = Ancestral polymorphism is V, Derived polymorphism is A
  VARIANT 208: note = Ancestral polymorphism is L, Derived polymorphism is H
MAPELMTAKMTAKAAAAAAAVKPATRAYVTFLAGDGDYWKGVVGLAKGLRKVRSAYPLVVAVLPDVPESHRRILVSQGCVVREIEPVYPPENQTQFAMAYYVINYSKLRIWEFVEYERMVYLDADIQVFENIDGLFELEKGYFYAVMDCFCEKTWSHTPQYRIGYCQQCPDKVAWPAATAELGPPPSLYFNAGMFVHEPSVATAKALLDTLRVTPPTPFAEQDFLNMFFRDQYRPIPNVYNLVLAMLWRHPENVQLEKVKVVHYCAAGSKPWRFTGKEANMDREDINALVNKWWDIYNDETLDLKGLPSLSPDDDDEVEAVAKKPLRAALAEAGTVKYVTAPSAA

SEQ ID NO: 20152 - protein, 351 aa, Zea mays
  VARIANT 171: note = Ancestral polymorphism is W, Derived polymorphism is G
MAPTVEISHLTFTYPGIDGRPPPGAPPLIEDVCFSLDAGQRCLLLGSNGAGKTTILKILGGKHMVDPSMVRVLGRSAFHDTALTSSGDLSYLGGEWRRDVAFAGYQVNIQMDISAEKMIFGIAGVDPKRRDELIKAGRASPLHGSTGVRGSEFAGEEPPCDAQILDIDLTWRMHKASDGQRRRVQICMGLLKSFKVLLLDEITVDLDVLARSNLLSYLKKECEERGATIIYATHIFDGLDDWPTHIVYIAHGKLQLAVPLEKVKEMSQLSLMRTVESWLRKERNEDRRRRKERKEKGLPEFDKVVEGSRVIGDPAKNADRVINNGWAAGRLTSTIAGEENFVFSSNSVLRQ

SEQ ID NO: 20153 - protein, 448 aa, Zea mays
  VARIANT 292: note = Ancestral polymorphism is S, Derived polymorphism is T
MALLQLLLENIVLLLLPLLALTFSCCDAATLKLHAHHADGGLSLSRRELLHRMAARSKARAARLLSASGSARVDPGPYANGVPDTEYLVHLAIGTPPQPAQLILDTGSDLVWTQCRPCPATTCFSQALPYLDLSNSSTFGVLPCNQPMCDNLAWSSCGKHSWGNQTCVYVYSYGDSSITTGHLNADTFTFAAADGSGGQVSVPDLAFGCGLFNNGIFESNETGIAGFGRGALSLPSQLKVDNFSYCFTDITRPEPSSILLGLPANLYGDAGGVVQSTPLVQNFSSLELYYLSLKGITVGSTRLPIPESTFALKQDGTGGTIIDSGTGMTMLPQDVYKLVHDAFTAQVRLPVDNATSSSLSQLCFSVPRRAKPDVPQLVLHFEGATLALPRENYMFEFEDAGGSFTCLAINAGDGLTTIIGNYQQQNLHVLYDLVGNMLSFVPARCNRL

SEQ ID NO: 20154 - protein, 914 aa, Zea mays
  VARIANT 605..914: note = Derived polymorphism lacks residues 605 to 914
MPWEQPRPGCKGTDVAAHQSYGLSYREFQTSSGDSHPNRRILAVHMAMDQDENGQSGAMVPASNSSDRSDRSDKPMDQKVLRRLAQNREAARKSRLRKKAYVQQLESSKLKLASLEQELQKARQQGIFISSSGDQTHTMSGNGAMTFDLEYSRWQEEQNKQINELRTAVNAHASDSDLRLIVDGIMAHYDEIFRLKGIAAKADVFHILSGMWKTSAERCFLWLGGFRSSELLKLLVNQLEPLTEQQLMGLSNLQQSSQQAEDALSQGMEALQQSLAETLAGSLGPSGSSGNVANYMGQMAMAMGKLGTLENFLRQVARPAPSFRTQACGLRCWIAAKLKLRKALKRHHGWQLQRNLDARGNDNVPDCLEAASLTEKRSHWNMHLAYDSGGEMANTSSDTLDSSTVQEKPVVPGHIISEISSHVQKEESAVSKRRSNNEPSLCIAVIGATGELARTKVFPALFALYYSGFLPRNVGIFGYSRKKLTDEGLRSIIEANLTCRVDHHENCDDKLIEFLKKTYYVDAGHDNQEGMVRLNSRMSQIEGIGAANRIFYLAVPQEALLDVALPLADGAQTKQGWNRIIIEKPFGFTGLSSLRVTQSMLSRFEEKQIYRIDHLLGKDLIENLTVLRFSNLVFEPLWSRTYIRNVQVIFSEETSNEIQGRYFGNYGIIRDIVHSHILQTIALFAMEPPVSLDGEDIRDEKVKVLRSIRKVNLDDVVLGQLKDMSGKVDRYTKSMIPTYFAAAMYIDNARWDGVPFFIRTGMGLMTNRAEIRIQFRHVPGNIYRERFGHDIDLDTNELVLRDQPEEAILLKVNNKVPGLGLQLDASELNLLYRDRYNTEVPDSYEHLLLDVLDGDSHLFMRSDELAAAWNVLTPIIHEIDQNRVVPELYEAGDRGPINAYHLAAKHGVRWDDDW

SEQ ID NO: 20155 - protein, 444 aa, Zea mays
  VARIANT 30..444: note = Derived polymorphism lacks residues 30 to 444
  VARIANT 112..444: note = Derived polymorphism lacks residues 112 to 444
  VARIANT 163: note = Ancestral polymorphism is E, Derived polymorphism is K
  VARIANT 165: note = Ancestral polymorphism is L, Derived polymorphism is F
  VARIANT 168: note = Ancestral polymorphism is M, Derived polymorphism is V
MKMMDRLTDLGPKIIMGKDSGLHTSRHAYREELVIKNGEMLGVSHLRNRRVLSNGFVSLGKEDLQLMYSDGDKAFGTSTDLCIDERLRIASDGIIFVGMEIFRPQKEHGLTQTGLKGKFKITTRCLWLDNGRLLDALYKAAHAALSSCPVNYPLSHMERMVAEILRKMVRKYSEKRPDVIAVAMENTTTSFSKHLDAKSSRNFEPSSATSHLSRSPAMSLEGSYKTHPDNPEVDAEETLPEATRTTPDDATTSSNGEAFFSSDLHQPKTLEHLWESFKSPIAVKIARIVNGGKKQNLGKIGIMGKDSSIQSTPAPAKSSKKNKWKPEEIKSLIQMHGEMNERFQSVKGRMVLWEEISDNMLKQGISRTPAQCKSLWTSLVQKYEWKFAHVTFSKPEYLQDSDIVMNRFHKQRPVYGGWEQHLGLEHTTTTPKRSYLGNNQMNRI

SEQ ID NO: 20156 - protein, 181 aa, Zea mays
  VARIANT 39: note = Ancestral polymorphism is G, Derived polymorphism is A
MDSNKRLGLGVQHGHHSHNGTIAKPPPAHHHHHARRKQGRQNGGGGGKGIKVVYISSPMKLTASAEEFRAVVQELTGRDSNVADHDLDLDDGACYSYSSFQRVVSPTATPTETAAAAAAAAAGPRALSPTTTTNAGPVRRRTPEYDGAAVAEPPPPPFQGVFEYDDDHQTAESLLYGQDYW

SEQ ID NO: 20157 - protein, 179 aa, Zea mays
  VARIANT 121: note = Ancestral polymorphism is G, Derived polymorphism is R
  VARIANT 58..179: note = Derived polymorphism lacks residues 58 to 179
  VARIANT 39..179: note = Derived polymorphism lacks residues 39 to 179
  VARIANT 31..179: note = Derived polymorphism lacks residues 31 to 179
  VARIANT 15..179: note = Derived polymorphism lacks residues 15 to 179
MYQVIKNHPSSLKLYEQKLLGTSEVMKEDVQRIHDKVNRILNEEFAKSKDYVPNKRDWLSAYWTGFKSPEQISRVRNTGVKPKILKRVGQAITTLPENFKPHRAVKKIFELRAAMIESAQGIDWAVAEALAFATLIVEGNHVRLSGQDVERGTFSHQHAVLHDQETGAKYCPLDHVAMN

SEQ ID NO: 20158 - protein, 1609 aa, Zea mays
  VARIANT 984..1609: note = Derived polymorphism lacks residues 984 to 1609
  VARIANT 915..1609: note = Derived polymorphism lacks residues 915 to 1609
  VARIANT 722..1609: note = Derived polymorphism lacks residues 722 to 1609
  VARIANT 623..1609: note = Derived polymorphism lacks residues 623 to 1609
  VARIANT 577..1609: note = Derived polymorphism lacks residues 577 to 1609
  VARIANT 520..1609: note = Derived polymorphism lacks residues 520 to 1609
  VARIANT 461..1609: note = Derived polymorphism lacks residues 461 to 1609
MKEIGLKVDKLIFLKMEQALTWKQESKKQKSSCEGKAWPRETAPSAANNDGSAAAKSSTDALAGLSTCPPRLNAPTSRRPPPPRPAKPNPRSFPPRPRLRQLTLALLHSLTPDYDDEDLAPYDVKIFSLRLFRDKCYIEIFPVVEKSIIVRSDDEERKRDERNRKQREYYARRKVDETTEERDARNKMMRDYRARKKAETGPSDEHERHREERNRKQREYRARRKAEETNEEREARNKRMCDYRAMKKADTVLYSPRQTQAYATGSSIVIQTNTQMAEPVTPVVARGSLHQLPTSVEPFSTNSQVTEPVTPVVARGSLHQLPISVEPFSTISQPSTYNQSAITASTMGNLIMNRARYINMDDADREILLHKRREYKRLRQCVQDDTITEHPITPHDFNIAQHNEYTRSREFHGEDDAFESYRLLGYSSHTEDPYDYVYHKLPDRHHVLRKIPDCCYCGAMKFEFEPHGMCCRKGKIKVHIPDVPTELKRLFTSQGDDDAKYFRKNIRTRRSPDLDINIIKNILTILEGNPYVQTFNRLGSIPNLDDYVIELNTNVTPDQRRYNAPTASQVAAIWFEGNDPQRSFDRSVIIYATGDRPTCIKAYHGCYDPLAYPLFFPRGQTGWNRFMPYNETPTVNATFNAPDHNDTRSVNNEHTTHYYLDEDNQQDDYDISNGGVIQSARFVTAREYYCFLIQAREGIESMRLDWYSNPVNQEIIRAELYQGLVDVISAGENRASEVGKRIVLPRTFQGGDRDMQQRFLNAMAIVQRLGKPDYFITMTCNPYWEEITNNLLPGQTPQDRPELVTMVYRAKLRDMKDLLIKKAYFGQVAGYVHVTEFQKRGLPHEHILLIMNLHNKLTSPDAYDKVICAEIPEKDKYHVLHNLVIKHMLHGPCGVLNKKCPCMVNEECRFRYPRQFCAATQQGKDSYPLYRRRDDGRRVKVRGSCSSIKAIKYMCKYVYKGHDRASFSVDPAHKEDGVINEIRQYRDARYISPPEVVHRILGFPLFGVNPSVLQLQCHLPGMQSVIIDETTKLQDIVNEPTSSMTTLTEYFTKNRADSFARTLLYKDFPEYYREACEKRGLIEADMSLDDCLSEAATFQMPPALRRLFATILVFCEATNVRGLWDKHNDSMSEDYNRDNPKLTCVQQMVLKDIRELVRSMGKDIKSYDLPEINDTGGTGKTFLYKALLARVRSEGLIAIATATSGIAASILPGGRTAHSRFKIPIKLADNSTCNFTKQSGTAELLRTASLIIWDEVAMTKRQAVECLDRSLQDIMTCSLPFGGKVIVFGGDFHQVLPVVTRGTRAQTTDATLQRSYLWDSIRKIRLTMNMRAQSDKWFSEYLLRIGNGTEETIGSDYVRLPEEIVIGYTDTEDSINKLIVDVFPSLEENARSIAYMSTRAILSTKNQHVDQLNAKMIDKFLGNGKVYHSFDCVDDDSRNNYPIEFLNSMTPNGLPPHVLKVKINSPVILLRNLDTNNGLCNGTRLMVRALQDNAIDAEIVGGHNAGTRVFIPRIPMCPSDDISLPFKLKRKQFPIRLSFAMTINKAQGQTIPNVGIYLPEPVFSHGQLYVALLRGVSRQTTRILARPKKELDPTGKSTKNIVYKDVLNC

SEQ ID NO: 20159 - protein, 151 aa, Zea mays
  VARIANT 114: note = Ancestral polymorphism is T, Derived polymorphism is I
  VARIANT 46..151: note = Derived polymorphism lacks residues 46 to 151
  VARIANT 45: note = Ancestral polymorphism is L, Derived polymorphism is R
  VARIANT 37: note = Ancestral polymorphism is K, Derived polymorphism is R
MASSAGDALSSLGKNESYLCANKSAGGGMATRAELPKEHPRRELLQEKGTGRGHRVHSSDHVREGQHGRAPYLKMVDIKMYSSYEDLSMALEKMFSCFITDYMPLQPLEDENDTVISFLYPLEPPVKQGRTRRGRFQSQSGQLFAVALFDS

SEQ ID NO: 20160 - protein, 157 aa, Zea mays
  VARIANT 121: note = Ancestral polymorphism is R, Derived polymorphism is I
  VARIANT 120: note = Ancestral polymorphism is R, Derived polymorphism is C
  VARIANT 118: note = Ancestral polymorphism is R, Derived polymorphism is C
  VARIANT 42: note = Ancestral polymorphism is E, Derived polymorphism is D
  VARIANT 41: note = Ancestral polymorphism is S, Derived polymorphism is L
  VARIANT 38: note = Ancestral polymorphism is L, Derived polymorphism is H
  VARIANT 35: note = Ancestral polymorphism is S, Derived polymorphism is F
  VARIANT 24: note = Ancestral polymorphism is S, Derived polymorphism is Y
  VARIANT 10: note = Ancestral polymorphism is P, Derived polymorphism is S
  VARIANT 8: note = Ancestral polymorphism is R, Derived polymorphism is H
MEEQFILRVPPSAAERIERLMNESAASSSNPDEASLDLSFSEDGTNGTFMIGNESFPASLLDLPAVVESYKTYDDSVLIKTADVGQMIMVREENDPAPEGVEYKHGLTPLMRDARRRRFRREPDLNAELVNQVEKHLISIMHGVSISILLFSSLATC

SEQ ID NO: 20161 - protein, 147 aa, Zea mays
  VARIANT 36: note = Ancestral polymorphism is R, Derived polymorphism is S
  VARIANT 47: note = Ancestral polymorphism is L, Derived polymorphism is F
MCYCIYELENFYRPESTVEDFSSGCITTKELGTVMRSLGQNPTEAELQDMINEVDADGNGTIDFPEFLNLMARKMKDTDSEEELKEAFRVFDKDQNGFISAAELRHVMTNLGEKLTDEEVDEMIREADVDGDGQINYEEFVKVMMAK

SEQ ID NO: 20162 - protein, 651 aa, Zea mays
  VARIANT 40: note = Ancestral polymorphism is S, Derived polymorphism is N
MLTVSILDAQLSRCCSARHLLQIHAQFLASGLLADAYAASRLLLFTTSATAARLLPHPLHHSLQLFGLVRSPNAFTCNTLLKAALRQGFPHLCFPLYASMPAAPDTYTHPLLAAACAARGDVREGLQVHSHSVKHGFSDNLYLRNALMHMYSACGCVASARRVFDAGPVWDAVSWNTILATYVRDGDVEQAVKVFTRMPERSAAAVSAMVALFARRGMVEEARGVFDGAEHRDAFTWTAMVSCFERNDLFMEALAVFSDMREEGWPVDEAVMVSVVAACAKSGVIQNGEVCHGLVVRAGLGSRVNVQNVLIHMYSSCQDVVAARRLFDNGESLDHFSWNSMISGYLKNGRVEDAKALFDVMPDKDNVSWSAMIAGCVHNNQSSEALNVFDSMRAHEIKPDDVTLVSVISACSNLSALEQGKLVHEYIRKYQYNITIVLGTSLIDMYMKCGCMEAALEVFDMLEEKGTPCWNAVIVGLAMNGLVTRSLDMFSEMEATGTAVPNEITFTGVLSACRHGGLVEEGRQFFKLMQNKYQIVPNIRHYGCMVDLLGRAGYVREAEDMIQSMPMSPDVPAWGALLGACWKHGDSEVGERVGKKLVKLDPDHDGFQTMLSNIYASEGMWQCVKDLRGSMKQQHVAKVAGCSMVEPSHSS

SEQ ID NO: 20163 - protein, 360 aa, Zea mays
  VARIANT 7: note = Ancestral polymorphism is R, Derived polymorphism is C
  VARIANT 24: note = Ancestral polymorphism is L, Derived polymorphism is F
MAAPCGRGGGTLTLVLVALSAAFLTYNVLISFHSSLQPLPSSFPTASRRFGAAGSARRRAFHTAVTASGSAYNTWQCRVMYHWFKEARRAPGGDEMGGFTRILHSGKPDEFVDEIPTFVADPLPDGDQGYIVLNRPWAFVQWLQKADIKEDYILMAEPDHIIVKPIPNLSRDGQAAAFPFFYIEPKKYENVLRKFFPEDKGPITKIDPIGNSPVIIEKESLGRIAPTWMNVSLAMKKDPDADKSFGWVLEMYAYAVASALHGVGNILRKDFMIQPPWDLEVGDSFIIHYTYGCDYDMTGKLTYGKIGEWRFDKRSYTDKPPPRNLPLPPHGVAQSVVTLVKMVNEATANIPNWDSYAAAF

SEQ ID NO: 20164 - protein, 558 aa, Zea mays
  VARIANT 212..558: note = Derived polymorphism lacks residues 212 to 558
MSAPPSLKTPATAVAVSRRSVATPRATGLRGACAPPTRRLRCSASAAVAGASTEMADAPLDWAERSLEELHSLPDHDTFCLMALSPLDGRYDRFVKELMPFFSEFGLIRYRVLIEIKWLLKLSQIPEITEVPQFSKEAQSLLNAIIENFCIDDAKEVKKIEKVTNHDVKAVEYFLKQRCSSNPEIAKVSEFFHFGCTSEDINNLSHALALKEGVNKVMFPAMIDLCRAMCSLATQNSGYPMLARTHGQPASPTTVGKEMANFAARLSDIGKSFSEVKILGKFAGAVGNYNADVVAYPEVDWPKVAEEFVRSLGLQFNPYVTQIEPHDYISKLFNLFTQFNNVLTDFDRDMWSYISLGYFKQIPKAGEVGSSTMPHKINPIDFENSDGNLCQANSILSGISMKLPISRLQRDLTDSTVLRNLGMGLGHSLLAYKATMRGISKVQVGDPELVLCLVTDDILNESRLAEDLEQTWEVLAEPIQTVMRRYGIPEPYEKLKELTRGQAVTKDSMQQFINGLDIPEEVRSKLSKLTPHSYTGLAEDLARDIEKWVDLESGFQIK

SEQ ID NO: 20165 - protein, 122 aa, Zea mays
  VARIANT 87: note = Ancestral polymorphism is A, Derived polymorphism is V
  VARIANT 66: note = Ancestral polymorphism is R, Derived polymorphism is C
  VARIANT 30: note = Ancestral polymorphism is S, Derived polymorphism is L
  VARIANT 9: note = Ancestral polymorphism is R, Derived polymorphism is C
  VARIANT 3: note = Ancestral polymorphism is S, Derived polymorphism is N
MHNSCPLPRWDPLLAICMLDTAPYTRAYYSQQAICMLPSRCWATPTAMGASSFSTIGRIHHINVVRLVGFCAEKMRRALVCEYIFSAERSFSWDMLNEIALGIARGINYIPASRVRHADPSL

SEQ ID NO: 20166 - protein, 508 aa, Zea mays
  VARIANT 18..508: note = Derived polymorphism lacks residues 18 to 508
  VARIANT 40: note = Ancestral polymorphism is M, Derived polymorphism is L
  VARIANT 166: note = Ancestral polymorphism is R, Derived polymorphism is Q
  VARIANT 195: note = Ancestral polymorphism is G, Derived polymorphism is R
  VARIANT 278: note = Ancestral polymorphism is G, Derived polymorphism is R
  VARIANT 285: note = Ancestral polymorphism is A, Derived polymorphism is D
  VARIANT 311..508: note = Derived polymorphism lacks residues 311 to 508
  VARIANT 316: note = Ancestral polymorphism is P, Derived polymorphism is L
  VARIANT 345..508: note = Derived polymorphism lacks residues 345 to 508
MALDLAIGGSAARRAETQTLAPVLLMGPPPPPPIPPMTGMYFVGPPTTGALLPLPIPVALPHEVIMYMDECRSRSLLKFISNAGIEPSLEDERRRERVVRELGKIVMDWARRVAYEQGKQHWITSATVLTFGSYALGAYGPESDIDVLCIGPYIASLQHHFFVVLRQMLEGRPEVSELHSIEGAKVPLMRFKFNGILVDFPYVQLPVINAAEAMHAFDPHVLENVDGPSWRCLSGVRANRQIIQLVPNMKKFQYLLRCLKLWARKRGLDCHLLGFFAGIHLAILAAYVCRRHPNASINTLLSLFFDIFVHWPWPLPVSLLDPPVLCGGPDGCSLMPIMLPCIPPEFCSSSTTESTFSKIKEELRRGYALSKDTRSTDSDWSWLFAPFPYGARYKCFLRIVLSAPMEDELRDWVGWVKSRFRNLLLKLESLGVYCDPDPSKQVDHTITDPNVVFFWGLIYRRSIQICTNSLKEDFMKSVCNNIYGKEKCAHSDITMAVVGPPQLPKKCL

SEQ ID NO: 20167 - protein, 329 aa, Zea mays
  VARIANT 254: note = Ancestral polymorphism is R, Derived polymorphism is W
  VARIANT 154..329: note = Derived polymorphism lacks residues 154 to 329
MATWKVAPALAAGCTAVLKPSELASVTCLELADICKEVGLPSGVLNIVTGLGPDAGAPLSAHPDVDKVTFTGSFETGKKIMASTAPMVKPVTLELGGKSPIVVFDDVDIDKAGSCGVRLLGRVLQRRPARRSQPRAVQGRRRLRRLLPGAVQGQRAVHVTDQARTSNRTTLVLSAAAYAAMASAGKAARLRDRRVVDVEYKRVPCGYMKDRNLSIRVEEKSRPPSNLSIRFLYQGGQTDTVAVDIATVGSSNWRFMARDHGPAWSTTQAPPGPLQFRLVVTGCYDGKWVWAELEVLPRRWEAGRVYDAGVQVSDVSREGCYLCDTHKWQ

SEQ ID NO: 20168 - protein, 401 aa, Zea mays
  VARIANT 265: note = Ancestral polymorphism is T, Derived polymorphism is A
  VARIANT 178: note = Ancestral polymorphism is A, Derived polymorphism is T
MDVDSDPAASSKPTQMDLEDQTDTKGKGKAEEGNGKGEELADSIGSLSIGPGRTNFKKKPVIIIVIGMAGTGKTTLMHRLVCDTQASNKRGYVVNLDPAVMTLPFGANIDIRDTVRYKDVMKEYSLGPNGGILTSLNLFATKFDEVVSVIERRAEQLDYVLVDTPGQIEIFTWSASGAIITEAFASTFPTVVAYVVDTPRSTNPVTFMSNMLYACSILYKTRLPLVLTFNKVDVAKHEFAIEWMQDFEAFQTAVESDKSYSATYTRSLSLVLDEFYNNLRSVGVSAISGSGVNTFFEAIEASAKEYMETYRADLDKRIAEKERLEEERRKENMEKLQKDMMKSKGQTVVLTTGLKEKNSVSDMMDGADEEEEEEALEDFGFSEDDEDEDEGEDEEVAHFGF

SEQ ID NO: 20169 - protein, 434 aa, Zea mays
  VARIANT 260..434: note = Derived polymorphism lacks residues 260 to 434
  VARIANT 252..434: note = Derived polymorphism lacks residues 252 to 434
MDKFIKRDMGIRETQINWQYWNELRDRLRKQETIDKDLQQQITKEKERMRQVLFRIVAIVKFLEFDLVMQDHLRRIERKDIHYHYLSNKIQNELISLLASDINNTAIKIIKEVKYFSIILDCTPDVSHEEQMSLVVRCVNISSNKIEVEEYFLGFLKVDDTSGLDFFNVLIDSLESFGLDIDDIRGQGYDNGSNMKGKHQGVQKQLLDKNPKAFYMPCACHGSTKRWKILLDHVPRLTVKSLCNTRWESHIKSVAAIRYQAPHIRATLFELHHASDTDPMAKSDAKSLYDLIGTFEFILGMVIWHDILYVVNVVSKKLQSSSMCLHSTLEQIDGIMSYFDKYRNEGFASSMVVAKDIASVMGVEASFPVKRCALRKKHYDENDCSNEANLQGEKDFEVNYFLVMLDMASRSLKIDLKTSKYSMVYLGLFLTQHH

SEQ ID NO: 20170 - protein, 202 aa, Zea mays
  VARIANT 39: note = Ancestral polymorphism is E, Derived polymorphism is D
  VARIANT 18: note = Ancestral polymorphism is R, Derived polymorphism is P
MASTSSSTPAAEVEERGRKRKRAAGAAPTQPSEWRTRREHEIYSSRLLEAIRLVRAGPSSAAAAKAAPTRSRAVREAADRALAVAARGRTHWSRAILASHRRRLQAAHRARLRAPASPPPRHGASAAKGTAALPPVARKAMVLGRLVPGCRKLSFPTLLAETTDYIAALQMQVRAMTALAEALSAVSSSSSGAGSSPSSSPA

SEQ ID NO: 20171 - protein, 340 aa, Zea mays
  VARIANT 307..340: note = Derived polymorphism lacks residues 307 to 340
  VARIANT 291..340: note = Derived polymorphism lacks residues 291 to 340
  VARIANT 284: note = Ancestral polymorphism is G, Derived polymorphism is D
  VARIANT 244: note = Ancestral polymorphism is P, Derived polymorphism is H
  VARIANT 232: note = Ancestral polymorphism is K, Derived polymorphism is N
  VARIANT 211: note = Ancestral polymorphism is L, Derived polymorphism is H
  VARIANT 134: note = Ancestral polymorphism is T, Derived polymorphism is M
  VARIANT 93: note = Ancestral polymorphism is P, Derived polymorphism is L
  VARIANT 48..340: note = Derived polymorphism lacks residues 48 to 340
  VARIANT 34..340: note = Derived polymorphism lacks residues 34 to 340
  VARIANT 22: note = Ancestral polymorphism is R, Derived polymorphism is C
  VARIANT 18..340: note = Derived polymorphism lacks residues 18 to 340
MAALISALLFAALLVAAQYMLRLLHSFLWVPLRLERRFRRQGIRWPPRSLVSGNVADYRDLLAAARSPPLSSFRHDGVVARATPQYALVISDPELVKAVMTDSTGAFDKAASGGNNPLARQLIGEGLVGLSGETRARHRRVISPTFNMERVKAWIPGIAAVTSSVLDKWEAEEWQVKARDEVLKVCGKHEHPNAENLSDLKIVTMVLKETLRLYPPTTFINRTATRNIKLGKLDIPTGTRLDFPIIHIHRDHEVWGMDAEEFNPSRFADGSSYHLGAYFPFRIGPTICVGQNLAMVEAKVALAMTLQRFAFTVSASYAHAPMLVFTLQPQFGAQVLVQKI

SEQ ID NO: 20172 - protein, 221 aa, Zea mays
  VARIANT 105: note = Ancestral polymorphism is A, Derived polymorphism is V
MEEDRVRTQASTAAAAARVERPVKLLLLLAPSHPTCTTPARRNLSKAAHLPAPGRGEAKVFMPNQAGAEAAGCVKRLIGTNPPVDDESGSDRSSPHELVPGSCAAIPHYLGATASLHHRAFSPAKCYGWQHPLGSGGLPAYVPATSPQGLALSRLREATPVRSDATLSHVDGQQHAWGHDASSAGGSVISQCPGAVPGVTQTQCKTAGTIEGGPVEMRGKE

SEQ ID NO: 20173 - protein, 173 aa, Zea mays
  VARIANT 117: note = Ancestral polymorphism is M, Derived polymorphism is L
  VARIANT 49: note = Ancestral polymorphism is A, Derived polymorphism is T
MCPTGRYLGLDLSGAGGDLRPAFDVLDADRDGRISRDDLKSFYAAAGPAAGDRFDDDDLAAMIAAADADRDGFVQYDEFERLLAGRAAAAAAAAGGAGRRSAMEGAFRLMDRDGDGMVGFEDLKAYLDWAGMPAADEEVRAMIRVAGGGDGGEGVGLEALAGVLAVDLEGIAF

SEQ ID NO: 20174 - protein, 120 aa, Zea mays
  VARIANT 50: note = Ancestral polymorphism is V, Derived polymorphism is M
  VARIANT 10: note = Ancestral polymorphism is V, Derived polymorphism is M
  VARIANT 7: note = Ancestral polymorphism is R, Derived polymorphism is S
MMRGLRRMFMAHNGKRRAHRDEQGTAFASTSTSLVISEIDSSATTLLQAVKLLALHLTGDKDAGKISGTTWIEEVVLHSTTAASKSGEAIQRKMAQPFEAKHQGNQLPVPPVPIIGKGVL

SEQ ID NO: 20175 - protein, 597 aa, Zea mays
  VARIANT 67: note = Ancestral polymorphism is T, Derived polymorphism is M
  VARIANT 74: note = Ancestral polymorphism is G, Derived polymorphism is V
  VARIANT 75: note = Ancestral polymorphism is P, Derived polymorphism is T
  VARIANT 85..597: note = Derived polymorphism lacks residues 85 to 597
  VARIANT 94: note = Ancestral polymorphism is A, Derived polymorphism is S
  VARIANT 130: note = Ancestral polymorphism is D, Derived polymorphism is E
  VARIANT 254: note = Ancestral polymorphism is P, Derived polymorphism is S
MASSDLHDTGRHGATPLVFDEVRWVVQIRQSLEEGGPGSDDDNDDGIQVSVFNVPKPLQVHKPEAYTPQFIALGPYHHWRPELYEMERYKLAAARRAQKRLRGGARLDGLVDQFKRLERRVRAYYHRYLDFGGETLAWMMLVDGAFLLEFLQVYAVAAANEGDVATTGSGDGKALRRGVSSRMQHLVDYAGRKSAHSLILRDMLMLENQVPLFLLRRILEPQCASPGEAGELLPRMVTGLMKELCPLKMLDKFPAIDVSKNAHLLEVLYYLLVPKPTDDGGAAEAGDAAHGSRREDGYDIEEQLVDGGGGDEEQKPAAGCEYVKQLLLTVSSMASGLSTGRMRYVTRPIAFAVKAPWKMLTVVPGFSAMKQPVEAYFMSGAADGSTHAHDPNGAGYLTRPPLIEEIMIPSVSELANIGVQFCPTAGDLSTIAFDARTVTFHLPAVTLDSNTEVVLRNLVAYEAAAASGPLVLARYTELMNGIIDTDEDVALLRRRGVVLNRMKSDGEVAKLWNGMSRSVRLTKVAFVDRAVEEVNRYYNSRWRVKTKRFMRKYVFSSWQLLTFLAAIVMLLLTTLQAFCSVYTCSRWFGTVTVATAE

SEQ ID NO: 20176 - protein, 256 aa, Zea mays
  VARIANT 28: note = Ancestral polymorphism is A, Derived polymorphism is T
  VARIANT 22: note = Ancestral polymorphism is L, Derived polymorphism is V
  VARIANT 12: note = Ancestral polymorphism is A, Derived polymorphism is E
  VARIANT 6: note = Ancestral polymorphism is R, Derived polymorphism is S
MGRAPRGVWNMELLGLAVLVVLAVVAETRSLEKQNLCGGCGVGGGGGYGGGGGGGGDLGLGGGLGHGVGVGIGIGGGNGGGAGGGGGLGGGAGGGLGGGGGLGGGGGGGYGGGAGGGGGLGGGSGGGLGGGEGGGGGLGGGAGGGGGLGGGGGAGGGAGAGGGSGGGAGAGGGAGGGYGGGAGAGGGYGGGAGGGYGGGAGGGAGGGYGGGAGGGAGGGYGGGAGGGYGGGAGAGSGGGGGYGAGGGGGGGIGGGV

SEQ ID NO: 20177 - protein, 155 aa, Zea mays
  VARIANT 107: note = Ancestral polymorphism is R, Derived polymorphism is C
  VARIANT 98..155: note = Derived polymorphism lacks residues 98 to 155
  VARIANT 89: note = Ancestral polymorphism is S, Derived polymorphism is L
  VARIANT 84..155: note = Derived polymorphism lacks residues 84 to 155
  VARIANT 79: note = Ancestral polymorphism is D, Derived polymorphism is H
  VARIANT 76: note = Ancestral polymorphism is H, Derived polymorphism is R
  VARIANT 64: note = Ancestral polymorphism is E, Derived polymorphism is K
  VARIANT 63: note = Ancestral polymorphism is S, Derived polymorphism is L
  VARIANT 54: note = Ancestral polymorphism is E, Derived polymorphism is K
  VARIANT 47: note = Ancestral polymorphism is R, Derived polymorphism is C
  VARIANT 21: note = Ancestral polymorphism is S, Derived polymorphism is F
  VARIANT 19: note = Ancestral polymorphism is S, Derived polymorphism is C
MDVDSRMATESDSDACGGSGSGSETPTASPSPSVGLEKYVMTKLFDRTFGTSTEDVVSDMDISEKIGLLQQFVKPRHLDIPKVQHNEALWLLAVKELQKINSFKAPREKLLCIMSCCQVINNLLLNISMSNDRTLSGADEFLPILIYVTIKASNS

SEQ ID NO: 20178 - protein, 267 aa, Zea mays
  VARIANT 92: note = Ancestral polymorphism is G, Derived polymorphism is R
  VARIANT 16: note = Ancestral polymorphism is A, Derived polymorphism is E
MAMGRAARGGRALELAALALVLALGVSVEARFLETQNLGGGGGFGGGAGFGGGAGLGGLGHGGGLGGGFGGGKGGGLGAGSGLGGGGGFGAGGGAGGGLGGGLGNGGGLGGGGGFGDGGGLGGGAGGGLGSGAGGGLGGGLGGGAGEGLGGAGGGFGGGGGAGGGLGGGTGGGVGGGLGGGAGGGGGLGGGLGGGSGSGIGGGFGGGKGFGGGLGGGSGGGFGGGGGAGLGSGGGVGGGFGGGAGGGAGFGGGGGFGGGGGIGGGHW

SEQ ID NO: 20179 - protein, 109 aa, Zea mays
  VARIANT 102: note = Ancestral polymorphism is T, Derived polymorphism is N
  VARIANT 94: note = Ancestral polymorphism is L, Derived polymorphism is R
  VARIANT 92: note = Ancestral polymorphism is N, Derived polymorphism is Y
  VARIANT 76: note = Ancestral polymorphism is A, Derived polymorphism is V
  VARIANT 58: note = Ancestral polymorphism is H, Derived polymorphism is Y
MKYFHPIMSLLNTIQPILMPLPGAGPLGPFVPVPPKIAMHMLREQGQPPPFEPNGAPHGGIGMVESMMGGSAPIIAMPPNFRHDHRLLRIYYDLNAPDEEVNVLDYRSL

SEQ ID NO: 20180 - protein, 201 aa, Zea mays
  VARIANT 185: note = Ancestral polymorphism is R, Derived polymorphism is M
  VARIANT 182: note = Ancestral polymorphism is V, Derived polymorphism is G
  VARIANT 175: note = Ancestral polymorphism is P, Derived polymorphism is S
  VARIANT 172: note = Ancestral polymorphism is S, Derived polymorphism is F
  VARIANT 169: note = Ancestral polymorphism is C, Derived polymorphism is Y
  VARIANT 120: note = Ancestral polymorphism is T, Derived polymorphism is A
  VARIANT 87: note = Ancestral polymorphism is R, Derived polymorphism is S
  VARIANT 53: note = Ancestral polymorphism is A, Derived polymorphism is V
  VARIANT 41: note = Ancestral polymorphism is T, Derived polymorphism is M
  VARIANT 25: note = Ancestral polymorphism is R, Derived polymorphism is Q
MVMKMEHEDNGAIGGTDGTWTEDDRALGAAVLGADAFAYLTKGGGAISEGLVATSLSGDLQNKLQELVESESPGTSWNYAIFWQLSRTNLETAKVMDESHWSSGVYGASSVLRSECSLLAQVGFLTLQLAATDFISDIHGSEELSIFLGDPDKLPSIRINLRRTLILFCLDFMSPLMLRFGVVSRKTMEWWAADGLYYFRT

SEQ ID NO: 20181 - protein, 1166 aa, Zea mays
  VARIANT 1104..1166: note = Derived polymorphism lacks residues 1104 to 1166
  VARIANT 1066..1166: note = Derived polymorphism lacks residues 1066 to 1166
  VARIANT 553..1166: note = Derived polymorphism lacks residues 553 to 1166
MASDSRPPKRSPSARRVAPRHAHHHHSQSSGGSTSRAGAGGGGGGAAATESVSKAVAQYNLDARLHAVFEQSGASGRSFDYSQSLRAPPTPSSEQQIAAYLSRIQRGGHIQPLGCTLAVADDSSFRLLAFSENAADLLDLSPHHSVPSLDSVALPPVSLGADARLYFSPSSAVLLERAFAAREISLLNPLWIHSRASSKPFYAILHRIDVGVVIDLEPARTEDPALSIAGAVQSQKLAVRAISRLQALPGGDVKLLCDTVVEHVRELTGYDRVMVYKFHEDEHGEVVAESRRDNLEPYLGLHYPATDIPQASRFLFQQNRVRMIADCHAIPVRVIQDPGLSQQLCLVGSTLRAPHGCHAQYMANMGSIASLVMAVIISSGGDDERTGRGAISSSMKLWGLVVCHHTSPRCIPFPLRYACEFLMQAFGLQLNMELQLAHQLSEKHILRTQTLLCDMLLRDSPAGIITQSPSVMDLVKCDGAALYYRGKYYPLGVTPTESQIKDIIEWLTVCHGDSTGLSTDSLADAGYLGAVALGDAVCGMAVAYITPSDYLFWFRSHTAKEIKWGGAKHHPEDKDDGQRMHPRSSFKAFLEVVKSRSLSWENAEMDAIHSLQLILRDSFRDAAEGTSNSKAIVNGQRQLGELELRGINELSSVAREMVRLIETATVPIFAVDTDGCINGWNAKIAELTGLSVEEAMGKSLVNDLIFKECDDIVEKLLSRALRGEEDKNVEIKLKTFGSEQSKGAIFVIVNACSSRDYTQNIVGVCFVGQDVTGQKVVMDKFINIQGDYKAIVHNPNPLLPPIFASDENTSCSEWNTAMEKLTGWSREEVVGKFLIGEVFGNCCRLKGPDALTKFMVVIHNAIEGHDSEKFPFSFFDKNGKYVQALLTANTRSKMDGKSIGAFCFLQIASAEIQQAFEIQRQQEKKCYARMKELAYICQEIKNPLSGIRFTNSLLQMTDLNDDQRQFLETSSACEKQMSKIVKDASLKSIEDGSLVLEKSEFSLGDVMNAVVSQTMSLLRERDLQLIRDIPDEIKDASAYGDQFRIQQVLADFLLSMAQSAPSENGWVEIQVRPNVKQNYDGTDTELFIFRFACPGEGLPADIVQDMFSNSQWSTQEGVGLSTCRKILKLMGGEVQYIRESERSFFLIVLELPQPRLAAGRENQLIC

SEQ ID NO: 20182 - protein, 768 aa, Zea mays
  VARIANT 456..768: note = Derived polymorphism lacks residues 456 to 768
MSKRPKLEGFSIPRPTSYNFERSQPVQRLYRPTDDPDLDDIAFSDDAPSDAPAGTAVDGKAEHDEEIDPLDAFMAEIQEEIRAPPPPPKAEALRRADSGDDEDDPVESFLRAKKDAGLTLAADAMRAGYDSDEEVYAAAKAVDAGMMEYDSDDNPIVVDKKTIEPIPALDHSTIEYDTFTKDFYEEKPSISGMSDQEVADYMKSLAIRVSGFDVPRPIKNFEDCGFPVPLMNAIAKQAYQKPTTIQCQALPIVLSGRDIIGIAKTGSGKTAAFVLPMIVHIMDQPELEKEEGPIGVICAPTRELAHQIYLEAKKFAKPYNLRVAAVYGGVSKFDQFKELKAGCEVVIATPGRLIDLLKMKALKMFRATYLVLDEADRMFDLGFEPQIRSIVGQIRPGRQTLLFSATMPYKVERLAREILTDPIRVTVGQVGGANEDIKQVVNVIPSDAEKMPWLLEKLPGMIDDGDVLVFASKKARVDEIERELNQRGFRIAALHGDKDQASRMETLQKFKSGTYHVLVATDVAARGLDIKSIKTVVNFDIAKEMDMHIHRIGRTGRAGDKDGTAYTLITQKEARFAGELVQSLIAAGQDVPNELMDLAMKDVRFRAKRDSRKGGKKGGKGKGGVGGGAGRGRGVRGVDFGLGIGYNAESGSQVPAPRSAAINSLKTGVMQQFKSSFVSGSSNTPSSSAPSLVRPALRGFVSGGTIGGDTRPAQPAPTFVTASWPAQAAPSVPASRPAAGNNNENGNPNPKSSRDRPRERKRPSGWDR

SEQ ID NO: 20183 - protein, 236 aa, Zea mays
  VARIANT 141: note = Ancestral polymorphism is K, Derived polymorphism is N
MGFVRCHGVSDVACACGRDDLVVPRSPYFPVESAAGQERGPSPMVMERFQSVVSQLFQHRIIRCGGPVEDDMANIIVAQLLYLDAIDPNKDIIMYVNSPGGSVTAGMAIFDTMKHIRPDVSTVCIGLAASMGAFLLSAGTKGKRYSLPNSRIMIHQPLGGAQGQETDLEIQANEMLHHKANLNGYLAYHTGQPLDKINVDTDRDYFMSAKEAKEYGLIDGVIMNPLKALQPLPASS

SEQ ID NO: 20184 - protein, 888 aa, Zea mays
  VARIANT 246: note = Ancestral polymorphism is S, Derived polymorphism is F
MASSSKASDSSQRSKRSDQGMGKDAAAASVVPIHANLTQLIRQVQSGRLAYIKEKLEVNRKTLQRHSCSLFDVAAAAEVASRGTDGGNALSQRAAERQCGSDLANGIGERDVVSVQEENLATGTLALSSSGATAQRTIVRFVKLPLVEKIPPYTTWIFLDKNQRMADDQSVVGRRRIYYDTVGNEALICSDSDEEIPEPEEEKHFFTKGEDHLIWRATQDHGLNQEVVNVLCQFIGATPSEIEERSEVLFEKNEKHSGSSDKIESRLSLDKTMDAVLDSFDNLFCRRCLVFDCRLHGCSQNLVFPVSNRSFSFEISIFPCQVNENILFVSVRSNPTALTLMKTRSHVVICATFDSSHALVVALAAADTGVLVGGIDGEDPLWREGFKEMHDDGLAGGATYTMESGTASQRVDVNVMYESEDSNRQKGNIRSMTLVGTSGSKIISSVSAEESTTTPSADISETENVSSDLPPSSLRKHKISKHGPRYREHSPGKRQKVFTSDISFEGNIMNKLSIPEIRDTRLESRESGGDKLRILDESTKKTSRKDMCGESPATTMENVGRQSNKVSSTKNFLESTLSCWSALERDLYLKGIEIFGKNSCLIARNLLSGLKTCIEVANYMYNNGAAMAKRPLLNKSISGDFAENEQDYMEQDMAARTRIYRRRGRNRKLKYTWKSAGHPTVRKRTDDGKQCYTQYSPCACQQMCGKDCPCADKGTCCEKYCGCSKSCKNKFRGCHCAKSQCRSRQCPCFAASRECDPDVCRNCWVSCGDGSLGEPLARGDGYQCGNMKLLLKQQQRILLGRSDVAGWGAFIKNPVNKNDYLGEYTGELISHKEADKRGKIYDRANSSFLFDLNDQYVLDAYRKGDKLKFANHSSNPNCYAKARIAITE

SEQ ID NO: 20185 - protein, 687 aa, Zea mays
  VARIANT 230..687: note = Derived polymorphism lacks residues 230 to 687
  VARIANT 220..687: note = Derived polymorphism lacks residues 220 to 687
  VARIANT 165..687: note = Derived polymorphism lacks residues 165 to 687
MERQRSSSSSSPYQFLSPKSLLLLSFASSSLLFSFLFALFAIRHGRPLNLPFTTPNTSYSFAMPNTSSSFAMPNTSTAALAPLPPPGNGGGSMGGAVALAAEAGYAVRGHGSGDSVADGARRAVTGDLSARGVGPPMEVEGAVTGGGNGGAPATGKVLEAQEVAGAGNNSTGTSDLAMHAKEKEVTGVGGDADKLGKFPVRKENLAEGSRQHVGWETKTQLNAGSASSSQEVDASMVRPEGAESLTAVNLSMDDEAAMQVRGESVVQDDVVVVGDKRYSSVQAAAYASEQVEQLESSHLSAGNNSSLAAPAPANQNKQDPNLIEEEAVTSKMDSTRSDTKRCDVYDGSWVFDDETYPLYTSDSCPFIDEGFSCGANGRTDQRYMKWRWRPNHCNIPRFDARKMLETLRGKRLVFVGDSINRNQWESMMCLLRTAVPDPGRIHETRGRRITKEKGDYNFKFLDYNCSVEYHVTHFLVHESKARIGQKRMKTLRIDTIHRSSSRWKGADVLVFNTAHWWSHHKTQSGVNYYQEGDHVHPHLDASTAFQRALTTWASWVDSHINPQLTRVFFRSSSPSHFSGGEWNSGGHCRESMLPLNDTRARPVPERNLILEQVTKQMKTPVTVLNVTNLSGVRIDGHPSVYGRKTVGLTASSVQQDCSHWCLPGVPDTWNELLFYHLLSPQEKDVTS

SEQ ID NO: 20186 - protein, 337 aa, Zea mays
  VARIANT 38: note = Ancestral polymorphism is A, Derived polymorphism is V
MCCRRQRGPDGTPVDGGRRRRRGCGAVLAVLALAAAAVVAFLESTAGGVSYTGDGWLHECAKWDAEGGRFLASTFFGGGVAEVRAGEGEERVVVADPDAAGRVALGLAVDAPRRRLLLVYCDRPPRFGYAALAAYDLGSWRRLFLTRLDVPGESTFPDDVAADEEGNAYVTDASGNKIWKVSPSGVLLGVIKNSTFVQRPGLRHNLVGLNGIVYHPNGYLLVVHTFGGDLFKVDPKTEAVHAVKVQGSLGRGDGMELLSPTRLVVAGTPSSRLVESSDDWETARVTGQYVGPVHRVGSSATVKDGDVYINHIVGFGLGKKKTHVLARAVFSPLAAES

SEQ ID NO: 20187 - protein, 989 aa, Zea mays
  VARIANT 419..989: note = Derived polymorphism lacks residues 419 to 989
MLDMQKRRVRLLLFITGILALSMTAEKSRELVGKEAASKSGQSTFMNCFDKGSGSLACTSKEGVKLYVNNIRSAHLEMVRQRAMGKALADAVAEGLTPSEAAKQAQKVSAKATKIAARQANRILGPIISCGWDFFEAMYSGGSMMEGFLRGTGTLFGTYVGGFHGEERFGKLGYLAGSHVGSWGGGRIGLMIYDVISGLKYMFMSVQPNNSFPTATVAATTSMEAQNVEVAALVQKIAALHAAIAKLPSLSPSPDVNALFTSLVMACVPPSPVDVTKLSPDGQRMREELIRLCSDAEGHLEAHYADMLAAFDNPLDHLGRFPYFSNYIDLSKLEFDLLVRYILGLAPSRVAFVGSGPLPFSSLVLAARHLPNTLFDNYDRCGAANDRARKLVRADKDLNARMSFHTVDVANMTDELDKYDVVFLAALVGMAAEDKAKVVAHLGRHMTDGAALVVRSAHGARAFLYPIVDPEDIRRGGFDVLAVYHPDNEVVNSVIIALEKSRELVGKEAASKSGQSTFMNCFDKGSSRLASTSKEGVKLYVNNIRSAHLEMVRQRTMGKALADDVAEGLTSEATKQAHKVCAKATNIAAPQANRILGPIISCGWDFFEAMYSGGSMMGGFLRGTGALFGTYVGGFLARSSYHQLRLAHSNSFPTATVATTTSMEAQNGEVAALVQKIAGLHAAIAKLPSLSPSPDVNALFTSLVMACVPPSPVDVTKLSPDGQRMREELIRLCSDAEGHLEAHYADMLAAFDNPLDHLGRFPYFSNYIDLSKLEFDLLVRYIPGLAPSRVAFVGSGPLPFSSLVLAARHLPNTLFDNYDRCGAANDRARKLVHADKDLNARMSFHTVDVANMTDELGKYDVVFLAALVGMAAEDKAKVVAHLGRHMADGAALVVRSAHGARAFLYPIVDPEDIRRGGFDVLAVYHPDNEVVNSVIIARKMDAHAKGLQNGHAHARGTVPIVSPPCKCCKMEANTLQKREEMATMTELSI

SEQ ID NO: 20188 - protein, 252 aa, Zea mays
  VARIANT 20: note = Ancestral polymorphism is Q, Derived polymorphism is H
  VARIANT 66: note = Ancestral polymorphism is I, Derived polymorphism is V
  VARIANT 122..252: note = Derived polymorphism lacks residues 122 to 252
MDGGGVDTATTAAWMEKHRHMYERATRHPFTVSIRDGTVDMSAFKRWLWLSFDLFMSDSWFVVSGIEIYWFLRHMQSQDYLFVREFVAFIASVLLKCCKQEDSSDMEIILGGVASISDEISWFKNEATVWGVDLASVSPLKANLEYHRFLRSFTEPEISYAVAVTTFWTIETVYQDSFGFCIQDGNKTPPELLGTCQRWGSAGFRQYCQSLQSIVDRCLANAPADAVQSAEEAFVRVLELEIGFWDMSSSRS

SEQ ID NO: 20189 - protein, 109 aa, Zea mays
  VARIANT 74..109: note = Derived polymorphism lacks residues 74 to 109
  VARIANT 53: note = Ancestral polymorphism is G, Derived polymorphism is V
  VARIANT 44: note = Ancestral polymorphism is L, Derived polymorphism is H
  VARIANT 38..109: note = Derived polymorphism lacks residues 38 to 109
  VARIANT 25: note = Ancestral polymorphism is I, Derived polymorphism is S
  VARIANT 6: note = Ancestral polymorphism is G, Derived polymorphism is D
MKLGVGISGEERREGSMWLLAMVLISPCLVLIDHGHFQYNCISLGLTLGAIAGVLSRNELIAAALFTLAINHKQVHTILDKENFTLKELLDEDEIIQECKALNSILINL

SEQ ID NO: 20190 - protein, 44 aa, Zea mays
  VARIANT 14: note = Ancestral polymorphism is R, Derived polymorphism is C
  VARIANT 22: note = Ancestral polymorphism is R, Derived polymorphism is C
  VARIANT 27: note = Ancestral polymorphism is R, Derived polymorphism is I
MAFSSEEVPDGDTRFKCSPPIRDDTNRENLWKALLDGHIDMLTC

SEQ ID NO: 20191 - protein, 38 aa, Zea mays
  VARIANT 14: note = Ancestral polymorphism is A, Derived polymorphism is V
  VARIANT 11: note = Ancestral polymorphism is G, Derived polymorphism is E
  VARIANT 9: note = Ancestral polymorphism is S, Derived polymorphism is F
  VARIANT 2..38: note = Derived polymorphism lacks residues 2 to 38
  VARIANT 1: note = Ancestral polymorphism is M, Derived polymorphism is K
MYLFGAVIFRGINVGEVKKLQDTSIYSCNCLLNQIYSH

SEQ ID NO: 20192 - protein, 246 aa, Zea mays
  VARIANT 152: note = Ancestral polymorphism is S, Derived polymorphism is L
  VARIANT 138: note = Ancestral polymorphism is A, Derived polymorphism is T
  VARIANT 133: note = Ancestral polymorphism is T, Derived polymorphism is M
  VARIANT 132: note = Ancestral polymorphism is R, Derived polymorphism is Q
  VARIANT 108: note = Ancestral polymorphism is A, Derived polymorphism is V
  VARIANT 107: note = Ancestral polymorphism is A, Derived polymorphism is V
  VARIANT 96: note = Ancestral polymorphism is P, Derived polymorphism is L
  VARIANT 91: note = Ancestral polymorphism is A, Derived polymorphism is V
  VARIANT 68: note = Ancestral polymorphism is P, Derived polymorphism is S
  VARIANT 67: note = Ancestral polymorphism is A, Derived polymorphism is T
  VARIANT 63: note = Ancestral polymorphism is P, Derived polymorphism is L
  VARIANT 55..246: note = Derived polymorphism lacks residues 55 to 246
  VARIANT 53: note = Ancestral polymorphism is G, Derived polymorphism is D
  VARIANT 52: note = Ancestral polymorphism is A, Derived polymorphism is T
  VARIANT 48: note = Ancestral polymorphism is R, Derived polymorphism is H
  VARIANT 47: note = Ancestral polymorphism is R, Derived polymorphism is W
  VARIANT 32: note = Ancestral polymorphism is R, Derived polymorphism is W
  VARIANT 24: note = Ancestral polymorphism is A, Derived polymorphism is T
  VARIANT 9: note = Ancestral polymorphism is S, Derived polymorphism is I
MQSPSCSSSSGAAAHPRYIMLTEAEKEEKRLRRVLANRESTRQTILRRQLSAGIQCPQHVSIPLPTAPSAALLLMPSWCAHPSLPYFALKAVTSFPSNSLRLPSVHVVVSLFSAATDTPLASVDGSALTLLRTAAVSALAASLLASPSRSPSVLALKIWRFSLHVPRVRTTDRRAGRGWRLVMGHGCQTRGDGGRGWRLVMGAKRAEMAAGDGWRFGRARDLEAGGRTVHHPHPVNAYTTLLKSSI

SEQ ID NO: 20193 - protein, 129 aa, Zea mays
  VARIANT 96: note = Ancestral polymorphism is R, Derived polymorphism is G
MAPPAAAQRARRAAAITEEERRRNRMASNRLSARKSRMKQQQHVDDLTAVAERLRRENEAMRAGVGGVVRQSIELEQENRVLAAHARQLCATLLLRNSQLRLLGDVAGLPLDVPLVPDHLVQLYGMLEF

SEQ ID NO: 20194 - protein, 371 aa, Zea mays
  VARIANT 123: note = Ancestral polymorphism is A, Derived polymorphism is P
  VARIANT 165: note = Ancestral polymorphism is W, Derived polymorphism is C
  VARIANT 166: note = Ancestral polymorphism is N, Derived polymorphism is K
MTSPPARPRPTGAQPRCRFLQLTDPPYSLGTAVSDYDARRAKWLRDNPRFPAFVAPGRPRVLVVTGSAPRRCGGADDGDHVLLRAFKNKVDYCRVHGFDVFYSNAVLDAELSGFWTKLPVLRALMLAHPEAELLWWVDSDVVFTDMLFEPPWGKYGRHNLVVPGWNDKVYGARSWLGINAGSFIIRNCQWSLDLLDAWARMGPRGPVRYEYGKVLGKALSDRPSYEADDQSALVYLLVTQRLRWGDKTFLESSYSLHGFWLGIVDRYEEMQRDASTPRDGGERWPLVTHFVGCKPCGGQYASYEASRCRTGMERALNFADDQILRLYGFEHESLNTTAVRRVRNDTGGPLDADDVEIGRLLHPTFRAAGPW

SEQ ID NO: 20195 - protein, 277 aa, Zea mays
  VARIANT 20: note = Ancestral polymorphism is I, Derived polymorphism is M
  VARIANT 56: note = Ancestral polymorphism is R, Derived polymorphism is L
  VARIANT 144: note = Ancestral polymorphism is D, Derived polymorphism is N
  VARIANT 158: note = Ancestral polymorphism is G, Derived polymorphism is V
  VARIANT 176: note = Ancestral polymorphism is T, Derived polymorphism is M
  VARIANT 195: note = Ancestral polymorphism is P, Derived polymorphism is L
  VARIANT 207: note = Ancestral polymorphism is L, Derived polymorphism is Q
  VARIANT 208: note = Ancestral polymorphism is P, Derived polymorphism is S
  VARIANT 209: note = Ancestral polymorphism is G, Derived polymorphism is C
  VARIANT 256: note = Ancestral polymorphism is A, Derived polymorphism is V
  VARIANT 263: note = Ancestral polymorphism is T, Derived polymorphism is M
MTERPVAADRRARQHRLLPIPVFPVFFLFVVAPCALFLFRTSDLALVPSIRIEFDRRDALSIAPRNEPPPAQPVPLPSPPPLSPAPPPPGPGPNGSATTRGSQPSSRRGAPGSSPRRCSDPNGEHLLLRAFKTKADYCRVHGFDIFYSTAVLDAELSGFWSNLPLLWMLMLTHPQTELLWWVDSDVIFTDMLFEPPWDKYAGHNLVLPGSEEKWSLDLLNALARIGPRGPVRELYGRVIAEMLSDQKPYEACDQSALIYQLVTEHGRRGDKTFLESS

SEQ ID NO: 20196 - protein, 327 aa, Zea mays
  VARIANT 314..327: note = Derived polymorphism lacks residues 314 to 327
MEAQNVEVAALVQKITALHADIAKLPSLSPSPDANALFTSLVMACVPPNPVDVTKLSPDVQGMREELIRLCSDAEGHLEAHYADMLAAFDNPLDHLGRFPYFSNYIDLSKLEFDLLVRYIPGLAPSRVAFVGSGPLPFSSLVLAARHLPNTLFDNYDRCAAANDRARKLVRADKDLNARMSFHTVDVANLTDELAKYDVVFLAALVGMAAEDKAKVVAHLGRHMADGAALVVRSAHGARGFLYPIVDPEDIRRGGFDVLAVYHPDNEVINSVIIARKMDAHTKGLQNGHAHARGTVPIVSPPCKCCKMEANALQKREEMATTTELSI

SEQ ID NO: 20197 - protein, 209 aa, Zea mays
  VARIANT 73: note = Ancestral polymorphism is H, Derived polymorphism is Q
  VARIANT 90: note = Ancestral polymorphism is R, Derived polymorphism is W
  VARIANT 100: note = Ancestral polymorphism is P, Derived polymorphism is L
  VARIANT 106: note = Ancestral polymorphism is T, Derived polymorphism is I
  VARIANT 131: note = Ancestral polymorphism is D, Derived polymorphism is H
  VARIANT 137: note = Ancestral polymorphism is G, Derived polymorphism is D
  VARIANT 158: note = Ancestral polymorphism is L, Derived polymorphism is P
  VARIANT 197: note = Ancestral polymorphism is G, Derived polymorphism is R
MTERPVAADRRARQHRLLPILVFPAFFLFIVALCALFLFRTSTTSLTAAMLYPSHLEMSHRQHSQCHYHRRHHCCQHHRLRVQWLHDNPRFPTFVAPGRPRVLVVIGSSPRQCSDPNGKHLLLQAFKNKADYCRVHDFDIFYNTVVLDAELSGFWSKLPLLRTLMLVHSETELLCWVDSDVIFIDMLFEPPWDKYAGHNLVLPDSEEKV

SEQ ID NO: 20198 - protein, 327 aa, Zea mays
  VARIANT 24: note = Ancestral polymorphism is K, Derived polymorphism is N
  VARIANT 80: note = Ancestral polymorphism is A, Derived polymorphism is V
  VARIANT 94: note = Ancestral polymorphism is D, Derived polymorphism is Y
  VARIANT 118: note = Ancestral polymorphism is R, Derived polymorphism is H
  VARIANT 132: note = Ancestral polymorphism is G, Derived polymorphism is D
MEAQNVEVAALVQKIAALHADIAKLPSLSPSPDANALFTSLVMACVPPNPVDVTKLSPDVQGMREELIRLCSDVEGHLEAHYADMLAAFDNPLDHLGRFPYFSNYIDLSKLEFDLLVRYIPGLAPSRVAFVGSGPLPFSSLVLAARHLPNTLFDNYDRCAAANDRARKLVRADKDLNARMSFHTVDVANLTDELAKYDIVFLAALVGMAAEDKAKVVAHLGRHMADGAALVMRSAHGARGFLYPIVDPEDIRHGGFDVLAVYHPDNEVINSVIITRKMDAHTKGLQNGQAHARGTVPIVSPPCKCCKMEANALQKREEMATTTELSI

SEQ ID NO: 20199 - protein, 178 aa, Zea mays
  VARIANT 10: note = Ancestral polymorphism is R, Derived polymorphism is L
  VARIANT 100: note = Ancestral polymorphism is D, Derived polymorphism is G
  VARIANT 106: note = Ancestral polymorphism is G, Derived polymorphism is D
MMKRPVAADRRARQHRLLPLLVFPAFFLFIIAPCALFLFRTSASSMTAATLYPSHLEMSRCQHSQCHCHRATTVASTTAFGSSDPNGKHMLLRAFKNKADYCRVHGFDIFYSTVLLDAELSGFWSKLPLLRTLMLVHPETELLWWVDSDVIFIDMLFEPPWDKYAGHNLVFPGSEEKV

SEQ ID NO: 20200 - protein, 341 aa, Zea mays
  VARIANT 148..341: note = Derived polymorphism lacks residues 148 to 341
  VARIANT 123..341: note = Derived polymorphism lacks residues 123 to 341
MSSLGLRLRLRRPGARSSEMQSSSAQAVFDFVSPLPAVTSSKNNNDLAFFTYEEKRKLGYGTQRERLGKDSIKPFDACCLCLKPLIGPLCCPKGHTFCKECILECLLYQKKDIKRKLAAHEVQKKQEKEEEEEKLILQKAKELDAFDQQNHGPVPQYHDRSGSQDKNGFHGANNVKVTSFEDEALRNMKAFWLPSATPEATVKVDVPSIHTVCPEGQEKLKLKSLFPISFTEETADQKSSKAVEKKSYMCPSCKSTITNTMSLVAVSTCGHVFCKKCYDKFLVKDKACLECSKPFRERNLVPLEKGGTGFAAHDERLEARYFKHLGSGSGLGLVKPAPKTY

SEQ ID NO: 20201 - protein, 195 aa, Zea mays
  VARIANT 96: note = Ancestral polymorphism is K, Derived polymorphism is T
  VARIANT 54: note = Ancestral polymorphism is D, Derived polymorphism is Y
MILATSTVSTFVKYIFYVSDMLMEGQWEKKAVYTFYLVRELYVTFRNFRIRIADYVRYRKITSNMNERFPDATSEELDVSDATCIICREEMATAKKLLDGHLFHVHCLRSWLEHQHTCPTCRAPIIPAAWDLSIFLVVNHDHCISTEKQENRLKKRFLYGFSMGASAPQEGFSLLGRCRAACPNVQGLLYINNQQ

SEQ ID NO: 20202 - protein, 636 aa, Zea mays
  VARIANT 352: note = Ancestral polymorphism is P, Derived polymorphism is L
MISSQSGQSCPVKREDYCSCCGKNLMFPFLSRQVIDKYLREARRILAAAPEGGGGGDAAAALGLVDAALELSPRMEAALELRARALLALRRYREVAEMLRDYIPSCGKSCSGEDTSSSSSASLLSTGSGDLGTISRAKLLSPDRHRSDDAEPDARPVRFFRCFDVSELKRRVLAGLSKNPNTDTQWRYLVLGQACFHLGLIEDAMVLLQTGRRLASAAFRRESVCWSDDSFSSSSATAAAAPSVPSGKTSKSSSAFFIIPATESEAVSQLLAHVKLLLRRRAAAMAALDAGLPAEAVRHFTKILEARRGVLPHPFAAACLVGRAAAFQAGGRPADAIADCNRSLALDPAYIPALRARADLLQSVGAVADCLRDLDHLKLLYDAALRDGKLPGPRWRPQGGVRYCEIAGAHRKLTARIQGLRGRVAAGEACNIDYYLLLGVRHGCPRSELERAHLLLSLKLKPDRAVVFGERLELVDEHRDLEAVRDQARMSALLLYRMLQKGYSFVMSAVLDEEAAERQRAKDAAAAAAALAAKQEAATQEPPQPVPGKSKNTESGSGRPRSPPGRAQTAKPKPKSKAKAKSATAATMPKAPAAVNSTAPVYQGVFCRDMAVVGTLLSRGGAFDRALPVKCEAMSC

SEQ ID NO: 20203 - protein, 134 aa, Zea mays
  VARIANT 42: note = Ancestral polymorphism is W, Derived polymorphism is L
MAGRDGAKSSASMEEEACGEKKYGGIAPKKKPLISKVADDVWTKEHECLARLLEALMITPTHSRRSCVCAVRMQDHERAYFDSADWVLGKQAANSSTRATVESLKPKLKVENASPPAAPSQAHLRFRLRRPDPW

SEQ ID NO: 20204 - protein, 337 aa, Zea mays
  VARIANT 23: note = Ancestral polymorphism is G, Derived polymorphism is A
  VARIANT 95: note = Ancestral polymorphism is S, Derived polymorphism is I
  VARIANT 154: note = Ancestral polymorphism is S, Derived polymorphism is F
  VARIANT 155: note = Ancestral polymorphism is R, Derived polymorphism is W
  VARIANT 166: note = Ancestral polymorphism is G, Derived polymorphism is E
  VARIANT 241: note = Ancestral polymorphism is R, Derived polymorphism is W
MGNTFGFRGGLRADVADLMQDAGEHLRSSGVFVKRAVASQYQSNRTGNDEIDESSAEELRDAASYVQHNAMLIQVPVVGTARTFWRLSDEATRMIRKLALILRNHHSVCKCLAAPLQASNVWVGSAGNAKLRGARFTDKGFSVERVREDYRNLSRVLQQLISISGGDTSKLPPDYIDFLSLLTEDNLTNKDEFLVVNHAALLPLKNRLIWVSCGHSTEAFLMLYDRIVKYLGKRNRAKMNRILSCLPYQDDWLDTATANAKINQWIVNVQNTKEYRKTTLDLLRLNRNVRSHLHEYGHDDDVEEILYCEWPMLLVVMEKMLHREGELQDTDIENKFG

SEQ ID NO: 20205 - protein, 201 aa, Zea mays
  VARIANT 126: note = Ancestral polymorphism is S, Derived polymorphism is P
  VARIANT 124: note = Ancestral polymorphism is K, Derived polymorphism is N
  VARIANT 122: note = Ancestral polymorphism is R, Derived polymorphism is M
  VARIANT 61: note = Ancestral polymorphism is H, Derived polymorphism is N
  VARIANT 57: note = Ancestral polymorphism is H, Derived polymorphism is R
MGNLVSGAAAASGGGKVVMADGSVRALSEPVSVAELMMDHPRHFVVDARVLKKLGHHNHHHHQQQQQSGAKVAPLPADHVLGAGGVYVLLPATRGKVSAEEARRALSAARSLARSRSMPGLRRKLSSSSSSNKGRGQPGAEEPAQAHREEDEDEAEAARPDGFEEHRPEFLSRELSSRGWKPSLRTIEERVLPKKTPHWLF

SEQ ID NO: 20206 - protein, 86 aa, Zea mays
  VARIANT 48: note = Ancestral polymorphism is C, Derived polymorphism is Y
  VARIANT 43..86: note = Derived polymorphism lacks residues 43 to 86
  VARIANT 38: note = Ancestral polymorphism is R, Derived polymorphism is H
  VARIANT 26: note = Ancestral polymorphism is G, Derived polymorphism is C
  VARIANT 25: note = Ancestral polymorphism is C, Derived polymorphism is Y
MDSDAAAICGQGVGTTADGDLCTFCGFPMCRPCYEYNRKDDTQACPQCKTNKRHQGLEVKPRFGMVPLVFGTLEALALQKLNYKHP

SEQ ID NO: 20207 - protein, 207 aa, Zea mays
  VARIANT 132: note = Ancestral polymorphism is A, Derived polymorphism is T
  VARIANT 129: note = Ancestral polymorphism is R, Derived polymorphism is W
  VARIANT 119: note = Ancestral polymorphism is A, Derived polymorphism is V
  VARIANT 90: note = Ancestral polymorphism is A, Derived polymorphism is T
  VARIANT 77: note = Ancestral polymorphism is L, Derived polymorphism is Q
  VARIANT 51: note = Ancestral polymorphism is D, Derived polymorphism is N
  VARIANT 40: note = Ancestral polymorphism is C, Derived polymorphism is Y
  VARIANT 31: note = Ancestral polymorphism is R, Derived polymorphism is W
  VARIANT 22: note = Ancestral polymorphism is A, Derived polymorphism is V
  VARIANT 20: note = Ancestral polymorphism is A, Derived polymorphism is V
  VARIANT 16..207: note = Derived polymorphism lacks residues 16 to 207
MAAVAEEEVIVVGAGQSGLAVAACLSLRGVRALVLERDDCVGSLWRKRAYDRLHLHLTKKYCALPHAPHPDEAPAYLHRDDFARYLDGYAARFAVRPRLRREVRSARYDPASARWEVEAVDLGTGQAERYAARFLVVASGENAEKFVPEVPGLEAFPEVTLGGWWKRRRARRAGLRVAMGAGAGSGCADMGRIGSERVDEERSNDED

SEQ ID NO: 20208 - protein, 344 aa, Zea mays
  VARIANT 28: note = Ancestral polymorphism is Y, Derived polymorphism is H
  VARIANT 83: note = Ancestral polymorphism is A, Derived polymorphism is T
  VARIANT 101: note = Ancestral polymorphism is D, Derived polymorphism is Y
MGRAPCCEKVGLKRGRWTKEEDQILANYIAEHGEGSWRSLPKNAGLLRCGKSCRLRWINYLRADVKRGNISKEEEDVIIKLHATLGNRWSLIASHLPGRTDNEIKNYWNSHLSRQIHTYRRKYTAGPDTAPIAIAIAIDMSKLHSAERRRGGRTPGRSPKSATSSSSMTKSKQPDDPEPEPEAGGASSPRHSDGARSAVVDPDPDPNQPNSSSGSGSTGEGEDATGPWVLDPIELGDLWEAESEMDALMSIGGAAHDSATAEGFDAAQAQVDDLFDDMDWDNFAAHLWGEPEQQNDHSAQPQPQQAAEPQAAAAADVAAAGAEACDPDEHELEALETWLLSDSF

SEQ ID NO: 20209 - protein, 342 aa, Zea mays
  VARIANT 173..342: note = Derived polymorphism lacks residues 173 to 342
MDDDIDSSCSTPFASAPSSPGRPHAIGGGGYFFSAPASPIHHLLLSTSCSASATPSTGGRGCVGDAEFEFGGPGGPMISADELFHNGQIRPLTLPPLPDLDPGSDDDEDCGRAPTRGRDLTPRSASVHRRARSMSPLRSASPRLKLMNALVPAPDLGPAPDATGEAAPPVTASSRSSSSSSTSSSGTSWVRGSRRWVFIRDMLLHRSKSEPGSSAHSRDALGAPAAGANKPERTSWPFSPSWVARDRLAARLRPSRSPPATEAAGEDARPRGQRRGRRRRSTTVAAAHERLYAAPNRAQAEGMRRRTFLPYRQGLLGCLGFSSRGYGALHGFTKTLNPVFSR

SEQ ID NO: 20210 - protein, 327 aa, Zea mays
  VARIANT 262: note = Ancestral polymorphism is L, Derived polymorphism is P
  VARIANT 267: note = Ancestral polymorphism is G, Derived polymorphism is W
MDAGKVAELRRVDLRGLRPGGPGWVQACAAVAASMEELGCVVVAHGALDGELRRDLFGRAMPELFALPLPAKQGTLSGHIGGYIGPDPEKAPGLESLRISEATDAGKVHAFADLVWPDDGNAAFCQTIGAFAKGMLELDHAVQKMVLESLGVRKERVDSHLASLVYDVRLSRYGALAPVTAGDDDEATTYMVAHRDCSMVTTITQHEVEGLQVRGRDGAWITVAPEPGTFAVVAGEMFTVVTNGRVPACVHRVRTPSNRERLSVLFGSSLKHGAVVGALEELVDHGRHPLRFRPCDFDEYVKFRFGQQRPGLNSALQEFCGIGTGTK

SEQ ID NO: 20211 - protein, 202 aa, Zea mays
  VARIANT 70: note = Ancestral polymorphism is P, Derived polymorphism is T
MAALRKPSFGTRAWRLLRLAVLWARKGGAAHSLRLLRTLRRHGARGDRLRHGGEREYSIDETPAFRFRTPSARVLRLIPCIAPATPGLCADDRYFFSSAAAREVDEAAGGYCYADDPRSARHVEEEEEDELSCCGDDEQLLERVVAEACHASTAGSVAGEGGEDAGVDVKAEEFIARFYAQMKLQRQISWLQYNEMMERSIS

SEQ ID NO: 20212 - protein, 190 aa, Zea mays
  VARIANT 130: note = Ancestral polymorphism is L, Derived polymorphism is P
MAAAADYDRAHRPYAAPAPAGEYDRPYRNEVVPYGDRRIDIIVKPPARSPPPVSNRGGGGGVGSAWCFSDPEMKRRRRVASYKAYSAEGKVKASFRRGFRWIKAKCSELIHGWYGSRLLLLLLLLLLLPLSPFIGVSVLLLDIFGHNGDGCFGSQASDLSFRWVMGLCTTSTDVLIFIVLFVWIIGTTEC

SEQ ID NO: 20213 - protein, 1021 aa, Zea mays
  VARIANT 107..1021: note = Derived polymorphism lacks residues 107 to 1021
MTEASAILSFSAAAVVEDVLRQHGCRLSERDLASRRAEEAGARGGGTRRRGGCAARWGRLPRAIFRRSRPRRSSASASATARSSAARLTGSTWVPSRRQALLVLVICPVRSRRRCNCVLTVPVRVQVVVNTAADSVLQADGAALSAFQYFENVRNFLVAAQEIGLPCFEASDLEQGGKSARVVNCVLALKSYCDWKQCGGTGPWKYGGNLKPSVSGKSFGRKNSEPFQRSQSINEGEVPYEEAGFNGYAHFDSSDMQSTWRPLKMLVSAVLSDKRPDEVPQLLESMLSKLVEEFENRLNSQNELVKAALKNGIDNTRSFSKSKMDTADIYCNHKQTKKVASSELALKQYSILQQQSKNVEELKSDLINTRDGMEYMQMKYAEDLNLLGRHLFSLAHAASGYHKVLEENRKLYNQVQDLKGSIRVYCRVRPFLPGQASPSTVASIDEGNITLVIPSKSGKEVRKTFSFNKVFGSSATQDEVFLDTQPLIRSVLDGYNVCIFAYGQTGSGKTYTMSGPKNMTEQTQGVNYRALGDLFKLAEQRKRTFIYDIAVQMIEIYNEQVRDLLVTDDASLVRVASTMDVMELMNVGHKNRAVGATALNDRSSRSHSCLTVHVKGRDLTSGTILRGCMHLVDLAGSERVDKSEVTGERLKEAQHINKSLSALGDVIASLAQKNSHVPYRNSKLTQLLQDSLGGQAKTLMFVHISPESDAVGETISTLKFAERVSTVELGAAQLNKESGEVRELKAQIAQLKSALAAKDLGSEQIISHDTEAFNIKMPSPGFSIKRQGSCDLLSTQTNFRQPLDAVGNIEARANPTLRQKKPSFDLQDLLTANDSPSWPDSNLRVNFQTGDEREVIGGDWIDKVVVNNNNSVGDWEGDNAALPDFFYQRYHSGMREKQYQRNNTRQKDDHEYEEQRSRFYSTNTDDSDDIDMATSDSSESDALWQQLNVQSMDNSISLSGSKVKKPQIKLRDGSDARTPIHSQIPSASRKVANGSNRSVRQPLSRSDSRRLSSNGRQSGAK

SEQ ID NO: 20214 - protein, 169 aa, Zea mays
  VARIANT 124: note = Ancestral polymorphism is R, Derived polymorphism is M
  VARIANT 80: note = Ancestral polymorphism is V, Derived polymorphism is G
  VARIANT 45: note = Ancestral polymorphism is L, Derived polymorphism is F
  VARIANT 41: note = Ancestral polymorphism is A, Derived polymorphism is E
  VARIANT 36: note = Ancestral polymorphism is Q, Derived polymorphism is R
  VARIANT 35..169: note = Derived polymorphism lacks residues 35 to 169
  VARIANT 30: note = Ancestral polymorphism is A, Derived polymorphism is V
  VARIANT 9: note = Ancestral polymorphism is E, Derived polymorphism is V
MLEVFKSFEFVFMLHLMNEIFGYTNGLCNALQKREQDIVNAMDLLEFTKVELVVLREDSGWQKFLNDVSSFCEKHKIKIVDMDAKYKPIQRDKKFYRNATNYHRFHADMFLGVIDKQLVELNNRFDEVNTELLRCMASFNPSKNFDGFNTEKLVKLAGFYPQDFEFEEK

SEQ ID NO: 20215 - protein, 605 aa, Zea mays
  VARIANT 127: note = Ancestral polymorphism is P, Derived polymorphism is L
  VARIANT 74: note = Ancestral polymorphism is T, Derived polymorphism is A
  VARIANT 69: note = Ancestral polymorphism is W, Derived polymorphism is R
  VARIANT 17..605: note = Derived polymorphism lacks residues 17 to 605
  VARIANT 1: note = Ancestral polymorphism is M, Derived polymorphism is K
MLLPPEALLVPFDNRSQKAMAWAELKHYNASDWFTAPGQALLLAYRQPNRRSAKVNARDDSGWDYNKGWSARLALFIWEDVDMANWFAAIVMDKAYAWRLREGVLVQLHRSGQEHNLYAGFGGAQLLGEAYQHEWIRLPRAGKQESVLSFTKKLTPGINVVVGDGFPTRVFFNGDECAMPQRISMSSGSSTRLSSGLAFGAVRSSHLKEAMNIFSRLVSSGLVPDCFSFSSVLSACARAGARRYGVWVHHLMTELGVEMNHILSSALVDMYAKCGRIDVATEIFNKVKGNHISVWNTMISGLASHGLGSDVVILFHKMKSEELVPDGVTFVALLTACSRCGMVEEARHYFRSMTTEYSITPEVEHYGALVDTLSRAGLLDEAYELVMSMNVKPDVVIWRALLSACRRYRHTKLGEATIEHMACHGSGDYTLLSNIYSSANRWNDSEEVWKQRKQKKVRKTKGLSWVELGGSTHEFKAGDRSHPDTEDIYVVLHGLCRRAKVEGYAPLTELVTKDVSEEEREENLTFHSEKLAVAYSVLKTGPGTEIMVSKNLQVCSDCHEWMKIISKVLCRVIILRDRVRFHRFESGWCSCKDYWINAEVLSNIQ

SEQ ID NO: 20216 - protein, 424 aa, Zea mays
  VARIANT 146: note = Ancestral polymorphism is L, Derived polymorphism is S
MIPLNRRASLPRAGMEYFDARRKPRNVGKIIAALVLTTLCIFALKQSPGFGGNSVFSRHEPGVTHVLVTGGAGYIGSHAALRLLQDSYRVTIVDNLSRGNMGAVKVLQGLFPQPGRLQFIFADLGDQKSVSSSMLLKLFCLCLFCLWRVTPEVFFSLNCLPAVAYVGESTLEPLRYYHNITSNTLLILEAMASHGVKTLIYSSTCATYGEPEKMPITEATPQFPINPYGKAKKMAEDIILDFSKSKGADMAVMILRYFNVIGSDPEGRLGEAPRPELREHGRISGACFDAALGVITGLKVKGTDYPTTDGTCIRDYIDVTDLVDAHVKALNKAEPRKVSIYNVGTGRGRSVNEFVDACKKATGVNIKIEYLSRRPGDYAEVYSDPTKINKELNWTARYTDLKESLSVAWRWQKSHPSGYGPNRI

SEQ ID NO: 20217 - protein, 375 aa, Zea mays
  VARIANT 267..375: note = Derived polymorphism lacks residues 267 to 375
  VARIANT 232: note = Ancestral polymorphism is S, Derived polymorphism is L
  VARIANT 163: note = Ancestral polymorphism is A, Derived polymorphism is S
  VARIANT 141: note = Ancestral polymorphism is R, Derived polymorphism is W
  VARIANT 125: note = Ancestral polymorphism is S, Derived polymorphism is F
  VARIANT 104: note = Ancestral polymorphism is A, Derived polymorphism is V
  VARIANT 103: note = Ancestral polymorphism is A, Derived polymorphism is V
  VARIANT 90: note = Ancestral polymorphism is A, Derived polymorphism is T
  VARIANT 87: note = Ancestral polymorphism is V, Derived polymorphism is I
  VARIANT 47..375: note = Derived polymorphism lacks residues 47 to 375
  VARIANT 25..375: note = Derived polymorphism lacks residues 25 to 375
  VARIANT 14: note = Ancestral polymorphism is A, Derived polymorphism is T
  VARIANT 13: note = Ancestral polymorphism is A, Derived polymorphism is S
  VARIANT 9: note = Ancestral polymorphism is G, Derived polymorphism is D
  VARIANT 7: note = Ancestral polymorphism is L, Derived polymorphism is M
  VARIANT 6: note = Ancestral polymorphism is R, Derived polymorphism is C
MLWVARLSGLLSAAMVVVVLSPSLQSFPPAEAIRSSQFDGSVRFPGQIAGGARGVAFRRAPPFRNAADCGAGADNGTGANVCDPWLVHIAITLDNEYLRGSVAAVHSVVQHARCPESVFFHFLVSDPGLGDLVRAVFPQLRFKVYYLDPGRVRGLISTSVRQALEQPLNYARNYLAELLEPCVRRAIYLDSDLVVVDDVAKLWRTDLGGRTVGAPEYCHANFTKYFTGRFWSDQRFAGTFAGRRPCYFNTGVMVVDLERWRQAGYTQRIERWMEVQKSAAGRIYELGSLPPFLLVFAGHVAPIEHRWNQHGLGGDNVLGSCRDLHPGPVSLLHWSGSGKPWARLGAGRPCPLDALWAPFDLYDPGGGAEESPYKF

SEQ ID NO: 20218 - protein, 166 aa, Zea mays
  VARIANT 9: note = Ancestral polymorphism is S, Derived polymorphism is Y
MDGGSGNASSGGAAVCCYYALLGVRKSASATDIRTAYRRLAMKWHPDRWASDPGAAGEAKRRFQRIQEAYSVLSDKGKKAMYDAGLFDPLDDDDQDFSDFMQEMLVMMDNVKNEKPDTLEDLQKMLADIVNGDGGDGVGGRVPPAPPDVARRTRVAPHPQPQQARR

SEQ ID NO: 20219 - protein, 264 aa, Zea mays
  VARIANT 229..264: note = Derived polymorphism lacks residues 229 to 264
  VARIANT 204..264: note = Derived polymorphism lacks residues 204 to 264
  VARIANT 70..264: note = Derived polymorphism lacks residues 70 to 264
  VARIANT 28: note = Ancestral polymorphism is E, Derived polymorphism is K
MGRPSLNGKRLARVTRACQYVLSSGVGKRYIAIWKLDSGKTQSSNCILSMEQPAIFLDCKCSDEGEVHILAISKIGACYFWSANDVDDLRNKKPTKIILAESSVSTVHQAFSIFAAKLQGVDGPNSAHVLLAYGSVAKPSFDKLLVCYGTDINLGISQDGVLLPNTQSTMTNKGQSVKKQETVTALDRANAEDAVLPLPKLHTQENKRKHGVRKPSGDVKPEMRGHLRSLKPGDACKLLENLVSAWTTRSGSTEVVLRWLYCLC

SEQ ID NO: 20220 - protein, 491 aa, Zea mays
  VARIANT 125: note = Ancestral polymorphism is F, Derived polymorphism is S
  VARIANT 169: note = Ancestral polymorphism is S, Derived polymorphism is L
  VARIANT 191..491: note = Derived polymorphism lacks residues 191 to 491
  VARIANT 195..491: note = Derived polymorphism lacks residues 195 to 491
  VARIANT 211: note = Ancestral polymorphism is S, Derived polymorphism is Y
METSTKKLSSLRITSLDDDDDETEIPHQPPQAGLSTAEADYEDDDDEEEEAEVTLGVLSKPKHPGLLLRHLFPSKAGGIPAWLDPVNLPSGKSSYCGFCGEPLQFVLQIYAPIEDNVAAFHRTLFMFMCPSMACLLRDQHEQWKHKYGNPCRSVKIFRCQLPRNNAFYSAQPPKHDGSDKPLCPGAPVCHWCGTWKGDKICSSCKKARYCSEKHQALHWRTGHKNDCLQIISSAASNSVLPAVGIVPASISWPEFEIKIDYEGTFDSDSGDENNSKSLVMQRHGKLDAMMQSWMDHFEADADNKCWASFQERVSRAPNQVLRYCREPNAKPLWALSFGCPSDADIPSCSYCRGPLCYEFQVMPQLLYFFGVGNQPDSLDWATIVVYTCQGSCDQTVSYKEEFAWVQLYPTTTTRRSVYRLNSCDQLGIDRNHRQVHTSFGYWNFEIGCGFNVSRSIGRAGSFKHLPTVAQCLVLVTVPLIHLGTILGPTNT

SEQ ID NO: 20221 - protein, 108 aa, Zea mays
  VARIANT 99..108: note = Derived polymorphism lacks residues 99 to 108
  VARIANT 64: note = Ancestral polymorphism is D, Derived polymorphism is N
  VARIANT 58: note = Ancestral polymorphism is R, Derived polymorphism is C
  VARIANT 57: note = Ancestral polymorphism is Y, Derived polymorphism is H
  VARIANT 46: note = Ancestral polymorphism is K, Derived polymorphism is N
  VARIANT 32: note = Ancestral polymorphism is S, Derived polymorphism is L
  VARIANT 31..108: note = Derived polymorphism lacks residues 31 to 108
  VARIANT 17..108: note = Derived polymorphism lacks residues 17 to 108
  VARIANT 6: note = Ancestral polymorphism is V, Derived polymorphism is M
MKGKTVMFVGDSLGRNQWESLVCLLHAAALQSPTQLVSVDPLYTYKFLEYQVTVSFYRAPYLVDIDVVQGKQVLMLDDIYENAESWRDADVLSFNSGLWWTHTGSMQG

SEQ ID NO: 20222 - protein, 114 aa, Zea mays
  VARIANT 75: note = Ancestral polymorphism is G, Derived polymorphism is C
MEHMRFDIMSGSIRILVVLCLKLLRTRKSPAKQTARNLFRGGDDEDDSADADTNDPVVPWSLGRVGVGHMVYISGLTCALSSTNILEVSWREKEPGSLFVNLSLLPYADAEKLL

SEQ ID NO: 20223 - protein, 448 aa, Zea mays
  VARIANT 195..448: note = Derived polymorphism lacks residues 195 to 448
  VARIANT 315: note = Ancestral polymorphism is Y, Derived polymorphism is H
  VARIANT 316: note = Ancestral polymorphism is I, Derived polymorphism is M
  VARIANT 326: note = Ancestral polymorphism is D, Derived polymorphism is A
MWAERVVGERRMRQIQRFARNAKLTVVCLLLTVVVLRGTVGAGRFGTPQQDLIELRQHFVSHPHRALAEHHDARSRASTTTTSSSSSSSSGRRDEPDPPPRSLRDPPYTLGPKISDWDEQRAAWHRRHPETPPFLNDIKPRVLLVTGSSPKPCENPVGDHYLLKSIKNKMDYCRVHGIEVFYNMALLDAEMAGFWAKLPLMRALLLAHPEVEFLWWMDSDAMFTDMAFELPWERYGPYNLIMHGWDEMVYDDKNWIGLNTGSFLLRNCQWSLDMLDTWAPMGPKGPVRIEAGKVLTKSLKDRPVFEADDQSAMVYILATQREKWGDKVYLENGYYLHGYWGILVDRYEEMLENYKPGLGDHRWPLVTHFVGCKPCGKFGDYPVERCLKNMDRAFNFGDNQILQMYGFTHKSLASRRVKRIRNETSNPLETKDELGLLHPAFKAVKTST

SEQ ID NO: 20224 - protein, 331 aa, Zea mays
  VARIANT 68: note = Ancestral polymorphism is G, Derived polymorphism is D
MHASLASYAAAAMPALDLRPEIAHAHQPVMSPSRHGWDGNGAAAVSSPMPKRLDGKVAIVTGGARGIGEAIVRLFVKHGARVVIADIDEAAGDALASALGARASFVRCDVSVEEDVRRAVDFALSRHGGRLDAYCSNAGVLGRQTRAARSVLSLDAGEFDRVLRVNALGAALGMKHAALAMAPRRAGSIVSVASVAGVLGGLGPHAYTASKHAVVGLTKNAACELGAHGVRVNCVSPFGVATPMLINAWRQGHHGAGAGLDDLDVTVPSDEEVGKMEEVVRELATLKGPTLRPMDIAEAVLFLASDESRYISGHNLVVDGGVTTSRNLIGL

SEQ ID NO: 20225 - protein, 1288 aa, Zea mays
  VARIANT 875..1288: note = Derived polymorphism lacks residues 875 to 1288
MPLSRHTVGNEYALGGRDLYRAADQHDPEDVLDGVAMAGLVGVLRQLGDLAEFAAQVFHGLYDEVMSTSARGHGLMLRVQQLEAELPLLERDSCQRDYLHVASNRGVDWRSNPRVDQGVVTRGDTPRFIMESIKQCRGPPKLFMLDKYDIGGEGACLKRYTDPSFFRTDSACSTLPHEEGIRDERRPPKAMEIRPNLENAQIFQPPNAADNVSKLETDPSAEAMDEVPTNRRRLKYRQLNGSVFQSFRPLMLNLYEKPSSEEKLVTGGHSKVRISVNGSPESDTEERDTMVDTSVNMGKGKVAVRKNRPVSEEALSRSSDARSAGSSKGYNSELDVYVDALTTVDSEAETDSEHRGHGQCTFDRMDSDNRFSNAQNAMTSRNSNFDKKDRPDVPSANRDMSNQHEEATVSTQNTKPVVVGEHERTSSLEELLGQEKPASWDHERTSSLEELLTEDFNAPESGAREQATEEQSCNGSATGAVSNGTQDITKKTKEVKENSNIATISFKKIASKRSRYVGSMAAKVGILPRKLSKKHDPFSDSLRCMAKQLLELKYDGTKDSDLYDFEANSVGCDVKYQGISDPPVEIKESDVHKFLPDSSYDDVGSRKCPQEEMNHGQEHDAPPTDSPHDSVPDEGNGFQDPNMIYLASIITSSSSQEEEGCASTSLHENSSMAVLNHILEHAQEKFEEHLDKDVNEDIHTEVISENSSGKCEDLKEVSIYSEQVNVEDMEESNKSDVYVLDDETAEYIEEQVVSDGMNSSPVSSKQSDDPCRITPLALADEDDTVACKVIDSPEVDHITLSETFTDIDLPNVVNESVISSEHAMPENEQYYFHPETTFGQDLCLDNNEIVGENGEVPLCSSTTVAITPEPTVNREIEHEFHQAVYQEPSNSFNSSKVFGDPLASDSRDVAPSVISSFDWMLNGAMQQSFNVFPSHPTNGNEQENGSSEDAPPLPPLPPMQWRTNKIQTCSSPLSAKIGRPPRPKPPAKQQESEAAHILQENNLHKGLSLQNEVAQATISSDHETNQLLNMDFHENHHQEGDEYHAQDSNPFPSSEAECLAEIDSVKSENLHPLQLPELIVVPEEAWSEFGNIKFMPEQEGKLQLNNGLSGLAAQKTSGKPDLFAYYKEKELSFAGSDKVANSEENKPNGAVKHMQNLDLPAQQKNDKNDCDRKAEEFSSALEDESSKSPTHTVPKPPRYPLLPVTSHDRSMLRKVPTLVQPSSKLADEKNTLLEQIKNKSFNLKPVLAKRPNVMGGPKTNLQVVAILERAHAIRQAVADDDDDDSWSE

SEQ ID NO: 20226 - protein, 456 aa, Zea mays
  VARIANT 116: note = Ancestral polymorphism is G, Derived polymorphism is S
  VARIANT 109: note = Ancestral polymorphism is L, Derived polymorphism is I
  VARIANT 95: note = Ancestral polymorphism is A, Derived polymorphism is S
  VARIANT 86..456: note = Derived polymorphism lacks residues 86 to 456
  VARIANT 82..456: note = Derived polymorphism lacks residues 82 to 456
  VARIANT 10..456: note = Derived polymorphism lacks residues 10 to 456
MGITSAREYQMLWRHFAYQPYLSLFPPQPLSPRLPPPHPLLLRPPASTRVCTPPPSVASSCNQLSRIQDVRHHIGGESFRSYLAYQYQRIRILLAQFENHVCAVIRTSLCLARSLGLLCSYHNDGLLVTGHDTFNLYINMKTQKISKLLSKRFTTPVWIKVLLLKFAFPFSLYVQLKQHKEPREVNMFVDLLLLEVLESTFRNMSSFRLSSRRAWERQVRPRGLLRLRTLAPRAAPTHAGPQRCTLADFGYLKDLPELLHRIVHGGVSTRTPGKKARLTTKCSWGRSRVCFGNRTRRSRAERATHVGSTEERVAASLERDWGLAAAAVVARRTRRAEAAARAVEMYSKSVTTPPTGTVKSVTPIHSLSYANGTVQTPEIICLSYVYAICLLKADKIFFLIGLCCETSGAGGTATDKSNKNKRKAPLKRSKGSLGSLDVVAVKNNKSPAKPSTSSSN

SEQ ID NO: 20227 - protein, 125 aa, Zea mays
  VARIANT 27: note = Ancestral polymorphism is I, Derived polymorphism is T
  VARIANT 61..125: note = Derived polymorphism lacks residues 61 to 125
MDAHRTTRVAAVGGQGNYAISGGVKGIEVVEAKAKFFKARMTVRLALAGALHTSFMQPAVSRLEPALAATEIRTPRIPVISNVDAQPHSDPDTIKLQADFSAAGKVIAGILKRINKGASIENIGA

SEQ ID NO: 20228 - protein, 192 aa, Zea mays
  VARIANT 125: note = Ancestral polymorphism is G, Derived polymorphism is D
  VARIANT 115: note = Ancestral polymorphism is R, Derived polymorphism is C
MYTARKKIQKDKGLEPSEFEDSVAQAFFDLENGNQELKSDLKDLYINGAIQLDVAGSRKAVVIHVPYRLRKAFRKIHVRIVRELEKKFSGKDVVIVATRRIVRPPKKGSAVQRPRTRTLTAVHDGILEDVVFPAEIVGKRVRYRLDGAKIIKIFLDPKERNNTEYKLDTYTTVYRRLCGKDVVFEYPMAENA

SEQ ID NO: 20229 - protein, 172 aa, Zea mays
  VARIANT 79..172: note = Derived polymorphism lacks residues 79 to 172
  VARIANT 121: note = Ancestral polymorphism is A, Derived polymorphism is T
  VARIANT 139: note = Ancestral polymorphism is V, Derived polymorphism is A
  VARIANT 154: note = Ancestral polymorphism is S, Derived polymorphism is L
MADSEVVHESNTDLGKGGEHSLHDYVLDEQLGLTCRLCNVVCIEAKDFFPPMFTGKDHERPERNHFGQDGHVLDLSFFEICDPEFSKIKESGNVWASITDLEPKLLAHQRKAFEFIWKNLAGSLQLEEMDGSTSRGGCAVAHTPEAGKTLLLILFLVSYLKVHTQEAGHWSS

SEQ ID NO: 20230 - protein, 188 aa, Zea mays
  VARIANT 143: note = Ancestral polymorphism is L, Derived polymorphism is F
MPPLACASHAHTPSHRRPRSRISPTTTRDRAPAASPSILAYTSASPSIYANGGDRGGRSPACTTSHVPLSPQVLPQRVAQYPSHCPLAPPPPHTHTHPRRPQHRKRRPRVTSPPFNGVLLPITRGQQGDRWGRVQLHCLPPGLTEVIRGRRVLHPLVQWSPAQKVMVDPRDATQLDEAGFRGLLRWFD

SEQ ID NO: 20231 - protein, 160 aa, Zea mays
  VARIANT 110: note = Ancestral polymorphism is G, Derived polymorphism is V
  VARIANT 5: note = Ancestral polymorphism is R, Derived polymorphism is G
MAFPRLSLAVLSCLALLAATAAHRAPITGPSPSAPRGLTTLAERLEGAETQQCWEALVEIKSCTGEIIILFIRGEAFLGPGCCRAIRVIEQSCWAADSMMSIIGFTPQEGDMLKGYCDAGDDNATGGQSGSPPPRGADDAVGAVRGSFAAVAGRKGSMHR

SEQ ID NO: 20232 - protein, 484 aa, Zea mays
  VARIANT 231: note = Ancestral polymorphism is M, Derived polymorphism is K
  VARIANT 172..484: note = Derived polymorphism lacks residues 172 to 484
  VARIANT 158: note = Ancestral polymorphism is G, Derived polymorphism is S
  VARIANT 142..484: note = Derived polymorphism lacks residues 142 to 484
MLSRRRSSPRPLVPGLLLLLLAMAPPPPASAVGVNWGFASSHSLPAAQVVRGLLLPNSVPRVRLAAASSDALTALEGTGIAVSVGIPDALLRPLASSTKAAAAWVHDNITRYSSSVRFEYIVVGDEPFLLRHGQNFHPFVVRAAENVQQALVHAKLSGKMKVVVPCSADTFQNASTLPTKASFRPDVNKTMADLLSFLANSSSPFMVELDPFLSFQHNRNLSLDYFLFQLMSHPVKDGENKYDNYVDASIDALVTSLTKAGFSDMDIIVGRAGWPTDGAMNATPAIAQSFMTGLVNHLAKKSGTPLRPKVPPVEMYLFSLLDEDQRSIASGGYERHHGIFTFDGQAKYYANIGQGPKSLKNAPDVNYLPSKWCVVDNNKDLSNVSSSFSSACANGDCTSLLPGGSCSGLAWPGNVSYAFNNYYQQHDQSEDSCYFNGLGLITTVDPSVDNCLFPLTIHVSAATSLHLTLPVSLLLVLWFCIVCI

SEQ ID NO: 20233 - protein, 364 aa, Zea mays
  VARIANT 290: note = Ancestral polymorphism is A, Derived polymorphism is T
MPNLECRMYEQRFPEVDAAVMIQVKHIADMGAYVSLLEYNNIEGMILFSELSRRRIRSISSLIKVGRQEPAIVLRVDRDKGYIDLSKRRVSEEEAHACEDRYNKSKLVHSIMRHVAETLEIDLEPLYQRIGWPLYRKYGHAFEAFKLIVADPDAILDALTYEEKEVGPDGQEVTKVVPAVTPEVKDSLVKNIRRRMTPQPLKIRADIEMKCFQFDGVLHIKQAMKKAEAAGNDNCPVKIKLVAPPLYVLTTQTLDKVGIILVLNNMCEQFVIAELFDKVSYDQGISVLTTAVKACTAEIEKYKGKLVVKEPPRAVSEREDKLFLDQIDSLMEQNAEVDGDADSEEEEDTGMGDVDITNSGVAAY

SEQ ID NO: 20234 - protein, 297 aa, Zea mays
  VARIANT 248: note = Ancestral polymorphism is G, Derived polymorphism is R
  VARIANT 209: note = Ancestral polymorphism is T, Derived polymorphism is I
  VARIANT 188: note = Ancestral polymorphism is T, Derived polymorphism is I
MTFYLCVHFFIYLFKLFALCRWDSDSTVGEFDGHSKRVLSCDFKPTRPFHIVTCGEDFLANFYEGPPFKFKHSIRDHSNFVNCIRYAPDGSKFITVSSDKKGLIYDGKTGEKIGELSTEGGHTGSIYAVSWNPDSKQVLTVSADKYAKVWDIFEDASGKLNRTLVCPGIGGVDDMLVGCLWQNDHLVIVSLGGTFNVFSASNPDQEPVTFAGHLKTVRSLVFFPQSSPRTILSTSYDGVIMRWILGVGFGGRLMRKNNTQIKCFAAVEEELVRKINRLPILLIKALRVACLFSFCHP

SEQ ID NO: 20235 - protein, 162 aa, Zea mays
  VARIANT 73: note = Ancestral polymorphism is G, Derived polymorphism is S
  VARIANT 79: note = Ancestral polymorphism is C, Derived polymorphism is R
  VARIANT 144..162: note = Derived polymorphism lacks residues 144 to 162
MRPASSPELSIRLARALISYAGGAPESRAEEVRQELQAEVVRYTNYHALIWATNCVRVCRWSLIANQLPGRTGNDVRNCWNTKLSKQLRQRGIDPTAPSPTSCTSSPAPSPYGDDGAGEIIDATLESWTATRRRGWTSSSPSCWPTRPTTLAPPPRWAGSWA

SEQ ID NO: 20236 - protein, 888 aa, Zea mays
  VARIANT 123..888: note = Derived polymorphism lacks residues 123 to 888
MASTSSSRYAKHRRIGEDDELEEVEEEAEEELERFDDFTIASSWEKFISEIEAICRQWLADGAKILMQKGAEGVPPFENLYMIKRELKHGKRVYSMEYHFMKSAKGQNSYWDDDTHSMQLSFGVDEFLIIAPLSASGVILDDPESTKLLSSVAIALSNCGSNWPAFVPVHDPSRKAYIGIQNLGTVFTRRFEADRIGSQVPIRLMHLEGLHELFLSKFVLSSSDFPARVKVHFSMKLSYKTPEYDHDNETLDSEATEPLTENEVVNHPRKLWDDDCPWAEWYSAEDPVKGFELTAIWGERTFEETLEMAEVENASSFDADSWFLHPVVSRYMVDDSIGKFVGFASQLHLLVNAYESSVEAQFLEDFVADTSGQDNAKSTATVPPPSVIDRVMKDLFSDETGNYMEAENKYSRAMRGAPADSLFGQFCLHALWFGNCNICAIATLWIDFVREIRWCWEESERLPRMKSTSSIDLSSCLIHQKLQMLTICIERKRSLNREKGTGYKDETSNSTAVNKSRKGSAGVVPKMMLLNTFQEMHAPYTQDAPLMTEDMHEERLHAAEAFGNAIGLSGQLERDILCSDMSAFKAANPDAVFEDFIRWHSPGEWLSEDKTDGNAGWPPKGKLSHRMSQHGNVWRKIWNDALPLPVSEQKSLLDPVREGEKVLHYLETLRPQQLLEQMVCTAFKSSADILNKTMYGGFKEMKTKMDRLYVTMASTLKSFLGNSDVNDLVGGLKRLCQVFEHIEKLLILAASINRKLIDAPRLAQAIFYDYYNFYLPKMGTSLESICYEKEFTTKEKVGMYERDAVSNLFPPPTANQSWRKVLSMGNLLNGHEPMQREIIFSVQERISNGHYSSPTPLCTNNEKIQTHRMYISGTSNDLWVALSVTSWD

SEQ ID NO: 20237 - protein, 595 aa, Zea mays
  VARIANT 40: note = Ancestral polymorphism is T, Derived polymorphism is I
MGILLRSLLVASLVLSSLVLHVAAAKTIDPYKASNLCIIIAYSLVLGVDKNASQRDIQKAFHKLSLKYHPDKNKGKGAQEKFEEINNAYEILSDEEKRKNYDLYGDEKGNPEFGGGNFGNHGGSTYFTGGGPKSSQFTSGNGWQTMGGQGNTKTFSFSFGGKPGASGGNPFGGGFDLGDVFSNLFGGGPMGDSHIGGSSGSARANTGTSGQHSGTTKIEDITTQVFNKEVADQGTTWLLLFYTPQSKSQFVLESVMQDVVHSLDGVLRAGKINCDNEKSLCKRSGVSIGKSARLFIYSYATAEKGSLHEYSGEHDAKSLKTFCQEHLPRFSKRVDISQFSFPLNVLPNLPQVLLLSSKKDTPAMWRAISGMFRNRIIFYDAEVHDVSHPLLKSLGVKNLPAVIGRTVNGEELLLKDGISVKDLRSGVKELKTLLDSFEKKNKKLLSNLANKKPSGQWEEIKKIPLLTASNFEETCGEKTSVCIIGVFGSNKAKGQLEAVLSEISMKTLIRGQNYNSRNAVSYALLDKDKQSGFLSSFDKSGYRSSDKLLIAYKPRRGKFAVYDGEVTLEEAERFVGSVLNGDVQLSPTKQKPVLR

SEQ ID NO: 20238 - protein, 171 aa, Zea mays
  VARIANT 49: note = Ancestral polymorphism is S, Derived polymorphism is A
  VARIANT 45: note = Ancestral polymorphism is A, Derived polymorphism is V
  VARIANT 5: note = Ancestral polymorphism is V, Derived polymorphism is I
MGVAVAKHRLEILKLARKESSSSHRKAAAIAVVLPWRATRLLAAAVHRSARSALGRLRACRDRNRERGRDRDRAAAVLATQRVPLLRHRGGRVALAHRHSSCWSKAAPPVATIRTGGKLLVKTLPAPAASIAACRLVSTDVCSCDEDEEVAVMDGGEAMRWESMFQDLRPT

SEQ ID NO: 20239 - protein, 226 aa, Zea mays
  VARIANT 71: note = Ancestral polymorphism is G, Derived polymorphism is S
  VARIANT 110: note = Ancestral polymorphism is Y, Derived polymorphism is H
MADPAEHRPAEEDEEAAAAGEDEDTGAQVAPIVKLEEVAVTTGEEDEDVLVDMKAKLYRFDKEANQWKERGTGTVKLLKHKETAKVRLVMRQAKTLKICANHLGFDTGLYCLSPSSERTVVATTKMQEHAGSDKSCVWHALDFADGELKEEMFAIRFGSVENCKKFKDTVEEIAEEQGKTEVKENEEVSIAAADLVQKLTVTEASKEGDAEEEEAPASDHKKDAKG

SEQ ID NO: 20240 - protein, 497 aa, Zea mays
  VARIANT 255..497: note = Derived polymorphism lacks residues 255 to 497
MEWQRGKCIGKGAFGTVHLAVYTATGRAFAVKSVDAESAAAMACLESEIRILKRLSSPHVVAYLGDDGAAGPTRNLHMELVPGGSAAEAAAALGGLGERGARGVLRRVAAALRYLHEDAGVVHGDVKGRNVLLGCRGCGAKLADFGAARLVSDAATATAPRGPRGTPAWMAPEVARGGAATPASDVWALGCTALELLTGRRPWSELGGATEVGELLLLVGFGGTRPAIPACLSDACLDFLDRCLRRDAAQRWSCEQLLRHPFLSTDAADDATDPWPSPSPSPFPSPRAVLDWAPSDSDSEALDDAEAESKHEVMARAKGRVAELASNGPPTSWDWEEEVGWGTGATLASDTWAPPPSSEAPRNGSASAPVPSSASAFSDDRDRDRDVLVVGSGSGLPCGHGRPGCHSHCCWCKCGFGVVGLRWPPLAVVPVLVPCTVIPFVHSIQSKSVSNQAANAVLHAFFFDRGGRPKKKRKQHASSGIAEGHFRCCQLPWWSGS

SEQ ID NO: 20241 - protein, 762 aa, Zea mays
  VARIANT 74..762: note = Derived polymorphism lacks residues 74 to 762
  VARIANT 28..762: note = Derived polymorphism lacks residues 28 to 762
MAILSALATEVLIPVAAVIGIAFAVVQWVVVSRVKLSPAASGGSGGKAGYADSLIEEEEGLNDHNVVVKCAEIQNAISEGATSFLFTEYQYVGIFMAIFAVVIFLFLGSVEGFSTKSQPCTYSKDKYCKPALFTALFSTVSFLLGAITSLVSGFLGMKIATYANARTTLEARKGVGKAFITAFRSGAVMGFLLASSGLVVLYITINVFKLYYGDDWEGLFESITGYGLGGSSMALFGRVGGGIYTKAADVGADLVGKVERNIPEDDPRNPAVIADNVGDNVGDIAGMGSDLFGSYAESSCAALVVASISSFGIDHDFTGMCYPLLVSSVGIIVCLITTLFATDFFEVKAVKEIEPALKKQLIISTVLMTFGIALISWLALPAKFTIYNFGTQKEVSNWGLFFCVSIGLWAGLIIGFVTEYYTSNAYSPVQDVADSCRTGAATNVIFGLALGYKSVIIPIFAIAVSIYVSFSIAAMYGIAVAALGMLSTIATGLAIDAYGPISDNAGGIAEMAGMSHRIRERTDALDAAGNTTAAIGKGFAIGSAALVSLALFGAFVSRAGVKVVDVLSPKVFIGLIVGAMLPYWFSAMTMKSVGSAALKMVEEVRRQFNTIPGLMEGTAKPDYATCVKISTDASIKEMIPPGALVMLTPLIVGTLFGVETLSGVLAGALVSGVQIAISASNTGGAWDNAKKYIEAGASEHARTLGPKGSDCHKAAVIGDTIGDPLKDTSGPSLNILIKLMAVESLVFAPFFATQGGLLFKYL

SEQ ID NO: 20242 - protein, 388 aa, Zea mays
  VARIANT 328: note = Ancestral polymorphism is D, Derived polymorphism is H
  VARIANT 299..388: note = Derived polymorphism lacks residues 299 to 388
MSCTVTIPNSPVFSPSRRPLSCKAAPASPEPAVAVSASSAAPAPAPAAAGSPLRPFALRALLREEVFPSPSPQLASAAAVASVPSGAVLKRRRPAPLLVPASGATAAAAVAAVEADPTNEVEEEGEEFAAYCRRGKGRRRVEMEDRHVAEVALGGDPQVALFGVFDGHGGKNAAEFAAENMPKFLAEEFKKVNGGGEIEGAVNRGYLKTDEEFLKRDESGGACCVTAVLQKGGLVVSNAGDCRAVLSRAGKADVLTSDHRASREDEKERIENLGGFVVNYHGTWRVQGSLAVSRGIGDGHLKQWVVANPDTRTLLVDHQCEFLILASDGLWDKIDNQEAVDLARPLCINNDKTSRLAACRMLTETSISRGSTDDISVMIVQLQKFSSS

SEQ ID NO: 20243 - protein, 569 aa, Zea mays
  VARIANT 114..569: note = Ancestral polymorphism lacks residues 114 to 569
MMVGHSHVVCRLKHRGPDWSGLYQHEGNFLAQQRLAIVSPLSGDQPLFNEDRTVVVVANGEIYNHKNVRKQFTGAHSFSTGSDCEVIIPLNKNFSSTDAAFVIAAAVVGVIDLQYEKYGENFVDMLDGVFAFVLYDTRDRTYVAARDAIGVNPLYIGWGSDGSVWMSSEMKALNEDCVRFEIFPPGHLYSSAAGGFRRWYTPHWFQEQVPRTPYQPLVLREAFEKAVIKRLMTDVPFGVLLSGGLDSSLVASVTKRHLVKTDAAGKFGTELHSFVVGLEDGIDAIEEVIYHDETYDVTTIRASTPMFLMARKIKSLGVKMVLSGEGSDELLGGYLYFHFAPNREELHRETCRKVKALHQYDCLRANKATSAWGLEVRVPFLDKEFVDVAMGMDPEWKMYDKNLGRIEKWVLRKAFDDEEHPYLPEHILYRQKEQFSDGVGYNWIDGLKAFTEQQVTDEMMNSAAQMFPYNTPVNKEAYYYRMIFERLFPQDSARETVPWGPSIACSTPAAIEWVEQWKASNDPSGRFISSHDSAATDRTGDKLAVVNGDGHGAANGTVNGNDVAVAIAV

SEQ ID NO: 20244 - protein, 394 aa, Zea mays
  VARIANT 221..394: note = Derived polymorphism lacks residues 221 to 394
  VARIANT 191..394: note = Derived polymorphism lacks residues 191 to 394
  VARIANT 118: note = Ancestral polymorphism is D, Derived polymorphism is V
MLPSRRKSAVLGVVALSSSVLILLHAFSLPAASALSVGLARRHRHDATPGLAAGGCDVFSGSWVLDGGSSASAAYTGYNCPLIDAEFNCQLYGRPDSDYLRYLWKPAGCELPRFDGADFLTRMKGKTVMFVGDSLGRNQWESLVCLLHAAAPQSPAQLVSADPLYTYKFLEYQVTVSFYRAPYLVDIDVVQGKRVLMLDDISENAESWRDADVLSFNSGHWWTHTGSMQGYGRWDYMGESGRYYEDMDRTVAFQRGLTTWASWVDLNLDQAKTRVFFQSMSPTHYSSKEWPNPVSKNCYGETAPATGLNSTGQASGQDQVIQAVLRGMKSPVRLLDITALSAMRKDAHPSAYSGDFSPAQRANPGAGSVDCSHWCLPGLPDTWNQLFYTLLFYK

SEQ ID NO: 20245 - protein, 184 aa, Zea mays
  VARIANT 11: note = Ancestral polymorphism is L, Derived polymorphism is P
MTPRHRRLRLLRAILRARQTWSESSCSKDQATTTPPTRHGREAPRRSSPNTSSKGTPRLPRLTRSRSSWSGRRNSRESRSSPRSWRARPRTSPRSRSRSGRTRRPGGGSGDQQRKPSPAYVAHASSADWHGTPRDHMHGCNPATLLGSSLHKRQQTVALVRAALSASASHHYEPQQAERKAMRL

SEQ ID NO: 20246 - protein, 264 aa, Zea mays
  VARIANT 147..264: note = Derived polymorphism lacks residues 147 to 264
MIRVPPPAPAPVHACPCARPVPVTHVAVPHAIDKRVRPESAFVPSFAPDPRSPWKASVVLASSLNPARSPWKGPPPPPRICVPAILRLGSAFASTLPARSSWKGPPPADLASTSPTSSPRISLAIHGSGLAPDSARVKGQYSTRVAQSVALVVYWCLSGSPKNRPDMSTIIQALEPLLDLDDDMPVAPLGHAGPVMLFVAATAEEKKERAPRKDVLGHRRRPLSPKASPRKHPSAGTKEEFWVWHLPADQKTRPSLGGVVQACA

SEQ ID NO: 20247 - protein, 341 aa, Zea mays
  VARIANT 86..341: note = Derived polymorphism lacks residues 86 to 341
  VARIANT 108..341: note = Derived polymorphism lacks residues 108 to 341
  VARIANT 109: note = Ancestral polymorphism is Y, Derived polymorphism is N
  VARIANT 167..341: note = Derived polymorphism lacks residues 167 to 341
  VARIANT 198..341: note = Derived polymorphism lacks residues 198 to 341
  VARIANT 248: note = Ancestral polymorphism is P, Derived polymorphism is L
  VARIANT 268..341: note = Derived polymorphism lacks residues 268 to 341
MGHGKVELKKIENPTNRQVTFSKRRMGLFKKANEVAILCDAQIGVIIFSGSGRMYEYSSPPWRIASVFDRYLKAPSTRFEEMDIQQKIVQEMTRMKDERNRLRMIMAQYMAEDLASFSVQDLSNLEQQIEFSLYKVRLRKIKERISLLPLWPRVRRGERSRSNINPQRHGQSCSRNAHSCRSCPVDEQEDLMLDTCWCHCHLAPIRCYGVASLHLAFSDDEDPAAAVATDEDLDGEDLFNDNYLEELPKKMSLDALMLEPVNKDFWGYFGFNVKLSGFEATSIYDLLGHFISICHCLKLGHALERFAHVGLAIITLLDIYCFGVMVTCSDNVQFLSQVRSE

SEQ ID NO: 20248 - protein, 407 aa, Zea mays
  VARIANT 9..407: note = Derived polymorphism lacks residues 9 to 407
  VARIANT 95: note = Ancestral polymorphism is G, Derived polymorphism is S
  VARIANT 178: note = Ancestral polymorphism is S, Derived polymorphism is Y
  VARIANT 183: note = Ancestral polymorphism is T, Derived polymorphism is K
MHAVGRLVLTLKPAPMTSCFNSGAGWPEPVVRVQAVSDTCGDTIPERYVKPLPERPRLSPASDVGGGRNIPVIDLSMPDVDATSRAVAAACREWGFFQAVNHGVRPELLRGARAAWRGFFKQPAEVRERYANSPSTYEGYGSRLGTAKGGPLDWGDYYFLHLLPSSLKNHEKWPSLPYSLRGTTEEYGEEVLHLCRRVMRLLSSGLGLEAGRLQAAFGGEGGEGACLRINFYPRCPQPELTLGVAGHSDPGGMTMLLVDDHVKGLQVRGPDGQWIIVDPVPDAFIVNIGDQIQVLSNAAYKSVEHRVTVSATEDRLSMAFFYNPRSDLPIAPMAELVGPGRPALYPEMTFDEYRVFIRQRGLAGKAQLESMQKAAATAADGGRRQLVHQLAATEHIISRASWSVSDA

SEQ ID NO: 20249 - protein, 526 aa, Zea mays
  VARIANT 344: note = Ancestral polymorphism is S, Derived polymorphism is L
  VARIANT 303: note = Ancestral polymorphism is D, Derived polymorphism is G
  VARIANT 209..526: note = Derived polymorphism lacks residues 209 to 526
MTWHEDLATHVGNTGVRLPGAGGHAPAAANVAAAGAGWYGEEEEGRAEEGWAQQAKGFAESTAEMLRELGRGLWDVAAQSLAGAEDSEVARRLRKRAAATGKRLSFMNEYLPEERDPVRCWLTVAAVAFVSLLVLGFGSGNETPVELPKKLIIGPPSADRIQLPDGRHLAYQEQGVSANRARFSLIYPHSFLSSRLAGIPGIRASLLEEFGVRLVTYDLPGFGESDPHIGRNLNSSAMDMLYLANALNIPEKFWVVGYSGGGMHAWSALRYIPDRIAGAAMFAPMANPYDSKMTKDERRKTWDSWSTKRKLMHILARRFPSLLPFFYRQTFLSGKQGHPESWLSLSLGKKDKTLLEGPAFNAFWERNVAESVRQGDARPFVEEAVLQVSDWGFSLSDIQMQKKEARGFFELIKSLFNQAEREWVGFLGPIHIWQGMDDRVISPSVAEFVRRLVPGATVHKLLDEGHFSYFCFCDECHRQIFSTLFGIPQGPMNPAPQPSEVVSELNEEITVPDNVTDQEQGKSGLP

SEQ ID NO: 20250 - protein, 130 aa, Zea mays
  VARIANT 110: note = Ancestral polymorphism is R, Derived polymorphism is S
  VARIANT 102: note = Ancestral polymorphism is S, Derived polymorphism is F
  VARIANT 99: note = Ancestral polymorphism is S, Derived polymorphism is F
  VARIANT 85: note = Ancestral polymorphism is A, Derived polymorphism is T
  VARIANT 80: note = Ancestral polymorphism is L, Derived polymorphism is R
  VARIANT 72: note = Ancestral polymorphism is S, Derived polymorphism is L
  VARIANT 54: note = Ancestral polymorphism is A, Derived polymorphism is T
  VARIANT 45: note = Ancestral polymorphism is A, Derived polymorphism is S
  VARIANT 44: note = Ancestral polymorphism is A, Derived polymorphism is V
  VARIANT 36: note = Ancestral polymorphism is D, Derived polymorphism is N
  VARIANT 34: note = Ancestral polymorphism is R, Derived polymorphism is H
  VARIANT 32: note = Ancestral polymorphism is L, Derived polymorphism is P
  VARIANT 29: note = Ancestral polymorphism is V, Derived polymorphism is L
  VARIANT 24: note = Ancestral polymorphism is P, Derived polymorphism is L
  VARIANT 23: note = Ancestral polymorphism is L, Derived polymorphism is P
  VARIANT 18: note = Ancestral polymorphism is G, Derived polymorphism is D
  VARIANT 15: note = Ancestral polymorphism is G, Derived polymorphism is D
  VARIANT 14: note = Ancestral polymorphism is G, Derived polymorphism is S
  VARIANT 13: note = Ancestral polymorphism is A, Derived polymorphism is V
  VARIANT 12: note = Ancestral polymorphism is A, Derived polymorphism is V
  VARIANT 11: note = Ancestral polymorphism is R, Derived polymorphism is W
  VARIANT 5: note = Ancestral polymorphism is I, Derived polymorphism is T
  VARIANT 1: note = Ancestral polymorphism is M, Derived polymorphism is V
MEVTIAEKKPRAAGDGGGLVDRLPEALLVEVLARVDVDGACSAAASCRSLYSAANAVLPALTSIDLSDFAPSNAILSRILAGNGAVCSLTVNCSLLDDSAASVIAWGSLRDLLLLKCSFSMSFFVGHATI

SEQ ID NO: 20251 - protein, 239 aa, Zea mays
  VARIANT 142: note = Ancestral polymorphism is A, Derived polymorphism is S
MDDYGNAIVVTGTAAPLKYNCRSVSPPSSVSSSCSPPPPPPPPTPPAAVQVVVGNVAPTVVLSPCAACKILRRRCADGCVLAPYFPPTEPAKFTTAHRVFGASNIIKLLQDLPESSRADAVSSMVYEAEARLRDPVYGCAGAVCRLQRQANELKVQLARAQADLLSAQAQHADLLALFCVEMANRRGNRQQQQQPSPPTTTVDGGGGSEFGGAAYGQTFYDSDDLDSATWPDHEAQLWT

SEQ ID NO: 20252 - protein, 279 aa, Zea mays
  VARIANT 46: note = Ancestral polymorphism is E, Derived polymorphism is Q
  VARIANT 116: note = Ancestral polymorphism is R, Derived polymorphism is H
  VARIANT 145: note = Ancestral polymorphism is V, Derived polymorphism is M
MTMMAPHPQPLPLAQPPAFGDTTLTKVFVGGLAWETHEGALRGHFQRYGDILEAVIISDKLTGRSKGYGFVTFKEADAAKKACEDATPVINGRRANCNLASLGAKPRPQPLQHVLRPSPPHAHALPSPHQPTPAIAVGSRSVSPVPWYYHPSTTRPPPPPAAHQQYHGVLPFYPAAATYGYSPNYVTDLSYNTKVGQAAAAGTAAGSYLQLQGHLAYQAAPAQGGMVPVYPFYHYPYHASHSQGLGVPAAHFLPPVSAAAVVSSKPTVVATPKAVEWSG

SEQ ID NO: 20253 - protein, 280 aa, Zea mays
  VARIANT 16: note = Ancestral polymorphism is V, Derived polymorphism is I
  VARIANT 25: note = Ancestral polymorphism is A, Derived polymorphism is T
  VARIANT 67: note = Ancestral polymorphism is A, Derived polymorphism is S
  VARIANT 83: note = Ancestral polymorphism is P, Derived polymorphism is L
  VARIANT 128: note = Ancestral polymorphism is L, Derived polymorphism is S
  VARIANT 139: note = Ancestral polymorphism is S, Derived polymorphism is F
MAKNYPTVSAEYSEAVEKARRKLRALIAEKSCAPLMLRLAWHSAGTFDVSSRTGGPFGTMKCPAELAHGANAGLDIAVRLLEPIKEEFPTLSYADFYQLAGVVAVEVTGGPEIPFHPGREVRFFIHFSLSLGFRQGLSSCFEISEGVGVKDKPQPPPEGRLPDATKGSDHLRQVFGKQMGLSDQDIVALSGGHTLGRCHKERSGFEGAWTTNPLVFDNSYFKELLSGDKEGLLQLPSDKALLSDPVFRPLVEKYAADEKAFFDDYKEAHLKLSELGYADA

SEQ ID NO: 20254 - protein, 374 aa, Zea mays
  VARIANT 278: note = Ancestral polymorphism is M, Derived polymorphism is K
MSGGGVDGAPVAEFRQTVTHGGRFLQYNIFGNLFEITHKYQPPIMPIGRGAYGIVCSVMNSETKEMVAIKKIANAFDNHMDAKRTLREIKLLRHLDHENIIGIRDVIPPPVPQAFNDVYIGTELMDTDLHHIIRSNQELSEEHSQYFMYQILRGLKYIHSANVIHRDLKPSNLLVNANCDLKICDFGLARPSSESDMMTEYVVTRWYRAPELLLNSTDYSAAIDVWSVGCIFMELINRQPLFPGRDHMHQMRLITEVIGTPTDDELGFIRNEDARKYMRHLPQFPRRPFVSLFPRMQPVALDLIERMLTFNPLQRITVEEALEHPYLERLHDVADEPICTDPFSFDFEQQALTEDQMKQLIFNEAIELNPNFRY

SEQ ID NO: 20255 - protein, 280 aa, Zea mays
  VARIANT 98: note = Ancestral polymorphism is P, Derived polymorphism is R
  VARIANT 94: note = Ancestral polymorphism is W, Derived polymorphism is R
MADESWRIPMLVQELAAKVQQPPSRYMQPEQYHPVSLDVGAETLEPIPVIDLSRLSTAGGADDDESGKLRLALQTWGALPVRVEPEDERNLVHWPQHPKTFRGLLHEYTLNCKRIKDCILGTTAKTLGLGEDCFARFNYYPPCPRPDLVFGVKPHSDSSGVLTILLIDKDVSGLQVLRDGVWHNNVPASPFMLLINVGDFMEIISNGVLRSPVHRAVSNAEKERISLAMFHGLDPDEEIEPAPAALLSENQPARYRTLKAKEYLLAGRIIKLISQPKIKK

SEQ ID NO: 20256 - protein, 347 aa, Zea mays
  VARIANT 11..347: note = Derived polymorphism lacks residues 11 to 347
MRLRPTPPQPQPTHKSREWCEKSIRPMPTSVATHATLLIKAAAAKPFFSPRPAARIPAPSPHPPPPPAGRRLPNTAAALAAAARRFRWPSAAASARGLCAPPHSGGEGMGSDAGAGARKRRDSAVNGLAKDVPPVNGMMMPKEEPATAPPRLLTLPTVLTIGRVAAVPLLISTFYMEGPWAATATTGIFLAAAVTDWLDGYIARKMQLGTPFGAFLDPVADKLMVAATLVLLCTKPLETSLLNDGPWLLTVPSIAIIGREITMSAVREWAASQNSEALEAVAVNNLGKWKTATQMTALTLLLASRDPSVPAQGALVAPGVALLYISAGLAIWSLVVYMRKIWRTLLK

SEQ ID NO: 20257 - protein, 281 aa, Zea mays
  VARIANT 60: note = Ancestral polymorphism is P, Derived polymorphism is L
  VARIANT 65..281: note = Derived polymorphism lacks residues 65 to 281
  VARIANT 126..281: note = Derived polymorphism lacks residues 126 to 281
  VARIANT 133..281: note = Derived polymorphism lacks residues 133 to 281
MAAAAPASSVKEVLPSPLTSASEPPPLFDGTTRLYVAYLCPFAQRAWIARNYKVVPSPSPPFSDLLKRFSLICGVFRERETETFFCSSPSVQGLQDKIKIVAIDLADRPAWYKEKVYPENKVPSLEHDNQVKGESLDLVKYIDSNFEGPSLLPEDHAKQQFAEELLGYTDAFNKAFYSCLVDREDVSEEAVAALDKIEDALGKFNDGPFFLGQFSLVDVAYVPFIERFQILYSNIKNYDVTKGRPNLQKFIEEVNKIDAYTQTKLDPQFLLEQTKKRLGIA

SEQ ID NO: 20258 - protein, 222 aa, Zea mays
  VARIANT 8..222: note = Derived polymorphism lacks residues 8 to 222
MRWPLAISTRRRPLLFVLLIALYTIPRTFSSRLVTLDTVEIFTTHEWFAKPTVAFRCNGANKTYLPDVTEAHTPYTFKGEESWQPLTELPEKKCKRCGLYEEGTFKPDAVFDEWEMCSSDFKGGKYTRFKEGQFNATFLCPNCTASTGHGNPRPSEDLETKKTSIAVIIIASVLASVLVVTALFGGFKYWQKKKRERDQVRFLKLFEEGDDLEDELGLSNEF

SEQ ID NO: 20259 - protein, 671 aa, Zea mays
  VARIANT 120: note = Ancestral polymorphism is L, Derived polymorphism is S
  VARIANT 124..671: note = Derived polymorphism lacks residues 124 to 671
  VARIANT 135..671: note = Derived polymorphism lacks residues 135 to 671
  VARIANT 145..671: note = Derived polymorphism lacks residues 145 to 671
  VARIANT 247..671: note = Derived polymorphism lacks residues 247 to 671
  VARIANT 250..671: note = Derived polymorphism lacks residues 250 to 671
  VARIANT 251..671: note = Derived polymorphism lacks residues 251 to 671
  VARIANT 254..671: note = Derived polymorphism lacks residues 254 to 671
MSWLRSAVHRAVEASGGHSSLLTRTVRTSLDTVVHHAGQAVAGGARLITGSRSYKSAKVAAKRLEEEALSCKGDERVQLLRRWLVALKETQRATTAVREPQFGDNPDQTAPLLAPNYLCSRELQDLYIDYDSGAEPMNFFHVFLYSQALECVVLSLIREAPTEEEVPLVSEVFGQVIRPFDVLMCLSGGKDVHNALLSSVKDLARLFSSYSDEVLAKRDELLQFAQGAISGLKINADIARLDNEITQLQQQINSMDALHATSIVNQNKKAQTATEGFRKAVSEVRLCSRMEELLLKKKSIHPGDSLETHFEKVDKLKVLSESLANSSAKAEKRIMENRLQKEESLIFRVTKTNEVSGIEKVYLFIEGNVYMRGLFLRVILKLRLQVNTKLKVATVKLKKTREERDQFDEASNQIVLHLKTKEDELSRSIASCKVEASTVSAWINFLKDTWKLQSLFEELREKQANEELDRCGLCFAKLMKYHVSASMEELSTSIDRIKTFVDNLKIFGNRSVSAEDGANGPSKQSNPRRYLEEEYLQTEKKVVAAFSLVDSIRAIYSSNQDYYKTRRDDTEVKNLFTSIDNLRIEFESVPRPVLQIEIKEQAEKKKRSPSLKVSASPSHSRSDSPIAAQLRTRLPSESESELAKFDQEYKADEISGWEFDDLEDEPTPGFL

SEQ ID NO: 20260 - protein, 330 aa, Zea mays
  VARIANT 125: note = Ancestral polymorphism is R, Derived polymorphism is W
MCPRATAQHCAAAMASVCSFVEEEYIDLDLSSCRDFEFRVRRSGAADELLCRGSLQRPPPAAPHKAAPPRPGGKAQEVDVGGCGGAAAGRRSAATVTPLQHSHSAGCREDTQTVVRLRAEGSRRRKAARTVHAKLLASRAFFRSLFARTSCTDDQCRGAQVRASPRAAVAPPGETKSVCNAAFGHIKNGYGYHSGSGRAALSTLRSSIEQEKLMDEEDVAVPAAARQRKSFSGVIKWRHPATKAKPLSSSTARKSSVVGGGGGGGPALKRSSSALSESEGLIQGAIAYCKRSQHQLGLARKSVSDAALCSASAPSWPSNPARSAGVAYCH

SEQ ID NO: 20261 - protein, 228 aa, Zea mays
  VARIANT 210: note = Ancestral polymorphism is Y, Derived polymorphism is C
MKQLHRQSSISKQHRPHHHRTSLSRTLASYLLREQRLLFVLLGFLLASSFFFLYPHSAAGSSSATNITAAFARKNPRSSGASSSARRLPVGVRKPSLRIVVTGGAGFVGSHLVDKLLARGDSVIVVDNFFTGRKDNVAHHLGNPRFELIRHDVVEPILLEVDQIYHLACPASPVHYKFNPIKTIISSPLRCPRIIRPHPHRNWIRYICLYWFIYGHGYDFCDAHFTWG

SEQ ID NO: 20262 - protein, 305 aa, Zea mays
  VARIANT 232: note = Ancestral polymorphism is T, Derived polymorphism is I
  VARIANT 204..305: note = Derived polymorphism lacks residues 204 to 305
  VARIANT 11: note = Ancestral polymorphism is A, Derived polymorphism is V
  VARIANT 10: note = Ancestral polymorphism is R, Derived polymorphism is T
  VARIANT 2: note = Ancestral polymorphism is A, Derived polymorphism is D
MAKNAVQTVRAVLCLVLALAVANCAFAGRFLDDEQAAAPLPADPLPAPTDPPTDPAVAPAGAGAGAAATGNAGAASDHPLTFFMHDILGGSQPSGRIVTGVVASAAANGQLPFARPNTNIFPIQGAVPLPQGASSLINGNNAPYVAGLGGTSSAVVQNNGNPANGGNKNIPFVNAGDLPSGATLQNLLFGTTTVIDDELTEGHELGAGVVGRAQGFYVASSQDGTSKTIVLTAMFEGPEAPHGGDTLSFFGVHRMAAPESHIAVIGGTGKYENAKGFAAIQTLHPGDEHTTDGVETLLQFNVHLI

SEQ ID NO: 20263 - protein, 275 aa, Zea mays
  VARIANT 110..275: note = Derived polymorphism lacks residues 110 to 275
  VARIANT 69: note = Ancestral polymorphism is G, Derived polymorphism is R
  VARIANT 50: note = Ancestral polymorphism is E, Derived polymorphism is K
  VARIANT 29: note = Ancestral polymorphism is I, Derived polymorphism is V
  VARIANT 23: note = Ancestral polymorphism is G, Derived polymorphism is E
  VARIANT 15..275: note = Derived polymorphism lacks residues 15 to 275
MAVNWELQGCCHRDQRIFIAAVGVSTVVILLLWRTFLLTPFKLITVFLHETSHALACKLTCGDFFCIKGSYFISSRTGVLDSLMGLLFSYPQVSLDSCCSCPVLQRSSQEFWSMSANCLQKCALLGSTLQPPDLGSSFWGMVFILASTNLLTTRIAAGCFILALFIVLFVADNWFLRWLCLGFIVFIAVVWVIQEFTSFHILKYVILFIGVMNSLFSVYDIYDDLISRRVNTSDAEKFAEICPCPCNGFAWGVIWGFISFIFLCASIYLGLVILS

SEQ ID NO: 20264 - protein, 81 aa, Zea mays
  VARIANT 77: note = Ancestral polymorphism is S, Derived polymorphism is N
  VARIANT 1: note = Ancestral polymorphism is M, Derived polymorphism is R
MAPGAGDDSDPASYIHTVQHLIERCMTFGMSMEECMEALAKRADVQPVVTSTVWKELEKENKEFFDKYRQWISEKRSGSTS

SEQ ID NO: 20265 - protein, 1413 aa, Zea mays
  VARIANT 299..1413: note = Derived polymorphism lacks residues 299 to 1413
  VARIANT 410..1413: note = Derived polymorphism lacks residues 410 to 1413
  VARIANT 509..1413: note = Derived polymorphism lacks residues 509 to 1413
MVPGGLFGWASPHVQPLTPVSEVSEPPESPSPYGDGPAGDAGVGAREGEGAGAGEEEVEDDEVEPPPAAVSFWRLFEFADGVDWALMAAGALAAAAHGAALVVYLHYFGRALNLLDSERVGSSLYGRSDELLSRFKEHALYIVFIAAGVFVAGWIEVSCWILTGERQTAVIRSKYVHVLLNQDMSFFDTYGNNGDIVSQVLSDVLLIQSAISEKVGNYIHNMATFVGGLIVGLLNCWQIALLTLATGPLIVAAGGISNIFLHRLAENIQDAYSEAASIGEQAISYIRTLYAFTNETLAKYSYATSLQATLRYGILISLVQGIGLGFTYGLAICSCALQLWVGRHLIHRGKADGGEVVVALFSVILSGLGLNQAATNFYSFDQGRIAAYRLYEMISRSTSSTNQEGTTLPQVQGNIEFRNVYFSYLSRPEIPILSGFFLTVPARKTVALVGRNGSGKSSIIPLMERFYDPTLGEVLLDGENIKNLKVEWLRSQIGLVTQEPALLSLSIRENIAYGRSATFDQIEEAAKTAHAHGFISSLEKGYETQVGRAGLALTDEQKIKISIARAVLSNPSILLLDEVTGGLDFEAEKAVQEALDVLMLGRSTIIIARRLCLIKNADYIAVMEEGHLVEMGTHDELLNLDGLYAELLRCEEATKLPKRMPTKNSREHKSLQSEDALVSQYFQESSSPKMAKSPSLQRTHGMLQFWRSDANRNSHDSPKDLSPPSEQTMDNGIPMVAIETERTPSIKRQNSFEMKLPDLPKVDVHPIQRQSSKNSEPDSPISPLLTSDPKNERSHSQTFSRPQSEQDDTSSERSELDEVQHQKPPSFWRLATLSIAEWPYALLGTIGAAIFGSFNPLLAYTIALIVSAYYQIEIRDMRHEVNRWCLFIVGMGVITVLVNWLQHFYFGIMGEKMTERIRRMMFSAMLRNEVGWFDKDENNADTLSMRLANDATFVRAAFSNRLSIFIQDTAAVSVALLIGMLLGWRVALVALATLPVLVISAIAQKLWLAGFSKGIQEMHRKASLVLEDAVRNIYTVVAFCAGDKIMELYRLHLGKILKQSLVQGLAIGFGFGLSQFLLFACNALLLWYTAISVDRQRLTIATGLKEYILFSFASFALVEPFGLAPYILKRRKSLTSVFEIIDREPKIDPDDTTGLKPPNVYGSIEFKSVDFSYPVRPDILVLSNFNLKVSGGQTLAVVGVSGSGKSTIISLIERFYDPVSGQVLLDGRDLKSFNLRWLRSHMGLIQQDPVIFSTTIRENIIYARHIATEAEIKEAARIANAHHFISSLPHGYDTHVGMRGVDLTPGQKQRIAIARVVLKNAPILLLDEASSAIESESSRVVQEALDTLVMGNKTTILIAHRAAMMKHVDNIVVLNGGRIVEQGTHDSLMDQNGLYVRLMQPHFGKGLRQHRLV

SEQ ID NO: 20266 - protein, 306 aa, Zea mays
  VARIANT 69..306: note = Derived polymorphism lacks residues 69 to 306
MPQRHSKNNNDLAFFTYEEKRKLGYGTQRERLGKDSIKPFDACCLCLKPLIGPLCCPKGHTFCKECILECLLSQKKDIKRKLAAHEAQKKQEKEEEEEKLILQKAKELDAFDQQNHGAVPQYHDRSGSQYKNGFHGANSVKVTSFEEEALRNMKAFWLPSATPEATVKVDLPSTDTVCPEGQEKLKLKSLFPISFTEETADQKSSKAGNSCSYMCPSCKSTLTNTMSLVAVSTCGHVFCKKCSDKFLVKDKACLECSKPFRERNLVPLEKGGTGFAAHDERLEARDFKYLGSGSGLGLVKPAPKTY

SEQ ID NO: 20267 - protein, 305 aa, Zea mays
  VARIANT 121..305: note = Derived polymorphism lacks residues 121 to 305
  VARIANT 88..305: note = Derived polymorphism lacks residues 88 to 305
MPQRHSKNNNDLAFFTYEEKRKLGYGTQRERLGKDSIKPFDACCLCLKPLIGPLCCPKGHTFCKECILECLLYQKKDIKRKLAAHEAQKKQEKEEEEEKLILQKAKELDAFDQQNHGAVPQYHDRRGSQDKNGFHGANNVNATSFEDEALRCMKAFWLPSATPEATVKVDVPSTDTVCPEGQEKLKLKSLFPISFTEETADQKSGKAVEKSYMCPSCKSTITNTMSLVAVSTCGHVFCKKCSDKFLVKDKACLECSKPFRERNLVPLEKGATGFAAHDERLVARDFKHLGSGSGLGLVKPAPKTY

SEQ ID NO: 20268 - protein, 305 aa, Zea mays; identical to SEQ ID NO: 20267
  VARIANT 121..305: note = Derived polymorphism lacks residues 121 to 305

SEQ ID NO: 20269 - protein, 305 aa, Zea mays
  VARIANT 238: note = Ancestral polymorphism is C, Derived polymorphism is Y
  VARIANT 235: note = Ancestral polymorphism is H, Derived polymorphism is N
  VARIANT 44: note = Ancestral polymorphism is C, Derived polymorphism is S
MPQRHSKNNNDLAFFTYEEKRKLGYGTQRERLGKDSIKPFDACCLCLKPLIGPLCCPKGHTFCKECILECLLYQKKDIKRKLAAHEAQKRQEKEEEEEKLILQKAKELDAFDQQNHGAVPQYHDRRGSQDKNGFHGANNVNVTSFEDEALRCMKAFWLPSATPEATVKVDVLSTDTVCPEGQEKLKLKSLFPISFTEETADQKSRKAVEKSYMCPSCKSTITNTMSLVAVSTCGHVFCKKCSDKFLVKDKACLECSKPFRERNLVPLEKGATGFAAHDERLVARDFKHLGSGSGLGLVKPAPKTY

SEQ ID NO: 20270 - protein, 159 aa, Zea mays
  VARIANT 50: note = Ancestral polymorphism is K, Derived polymorphism is N
MDSTGTGAGGKGKKGAAGRKVGGPRKKSVSRSVKAGLQFPVGRIGRYLKKGRYAQRVGTGAPVYLAAVLEYLAAEVLELAGNAARDNKKTRIIPRHVLLAIRNDEELGKLLGGVTIAHGGVLPNINPVLLPKKTAEKASSVGSKEAKSPKKAAKSPKKA

SEQ ID NO: 20271 - protein, 148 aa, Zea mays
  VARIANT 56: note = Ancestral polymorphism is K, Derived polymorphism is N
MAPKAEKKPAEKKPAAEEKAEKTTAGKKPKSEKRLPASKSSGKEGGEKKGKKKAKKSVETYKIYIFKVLKQVHPDIGISSKAMSIMNSFINDIFEKLAGEAAKLARYNKKPTITSREIQTSVRLVLPGELAKHAVSEGTKAVTKFTSN

SEQ ID NO: 20272 - protein, 216 aa, Zea mays
  VARIANT 63: note = Ancestral polymorphism is A, Derived polymorphism is V
  VARIANT 70: note = Ancestral polymorphism is E, Derived polymorphism is V
  VARIANT 89: note = Ancestral polymorphism is T, Derived polymorphism is I
MATALMVAATTSCSPGRAAPRLKPVASSSSSSSSSSARPRRPLAQQLPRLLATAAAAAAVAAAPLPALAEQMEKAALFDFNLTLPAIATEFLLLMVALDKLYFTPLGKFMDERDAKIRGELGDVKGASEEVKQLEDQAAAIMKAARAEIAAALNKMKKETTAELEAKLDEGRSRVEAELVEALANLEAQKEEAVKALDAQIASLSDEIVKKVLPSA

SEQ ID NO: 20273 - protein, 735 aa, Zea mays
  VARIANT 15..735: note = Derived polymorphism lacks residues 15 to 735
MNGRPASARTVSRTRRALRRLKGGGGLPVASLGPSPRRNRRVAETSSPVSPPHRSLSRAPLGSSLQVCLLLSFNMPASEMEAPASAHASAAAADDSQEDSAPTAAVAAAADEAQPAAAAVPALYVGDLHEDVAEEHLFEAFSKIGTVTSVRVCRDNATSRSLRYGYVNYFSRADAVVALDKLNHSLVLDKPIRVMWSNRDPDARRSGVGNIFVKNLSSSVDNASLQELFSKFGDVLSCKVAKNEDGTSRGYGFVQFTSQESADEAIGNLNGSLFNDRKLHVATFIKKSERSANNDDKFTNLYMKHLDDDITEELVKLKFSQFGSIVSVKIMKRPDGSSLGFGFVSFQNPESAIKAQSTMNGMLLGSKALYVARAQKKEERKQYLQRLHEEKRNEIMTRCNESNVYIKNIHDEVDDDALRARFVEFGNITSAKVMRDDKGISRGFGFVCYSTPEEAKSAVNNMRGVMFFGKPLYVAIFQRKEERKAKLQQHFAQLARMVGPANSMIPTGYPQVYFAHPSTHIPQGPPRHGFVYPPMGLSHEWRPSMFPPAPNLQQIHSPVMPNSPRHYRSNRGRMGGNMMPLPHAVHTMNYMTHPQPAKEFMSLPRQRFNHPKYFSNDVMANSLAIHQSDPVSTMNDSFSNYLASAPPAEQKNLLGNRLYPLVERHQPELASKITGMLLELDNSEVVTLLCSSEMLSVKVDECVQLLQATKPKAEDHEALHPGFMLEPRPPSVNAS

SEQ ID NO: 20274 - protein, 453 aa, Zea mays
  VARIANT 16: note = Ancestral polymorphism is T, Derived polymorphism is M
  VARIANT 26..453: note = Derived polymorphism lacks residues 26 to 453
  VARIANT 154..453: note = Derived polymorphism lacks residues 154 to 453
MASTAARRLRELQAQTGNKTCVDCAQRNPQWASVSYGVFMCLECSGKHRGLGVHISFVRSVTMDSWTEAQLRKMEAGGNDRLNAFLTARGVPKETSHVAKYNSNAAAAYRDRIAALAEGKPWTDPPVVKETPGSGAPAPARKPPLHASGGGGGWDDWDDDFRSDMRRNQSVGSFAAAGAQSGRQPPRSKSTQDIYTRQQLEASAANKDDFFARRMAENESKPEGIPPSQGGKYVGFGSSPAPSANRNGGAAQGDVLQVVSQGFGRLSLVAASAAQSAASVVQVGTKEIQSKMRDGGYDQKVNETVSVVANKTAEIGSKTWGIMRGVMAMASQKVEEYAKEGGMSGWGEDWQRSEQNGEPYQRFEHATDSNSLNSSQNSSWKNNNSSSWDDWDDQGKKGEPAKPHQSSDSWAGWDDGKDDGFDSPGYNNHNSSNKGSNHNGTSGGSFWREGGFR

SEQ ID NO: 20275 - protein, 254 aa, Zea mays
  VARIANT 123: note = Ancestral polymorphism is R, Derived polymorphism is C
  VARIANT 140: note = Ancestral polymorphism is S, Derived polymorphism is Y
  VARIANT 145: note = Ancestral polymorphism is P, Derived polymorphism is L
  VARIANT 160: note = Ancestral polymorphism is V, Derived polymorphism is A
MAETLDMTLDDIIKNNKKSNPSSRGARRSRGVSAPGGGTGGVGPTRRPFKRAGNRQAPYQPPKAPDAAWQHDMYPAVAAGGGGGGGRVSALETGAKLYISNLDFGVSNEDIKELFSELGDLKRFSINYDRSGRSKVQMPSYSLLLVSYIHLTSRSLTFVVPRTSQGTAEVVFARRSDAVAAVKKYDNVQLDGKPMKIEIVGTNTPAAAAAHPVPNGGHARNAARRYISHLIIHPPSLSFVNIICSGMFGSIQND

SEQ ID NO: 20276 - protein, 274 aa, Zea mays
  VARIANT 260..274: note = Ancestral polymorphism lacks residues 260 to 274
MSPSTRVGKYQCELCGIWKPTGGKSITRVGTGFLGWRKHASEGRAHNTHRGSSSTPRLVSSFRFSRRSPQPPPSPSPPASPPLLDPAAAAASPTDLRKKTQICEINVAGPSVGNETNVAGLTLDREACEVQSPPSGTSVHGSGKKRKKSQVASVLDDYLEHKKNQTNKTVEAFLEKKTRGEESMDRCIHIFEAMEDLTDEEKAIAAEVFENELYREMFLKLTIHNVRLIWLRRKISFVECLFLLEEVATIVQLKLTKVYQRFLLLFCLNFSKSQ

SEQ ID NO: 20277 - protein, 350 aa, Zea mays
  VARIANT 242..350: note = Derived polymorphism lacks residues 242 to 350
  VARIANT 240..350: note = Derived polymorphism lacks residues 240 to 350
  VARIANT 166..350: note = Derived polymorphism lacks residues 166 to 350
MAQKETNGSNGDHISTRPPPTPSPLRFSKFFQANLRILVTGGAGFIGSHLVDKLMENEKHEVIVADNFFTGSKDNLKKWIGHPRFELIRHDVTEPLLVEVDQIYHLACPASPIFYKHNPVKTIKTNVIGTLNMLGLAKRVGARILLTSTSEVYGDPLEHPQTEAYWGNVNPIGVRSCYDEGKRVAETLMFDYHRQHGIEIRIARIFNTYGPRMNIDDGRVVSNFIAQAVRGEPLTVQRPGTQTRSFCYVADMVDGLIKLMNGNKTGPINLGNPGEFTMLELAENVKELINPDVTVTMTENTPDDPRQRKPDITKAKEVLGWEPKIVLRDGLVLMEDDFRERLTVPKKTKA

SEQ ID NO: 20278 - protein, 141 aa, Zea mays
  VARIANT 62..141: note = Derived polymorphism lacks residues 62 to 141
  VARIANT 49: note = Ancestral polymorphism is R, Derived polymorphism is T
MFSPHGSLASVLHGTKEPLKWKVRFKIALGIAKGLLYLHEGCHRRIIHRDIKASNILLTEDYQPQISDFGLAKWLPDKLTHHVVYPIEGTFDERLCVRVTRTWDFYDPGDDKKLLHSDLVLLDEEQEKKEDKSDKTEDEKN

SEQ ID NO: 20279 - protein, 652 aa, Zea mays
  VARIANT 252: note = Ancestral polymorphism is F, Derived polymorphism is S
  VARIANT 349: note = Ancestral polymorphism is R, Derived polymorphism is S
MAGNKGEGPAIGIDLGTTYSCVGVWQHDRVEIIANDQGNRTTPSYVAFTDTERLIGDAAKNQVAMNPTNTVFDAKRLIGRRFSDPSVQADMKMWPFKVVPGPADKPMIVVTYKGEEKKFSAEEISSMVLTKMKEIAEAYLSTTIKNAVITVPAYFNDSQRQATKDAGVIAGLNVTRIINEPTAAAIAYGLDKKATSTGEKNVLIFDLGGGTFDVSILTIEEGIFEVKATAGDTHLGGEDFDNRLVNHFVMEFKRKHKKDISGNPRALRRLRTACERAKRTLSSTAQTTIEIDSLYEGIDFYATITRARFEELNMDLFRKCMEPVEKCLRDAKMDKSQIHDVVLVGGSTRIPKVQQLLQDFFNGKELCKSINPDEAVAYGAAVQAAILSGEGNQKVQDLLLLDVTPLSLGLETAGGVMTVLIPRNTTIPTKKEQVFSTYSDNQPGVLIQVYEGERTRTKDNNLLGKFELTGIPPAPRGVPQINVTFDIDANGILNVSAEDKTTGKKNKITITNDKGRLSKEEIERMVQEAEKYKTEDEEVKRKVEARNALENYAYNMRNTVRDEKIASKLPADDKKKIEDTIEDAIKWLDGNQLAEAEEFEDKMKELESICNPIISQMYQGGAGAAGMDEDVPGGGAGNGGGSGAGPKIEEVD

SEQ ID NO: 20280 - protein, 534 aa, Zea mays
  VARIANT 425: note = Ancestral polymorphism is F, Derived polymorphism is S
MGESLLTALSMDTTTAHHPHQGPFTFLSMDTASHDHFDLFLPPQGPFRRCLHAAAVAPPDINLPLTADPSPPPPASHDANVDVLDAGLGGPQHYDSDSPAAAGPVLAPAAAAATVIAVSHTKGSGSSVARKCVKRNDSIWGAWFFFTHYFKPVMSTDKGGKAKAATTGGNGNSASATLDAFLVQHDMENMYMWIFKERSENALGKMQLRSFMNGHSRLGDPQFPFSADKGFVRSHRMQRKHYRGLSNPQCIHGIEIVRAPNLAGVPESDLKRWMELTGRDANFSIPAEASDFESWRNLPSTEFELERLAAVVPTKSSSHGHHKRLLNGSGLNLSTQPSNHSSGDAMEIATICNKRRKDSSPSATEEDCSNSNSDKAQDMDVSHTFEPSWMNDFTGVMRHASGPVTAAKTIYEDSKGYLIIVSLPFSDFQKVKVSWKNTLTNGIVKVSCISVGRMPLLKRHDRTFKLADPSPEHCPPGEFVREIPLPTRIPEDATLEAYRDETGTGLEIIVPKYRVGPEEHEVHVSMRPPSSWCQ

SEQ ID NO: 20281 - protein, 143 aa, Zea mays
  VARIANT 141..143: note = Derived polymorphism lacks residues 141 to 143
  VARIANT 118: note = Ancestral polymorphism is L, Derived polymorphism is Q
  VARIANT 114: note = Ancestral polymorphism is V, Derived polymorphism is A
  VARIANT 112: note = Ancestral polymorphism is A, Derived polymorphism is V
  VARIANT 111: note = Ancestral polymorphism is A, Derived polymorphism is V
  VARIANT 108: note = Ancestral polymorphism is K, Derived polymorphism is Q
  VARIANT 105: note = Ancestral polymorphism is P, Derived polymorphism is R
  VARIANT 100: note = Ancestral polymorphism is I, Derived polymorphism is V
  VARIANT 87: note = Ancestral polymorphism is I, Derived polymorphism is N
  VARIANT 44: note = Ancestral polymorphism is G, Derived polymorphism is E
  VARIANT 29: note = Ancestral polymorphism is A, Derived polymorphism is T
  VARIANT 23: note = Ancestral polymorphism is R, Derived polymorphism is Q
  VARIANT 17: note = Ancestral polymorphism is L, Derived polymorphism is V
  VARIANT 16: note = Ancestral polymorphism is L, Derived polymorphism is V
  VARIANT 13: note = Ancestral polymorphism is L, Derived polymorphism is F
MVTIGCSMAIPALVQLLSNGSQRGKKDAATTLFKLCSIYQGNKGKAVRAGLVPILLELLMETESGMVDEALAILAILSGHPEGKAANGAASAVPVLVGVVRNGSPRSKENAAAAMVHLYNGVSSSNSILLKHRSRASCLCWRS

SEQ ID NO: 20282 - protein, 336 aa, Zea mays
  VARIANT 9..336: note = Derived polymorphism lacks residues 9 to 336
MSRLASGLQRPRRSLSPCEVLWCALASCGLVLFSQLAVAMVPRLFPSLYLLAMLPIAGLVLLAAIVLGRLWRRFIGVTASAPLFVLFNILLSWGVYIFVIRRSELLWGKQHCAYVYCCCGSVICQIFCRNFFSAGHANKCRMCTASVGILQVSRILSCDPGIFACDSSYLAEAGCKDFVEAIYTSERLPMLSRVRQCTWCKANIRGYDHHCPAFGTCIGQKNHRLFMALLTGFVVAESTYTMCSTKYITICISSGTIKSENPVSLNMVISTMLFSILQVLWQLKGQIFQINWKKYPEFQMKEQPRSDSEVKSMNPYDKGMLCNIRDFLKPVLSTKT

SEQ ID NO: 20283 - protein, 357 aa, Zea mays
  VARIANT 304: note = Ancestral polymorphism is L, Derived polymorphism is P
  VARIANT 301: note = Ancestral polymorphism is S, Derived polymorphism is L
  VARIANT 249: note = Ancestral polymorphism is G, Derived polymorphism is R
  VARIANT 248: note = Ancestral polymorphism is G, Derived polymorphism is A
  VARIANT 224: note = Ancestral polymorphism is D, Derived polymorphism is V
MESAGGEARPVLPPPPPPVQELAGAANDVPARYVARAGNEPKVTVTAPVPVIDLARLCQPGGGADEASKLRLALESWGLFLVTNHGIEATLMDAMMDASREFFRQPLQEKQKHSNMIDGKHFQLQGYGNDRVASEDQVLDWCDRLYLLVEPQEDRSLDLWPACLRDVLHDFTTECTRVKDCLLREMAKALDELGDDDDYFIDQFGDRADTHARFSYYPPCARPDLVFGLRPHSDGTFLSLLMLDDSVGGLQVFRDGAWYDVRTRPHTLLVNLGDQIEIISNGIFKSPVHRVVTNAEKERLSVVLFYSIDPEREIRPADKLIDENHPALYKKVKVKEYTAGLYEHFSRGKLVKETAKI

SEQ ID NO: 20284 - protein, 466 aa, Zea mays
  VARIANT 308..466: note = Derived polymorphism lacks residues 308 to 466
  VARIANT 147..466: note = Derived polymorphism lacks residues 147 to 466
  VARIANT 113: note = Ancestral polymorphism is C, Derived polymorphism is Y
  VARIANT 104..466: note = Derived polymorphism lacks residues 104 to 466
  VARIANT 93: note = Ancestral polymorphism is P, Derived polymorphism is L
MGSKDQGGGAASSGGGFFSSFAAGMRSWGTAVHKSVNGLLGYEGLEVINPDGGTDDAEEEALRGRWKQEDRDSYWKMMHKYIGSDVTSLVTLPVIIFEPMTMLQKMAELMEYCELLDKADECEDPYMRMVYASTWAVSVYFAYQRTWKPFNPILGETYEMVNHQGITFLAEQVSHHPPMGAAHCENEHFTYDITSKVKTKFLGNSLEIYPVGRTRVTLKKSGVVLDLVPPLTKVNNLIFGRTWVDSPGEMVMTNLTTGDKAVLYFQPCGWFGAGRYEVDGYVYSAAEEPKIMITGKWNKSLSCQPCDQEGDPLPGTELKEIWRVAPAPQNDGYQYTHFAHKINSFSTAPKKLLASDSRLRPDRYALEKGDMSKSGSEKSRLEEQQRAEKRTREAKGEQFTPRWFNVTDAVASTPWGDLEICEYSGRYTEHRAAIDSSNSTDDDDEIDVTSVEFDPWQYGGSSSSPQ

SEQ ID NO: 20285 - protein, 280 aa, Zea mays
  VARIANT 35: note = Ancestral polymorphism is G, Derived polymorphism is D
MEFEDRCHKVQEPKFDCLLFDLDDTLYPLSSGIADHVKKNIEDYMVEKLGIDESKIENLGNLLYKNYGTTMAGLRAIGYSFDYDEYHAFVHGRLPYDNIKPDPVLKHILKNLPIRKLIFTNGDKVHAVRALERLGLEDCFEGIICFETLNPPCPPQGDREAEIFDIAGHFARSGAAAELPKTPVLCKPNVDAMEEALRIANVNPHKAIFFDDSVRNIQAGKQIGLHTVLVGKSQRVKGADHALESIHNVREALPGLWEEAEKAEDVLYAERVAMETSVTA

SEQ ID NO: 20286 - protein, 350 aa, Zea mays
  VARIANT 159: note = Ancestral polymorphism is D, Derived polymorphism is V
  VARIANT 307..350: note = Derived polymorphism lacks residues 307 to 350
MAAEINGGFLAAGGPRQHRGGLGCGRCFQNISLLHGLGIKFVLVPGTHIQIDKLLSEIGNKAKYVGQYRITDEDARKAAMDAAGRIRLTIEAKLSPGPPMLNLRRHGVIGRWHGLVDSIASGNFLGAKRRGVVNGIDYGFTEEVTKIDVSRIRERLDSDSIVVISNMGFSSSGDVLNCNTNEVATACALALEADKLICVVDGQVFDEHGRAIQYMSIEEADFLIRKRARQSDIAASYVKVVDEEGINSLHKGDNRPSLSPKAYINGYAASFRNGLGFNNGNGIYSGEQGFAIGGEERLSRSNADPFQNGLGFNNGNGIYSGEQGFAIGGEERLSRSNGYLSELVAAACVP

SEQ ID NO: 20287 - protein, 99 aa, Zea mays
  VARIANT 4: note = Ancestral polymorphism is Y, Derived polymorphism is C
  VARIANT 15: note = Ancestral polymorphism is S, Derived polymorphism is R
  VARIANT 22: note = Ancestral polymorphism is R, Derived polymorphism is C
  VARIANT 39: note = Ancestral polymorphism is S, Derived polymorphism is L
  VARIANT 89: note = Ancestral polymorphism is V, Derived polymorphism is M
MELYDDEKWKFSKKSRNNGSRRVPGAGAGGGGDSLLKRSSSMRDAPAIGRGAAAGAGGCAAQQPPSFSSRCAGLVKEQRARFYIMRRCVTMLVCWKDRS

SEQ ID NO: 20288 - protein, 123 aa, Zea mays
  VARIANT 38..123: note = Derived polymorphism lacks residues 38 to 123
  VARIANT 61..123: note = Derived polymorphism lacks residues 61 to 123
MFHALIQILALKITCCRMKAIEHAEQQTHGTTCEDLYQTMSSCGRDLVLLQGWDKKKRRGESSTSLTITSNGRQIGIEGGRERGTAGEEYSLEKASPFFMVTRWQANHANEYRLGKLSGEGVY

SEQ ID NO: 20289 - protein, 96 aa, Zea mays
  VARIANT 20: note = Ancestral polymorphism is S, Derived polymorphism is G
  VARIANT 19: note = Ancestral polymorphism is L, Derived polymorphism is P
  VARIANT 12: note = Ancestral polymorphism is P, Derived polymorphism is S
  VARIANT 10: note = Ancestral polymorphism is W, Derived polymorphism is R
MWTNERHITWTPISCHYLLGCSFISERGRGCGLGAKEEREYWAAAGCERGGGSFHQSVHPHPQRLMLTRWIRRGYRSGEKLTIDQEFEQYFSNLML

SEQ ID NO: 20290 - protein, 651 aa, Zea mays
  VARIANT 137..651: note = Derived polymorphism lacks residues 137 to 651
  VARIANT 48..651: note = Derived polymorphism lacks residues 48 to 651
MSFVFRGSRADIEAGGFTGFAPERRTMLWIVLGAFLMATSLRMYATCQQLAHAAAANSFLGHTELRVHVPPTIALATRGQLQSLRLQLALLDREFDDLDYDTLRALDADNSLHVPSMSEEEINSLPVFKYKVQAQQGNAPARKSDEASQLSVSSTGSGNEKKQDGLKADGTGKTPQDELTCSVCLEQVMVGDLLRSLPCLHQIRERETRDVNQVKCIKDEANQLLVKNEEIKNIWKEYFNKLFNGGNESSTIELGKPFDDNNRGFVRRIQEYEVKEALKRMKVGKAMGPDGIPIEVWRCLGDIAIVWLTKLFNTIFRTNRMPDEWRRSTLVPIFKNKGDVQSCTNYRGIKLMSHTMKLWERVIEHHLRNMTGVTQNQFGFMPGRSTMEAIFLLRQLMERFREQKKDLHMVFIDLEKAYDKTLEAKGFRLSRSKTEYMKCDFSAMGYEDGDVSLDGQVVPKKDTFRYLVSMLQKEGDIDEDVSHRIKAGWLKWRQAAGVLYDPWVPHKLKGKFYRTTIRPAMLYGAECWPTKRRHVQQLSVAEMRMLRGICGHTRRDRVRNDDIRERVGVASIEEKLMQHRLRWFGHIQRRPEEAPVHIGIIRRPENVKRGRGRPTLMWTEAVKRDLKEWNIDKELAVHRKGWKCAIHVPEP

SEQ ID NO: 20291 - protein, 203 aa, Zea mays
  VARIANT 185..203: note = Derived polymorphism lacks residues 185 to 203
  VARIANT 159: note = Ancestral polymorphism is G, Derived polymorphism is D
  VARIANT 151: note = Ancestral polymorphism is V, Derived polymorphism is G
  VARIANT 119: note = Ancestral polymorphism is A, Derived polymorphism is V
  VARIANT 113: note = Ancestral polymorphism is G, Derived polymorphism is R
  VARIANT 111: note = Ancestral polymorphism is R, Derived polymorphism is L
  VARIANT 100: note = Ancestral polymorphism is S, Derived polymorphism is L
  VARIANT 72: note = Ancestral polymorphism is S, Derived polymorphism is Y
MEACTDVVPTLFLHHFYRNHDHIASILFITSFTSIGCVSATRRGVGLRCRGQDLGGEGAPGGDNGKAVSSVSVLPLAPLRPLPLRRAARNVLEGGGRRALSPLLLARYGLRRGRSAAAAVVGEAELALEEADAAMRVATDDDSITATLVSVLLTLAFVGLSILTLGDFLQKREKEKFEKEKAEKQKEEARKKRAKSRQKRRNY

SEQ ID NO: 20292 - protein, 484 aa, Zea mays
  VARIANT 32: note = Ancestral polymorphism is A, Derived polymorphism is D
  VARIANT 179..484: note = Derived polymorphism lacks residues 179 to 484
  VARIANT 184: note = Ancestral polymorphism is L, Derived polymorphism is V
  VARIANT 204: note = Ancestral polymorphism is T, Derived polymorphism is M
MSVPGLWAAVAAVAVVIIDALVRRAHRWAWEASLGGSRRARLPPGDMGWPVVGAMWAFLWAFKSGNPDSFIGSFIRRFGRTGVYMTFMFSKPTVLVATPEACKRVLMDDDSFLEGWPRATVALIGRKSFLTLPCEEHRRLRKLTAAPINGFDALTTYLGFIDRTVVATLRGWSDAGEIEFLTELRRMTFKIIVQIFLTAADDATTLALESSYTDLNYGMRAMAINLPGFAFHRAFKARKKLVSVLQGVLNERRARKRLPRSSVDMMDRLIDAEDEHGRRLDDEEIIDILVMYLNAGHESSGHICMWATVYLQKHPEIFAKAKAEQEEIMRSIPSSQMGLSLRDFRRMEYLSQVIDETLRLVNISYVSFREATKDVFVNGYLIPKGWNVQLWYRSVHMDPEVYRDSKEFNPSRWEGYTPRAGTFLPFGLGTRFCPGNDLAKLEISVFLHHFLLGYKLTRTNPNCRIRYLPHPRPVDNCLAKITRV

SEQ ID NO: 20293 - protein, 357 aa, Zea mays
  VARIANT 5: note = Ancestral polymorphism is G, Derived polymorphism is D
  VARIANT 17..357: note = Derived polymorphism lacks residues 17 to 357
  VARIANT 41..357: note = Derived polymorphism lacks residues 41 to 357
  VARIANT 50..357: note = Derived polymorphism lacks residues 50 to 357
  VARIANT 131: note = Ancestral polymorphism is A, Derived polymorphism is T
MVAYGNEEADGKKIQIQLTGFMEKNTMKFMKELWSLLLSAQQNASGVPQQFLDEKEAEIHKKKDGDAGNSRSYGDPVASALNSTNFNIEEEKDNDFKRTSRPKNSSCTKEITIYNSKVSCSTQILTRKEQTTVPISRKPQAMVSVSNKTSVPISKTAEEVTKLTEDLFCKSTFIATGKEDCRSPSRSCRSLSRDIEKETNGTPFTKNRAVHSRVREQKTDDNDRDGARIGGHHSPDFEHRLSKSVRSPNNEERNSTLDSGKGVQKKHPDQLSESSEDELAGRRTKRQTDSPDDHRGKHNSPTRIENDDSYSKNGRNSEHVMRGLHDGSDDAKKYLSKVNEDSQSEDGSPSKKKLRKE

SEQ ID NO: 20294 - protein, 87 aa, Zea mays
  VARIANT 33: note = Ancestral polymorphism is C, Derived polymorphism is R
  VARIANT 19: note = Ancestral polymorphism is G, Derived polymorphism is E
  VARIANT 12: note = Ancestral polymorphism is A, Derived polymorphism is V
MACGFLEMGTVVCSFLGMGTVACAFVEMGTLACAFVEMGTLAYAFLVMGTLACALLEMEMDVYLMMVISCEEVISGVKMEMDILTRK

SEQ ID NO: 20295 - protein, 343 aa, Zea mays
  VARIANT 169: note = Ancestral polymorphism is V, Derived polymorphism is A
MQTEARVGMAAATMDGTGAAASAARRYTTQQQQQQQLQHHQPQLGTVPHLLAGGVAGAVSKTCTAPLARLTILFQVQGMHSDVATMRNTSIWREASRIVYEEGFRAFWKGNLVTIAHRLPYSSISFYAYERYKNLLQMLPGLEKNGGFGADVGVRLLGGGLSGITAASATYPLDLVRTRLAAQTNTAYYRGISHALYAICRDEGVRGLYKGLGATLLGVGPSIAVSFSVYETLRSHWQIERPCDSPVLISLACGSLSGIASSTFTFPLDLVRRRMQLEGAAGRARVYQTGLFGTFGHIVRTEGFRGMYRGILPEYCKVVPGVGIVFMTYEMLKAILTGLESDD

SEQ ID NO: 20296 - protein, 455 aa, Zea mays
  VARIANT 266: note = Ancestral polymorphism is D, Derived polymorphism is G
  VARIANT 178: note = Ancestral polymorphism is G, Derived polymorphism is D
MRKVCPNLERDDALDTVLEVPIPEEMFSGGGGGGGGSCGFRFGCTSVKAWMRSHAADRCGAGEPCSMSRGELQLMLGVIGAPLVPLPVAVCCRAEQSPCSVLCEQLKTGPIESSSAKYIVQQYVAASGGERALDRVKSMYAMGKVRMTAAEQLNGSDAAGGHCGGATGKGNRGGRRKGRGGEVGGFVLWQKRPELWCLELVVSGCKISAGSDGKVAWRQTPWHQSHASRGPPRPLRRSLQGLDPQLTASLFADSVCIGERSVDGEDCFVLKVEAEASSLRARNSGSVEIVRHTLWGYFSQRTGLLVQLEDSHLLQIRSGGGGGGGSIFWETTVESRLGDYRAVDGVNIAHAGRTAVSLVRFGDCQQDGSSARTRMEETWDIEEVDFNIWGLSMDCFLPPSDLREGGKESQDVAVAVAKADARPPPIRIPAVAVRVGPSQVAAVSMDDSDSLIARP

SEQ ID NO: 20297 - protein, 635 aa, Zea mays
  VARIANT 182..635: note = Derived polymorphism lacks residues 182 to 635
  VARIANT 83..635: note = Derived polymorphism lacks residues 83 to 635
  VARIANT 6: note = Ancestral polymorphism is R, Derived polymorphism is W
MGSFLRKQPSYLFILIILHLVAHEARTLSSDGEALLAFKKAVTNSDGVFLNWREQDADPCNWKGVRCDSHSKRVINLILAYHRLVGPIPPEIGRLNQLQTLSLQGNSLYGSLPPELGNCTKLQQLYLQGNYLSGYIPSEFGELVELVALDLSSNTLSGSVPHSLDKLSKLTSFNVSMNFLTGAIPSSGSLVNFNETSFVGNLGLCGKQINSVCKDALQSPSNGLQSPSPDDMINKRNGKNSTRLVISAVATVGALLLVALMCFWGCFLYKNFGKKDMRGFRVELCGGSSVVMFHGDLPYSSKDILKKLETMDEENIIGAGGFGTVYKLAMDDGNVFALKRIVKTNEGLDRFFDRELEILGSVKHRYLVNLRGYCNSPSSKLLIYDYLQGGSLDEVLHGKVSFLFISIHLDCIYLFIFNCFFLNKHINKLVTSPFATMTKKSEQLDWDARINIILGAAKGLSYLHHDCSPRIIHRDIKSSNILLDGSFEARVSDFGLAKLLEDEESHITTIVAGTFGYLAPEYMQFGRATEKTDVYSFGVLVLEILSGKRPTDASFIEKGLNIVGWLNFLAGENREREIVDLNCEGVHTETLDALLSLAKQCVSSLPEERPTMHRVVQMLESDVVTPCPSDFYDSE

SEQ ID NO: 20298 - protein, 143 aa, Zea mays
  VARIANT 100: note = Ancestral polymorphism is C, Derived polymorphism is Y
  VARIANT 90..143: note = Derived polymorphism lacks residues 90 to 143
MAVALLRRSSAARALLSPALSSRLVASKPHSSSPASPPPVKAASSSKTFSIYRWDPDSPSTKPRLKDYQVDLSDYGSMVLDALLKIKNEQDPSLTFRRSCHEGICRSCAMNINGDNGLACLTKISDASSASTVSPLPHIASSA

SEQ ID NO: 20299 - protein, 479 aa, Zea mays
  VARIANT 54..479: note = Derived polymorphism lacks residues 54 to 479
MSVQEYLEKHLLSRKIEEAVNAAVRAKAPDPVLFIAGHMRRAAPAVITRVRARQILDGHGAPAVEVELHTNKAIHRASAAGSGALEGAAADAAGAAERRKILAKVVADSVRMINDKVSEALVGMDPQEQSQIDQAIMDLNKARHKAELGVGANAMLAVSIAACKAGAAEKEVPLYKHIANLVGKSATTLPVPAITVINGGKHAGNGLPIQEIMILPIGAKNFEEAMQMGSETYHHLKDVILEKYGSDSCNIGDHGGFAPNISSISEGLDLVIAAIERAGYNGRIKLAIDVAATDFCTGKKYDLEFKSTKKSGQNFKTADDMIEIYSQLCSEYPLVSIEQPFDKDDWEHSKKLTTLELCQVAGDDLLMSDPERIKRAVNEYTCNALVLKANQVGTVTEAIEVVKQAKDAHWGVMVSHRSGDTEDSFIADLAVGASAGQIKAGAPCRGECLTNYNQLLRIEGELGSEGVYAGENWRTVNTS

SEQ ID NO: 20300 - protein, 279 aa, Zea mays
  VARIANT 231: note = Ancestral polymorphism is G, Derived polymorphism is D
MRIYSPDATILQALRGSGIDLIVDETNLDSLISDAPGWVQANLQPYKDDVSFKYIAVGNEVEGGDTQKILPAMQSLSDALSAAGLGNIKVSTAVKMSVLATPSSPPSTGAFADPSVMGPIVRFLAGVGSPLLANIYPYFAYRDAAGTIDLNYALFQPSTTVVTDDGGLDYTNLFDAMADAMYSAMEKEGGSGVPIVVSESGWPSGGGGTGAETVDNARTYNQNLINHVGNGTPKRSGPLETYIFAMFNEDKKQGDETEKHFGLFNGPDQSPVYQISFST

SEQ ID NO: 20301 - protein, 427 aa, Zea mays
  VARIANT 70: note = Ancestral polymorphism is M, Derived polymorphism is I
MSQTGEVQVPLLQTEEADGEWSSKPRRIALFVEPSPFALVSAFSPQTFSCYYISGYKNRFQNFIKHLREMGDEVLVVTTHKGAPEEFHGAKVIGSWSFPCPLYQNVPLSLALSPRIFSEVNKFKPDIIHATSPGIMVLGALAIAKMISVPILMSYHTHLPAYIPRYNLNWLLEPTWSFIRCLHRSADLTLVPSLAIAEDFETAKVVPANRIRLWNKGVDSESFHTKYRRHEMRVRLSGGEPEKPLVIHVGRFGREKNLDFLKRVMERLPGARIAFVGDGPYRAELEKMFMGMPAVFTGMLQGEELSQAYASADVFAMPSESETLGQVVLESMASGVPVVAARAGGIPDIIPKDKEGKTSFLFTPGDLDECVRKIEQVLSSKDLRETVGKAAREEMEKCDWRAASKKIRNEHYSTAISYWRKKMDKSN

SEQ ID NO: 20302 - protein, 493 aa, Zea mays
  VARIANT 33: note = Ancestral polymorphism is S, Derived polymorphism is R
  VARIANT 207..493: note = Derived polymorphism lacks residues 207 to 493
  VARIANT 441: note = Ancestral polymorphism is L, Derived polymorphism is P
MAPECSRRDAPPSATLLIVCVALYTVVLAVASSPKALASSSALSSRARAAPEQQLLLSADLTTEESARRPGETRRPPSVEQELDVARAAIRRTAQRHGDAGRAGDGNVSSANTWFDAGVEYALLASVYRNPAAFHRSYAEMEKLFRVYVYEEGEPPILHAGPCKNIYTIEGRFIEQLELMAPSPASSSRRGTRRRSASDVRTSEPARAHAFFLPFSVSQMVQFAYRPNTYDKTPLRAIVADYVRVVASRHPYWNRSAGADHFMLACHDWGPEASTGHPELHANGIRALCNANSSEGFRPWQDVSVPDINLYDGDMPRQLLAPAPGVTSRPFLAFFAGGRHGHIRDLLLRHWKGRDPDFFPVYEHRHEDGFDYYSFMRRARFCLCPSGYQVASPRVVESIHAECVPVILSDGYVLPFADVLRWEAFSVAVPVADIPRLREVLERIPAPEVEKLQQGVRLVKRHFMLNQPPQRLDMFNMILHSVWLRRLNLRLDH

SEQ ID NO: 20303 - protein, 134 aa, Zea mays
  VARIANT 7: note = Ancestral polymorphism is S, Derived polymorphism is P
  VARIANT 10: note = Ancestral polymorphism is P, Derived polymorphism is S
  VARIANT 14..134: note = Derived polymorphism lacks residues 14 to 134
  VARIANT 30..134: note = Derived polymorphism lacks residues 30 to 134
  VARIANT 38: note = Ancestral polymorphism is M, Derived polymorphism is T
MLTAHYSFLPLGPQLDEHVSGHQFWRMKFQSFLSLHIMYIQGAPLLGNSAAASDEILAVDTPSEGGDAVIVSSSDNSTSTPSAVSWRARFVGQGYKQIHDQVCGRADVWGDGVVPEMAAHLDYLSINFLRIKAG

SEQ ID NO: 20304 - protein, 843 aa, Zea mays
  VARIANT 56..843: note = Derived polymorphism lacks residues 56 to 843
MALSASAASTGRGSRAEKVRRIFERFDTNGDGGLDRNEMAALVVAVNPRVKFSEDQISAILDEVFRTYAEFILPDGSGLSLSGLLRTYNDGAGDVDRDFVALSLPTVHSDASSPDIAAGDAAAHSSPPSASAASLLDDHAMPLGGGGVPTPATASSRATAAAPAWAGSPNHGIAFDSSWGLLDDLEILVKRLRSKQVRKGSIDGSGGAGNSNFDSFSEAGWSREISGAADSASTSAPWDETSRDYLTFVKELAVLRTRADASRSREEAFDNHMIIGRALSEHRLFRDALASFRRACELQPTDVRPHFRAGNCLYGLGRYAEAKEEYLLALEAAEAGGSQSADILPQIHVNLGIAMEAEGMVLGACEHYREAAILCPSHARALKLLGSALFGVGEYRAAEKALEEAIFLKEDYADAHCDLGSALHAVGEDDRAIQEFQTAIDLKPGHVDALYNLGGLNMDAGRFVRAAEMYTRVLSIRPNHWRAQLNKAVALLGQGESEEAKKALKEAFKMTQRVEVYDAISHLKTLQKKKLKPSKGKNDGQGEQTYVIVEASKFKRVGRKTTLRQDLANALDIRAFERMTKLGHCDVELLRKEMNETDVPVSYSGTGIPEKSIRKAALEVILRRLLSFLKPDTFQGAIKAINERILSVLDAPGSGRVDLGMFFAIIAPICSGPVDRRKRIVFDALLWRPASEGSNGQIRRSDALTYVKLLRAVYIPTHGASDMLEMHGESDPTMVSYTEFLEMFNDPDWGFGILSTLVKLEESDHIRHGSHTCSICRYPIIGSRFKETKHSFSLCNRCYSEGKVPSAFKLEEYRFKEYGNESEALIDKCMCFNLHSKKLETDA

SEQ ID NO: 20305 - protein, 111 aa, Zea mays
  VARIANT 72: note = Ancestral polymorphism is G, Derived polymorphism is C
  VARIANT 12: note = Ancestral polymorphism is K, Derived polymorphism is T
MAYVERGVVKDKRTIWRLSIISDFFWAIVSFIRIFFDTLFSLDKTDNFKKGYGAGKKWDGGPGGGGRGPYGGGGGGGFGGGGGGGSRGPRTLSDIQSNDHSSLPACGSCCG

SEQ ID NO: 20306 - protein, 412 aa, Zea mays
  VARIANT 252: note = Ancestral polymorphism is G, Derived polymorphism is W
MEKRNLQWRRGRDGIVQYPHLFFAALALALLVADPFGLSPLAEVDYRPVKHELAPYGEVMGSWPRDNASRLRRGRLEFVGEVFGPESIEFDLQGRGPYAGLADGRVVRWMGEEAGWETFAVMNPDWSEEVCANGVNSTTRKQHEKEEFCGRPLGLRFHGETGELYVADAYYGLMVVGQSGGVASSVAREADGDPIRFANDLDVHRNGSVFFTDTSMRYSRKDHLNILLEGEGTGRLLRYDPETSGVHVVLKGLVFPNGVQISEDHQFLLFSETTNCRIMRYWLEGPRAGEVEVFANLPGFPDNVRSNGRGQFWVAIDCCRTPAQEVFAKRPWLRTLYFKFPLSLKVLTWKAARRMHTVLALLDGEGRVVEVLEDRGHEVMKLVSEVREVGRKLWIGTVAHNHIATIPYPLED

SEQ ID NO: 20307 - protein, 258 aa, Zea mays
  VARIANT 35: note = Ancestral polymorphism is R, Derived polymorphism is G
  VARIANT 62..258: note = Derived polymorphism lacks residues 62 to 258
MMVKNPSSNGVLTATAFSDSKARPERGVGGEAAGRPYRGVRMRSWGSWVSEIRAPNQKRRIWLGSYATPEAAARAYDAALLCLKGSNAVLNFPAAASSSSSSTSASSSHRRAHSRGHPDDDPPAAAGGGMSPRSIQRAAAAAAAAIDDDAGMGASAADDRCSSSAGATTPTSASLSTQGSTADHVGQEQHATTTSAAASTGSPPEGKEELWTDLDLEAFASPKFMDLLMDTGAAPYSSTWEEPEDDGDGELMRLWSFC

SEQ ID NO: 20308 - protein, 507 aa, Zea mays
  VARIANT 167..507: note = Derived polymorphism lacks residues 167 to 507
  VARIANT 159: note = Ancestral polymorphism is P, Derived polymorphism is L
MEGSADSFGSLTAPLAWHDFLERMRQPSAAEFVKSIKSFIVTFSNRAPDPEKDSTAIQEFLENMEGAFRAHTPWAGSSEEELESAGEVISLFCTLKYQVLLMWLRIFVRTDGLEKYVMTKLFNRVFASVPEDVKSDEELFEKMSLLQQFVRPENLDIKPEYQNETSWLLAQKELQKINMYKAPRDKLACILNCCKVINNLLLNASIVSNETPPGADEFLPVLIYVTIKANPPQLHSNLLYIQRYRRQTRLVSEAQYFFTNILSAESFIWNIDGESLSMNELDFQRRMDSARERMLGLSADSEYQDNQANPDVQDRTSQSLGANRNSDASLSLKDHVQGSGQDMRRDSDVTVSGKQAEQVQSISELEKKGTAELLNEDDLNKKFQEYPFLFARAGDLTIADVESLLNSYKHLVLRYVALAQGMGVSPETTLTQNGQTSDLVVSEEPEILNSVVKDNENSAIINKNVDDVISLNHHSEAVDTEASEQMNQRTAVDSSDDLEALGRPENA

SEQ ID NO: 20309 - protein, 183 aa, Zea mays
  VARIANT 95..183: note = Derived polymorphism lacks residues 95 to 183
  VARIANT 119..183: note = Derived polymorphism lacks residues 119 to 183
  VARIANT 134..183: note = Derived polymorphism lacks residues 134 to 183
MWFTSLLVLDKYQASIDVECAAKTDDWSKARKKERRTIMALVGQVAMVAQLVGVDAFSLFILGIFVFVPIAFYAPWCGHCQNLALVLDEVIVLLQKDEGATIAKMVTYNRILIVRVGTWDIVKSLFQNDSPTTLLARVMGTIGSIEQAMLAQGRHTYKYFIKNHMLYEKNQERFAFGRMGFDW

SEQ ID NO: 20310 - protein, 128 aa, Zea mays
  VARIANT 12..128: note = Derived polymorphism lacks residues 12 to 128
  VARIANT 14: note = Ancestral polymorphism is G, Derived polymorphism is V
  VARIANT 17: note = Ancestral polymorphism is D, Derived polymorphism is N
  VARIANT 18: note = Ancestral polymorphism is R, Derived polymorphism is H
  VARIANT 19: note = Ancestral polymorphism is R, Derived polymorphism is H
  VARIANT 28: note = Ancestral polymorphism is V, Derived polymorphism is A
  VARIANT 29: note = Ancestral polymorphism is A, Derived polymorphism is V
  VARIANT 30: note = Ancestral polymorphism is R, Derived polymorphism is S
  VARIANT 47: note = Ancestral polymorphism is V, Derived polymorphism is L
  VARIANT 49: note = Ancestral polymorphism is A, Derived polymorphism is V
  VARIANT 77: note = Ancestral polymorphism is R, Derived polymorphism is C
  VARIANT 79: note = Ancestral polymorphism is V, Derived polymorphism is D
  VARIANT 81: note = Ancestral polymorphism is I, Derived polymorphism is S
  VARIANT 82: note = Ancestral polymorphism is G, Derived polymorphism is S
  VARIANT 91: note = Ancestral polymorphism is P, Derived polymorphism is L
  VARIANT 94: note = Ancestral polymorphism is L, Derived polymorphism is F
  VARIANT 114..128: note = Derived polymorphism lacks residues 114 to 128
MGHSSPDVEDMGCGVRDRRADGEAVRAVARGAVEHVEVGGGGKELLVVASRSARSLSLPFPPLPGASSHVVFPPLHRLVLIGARQRRLLNPAALRLAHGPRGVVLPPRAPQPHRLRQEHAEDHTYVYF

SEQ ID NO: 20311 - protein, 329 aa, Zea mays
  VARIANT 95..329: note = Derived polymorphism lacks residues 95 to 329
  VARIANT 67..329: note = Derived polymorphism lacks residues 67 to 329
MLDLSRFHDRDCAQCRDWCFATFVHAYATYLDDRLKHRMQARGAGGASLGKWHVDGDPDGMACEVAEAWEPMPRGRSASATETTAAEDVIGKAQQLKHLLGRFIQCRPTGKARTNPVVTVALYRLVKESATMYCELMEVMVVLLDRFADLGTPACMRVHSIFTSLAKLVDELDDFYLWCKATDVCHPSDIPEIQRVKQMNLDLMDEFIHDRQASAPPCALVARCSCRPIPRNPPSTPRHHRPLYRPMPLTSRGFLRLRPASVTPAPCPERKKRSGDGRRGRRHPTRPVDPHQYCLRDRLAHLSASSLTTTTVVYSKRSWRRPRSHHSRG

SEQ ID NO: 20312 - protein, 229 aa, Zea mays
  VARIANT 144: note = Ancestral polymorphism is H, Derived polymorphism is Y
MTTGSNGDGGGAGSWYPQRRPHYGYGGGSASFRGCCCCLFLLLTFLALLALAVALVVVLVVKPRKPQFDLNQVSVQYLLVASPTTSPAGVPPGAAYLSLNITLLFTAENPNKVGIRYGATAFDVMYHGVPLGVAAVPGFEQPAHSTRLLQTRVIVDRFNVLQTDAQDLIRDAAINDRVELRITGDVGAKILVLGFSSPRVQVSVDCTIAISPRSQSLKYKQCGVDGLSV

SEQ ID NO: 20313 - protein, 305 aa, Zea mays
  VARIANT 243: note = Ancestral polymorphism is S, Derived polymorphism is F
  VARIANT 206: note = Ancestral polymorphism is A, Derived polymorphism is S
  VARIANT 194: note = Ancestral polymorphism is A, Derived polymorphism is S
  VARIANT 145: note = Ancestral polymorphism is V, Derived polymorphism is L
  VARIANT 111: note = Ancestral polymorphism is T, Derived polymorphism is I
  VARIANT 106: note = Ancestral polymorphism is D, Derived polymorphism is H
  VARIANT 74: note = Ancestral polymorphism is D, Derived polymorphism is V
  VARIANT 55: note = Ancestral polymorphism is E, Derived polymorphism is K
  VARIANT 52..305: note = Derived polymorphism lacks residues 52 to 305
MAMQAARRLASLKLQRRLLLPSQAESPSISIPTAAAAAAFLHSHATSFGYKQVREEDKSKLVGNVFSSVASSYDLMNDLMSVGLHRLWKDRLISKLNPFSGMKHLDVAGGTGDVAFRVLERVKSVGHRAMQGTLTETEEGTHIYVCDINPNMLNVGKKRAAERGYSEEHCLSWIQGDAEALSFEDGSMDGYTIAFGIRNVTHIEKALSEAYRVLKQGGRFLCLELSHVDVPIFKEIYDVYSFSMVPAIGELVAGDRQSYQYLVESIRRFPNQEKFAQMIQEAGFQRVEYENLVGGVVAIHSGLKL

SEQ ID NO: 20314 - protein, 66 aa, Zea mays
  VARIANT 63..66: note = Ancestral polymorphism lacks residues 63 to 66
  VARIANT 59: note = Ancestral polymorphism is T, Derived polymorphism is I
  VARIANT 53: note = Ancestral polymorphism is V, Derived polymorphism is D
  VARIANT 44..66: note = Derived polymorphism lacks residues 44 to 66
  VARIANT 41: note = Ancestral polymorphism is R, Derived polymorphism is Q
  VARIANT 37: note = Ancestral polymorphism is K, Derived polymorphism is E
  VARIANT 35: note = Ancestral polymorphism is K, Derived polymorphism is N
  VARIANT 32: note = Ancestral polymorphism is S, Derived polymorphism is L
MTSFMAACLVSIKKTKDLPLDQLQKALRKTFSAEKKKSKIRKAWDGTKVIYNDASWGATVVGQHKA

SEQ ID NO: 20315 - protein, 402 aa, Zea mays
  VARIANT 62..402: note = Derived polymorphism lacks residues 62 to 402
MALTVLETTEQQLLPCQQSVEHGAGDGGNGKAAAAGAEKATVMLKETGHGGDVDRPDRDNIWSMIQAQKPPPAAPRQAQAPAPYVHPLARRSSGLLTQKSLETCTESLGSETGSDGFSDADDSATDRSCTGCGDDERGEEEEEEVAPHAAPPRSFPPPLPSLARRRVEPTTMEMRQERQDGRLLVKVVPVASSTLLRAQRRDGRLLLSFADTVAPALDELDRRSGDQPETEQQADEEDEEDEVEVVDRGTVLEVKVSAQPQRQARSGSGPRVHRSALVINKFVGAEPVITSSCEIDGGAPAAQHPVAPVKPPRRATGSTTTAVAALLAAASALSATAAPPSNGDDAAVPGATCGENKLLMTARRHSSKEELMMHMRRCSGQLSPSLFVWEGTKGASQFATSS

SEQ ID NO: 20316 - protein, 717 aa, Zea mays
  VARIANT 422: note = Ancestral polymorphism is G, Derived polymorphism is S
MAYDLPFTLFVLLFLVLLQTPSSSWRPADDDDASVSRSAFPMEGDVAWVVQVSDLHISTYNPERAAELALLGTALRAIRPHLLLVTGDITDAKNQQRTSSRQDEYEWITYKKTIDAIVGSGGIDKSRIFDIRGNHDTYGVPYRGGKLDFFSTYSVNSQFKRLSTISSILLQGDRSYQFLGIDDTMNVGIRFPANLFGHSTDKRIEAVNSELQYWTNHSNVPVTKVVFGHFPMSFTASSEKGQRYESVLAGQSISAYLCGHLHAKVSKQLWRYHEIRTTEDHKSSFWEWELGDWKDSRLMRILAIDGGAVSFIDHTLKHALQTSILITYPTDSRSMNMLDSEKWSMRNDINVLIFSHQFISNVSARIFDSHCEFKIVEEIPLQLVTSTSAHRPLFHAKWNAENYRSSSATRYWLQVFVLDSHGVKISSEQRPFSVEGKMAIPTSPWTNYLLFEVQWEGMYQVLLWSNLAFTIVLLFIPKLLYHFVRRSSSYQRWAVSIPSSSIQQRKPYFWLVWFLMEGTRSKPFWFSMVTYVLWLIEMPWFWGHATSENGEIAQMYLSGWSVPIHDGGLTGNKLSNPDVLVITLPFLYLVLVPVIVLTYGLFAEKATVFLQHRRRVVYSLDSTNVHAESPRLLPVAPRASLMKFADKMVSMVIQFCGSWTRRALLLACLITAAIHLKLCSKLMSAYGTVPVALSPPLTWIPLLLLGGAAYCTVLHAD

SEQ ID NO: 20317 - protein, 370 aa, Zea mays
  VARIANT 56: note = Ancestral polymorphism is P, Derived polymorphism is L
  VARIANT 53..370: note = Derived polymorphism lacks residues 53 to 370
MRRRRMGALHVVGEPRISFRQQPAAVVAKNGGHGAVVEEIHGLIRVYKDGHVERLPAIPAVPCTWGGTAPDAPGGVVARDVVVDPATGVWARLYAPTSAGDGARRPVVVYFHGGGFCVGSAAWSCYHEFLAQLAARAGCAVMSVDYRLAPEHRLPAAFDDGLAAVRWLRHQAAASASASACCNDDLSWWRARCGFDRVFLMGDSAGASIALHVAARLGQGQLGALPPLTVRGAVLIQPFLGGEGRTASEKNVAQPPRSALTLATSDCYWRLALPAGASREHPWCNPLSGRAAPRLETTPLPPLLVCVSETDILRDRNLELCRALREAGKRVEQAVYGGVGHAFQVLHNCHLSQPRTQEMLAHIKAFVSAR

SEQ ID NO: 20318 - protein, 143 aa, Zea mays
  VARIANT 84: note = Ancestral polymorphism is G, Derived polymorphism is A
MFAARRCGDLPELTFARTILTTKFGGEFAEMAKEGAGVVDPMLVWKLTGNKGDMELKKKVVKEVAAENNVLVDFSELQEVEHGGSGNVPHHHKVSHEGIYQTDMDGSSEPSHDEDPCDTSNSDGASNGHPKQENTRTSVRTRR

SEQ ID NO: 20319 - protein, 250 aa, Zea mays
  VARIANT 124..250: note = Derived polymorphism lacks residues 124 to 250
MGFIQGRTSKQTSRVKTLLWLALSRLAAARRPRLARKSISRSDVGQLLALGHIDRALHRAEQLIEEDNMLEAFNIIELHCNRLIECAKQLDKPHECGDDIREAAAGIMFAAGRCGDLPELTFARTILTNKFGGEFAEMAKEGAGVVDPMLVWKLTSNKGDMELKKKVVKEVAAENNVLVDFSELQEVEHGGSGNVPHHHNVSHEGIYQTDMDGTSEPSHDEDPCDTSNSDGASNGHPKQENTRTSVHTRR

SEQ ID NO: 20320 - protein, 200 aa, Zea mays
  VARIANT 116: note = Ancestral polymorphism is R, Derived polymorphism is W
  VARIANT 110: note = Ancestral polymorphism is A, Derived polymorphism is T
  VARIANT 108: note = Ancestral polymorphism is H, Derived polymorphism is Y
  VARIANT 74: note = Ancestral polymorphism is P, Derived polymorphism is A
  VARIANT 73: note = Ancestral polymorphism is W, Derived polymorphism is L
  VARIANT 62: note = Ancestral polymorphism is R, Derived polymorphism is M
  VARIANT 57: note = Ancestral polymorphism is D, Derived polymorphism is G
  VARIANT 42: note = Ancestral polymorphism is E, Derived polymorphism is D
  VARIANT 36: note = Ancestral polymorphism is Y, Derived polymorphism is C
  VARIANT 30: note = Ancestral polymorphism is P, Derived polymorphism is S
  VARIANT 28: note = Ancestral polymorphism is E, Derived polymorphism is K
MAEVKPQTVGLLEVSLTSPWMSGFAGPEWPRFCTMYVVIGGEVVGKQTLPFEFDMDDIRKWRLGIRIPAAPDWAHQCLDIFVERADYLVRRRTKSVVVTRGGPHTSRHTAVICRARVRLLDALVLGHLDEEEEEQEDNKSKTRHEEAEGKPMLLEGTLPFGKVVPLLDWKLPAPADEDGNPRSVVRGTVVVRMNLCEPFW

SEQ ID NO: 20321 - protein, 199 aa, Zea mays
  VARIANT 167: note = Ancestral polymorphism is W, Derived polymorphism is R
  VARIANT 65: note = Ancestral polymorphism is I, Derived polymorphism is F
  VARIANT 62: note = Ancestral polymorphism is R, Derived polymorphism is M
  VARIANT 40: note = Ancestral polymorphism is G, Derived polymorphism is S
  VARIANT 38: note = Ancestral polymorphism is D, Derived polymorphism is Y
  VARIANT 37: note = Ancestral polymorphism is V, Derived polymorphism is M
  VARIANT 31: note = Ancestral polymorphism is R, Derived polymorphism is W
  VARIANT 28: note = Ancestral polymorphism is E, Derived polymorphism is K
MAEVKPQTVGLLEVSLTSPWMSGFAGPEWPRFCTMYMDIGGEVVGKQTLPFEFDMDGIRKWRLGIRIPAAPDWAHQCLDIFVERADYLVRRRTKSVVVTHGGPHTSRHTAVICRARVRLLDALVLGHLDDEEEEDNKSKTRHEEAEGNPRLLEGTLPFGKVVPLLDWKLPAPADEDGNPRSVVRGTVVVRMNLWEPFFW

SEQ ID NO: 20322 - protein, 281 aa, Zea mays
  VARIANT 15..281: note = Derived polymorphism lacks residues 15 to 281
MLGHGLVTDPSRTLRCPVNSRVSSAPLGLVSSLNFNRGCKGKNKIFNVDRHTKYSTSFCYAPRNARITPLATASFGDMADSSTPIFPRIHVKDPYQRLGISREASEEEIRAARNYLISKYAGHKPSVDAIESAHDRIIMQSFFDRKKPKMNLKKKFRELSQSRAVKAIQGRFQTPRSKVIWQTAIAFVLLGVLTLAFPTEEGPTLQVAISCAANIYFIYQRVKSGWRAFFYGFGSFFASWFLGTFLMVSVIPPILPGPRNLEVSTACVTYVLLFISSTFLK

SEQ ID NO: 20323 - protein, 146 aa, Zea mays
  VARIANT 93: note = Ancestral polymorphism is P, Derived polymorphism is H
  VARIANT 43: note = Ancestral polymorphism is G, Derived polymorphism is D
  VARIANT 25: note = Ancestral polymorphism is A, Derived polymorphism is T
  VARIANT 19: note = Ancestral polymorphism is G, Derived polymorphism is D
MSSLAILEKKSTLFPDGGGFSELRAAGFGLVSKIGLEATNTSGSLILHCGILRPDKRDWILPSRQPDRTTVYKNRALRTPFVKMIMWCKILSPSSLTTHITNGKRLRGWSLKYIQIQGMPQSISRVGCSGVWKGEKPNKWVHVQQA

SEQ ID NO: 20324 - protein, 1131 aa, Zea mays
  VARIANT 330..1131: note = Derived polymorphism lacks residues 330 to 1131
  VARIANT 394..1131: note = Derived polymorphism lacks residues 394 to 1131
  VARIANT 449..1131: note = Derived polymorphism lacks residues 449 to 1131
MSSLSRELVFLILQFLDEEKFKETVHKLEQESGFYFNMKYFEDEVVNGNWDEVERYLGGFTKVDDNRYSMKIFFEIRKQKYLEALDKHDRSKAVEILVKDLKVFASFNEELFKEITQLLTLENFRENEQLSKYGDTKSARAIMFVELKKLIEANPLFRDKLQFPSLKNSRLRTLINQSLNWQHQLCKNPRPNPDIKTLFVDHSCGQPNGARAPSPANNPLLGSMPKPGGFPPLGAHGPFQPSPTPVPPLAGWMSNPPAVTHPAVSGGAIGFGTPTNPAALLKHPRTPTTANPGMDYPSGDSDHISKRTRPVGMSEEVNLPVNMLPVTYPQSHNYQQDDFHKTVARTLSQGSTPMSMDFHPLQQTLLLVGTNVGDIGLWDVGTKDRLVVRNFKVWDLSKCTMILQASLVKDPAVSVNRIIWSPDGTLFGVAYSRHIVQIYSYNGGDDIRQHLEIDAHIGGVNDIAFAHPNKQLCIITCGDDKTIKVWEATSGAKQFTFEGHEAPVYSVCPHYKENIQFIFSTALDGKIKAWLYDNMGSRVDYDAPGHWCTTMAYSADGSRLFSCGTSKDGESHLVEWNESEGAVKRTYQGFRKRSMGVVQFDTTRNRFLAAGDEFMIKIWDMDSTGLLTTIDADGGLIASPRIRFNKEGTLLAVSTVDNGIKILANADGLRLLRTLENRSFDASRNASEAVTKPLINPLTAAANAAAASSSGAGAPSAVTAMNEQNGDTRSLVDVKPRIADESLDKSKAWKLMEITESTQCRSIKLADNMRTSKISRLIYTNSGLAILALTSSAVHLLWKWPRSDRNSGKASASVSPTLWQPPSGILMTNDTTDNNPEEAVHCFALSKNDSYVMSASGGKISLFNMMTFKTMTTFMPAPPAATFLAFHPQDNNIIAIGMDDSTIQIYNVRIDEVKSKLRGHSKRITGLAFSNVLNVLVSSGADAQLCVWNTDGWEKQKNRFLQIPSGRQSNILDTRVQFHQDQMHFLVVHETQIAIYETTKLEPVKQWPVRENSPPITHAAFSCDSQLIYASFMDATVGIFNASSLRLQCRILPASYLPPNISPSVHPVVVAAHPSEASQFALGLTDGGVFVLEPLESDRKWGNPPPVENGSASNLSAPPPNGASSSDQPER

SEQ ID NO: 20325 - protein, 347 aa, Zea mays
  VARIANT 204: note = Ancestral polymorphism is R, Derived polymorphism is L
MLGSLALGGAVLLLFFGKWWQPLAGTDWRVKELTDAAARLLEPGDNHRYNMFPSDTHVRVHDVVRDAALRFAPAKWLVHSGAGLREPPREEAPAKVGGALVDAQPASLMLQRNKALPKRMLQAIQDLTKLTYLDLENTGIQDAFPMEVLEVFTASIVSVADNYVAPDIDDLESSGARMASLGIWLDTTRDVERFARLAPGVRARSLHLRKLEGARAQPLLSAEHAPELAGVQESLRELVLYSSDVEEVTADAHVPRLEVIKFGFPFLTKLRVMEWSTGVQHLPCLESLNLSGCNGLTRLLGGAEDGGSAAKEVAVFPRLRLHDHLRSRSSSPRQLPHVILVAPPPPR

SEQ ID NO: 20326 - protein, 90 aa, Zea mays
  VARIANT 10: note = Ancestral polymorphism is R, Derived polymorphism is Q
  VARIANT 24: note = Ancestral polymorphism is F, Derived polymorphism is L
  VARIANT 51: note = Ancestral polymorphism is A, Derived polymorphism is V
  VARIANT 69: note = Ancestral polymorphism is T, Derived polymorphism is A
MHSAAANKQRVAVVVAHELAHQWFGNFVTMEWWTHLWLNEGFATWVSYLAVDQFFPEWNVWTQFLEESAIGFKLDALAGSHPIEMYILHS

SEQ ID NO: 20327 - protein, 211 aa, Zea mays
  VARIANT 172: note = Ancestral polymorphism is P, Derived polymorphism is L
  VARIANT 143: note = Ancestral polymorphism is C, Derived polymorphism is Y
  VARIANT 124..211: note = Derived polymorphism lacks residues 124 to 211
MAWRRASVAWRTGHPRRAGPPTSTPKSRREEVSLLFRVRRERSSRMRTIRGRRADNVEVLFPESQVVGSGNPSSVADNNDLASTSSAFVDSATLVEKVIAKLPAEVHAHATDSKRKAKSQDPGWKFGWWPDPTKKDFIRCIFCLKVVPSRIKRFKQHLVGGFSDTTKCSMVPEVVSNDMYAYLKRNTRLVLSVESEEGGQKDGDATEPEQK

SEQ ID NO: 20328 - protein, 97 aa, Zea mays
  VARIANT 5: note = Ancestral polymorphism is S, Derived polymorphism is T
MSSWTYCENALFERALATYDRDTPRRWELVAAAVGGGKTAEDARRHYAHLVLDVGDIESGGYDNPNPRGPAPTNSGGASISGNGNNRGGGRANRPQT

SEQ ID NO: 20329 - protein, 485 aa, Zea mays
  VARIANT 54: note = Ancestral polymorphism is L, Derived polymorphism is R
  VARIANT 189: note = Ancestral polymorphism is P, Derived polymorphism is L
  VARIANT 337..485: note = Derived polymorphism lacks residues 337 to 485
MDMALPVVNATAAVLARVSAAFNGPLARAVVFGVHIDGHLVVEGLLIAVIVFQLSRKSYKPPKKPLTEKEIDELCDEWEPEPLCPPIKEGAKIDAPTLESAAGPHTIVDGKEVVNFASANYLGLIGNEKIIDSCISSLEKYGVGSCGPRGFYGTIDVHLDCESKIAKFLGTPDSILYSYGISTIFSVIPAFCKKGDIIVADEGVHWAVQNGLHLSRSTVVYFKHNDMASLASTLEKLTRGNKRAEKIRRYIVVESIYQNSGQIAPLDEIVRLKEKYRFRVILEESHSFGVLGKSGRGLAEHYGVPIEKIDIITAGMGNALATDGGFCTGSVRVVDHQRLSSSGYVFSASLPPYLASAAVSAVNYLEENPSVLANLRSNIALLHKELSDTPGLEISSHVLSPIVFLKLKKSTGSPTTDLDLLETIADKALKEDSVFVVTSKKSNLDRCKLPIGIRLFVSAGHTELDISRLSSSLKRVSASVLSDYF

SEQ ID NO: 20330 - protein, 552 aa, Zea mays
  VARIANT 220..552: note = Derived polymorphism lacks residues 220 to 552
MASNQTNQTLRSEHTAGGGISMGSVAPAELVLKAACERCGAASGLYATSCRHTTLCSDCGMTLALARGRCTVCSAPVTRLIREYDVRVDTSAEKEKTHYIGRFTTGLPPLSNERSAGNRWTLRKDVPHGQQLTGNMRDKHYSKMPWILEDETGEHQYQGQTEDPPATYYSLTQKGNDMIAVQVGSWYNFSKIAQYKQLTLEEAEEKMNRRRSSASGYERWMMKAATNGPDAFSSVVKRLDDVNRGATNGVHPKKGDRNENGNQSDKVDDKEEEGAARKNRLGLTMKDMGEDYEDSGNDIEFDLDDEIEKGDDWEHEEIFTDDDEVVDVDIEQRPELADPEAAPPEIKQDDNEDELGCSDNLSKSGQELKRLLRRAAGENESDVDDKSTYEDDLPSPKPAPKLVPKSEPDDSSPAKPTPSGHAQSATPSSKSTQKRKSGGGDANISNGAPSKKIKMEHETGTLAVKDENPSYLEPTSKASLSARRESSPITEEEVRTVLRAISPTTSQDLVSRFKTRLITQEDKKAFLGIVTKISRILKHNGGRYIVLRHEHM

SEQ ID NO: 20331 - protein, 332 aa, Zea mays
  VARIANT 125..332: note = Derived polymorphism lacks residues 125 to 332
  VARIANT 160..332: note = Derived polymorphism lacks residues 160 to 332
  VARIANT 178..332: note = Derived polymorphism lacks residues 178 to 332
MMGGFLSRVLLLAFGYAYPAYECYKTVELNKPEIAQLIFWCQYWILVALLTVLERFGDFTISWLPFYSEAKLMFFVYLWYPKTKGTTYVYGTFFKPYISQHENEIDRNLLELRARATDTVVLYFQKAASAGQSTFFDVLKYVAAQSPSQKSRQRLHQDSQQPPQQQQPQVQVQQAQPQKQAAPVMRRASSIAARQAAMAQQSQETKPVSSSPKIKRQTSARSGSVASTKPPVAASALKPGGSPKKGEVKPAADPVQTPTTGADSPKPEPSAPSLPGAEGVDKMAIDEASGDAPEGAEELDPALEEETPMEETIRVTRAKLRRRTATEDPAGN

SEQ ID NO: 20332 - protein, 133 aa, Zea mays
  VARIANT 89: note = Ancestral polymorphism is R, Derived polymorphism is T
  VARIANT 108: note = Ancestral polymorphism is W, Derived polymorphism is R
MSYYGDRRAESSIVEAFTLSPLPYPVILVLLMVTLLLGASWFFTYDDFIEEASQQLSWALLGVPIALVLLIRWISSVDSFEGYLGFYPRESRWKGRYERGPAEGSSPWGVALLVLLLLVLASFHSTIHDMWGP

SEQ ID NO: 20333 - protein, 479 aa, Zea mays
  VARIANT 139: note = Ancestral polymorphism is G, Derived polymorphism is D
  VARIANT 98..479: note = Derived polymorphism lacks residues 98 to 479
MAPQLTGVPGSGAAAGGAAAVKPQFHHYHHRLPPRHHHSSPASLLSKLAFWSVCSLSLLLAFLLLSPAAPAPRAAPESPRRSLHASPSSTTSWGGAAWEKKVRASARIRRSGGHSVLVTGAAGFVGCHAAAALRRRGDGVLGLDNFNDYYDTALKRGRAALLARSGVYVVHGDIADAELLAKLFDVVPFTHVLHLAAQAGVRHALVDPMSYVRANVAGLVALLEAARAANPQPAVVWASSSSVYGLNSHVPFSEHDRTDRPASLYAATKKAGEEIAHVYNHIYGLSLTALRFFTVYGPWGRPDMAYFFFTKDILAGRPITIYESAGGGSHQTTISRDFTYVDDIVKGCVAALDTAGRSTGSGGKKRGTAPFRTYNLGNTSPVPVTQLVDLLEKLLKVKAVRKVVKMPRNGDVPYTHANVSLAQRELGYRPSTDLQTGLKKFVRWYLEYYHPELAEKHKLRTSSNGKGSRGRNGSSSSAR

SEQ ID NO: 20334 - protein, 450 aa, Zea mays
  VARIANT 364: note = Ancestral polymorphism is E, Derived polymorphism is V
  VARIANT 94: note = Ancestral polymorphism is L, Derived polymorphism is P
MERYNPSEVYELFVRHMNNPRVVVDNGACATATLVQVHSARKHGVLLDAVAALSDHGVCVRKGYISSDDGRWFMDVFHVVDAAGGKVADAGALLARLESSLSADALPPRPPPAAAGAGTPTLLELVGADRPGLLSEVFAVLHDLRCGTVDARAWTHAGRVAALVFVRDEETGSPIDDAARVRRVESRLRHVLRGGALGARMVRADASAVNMDRRLHQLLNEDGEAGSRADRAESEAEAPTPTAVAVQDWVERGYSVVTVSCRDRPKLLFDVVCTLTDLDYVVYHGTFHTDDDHARQEFYIRRLDERPISSATERRRVIQCLEAAIERRASEGVRLELRITDRRGLLAYVTRVFRENSLSVTHAEITTRGDMAMNVFHVTDVAGRPADPKTIDEVIQRIGTESLRVDEERWPRLCSTEGDAGRGGGGAGIFSLGSLVKKNLVSLGLIRSCS

SEQ ID NO: 20335 - protein, 288 aa, Zea mays
  VARIANT 116: note = Ancestral polymorphism is R, Derived polymorphism is H
MPCWRSSHVTGVHFLVDAILAKAHLRGANIPNFSIKHALLPCIYPLSKPETPERVRKQLPAMATADRVAATFLSSFPTHHPRPFSSVSLVTNPVLPVSLRAAVTGGPRLASRLRVHRVGAAVAQLPTTWSSRAVRSFAMAELEARKMRYPTTGTEGLLMGILVEGTSGAAKLLRANGTTLLKVREEAANVLGKSEMFYFSPMHPPLTEAAQRALDWAVNEKLKSGEDGEVTANHLLLGIWSDKESAGHKILYSLGFDDEKASLLAKTAGEEAAMSLREQGEHLIYSST

SEQ ID NO: 20336 - protein, 265 aa, Zea mays
  VARIANT 128..265: note = Derived polymorphism lacks residues 128 to 265
MSAGGGAGASTLGGGGPSGSGSGSGGSGAGVIGGGGGGGAGGPCGACKFLRRKCVSGCIFAPYFDSEQGAAHFAAVHKVFGASNVSKLLLQIPPHKRLDAVVTICYEAQARLRDPVYGCVAHIFALQQQVVNLQAELTYLQAHLATLELPSPPPLPAPPQMPMPGPFSIADLPSSTSVPTTVDLSTLFDPPPQWAVHQPHHHHQQLQQHQLRQPAPYGAPVRPGGGMAAESSGGGSGDLQSLARELLDRHRSGGVKLEPPPPHSR

SEQ ID NO: 20337 - protein, 183 aa, Zea mays
  VARIANT 23: note = Ancestral polymorphism is P, Derived polymorphism is L
  VARIANT 30..183: note = Derived polymorphism lacks residues 30 to 183
  VARIANT 36..183: note = Derived polymorphism lacks residues 36 to 183
  VARIANT 48: note = Ancestral polymorphism is C, Derived polymorphism is Y
  VARIANT 51: note = Ancestral polymorphism is C, Derived polymorphism is Y
  VARIANT 52: note = Ancestral polymorphism is G, Derived polymorphism is A
  VARIANT 113: note = Ancestral polymorphism is C, Derived polymorphism is R
  VARIANT 145..183: note = Derived polymorphism lacks residues 145 to 183
MDLRISEGSGTNTTLDDQSVQSPTRRAKVWEYFQQELVEVDGVMKAVCKYCGTKLTSKRNSGTNSLRNHVADTCPKISVEDRKRFIATMRKKPGEGSFVFDPRKTRECMVKWCISAEVAFNKFDDPFFAPWMESLQPSFSGVGRQTMRNDCIARFKMMRQELRNELQSLNSRICLTSDLWTSN

SEQ ID NO: 20338 - protein, 598 aa, Zea mays
  VARIANT 337: note = Ancestral polymorphism is Y, Derived polymorphism is H
  VARIANT 346: note = Ancestral polymorphism is L, Derived polymorphism is P
MAVGGTQPVLRKYLGALKDTTTVSLAKVNSDYKELDIAIVKATNHVERPSKEKYIREIFHSISAARPRADVAYCIHALARRLSKTRNWAVALKTLIVIHRALREVDPTFREELLNYGRSRSHMLNMAYFKDDSSAEAWDYSAWVRIYALYLEERLECFRVLKYDVETDPPRTKDLDTVDLLDHLPQLQQLLFRLLACQPQGASSYNVIIQHALSMVALESVKIYTAISDGTINLVDKFFEMQRNDAVRALDVYKRATNQAERLSEFHEVCKTIHIGRGEKFLKIEQPPASFLQTMEDYVRDAPTGQKQKVWKLQELFRLKLSGGPSTILFISLYSSHPVFLPLSVLHLLQTILAIEYKKEPEEEEKPASPPPAPEQEPEQEPEPEPEPVKEEAPEAEPDLLGLNEPSPAATAIEEQNALALAIVPIDDVPGAAPTFENGVTGWELALVTAPSSTETAVAPSKKLAGGLDLLTLDSLYDEANRRASQPASYNPWDATASAPMMTTMAPAMHDPFYASNGYAAPHGVQMAAMAHHQQQQQVFMLQQQMMAPAPAVHHPMQMQQNPANPFGNPFAAAGAHPYGAAGMPLHAGPGNVYTGLI

SEQ ID NO: 20339 - protein, 171 aa, Zea mays
  VARIANT 107: note = Ancestral polymorphism is D, Derived polymorphism is N
  VARIANT 114: note = Ancestral polymorphism is S, Derived polymorphism is L
  VARIANT 123: note = Ancestral polymorphism is G, Derived polymorphism is W
  VARIANT 145..171: note = Derived polymorphism lacks residues 145 to 171
MDYAFEFIINNGGIDTEKDYPYKGTDGRCDVNRKNAKVVTIDSYEDVPANDEKSLQKAVANQPVSVAIEAAGTTFQLYSSGIFTGSCGTALDHGVTAVGYGTENGKDYWIMKNSWGSSWGESGYVRMERNIKASSGKCGIAVEPSYPLKEGANPPNPGPGARRVRQLLLVP

SEQ ID NO: 20340 - protein, 546 aa, Zea mays
  VARIANT 260: note = Ancestral polymorphism is G, Derived polymorphism is R
  VARIANT 399: note = Ancestral polymorphism is R, Derived polymorphism is S
  VARIANT 444: note = Ancestral polymorphism is S, Derived polymorphism is N
MEEAAPAAVMERERLTAEMAFRGADEARREGGDPAPSIVIKIRRRLPDFARNIKLKYVKLGIRHGGSPTSLLPALCVPAVAAAAYSFVRLDVIYYSVDLLTCVAWLGTALLLLTVYYLKRPRPVYLVEFACYKPEERLKISKSAFLEMTESTGSFNEAALDFQTKITSRSALGDETYLPPGVQARPPRLNMAEARKEAEAVMFGCLDALFESTGIDPRRDVRILIVNCSLFNPTPSLASMVINHYRMREDVKSFNLGGMGCSAGLIAVDLAKDMLQANPGSYAVVLSTENITLNWYFGNDRSMLLSNCIFRMGGAAALLSNRRADAGRAKYRLLHTVRTHKGATDECFNCVYQREDEAGKAGVSLARELMAVAGDALKTNITTLGPLVLPLSEQLKFLRSLMMRRVFRVGGVRPYIPDFRRAFEHFCVHAGGRAVLEEVQRSLSLRDTDMEPSKCSLHRFGNTSSSSLWYELAYAEAKGRVRRGHRVWQIGFGSGFKCNSAVWRALRDVPPLPSSPGAAAGPGARKGTCCNPWVDDVDRYPPKAYV

SEQ ID NO: 20341 - protein, 325 aa, Zea mays
  VARIANT 6: note = Ancestral polymorphism is S, Derived polymorphism is R
  VARIANT 9: note = Ancestral polymorphism is P, Derived polymorphism is A
  VARIANT 23: note = Ancestral polymorphism is S, Derived polymorphism is C
MQMQLSVPPQVVVCLALAFLLPCHATATAPAGTIRRVTKQQILASIPPHWDENPVLFLTSPSGKYAAYFMRSQTEPGAGGLGADFCYVEVLDTTAPGAEGRSVWESECMAVSTVNTCALVFSWNGLEVFDGSTSVWHTHDAQSDDQNFLQTLQLVDQGDMRILDKGGELAWKASDEPRAAQRCGMPGSPGLASALPPFAEPIGHGSSDLPFGQGDAYGNGVGVGVGVGAGGAAQPEAPLAAPLPQPESLPLAPLPQEADQFGGAAAAAAGQGQTVQDVGQTFGFGNQPLVDNSPYDSGALKHGCSLVGNSVALGLSVAVAMGLGL

SEQ ID NO: 20342 - protein, 390 aa, Zea mays
  VARIANT 279: note = Ancestral polymorphism is D, Derived polymorphism is G
  VARIANT 256..390: note = Derived polymorphism lacks residues 256 to 390
  VARIANT 128: note = Ancestral polymorphism is R, Derived polymorphism is C
MPSPSNSHSSSSNSSDRDDDGGGGGNGRSWAAAERVASYLRNHKSVHAVCEKLGVDTKAFTPIPAGDRRACSPPPAGSICVYADALEAGMRVPLDPFFCELLSHFGVAPSQLAPNCWRIMAAFLALSRSAGVHPPSVPVFLHFFALRVLKVKGLYCFAPKDTAGIDPSTYSMMQNMRAEKAAAEAAEAAKVAAKSEPGCSASPGWTPLSGKKRPAEDNTREATGHGSASVPPGFSTRQKRKLQHAPDRHDGDTVEWEAARQLLQGVITPARERAFLMADPFSVIATSYIATLQAANYATFSLGHALKLHEELEKAKAELAEAKKTTEAELKSAKEAAVQEFLGSEEHERRLVEEALKGYERGLEDMKRVALRLRPDVDAAQLFVPPGGFQ

SEQ ID NO: 20343 - protein, 262 aa, Zea mays
  VARIANT 168: note = Ancestral polymorphism is K, Derived polymorphism is E
MGALVPQQAAVLLAALLVLAVSLLGKTAWKAEAAAPPAVVVGSVKCLDCSPSDVDAFKDLQVAIKCKSGADEGYETKARGPLDDTGVFRIPLAAELLRDDGSTDRDCFAQLRSSPDDTPCVGQAPPRMIAPASQVDGSSSTNTTYLAAAAAADTALSPVACACGKKKKKHFMFGPPPPPPRPTPTPTPAPTPTYGPPTPTPTPVPEPRPPAPEEPEPFFKKKPKLKFMRKKKPCPPLADDDTTRRPAAAGGQGQEKVPMKLN

SEQ ID NO: 20344 - protein, 275 aa, Zea mays
  VARIANT 11: note = Ancestral polymorphism is A, Derived polymorphism is V
  VARIANT 43: note = Ancestral polymorphism is C, Derived polymorphism is Y
  VARIANT 225..275: note = Derived polymorphism lacks residues 225 to 275
MEIKARQLLLAVFGIVIAIGFANAVQGETAPPVVVGLAKCSDCARRNMDAEAAFKGLQVAVKCKNSKGEYESTAVGQVGRSGAFRVPLAAADVVGEDGELKSECFAQLHSASSAPCPGQEPSKIVAAPPGHDANGEKTYVALGGKVYRSSPECASAFLCHPFFHSIMHHHHVGTHKHVVIPHLPVPDHGHGHSGVPVPPVTKPPVDVPEHKPAPVPVPEHKPPSSTPVDTPPSTPVGTPPSTPVDPAPSTPVYSPPKPTPSYYHPPAQRDAATGP

SEQ ID NO: 20345 - protein, 329 aa, Zea mays
  VARIANT 143: note = Ancestral polymorphism is L, Derived polymorphism is P
  VARIANT 58: note = Ancestral polymorphism is G, Derived polymorphism is D
MLSMRPPSTTLSRPLIWPRRGRLGGAAAPQYVSAAAPAPALEPAAPPESVSFPILVNGCTGNMGLSVAEAAALRGLHLVPVSFSSREKVEKTIQVGQTDIQIYGPSKREDVVSSIADEFPDVIVVDYTGPNSVNSNAELYCKLGLPFVMGTTGGNKHLLYKSVQDSKNYALISPQMGKQVVAFVAAMKIMAEQFPGAFSGYHLEVLESHQAGKLDTSGTAKDVIACFEKLGVSYDMNRMVKIRDPEQQLEMVGVPEEHIQGHAFHLYHLTSPDDSVSFEFQHNVCGRSIYAEGTIDAAMFLHRKVQSKDSKRIYNMDDVLREETCHKAY

SEQ ID NO: 20346 - protein, 654 aa, Zea mays
  VARIANT 82..654: note = Derived polymorphism lacks residues 82 to 654
  VARIANT 115..654: note = Derived polymorphism lacks residues 115 to 654
  VARIANT 123..654: note = Derived polymorphism lacks residues 123 to 654
  VARIANT 150..654: note = Derived polymorphism lacks residues 150 to 654
  VARIANT 157: note = Ancestral polymorphism is H, Derived polymorphism is L
  VARIANT 218: note = Ancestral polymorphism is R, Derived polymorphism is H
  VARIANT 242: note = Ancestral polymorphism is P, Derived polymorphism is L
  VARIANT 511: note = Ancestral polymorphism is C, Derived polymorphism is S
MGEGSKAMLAKPIQLADQVAQQAGWQCLRADCTELRSRAMKLAELLRQAARVELYERPAARVMADTERALHKAAGMAARCFQSHSRLRRFFTLNPVSGLPRTLALLDTALEDIAWLIRVSSPQDDDGDDDGDLRGLPNIAQNEPVLGMVWDNIARLHTGGLAARADAAATLASLARGNSYFAKYIVEEDGVAPLVKLLKEGTDDGQEAAATALGLLCRDEDSLDKLLHSGVCSVFAAALKEPPMRVQAAVADAIASLARHSHKCQDLFAQSNAVRHLVTHLSSGTIKEHSRYSIGVNGSRNAVTAAAATTTSLDNLHSVVLAKSRSVRQDEPGSSTNVPPNPLETSTGQQRARANQMQSVVQSAMAATNTTTNGVTPPGARPQLSLSSNGSSGRGSREAEDPATKAQMKAMAAKALWMLARGHVEVCKSITESRALLCFARLLEGGGGGSAGTELQFYSAMAIMEITRVAEHNLALRQSAFKPSSPAAKAVVEQLVRIVRKGDDDDLLRPCVTALGCLSRSFTASETRVIGPLVQLLDDRDVPVMKEAVVALTKFACTENHLHVNHCRAIVDAGGARHLVQLVYLGDQLQIEALILLCYIALHVPENEELAQAGVLAVLLWASKQAHMVQDLRVEALLPEAKARLDLFQSRASR

SEQ ID NO: 20347 - protein, 326 aa, Zea mays
  VARIANT 40..326: note = Derived polymorphism lacks residues 40 to 326
  VARIANT 22: note = Ancestral polymorphism is P, Derived polymorphism is T
MEMARSPAHVALCSLALLLLLTAARSATFTLTNNCGYTVWPGLLSGAGTAPLPTTGFALARGASAAVDAPAGWSGRMWARTLCATDGATGRFACATGDCGSGGVQCGGAGAAPPATLAEFTLDGSGGLDFFDVSLVDGYNVPMLIVPQGAGGGGGGGGNGSAGAESSKCMATGCLVDLNGACPADLRVMAASSSGGGGGGAVACRSACEAFGTPQYCCSGAYGNPSTCRPSTYSQFFKNACPRAYSYAYDDSTSTFTCATGIGYAITFCPSTTSGKYSGENPQAASATSSMVYLGGEQLATGASATATRASQLLVAAAAAAAVALL

SEQ ID NO: 20348 - protein, 333 aa, Zea mays
  VARIANT 8: note = Ancestral polymorphism is R, Derived polymorphism is T
  VARIANT 14: note = Ancestral polymorphism is L, Derived polymorphism is P
  VARIANT 45..333: note = Derived polymorphism lacks residues 45 to 333
  VARIANT 48: note = Ancestral polymorphism is G, Derived polymorphism is E
  VARIANT 139..333: note = Derived polymorphism lacks residues 139 to 333
  VARIANT 222: note = Ancestral polymorphism is P, Derived polymorphism is L
MAMGVATRICFVVPVLICTSSRGGRAATFTFVNRCAATVWPGIQSNAGSSRLDPTGFALPAGASRAVPAPSGWSGRVWARTGCAQDAASGKVACATGDCGSGSLECDGRNAATPATLAEFTLDPAGGNDFYDVSLVDGYNLPVVVEPAGGGGGGATTTCAAAGCAADLSERCPAELRAEGGAGCRSACDAFGRPEYCCSGAYASPSTCRPTAYSQLFKSACLRSYSYAYDDPTSTFTCAGGRDYTITFCPVAPPSLKSSSGPGATAAAPAGPTPQMPRLAGGQGGGPDGQGVMLGDSSWLASLATGAAPPGPALRASPLVPLLLGVGGLLLVL

SEQ ID NO: 20349 - protein, 450 aa, Zea mays
  VARIANT 286..450: note = Derived polymorphism lacks residues 286 to 450
  VARIANT 295..450: note = Derived polymorphism lacks residues 295 to 450
  VARIANT 303..450: note = Derived polymorphism lacks residues 303 to 450
  VARIANT 336..450: note = Derived polymorphism lacks residues 336 to 450
  VARIANT 356: note = Ancestral polymorphism is V, Derived polymorphism is E
  VARIANT 369: note = Ancestral polymorphism is L, Derived polymorphism is R
  VARIANT 380: note = Ancestral polymorphism is Y, Derived polymorphism is S
MVLEATMICIDNSEWMRNGDYAPSRFQAQADAVNLICGAKTQSNPENTVGVMTMAGKGVRVLVTPTSDLGKILACMHGLEVGAEANLAAAIQVAQLALKHRQNKRQQQRIIAFIGSPVKYDKKILETIGKKLKKNNVALDIVDFGESDDEKPEKLEALIAAVNSSDSSHIVHVPPGENALSDVLLSTPIFTGEEGGSGFAASAAAAVATGASGFEFGVDPNVDPELALALRLSMEEERARQEAIAKKAAEDTSNTENINASSSNSDSVMAEAELASNAAAGDKQEQPKDDDDLLQQALAMSMEGGASGSAAVTDSAMAEAGAVDPDLALALQMSVQDANMSSDTDMSKVFEDRTFVSSILNSVCIILKLMAYRIAYGVLYVPQAQLILWNGNSRTLSGESTQIPYTKQVLSQIVVYPFVVWIHWFGENEICPKQQNPVHMNCYPVFTNLD

SEQ ID NO: 20350 - protein, 172 aa, Zea mays
  VARIANT 11: note = Ancestral polymorphism is P, Derived polymorphism is A
  VARIANT 61: note = Ancestral polymorphism is R, Derived polymorphism is H
MRDRIRRQRIPRFRRQGVHPIRDDPQATAMAMAYKMATEGMDVKEECQRWFMEMKWKKVHRFVVYRIDERSRAVLVDRVGGPGEGYEELVAALPGDDCRYAVFDFDFVSVDNCQKSKIFFIAWSPAASRIRAKILYATSKQGLRRLLDGVHYEVQATDPSEMGFDVIRGRAQ

SEQ ID NO: 20351 - protein, 383 aa, Zea mays
  VARIANT 34: note = Ancestral polymorphism is R, Derived polymorphism is C
  VARIANT 107: note = Ancestral polymorphism is T, Derived polymorphism is I
  VARIANT 146..383: note = Derived polymorphism lacks residues 146 to 383
  VARIANT 152..383: note = Derived polymorphism lacks residues 152 to 383
  VARIANT 161..383: note = Derived polymorphism lacks residues 161 to 383
  VARIANT 171..383: note = Derived polymorphism lacks residues 171 to 383
  VARIANT 230: note = Ancestral polymorphism is S, Derived polymorphism is L
  VARIANT 235: note = Ancestral polymorphism is S, Derived polymorphism is L
  VARIANT 237: note = Ancestral polymorphism is T, Derived polymorphism is M
  VARIANT 293: note = Ancestral polymorphism is P, Derived polymorphism is S
  VARIANT 296: note = Ancestral polymorphism is I, Derived polymorphism is T
  VARIANT 329: note = Ancestral polymorphism is R, Derived polymorphism is G
  VARIANT 330: note = Ancestral polymorphism is T, Derived polymorphism is I
  VARIANT 340..383: note = Derived polymorphism lacks residues 340 to 383
MASPPHSVEPSIASCLLLLLTAAVAAATAFVLLRLPITVVTAASATARPLSKPVVLLISSDGFCFGYQYKAPLPHIHRIFANGTSATEGLVPVFPTLTFPNHYSIVTGLYPSSHDIINNYFPDPISGDYFTMKNHDPKWWLGEPLWATAAAQGVLSATFFWSGSEVTKGSWNCPDKYCRHYNGSVPFEERARGMFEDVNIILVGDHGMVGTCDRKLVFLEELAPWIELKSDWVLLMTPLLAIRSPDGVSPTEIVAKMNEGLGSGKVKNGEYLKMYLKEELPTRLHYSESYRIPPIIGLVGEGYKIEMKRSKRNECGGAHGYDNAFFSMRTIFVAHGPRFQGGRTVPSFENVEIYNVMASILNLKPTPNNGSASFPGTIPLPNK

SEQ ID NO: 20352 - protein, 487 aa, Zea mays
  VARIANT 10..487: note = Derived polymorphism lacks residues 10 to 487
  VARIANT 18..487: note = Derived polymorphism lacks residues 18 to 487
  VARIANT 152..487: note = Derived polymorphism lacks residues 152 to 487
  VARIANT 154: note = Ancestral polymorphism is P, Derived polymorphism is L
  VARIANT 166: note = Ancestral polymorphism is P, Derived polymorphism is L
MAFASSNAKQSLYPDVDQSHPDLNTPFFSAPTTSTCAGAGAATGNSLYPTVDPNELAQNLFPETVEEDAAPPPPTTEETIIAVPGAQLHLIDPDRSVDLGAGTLSIVRLRQGDHSVAVLARLIHEKPHHRRGLFRLFSSGRSDAGAEQEPVQWPLARDVAAVKLDPAHYFFSLHVPHTDHPDDKDDADGAEADAEAALSYGLTVVGKGQEEVLAELDRVLEEYTTFSVKQVETAAKEKSEVMDARAVAEITPEEAVGDKKEVVEEKSAAFWTTIAPNVDDYSSSVARLIARGSGQLVRGIIWCGDITAGGLRRGEEVMKKSVGPSTKPTQVKPSTLRRMKRARRVTKMSNRVANSILSGVLKVTGFVTSTVLNSKPAQKFFKLMPGEVILASLDGFGKIWDAVEVSGKNVMQTSSVVTTSVVTHRYGEQAGEATHNYLHATGNVLGAAWAVFKIRKALDPKGNMKKSFVSQAAHAVAKESVARQKKK

SEQ ID NO: 20353 - protein, 506 aa, Zea mays
  VARIANT 413..506: note = Derived polymorphism lacks residues 413 to 506
MEIFLSAVLGELASRSINLLISRRSARPTALDVGDSLQSALLRAQVIVDEAMGRHIANQAMLQQLDMLRDAMHRACYVLDTSRCQSHDEEDAEDQVVNHSLSLQKLTSLKGISFASNRKTPPLLEQLQESLQNLSSMILDARELVVFFRSYPPRLYSQPYSMHLLLGNCMFGFQMETELVINFLLHAEPPPGSEELDVLPIIGPSKVGKTTLVAHVCRNQRVRDHFSGILLLHDHDFADDGDDDISTTFGQRCATKLQLRMPDSNKDGRLLVVVDLVGDLGEAAWNVLYSTCKQRSMASRSKIILTSRSDKIVKFGTRPALRLSYVSSEAFWYFFKTITFGSTDPKVHPRLLHLAMDIAKMLDRSLIGANITACLLRENFDVHYWSKVRTFLRGLVQKHISKFGVHPAHLLEQDRPLQVGRMATTLEDLVFFYECQRSSQEEVPEMRFQDVMYGNVKAVGKFKALGWRSQIPPYYSYVISCQIIGQETARATKRKRSVRNRTNSFA

SEQ ID NO: 20354 - protein, 355 aa, Zea mays
  VARIANT 14: note = Ancestral polymorphism is A, Derived polymorphism is V
  VARIANT 47..355: note = Derived polymorphism lacks residues 47 to 355
  VARIANT 100..355: note = Derived polymorphism lacks residues 100 to 355
  VARIANT 267..355: note = Derived polymorphism lacks residues 267 to 355
MSVLLLKHQKIALAWMLSKENCSHCPGGILADDQGVGKTISTIALIQKEMVKQSRFMTAGSYSTKFVPNSDYDNGSDVVISMDKKEPKDEPLNELDGSARLHVASSLKLCDSKPNTATDKAEPKKKARVRYSASNLRLKTRPAAGTVVVCPASVLKQWANELFVKVMEDNKLSVLVYHGSSRTIDPNELATYDVVVTTYMTVANEVPKENSNDERKKCEMDGICPEISIGSKRKKQSKPKKKNKPSNSEGGPLAMVLWFRVVLDEAQTIKNYRTKVSRACCGLRAQRRWCLSGTPIQNKIDDLYSYFCFLKYEPYSKFSNFKYMIKHQITRDSVRGYKKLQAILKIIVLRRTKGK

SEQ ID NO: 20355 - protein, 129 aa, Zea mays
  VARIANT 80: note = Ancestral polymorphism is A, Derived polymorphism is V
  VARIANT 77: note = Ancestral polymorphism is S, Derived polymorphism is N
  VARIANT 65: note = Ancestral polymorphism is D, Derived polymorphism is N
  VARIANT 52: note = Ancestral polymorphism is E, Derived polymorphism is K
  VARIANT 50: note = Ancestral polymorphism is A, Derived polymorphism is T
  VARIANT 41: note = Ancestral polymorphism is L, Derived polymorphism is H
  VARIANT 32: note = Ancestral polymorphism is A, Derived polymorphism is T
  VARIANT 21: note = Ancestral polymorphism is A, Derived polymorphism is T
  VARIANT 9: note = Ancestral polymorphism is G, Derived polymorphism is D
MLDELRAAGRIHELAQRCPAATLKVTALVSPASHHSLELNLIHENLSGFARELGVFLQFVAYNVDALDPAELVAITSDNAVAVHLRVGSAHVTALSTVLRLVKRLGVKVVVSVDRGCDLSALGGEIYTG

SEQ ID NO: 20356 - protein, 127 aa, Zea mays
  VARIANT 126: note = Ancestral polymorphism is L, Derived polymorphism is P
MESVVNPKAYPLADAQLTMGILDIIQQAANYKQLKKGANEATKTLNRGISEFVVMAADTEPLEILLHLPLLAEDKNVPYVFVPSKQALGRACGVTRPVIACSVTSNEGSQLKLQIQGLKDSIEKLLI

SEQ ID NO: 20357 - protein, 223 aa, Zea mays
  VARIANT 19: note = Ancestral polymorphism is W, Derived polymorphism is C
  VARIANT 26: note = Ancestral polymorphism is C, Derived polymorphism is R
  VARIANT 72..223: note = Derived polymorphism lacks residues 72 to 223
  VARIANT 115: note = Ancestral polymorphism is V, Derived polymorphism is I
  VARIANT 158: note = Ancestral polymorphism is T, Derived polymorphism is I
  VARIANT 165: note = Ancestral polymorphism is G, Derived polymorphism is R
  VARIANT 184..223: note = Derived polymorphism lacks residues 184 to 223
MAGSMVDRATSDMLISPDWAKNMEICDICNRDPGLRLNPNLYESGKVCLSLLNTWWGKGCEKWGKSSSTMLQVLVSIQGLVLNDRPYFNEPGYKNSAETTGGERCSLAYNQTAFVRSCKTMLYSLRKPPMHFETLVLWHFHEHERAILDACRAYMSGTVVGSSAGTGSNRRYVHDKCFAEFHKSLMLYTEHLRAEFAANRRRVMELETEDEIVPSIAASVKSC

SEQ ID NO: 20358 - protein, 513 aa, Zea mays
  VARIANT 66..513: note = Derived polymorphism lacks residues 66 to 513
  VARIANT 86: note = Ancestral polymorphism is S, Derived polymorphism is P
  VARIANT 124..513: note = Derived polymorphism lacks residues 124 to 513
MPSASSSSSSSLYIIGDSSRLRDDPIIEVGDMDEDGSSGGALSGLVAERFASSFETQGSIDALCRKYGVPEQYSAVLPAGHQRACSPPGSAVSVYAHALEAGMRVPLHGFFCEVLAHFGVAPSQIAPNGWRAMAGFVVLSHSAGVAPSLPVFRHFFSLCAFKLKGWYYFRGKDAAGLLFKGMPLSIAGWKEAFFFLKSPTPWPCPVKWGGLSMGSTVEPALTREEQSVAKKLLRVHGAAVDIMTYLSESNLAAATIAGSSAKPPPPPIGTTSSASAKGMDPCVYDMMKNLRAAKAAQASGVTVKTEPSSDTPSSCKKRKVVEDATKQDPPRPEPPHYSPPGFFSAHKSPKVTREPDGGATSDWERARRMLQSIVTPALEQTFSVAKPSDVIASSYTTALQAANYASFSLGYALELEDKLAAREREADALRRELSQAKAELAGAKKAAAEGVRGAREAAVRDFRGSTEQVVRFAEHALAGYEKGMDDMKRAVLRRYPHLDPEQLVVPADGGGAQ

SEQ ID NO: 20359 - protein, 303 aa, Zea mays
  VARIANT 293..303: note = Derived polymorphism lacks residues 293 to 303
  VARIANT 196: note = Ancestral polymorphism is R, Derived polymorphism is M
  VARIANT 159: note = Ancestral polymorphism is E, Derived polymorphism is A
  VARIANT 122: note = Ancestral polymorphism is E, Derived polymorphism is G
  VARIANT 102: note = Ancestral polymorphism is S, Derived polymorphism is G
  VARIANT 69..303: note = Derived polymorphism lacks residues 69 to 303
  VARIANT 47: note = Ancestral polymorphism is P, Derived polymorphism is L
  VARIANT 37: note = Ancestral polymorphism is K, Derived polymorphism is M
  VARIANT 36: note = Ancestral polymorphism is R, Derived polymorphism is H
MVGSLIFPTPNVDPKAENPNEMVTAGVLSSLQNFLRKCLIAILSYGPMPKHIAFIMDGNRRYAKFRSMQEGAGHRMGFSTLIASLMYCYEMGVKYITVYAFSIDNFKRDPSEVESLMQLMEEKINELLENRSVINKINCKINFWGNLDLLYEPVRLAAEKLMASTAGNTGLVFSICMPYNSTSEIVNAVSQVCAERMEMFQSEHIGECNGHAANNGVRSEISVADLDRHMYSAECPDPDIVIRTSGETRLSNFLLWQTTFSHLQNPDPLWPEFSFRHLVWAVLQYQRVYPALEHNRKLAKKQL

SEQ ID NO: 20360 - protein, 745 aa, Zea mays
  VARIANT 40: note = Ancestral polymorphism is S, Derived polymorphism is I
MCTRMSFTGSAPESSDPNKQPGSFFVNYFRMFFRLPVYHSSEFRLIVFALCLIHVAKKQTRQWAAWTHQEEENFFNALRQVGKNFDKITHRVQSKNKDQVRHYYYRLVRRMKKLLGPRFSLDAKNSKDTIAAMLRWWSLLEKFSCSASKLHLKPRRFKTFVEALGKQLLKDRNKSRKKHSRVDMCISSPSPVISKAPGDETPPVKFLSIDSQNGSRVASPKGTIFKRIAEPISNKSGTTKGDLSATRTVKQKRKAGGAVASAAYKKWERAAMAGVSLVADAAEELERNTINPGMLCNVDARTLTSSSDRLSTGDGISTNHMKETDSQAPVKLKLQLFPINEATRKALEKDDHNPHLELTLSSRKKISSVLEHLNRKWGNSNIASGELILFPYCANQEDLATYQRWTTRDTVAVADVFLSVNSPSVFRLRYGWFSLVELGAGVSDISLTHFEDCMRPEVIQVKSPSGDKACVQKDGKNSELPDQPANVPHSRFGSQKQVQVPVTQAFEDDQGMNCVAISEVEWADTLTDISVEHLLTEASKDLDCVGTSVKDPLFLENPCSYDSFDAVVALHASRYQASEQPAHAPHSNIWGAEETCDEFSFNLSASRKQEGSNTSSSSPDTDNEVHPSNSEGFRGFLQDLTGRETDADNPCNDDAKDEEEFYAKSPPRNDKTNELKDQPLADIYWPDSLGPLDLDIPAVRYQTDDILIGDSQSSWNWNRLMANSLDAFRNLSFFSDKNDSIPSIM

SEQ ID NO: 20361 - protein, 222 aa, Zea mays
  VARIANT 128: note = Ancestral polymorphism is R, Derived polymorphism is P
MASSSTLDLAMGPGALLPRSAVPYASFAPGRGRSASGTRSRNLALSASSSNGAAVPSLTTDSEKKGPVIMEIPLDQIRRPLMRTRANDPVKVQELMDSIRVIGLQVPIDVLEVDGVYYGGLLWMPPLRGSPAPWSPNHPLQSSPWDKGNTEARAPSFSLDSIFELLDALNFSLLFQAPYAMSYILFSYKVICVSRAKTEASMVFSSSRLQFSIPVNVVQTEW

SEQ ID NO: 20362 - protein, 126 aa, Zea mays
  VARIANT 104..126: note = Derived polymorphism lacks residues 104 to 126
MEVPVHFKVLMCILLFLRCVLEGVAEPGNPTLREMDFLWKVRMRMTMRTPHICSMFNMMQGMLDNLNQNGTAQWETLVEISKERADQRRREIVVDMQNKIEDIGRCLKLDVDYGISEVSDEYWVAT

SEQ ID NO: 20363 - protein, 373 aa, Zea mays
  VARIANT 16: note = Ancestral polymorphism is S, Derived polymorphism is L
  VARIANT 58: note = Ancestral polymorphism is G, Derived polymorphism is R
  VARIANT 68: note = Ancestral polymorphism is S, Derived polymorphism is G
  VARIANT 74: note = Ancestral polymorphism is R, Derived polymorphism is H
  VARIANT 89: note = Ancestral polymorphism is H, Derived polymorphism is N
  VARIANT 103: note = Ancestral polymorphism is R, Derived polymorphism is C
  VARIANT 106: note = Ancestral polymorphism is C, Derived polymorphism is Y
  VARIANT 118: note = Ancestral polymorphism is D, Derived polymorphism is Y
  VARIANT 134: note = Ancestral polymorphism is S, Derived polymorphism is R
  VARIANT 160: note = Ancestral polymorphism is A, Derived polymorphism is T
  VARIANT 166: note = Ancestral polymorphism is M, Derived polymorphism is T
  VARIANT 168: note = Ancestral polymorphism is D, Derived polymorphism is Y
  VARIANT 172: note = Ancestral polymorphism is G, Derived polymorphism is R
  VARIANT 183..373: note = Derived polymorphism lacks residues 183 to 373
  VARIANT 186: note = Ancestral polymorphism is L, Derived polymorphism is I
  VARIANT 202: note = Ancestral polymorphism is N, Derived polymorphism is K
  VARIANT 216: note = Ancestral polymorphism is P, Derived polymorphism is H
MVCHAVPIDLTGLFFSLRRLSLESMDDLDTCPDFDAATPHSLDATPTGPETARGASLGSNPFEDQRLSIDDVQRIEWKLLNDKMKKWVHGVKTVVRVLLAGERRLCDQVLDASDELMYVCFLESTKGCITQILSFGGVVAVCPRSPEKVPWILDMYEALAEVIPEMKDLCIGCSRDGVISDVQAILDRLGDAMWGSGTLGENDPFWKASSEADILPGGQFARVYHYFAASEIYNAICVFIACYVWMTGFGNFSYYYIKKDFSIARFAQMMWRLNFFVAFCCIVLDNDLMLYYICPMHTLFTLMVYGSLGLFNKCNEVPSIMAIKIVCLAMAAGPSDGVGAVLNVLASMQQHNHRVLFDVANGRIGFSRELCTA

SEQ ID NO: 20364 - protein, 872 aa, Zea mays
  VARIANT 356..872: note = Derived polymorphism lacks residues 356 to 872
  VARIANT 307..872: note = Derived polymorphism lacks residues 307 to 872
  VARIANT 211..872: note = Derived polymorphism lacks residues 211 to 872
  VARIANT 183: note = Ancestral polymorphism is A, Derived polymorphism is V
MNLSEDWRSVFPVCAVFAAPSVDPLPAAAASRGPLHFSPLPPRTPLLSLPYPIPLPRSSTRGLNRFLRSFVRGTSFLPRSDFDYLADTLIPQPSSSSPPSNLLAVLRLSCSLILFFPYGENAEHVAFVTLDATTVTGSTPLSPVVQSDGFMHPGHRIQQLVTTANESSWPSQLEDNPEGFLLAVTMYSLNWFRVESQDLGTSVLVPIAKQQVDSVIVHACWSRHLPSECVVLLESGELCWFNLDTRQGGKIKIDVGSKDDTGEWLSCDYGAQPWMIIVASSKSILLIDLRFGDRGQYKVLARVGMPGLLETDPFAEADQYLAFCRGGLDHFHFSVVTKRYLILLDLRQPLTPVLAWQHELKSPSNVAMFRLSELRPSKEHEWASNSGFAILVGSFKTGEFSVFCYGPKEQGCPDNSHLYAWDLPSRFSLTGHHCSCSSGRMKDVFSMPVSRDEYASKWSKNSIIGYYVLPNHLSVSETSFTGFALVCLTAMGKLEMQRYRASADSHNDIPCDESKHTARASNLAIFPDTPYDNFSLRYSLMKLRFLSEYLEGNLCNALVKHGSSINKEMGHIIISEAVSEYAKENSSSLPHPVSDFLCNVSIPMNIFEISCQRILNGLPSDILHVTFSKYSDMLACSTEKTLCEHLDVPTCLTNTKLRPFLLAKPSSISYNLTSKVRSPDALVGPVLPIPVLLALEEKSKDAESSSQGVPIETDSINDRCREVFEALDPVISIADTDNGNGWPASQELDEGKSYFSYEPQIEHRFSMGRSTRKEEKEDQNQDDLHRSSTLYEDKVFTTFVCGKAKVPDSPEQAATLFDFGPVRIDFDTPAMEIQPAEEKVYKCLRKQFVTWRNNFKPYQDFCSTHKIPKLRQ

SEQ ID NO: 20365 - protein, 212 aa, Zea mays
  VARIANT 1: note = Ancestral polymorphism is M, Derived polymorphism is L
MNDKEMMCQEQCDELSETEISSQEASNSSGPVSLDLSLSVTDNSNGNNSNSGGAQADAAREPSRVFTCNYCQRKFFSSQALGGHQNAHRRERTLARRALRLDAAGPYYGYGYGYYADVASLPLYGSCLYPIGIQAHASAAALPEHEDARAGADELRRPARGLLSPMPFLVADDEEMLFGWPGSFRPDAAAPADSAGGVAVHAREEPDLTLRL

SEQ ID NO: 20366 - protein, 735 aa, Zea mays
  VARIANT 493..735: note = Derived polymorphism lacks residues 493 to 735
  VARIANT 466..735: note = Derived polymorphism lacks residues 466 to 735
  VARIANT 429..735: note = Derived polymorphism lacks residues 429 to 735
MFGDSDGSKDASAAAPGSNPPEPPFPSRELTLSSYLCDKAPPAAAGPSSPPNPEAAAGPAEDAAASAKLCVERDFLHLTAPKRGDPPGDDSSVVGGKKPRLESLQLSLSLSTDAPAPPPASQQPSSSLLPPSQLASFLPVDGDLRCGSAAPAAAAAVPAAPAPPPRRTYSANTGRTRSINSDDMSYSYSVFSHNPSCSLTHNSTDIYAAGEGTNGSVHSRFNFRPMGDGSVAFAPAQLKEGTASFFPTELPARAAAALSAGGSFDGSRGGMHSSRPDRILREIVSDSVPAVAQVLQDFPSETLEVLRETVRSMVDAPEKRDELSSLQRKLERRSDLTAEVLGRANKTQLEILVAIKTGMATFVTGKGRVSGSELVEMFLMTRCRNMNCKSAVPVDDCECKICSTKKGFCSACMCPVCQKFDCAANTCSWVGCDVCSHWCHAACALEKNLIRPGPTLKGAMGTTEMQFQCLGCNHASEMFGFVKEVFNCCAENWSAETQMKELDFVRKIFAASEDFEGKGLHAKAEEVLSMLVKKTISPSDATKTMLQFFKYGVTDYSVTGSKSKGILAAQTSKSTDMLHLQTPTITPPKSSFNFKPSTSILDSQINVLKASPKPLSIEPHFSSSSKEDDSSSLETIVKCKEAEAKLFQKLANDARKEVDSYRQIVRAKTHKLEEEYAAKVAKLCFQETEEKRRKKVEELKVLENSHYDYHKMKLRMQTEIQGLLERMEATKKMWV

SEQ ID NO: 20367 - protein, 334 aa, Zea mays
  VARIANT 86: note = Ancestral polymorphism is A, Derived polymorphism is T
MVCSFVLAAAAAATLACLSAAAAATGDLLPSSSETPLSFGDGYTQLFGDSNLALHGGGKRVHISLDERTGAGFASQAAYLHGHFSARVKLPADHTAGVVVAFYMSNGDVYERTHDELDFEFLGNVRGKEWRVQTNVYGNGSTAAGREERYGLWFDPTEDFHRYAIHWTRDRIIFYIDDTPIREMVRTESMGAQFPSKPMSLYATIWDGSSWATSGGRYKVDYKYAPYVAEFADLALRGCAAGPAAACATSGGDDDAYGHAAAAMPPARRSAMEAFRARYMTYGYCYDRLRYPAPLPECSVGAEAAAFLPSGDARAALHRHGRRSRMRRGADFAV

SEQ ID NO: 20368 - protein, 453 aa, Zea mays
  VARIANT 27: note = Ancestral polymorphism is R, Derived polymorphism is C
  VARIANT 94: note = Ancestral polymorphism is F, Derived polymorphism is S
MSSTTTSPPPPAAGDHPRVLLRGFLSRETCKELEFVHRSCGAAGYRPSVISTSLPHLAATGCGHLLLPFVPVRERLRDAVESFFDCHFDLFIEFTGLISWCKGASIGWHSDDNKPYLRQRAFTAVCYLNNHGEDYKGGILQFQDGDPSCIVPVAGVSKSNFTLHPCGFKILLMKHTFVVSKMFWVILVSFMRNIFVQDVVIYTADTRNVHCVNEVCPVVTEGERLTLTLWFTRDRAYDEDPKLLNFLSQTSLSCEPTEQNSYIPVPASDNMYRFSCDQSGFDIRCARVHILGFSFHSSSGECNISASPAEDDPIELLGKQLRLGRGDDVFEKIFSNSLHALQVVQFYYWKKHELAARREQSVVSSGTVCCPVTHHSKGTELPLPCNHALAQTIFGSYNTEEIVQWNDFALAVAMWEKYSEELKKQLLTFLPYWLSNETIYVVDTSELQRAEPI

SEQ ID NO: 20369 - protein, 513 aa, Zea mays
  VARIANT 72: note = Ancestral polymorphism is R, Derived polymorphism is P
  VARIANT 85: note = Ancestral polymorphism is L, Derived polymorphism is I
MVLWPRLVANKLFRKTSGSHAFVADFPATDGDGDVVFGGTEFDGGGCSPDPDDADASRCVKRARPQPQPQERNKKTLKYKYVLLLLAMCTRAVANHVFLRERREPLFASTWNVGGVAPPDELDLSDWLDGGGGDDDDGPYDMYVLGFQEVVPLRARNVLGADKKRVGMRWIELTRAALNRSSSSHAQRGGGSGGGSGSGDGGGGGRQKVHPVRDGGGGGGLACRDYRCVVSKQMVGVLLTVWVRSDLRRFVRRASVSCVGCGVMGCLGNKGAVSVRFWLHETSFCFVCCHLASGGRDGDEAHRNADATEILSRTAFPRGQALNLPLPHKILDHDRVILLGDLNYRISLPEAKTRLLVERQDWKTLLENDQLRAEVRRGGAFQGWSEGPIAFSPTYKYCPNSDAYYGCATASATADARRHKRRAPAWCDRILWRGEGIRQARYGRCESRLSDHRPVRAVFTVEVGAPAPGSNLNSLRSFFMSERFDGAGSRSPAADQLLRRDDDVNSARFSDAL

SEQ ID NO: 20370 - protein, 448 aa, Zea mays
  VARIANT 401: note = Ancestral polymorphism is A, Derived polymorphism is V
MALLVKSHQQMLVSSSTTSSSSPSSASQQRHPPPPPPPSSSCLTDQQQPSPAKRKRRPPGTPDPDAEVVALSPRTLLESDRYVCEICGQGFQREQNLQMHRRRHKVPWRLVKRAPPPAGGGEDSAGANNSSTAGTGVGGGGGGPRKRVFVCPEPSCLHHDPAHALGDLVGIKKHFRRKHGGRRQWVCARCAKGYAVQSDYKAHLKTCGTRGHSCDCGRVFSRVESFIEHQDACNSSRIRGEAVAVAVPAPPSALPVIRPAVPRHQPTVAPAPPPPELQLLPASAAASAPLASTPTASLSTTTNASQEQEPHAAAAATTTTKLQLSIGPTVIAPGADAAAATASAVGEEDDSEAKELRRAMKEKAAADAARARARGEAAAAERALDEARRARQRARADLEKACALRDHAARLLAQVTCHACRQRSLAVAGGPAVACDSIIRGGGGEAGI

SEQ ID NO: 20371 - protein, 589 aa, Zea mays
  VARIANT 397..589: note = Derived polymorphism lacks residues 397 to 589
  VARIANT 337: note = Ancestral polymorphism is L, Derived polymorphism is S
  VARIANT 95: note = Ancestral polymorphism is A, Derived polymorphism is T
MRNSNFGFPRVLPTSSASAEPSPKRRRIGEATDPPPEMREEALERLRGVVRDSAGKHLYTSAIFLADKVAAATGDPGDVYMLAQALFLGRQFRRALHLLNNSRLLRDLRFRFLAAKCLEELKEWHQCLLMLGDAKVDEHGNVLDHDVGSDIYFDKDAEDHEINIKSALCFLRGKAYEALDNRDLARQWYKAAVKADPLCYEAIECLVDNYMLTCEEEVELLSSLQFGEEDGWLSAFYSCLVTKHEKEYLVEAKFKELEQEACSISSSSSGETMKNNIDVLVCKAEYYHQSGEYQKCFKLTSSLLERDPFHLKCTLVHLATAMELGHCNDLYLLACNLVKDYPQKALSWFAVGCYYYCIKKYDQARRYFGKATGLDGAFPPAWIGTGIAYAAQEEGDQAMAAFRTAARLFPGCHLPTLYMGMQYVRMHNFKLAEQFFTQAKSICPSDPLIHNELGVVAYNMKEYRKAVQLFELTLDHTSSSLNEMWEPTLVNLGHALRKLKEYQKAVSYYAKALTFPTKSLSAFAGLAYTYHLMDDFEAAINYYHKALWLKPDDQFCTDMLTYALESICQITARRKPGRGLLTATGGVTC

SEQ ID NO: 20372 - protein, 157 aa, Zea mays
  VARIANT 46: note = Ancestral polymorphism is G, Derived polymorphism is R
  VARIANT 89: note = Ancestral polymorphism is Q, Derived polymorphism is H
  VARIANT 101: note = Ancestral polymorphism is M, Derived polymorphism is I
  VARIANT 130: note = Ancestral polymorphism is R, Derived polymorphism is C
MKSTLCNERSSQSHCMIILDVPSVGGRLMLVDMAGSENIEAAGQTGFEAKMQTEKINQGNTALKRVVESIANGDSHVPFRDIKLTMLLQDSFEDDKSKILMILCASPDPKELHKTISTLEYGAKAKCIVRAAHAATPRDKMSSEESFVEENWLKVTS

SEQ ID NO: 20373 - protein, 490 aa, Zea mays
  VARIANT 190: note = Ancestral polymorphism is M, Derived polymorphism is I
MVLSKAVSESDMSVHSTFASRYVRSSLPRYRMPENSIPKEAAYQIINDELMLDGNPRLNLASFVTTWMEPECDKLIMAAINKNYVDMDEYPVTTELQNRCVNMIAHLFNAPLGESETAVGVGTVGSSEAIMLAGLAFKRRWQNKRRAEGKPFDKPNIVTGANVQVCWEKFARYFEVELREVKLRDGYYVMDPEKAVEMVDENTICVAAILGSTLNGEFEDVKLLNDLLQAKNRETRWETPIHVDAASGGFIAPFLYPDLEWDFRLPLVKSINVSGHKYGLVYAGIGWCIWRSKEDLPEELIFHINYLGADQPTFTLNFSKGSSQVIAQYYQLIRHGFEGYRNIMENCHENAMVLKEGLEKTGRFDIVSKDEGVPLVAFSLKDRSRHDEFEISDMLRRFGWIVPAYTMPPDAQHVTVLRVVIREEFSRTLAERLVLDIEKVMYQLDALPSRLPPPPPAAPLLRKKTELETQRSVTEAWKKFVLAKKTNGVC

SEQ ID NO: 20374 - protein, 635 aa, Zea mays
  VARIANT 33: note = Ancestral polymorphism is P, Derived polymorphism is S
  VARIANT 31: note = Ancestral polymorphism is L, Derived polymorphism is R
MPSRAAIRMKPPSFSVSLTTASQLHDAIDRLLSLLRADASHAPAARAIAAAVASLRPPSTLLSNRILHLLSSHPATLPDALALLSSLPSTDVCSYNTLVAALGRSPRGLASARALFDRMPRRDHFSWSAIVSAHVRHGQPRAALAIYRRMLREPGGSGADNEFTASSALAAATAARCARAGRELHCHVVRRGIDADAVVWSALADMYAKFGRLDDARSVFDRMPVRDVVSWTAMLDRYFDAGRDGEGFRLFVRMMRSGILPNEFTYAGVLRACAEFTSEKLGKQVHGRMAKSRTGDSCFAGSALVHMYSKYGDMGTAMRVFRGMPKPDLVSWTAMISGYAQNGQPDEALHCFDMLLSSGFRPDHVTFVGVLSACAHAGLVDKGLGIFHSIKDKYGIEHTADHYACVIDLLSRSGLFERAEDMINTMPVKPNKFLWASLLGGCRIHKNVRLAWWAAEALFEIEPENPATYVTLANIYASVGLFDEVENMRRTMELRGITKMPASSWIEVGTRVHVFLVGDKSHPQAEEIYALLKKLYVKMREEGYVADTGFVLHDVEDEQKQQDIGYHSERLAVAFGIIATPKGSPIKVFKNLRICGDCHTTIKLISKIVQREIIVRDSNRFHHFKNGSCSCRDYW

SEQ ID NO: 20375 - protein, 317 aa, Zea mays
  VARIANT 35: note = Ancestral polymorphism is D, Derived polymorphism is Y
  VARIANT 37: note = Ancestral polymorphism is T, Derived polymorphism is P
  VARIANT 140: note = Ancestral polymorphism is G, Derived polymorphism is R
MAASLQLAIFMSAAIALGFAGVQAGAAQLCSEYYDRTCPVVHRVARRVLKKAHESDVRIYASLTRLHFHDCFVQGCDGSILLDNSSSIASEKFATPNNNSARGYPVVDAVKAALEEVCPGVVSCADILAIAAKISVQLSGGPRWRVPLGRRDGTTANNLPSPFDNLTTLQQKFGAVGLDDTGHRPCRPLRGAYVRARAVPVRDGAAVQLQRHEPAGPDAGQGVPGVPLPAVPEGRRQRVGAQRPRPGHAGHLRQRLLHQHRGAPRDAAVRPGAAVDALRAHGADRPPLRRQPEGVLQELRQVHDQHGEHPGADGEPG

SEQ ID NO: 20376 - protein, 365 aa, Zea mays
  VARIANT 277..365: note = Derived polymorphism lacks residues 277 to 365
MSSPPRGQPATAAVPAVAAATSPQLPAASHTLPRAFLATSSPRAIVAAPAPPLFTGRPLNPNPPAHGSSVPHGILYPVLKSASTSNSAAAAVTAQLRRVPPMAVGYPRTHAVAIPIAQQQQPLVHAQPRSFAAVPRALVTGVSTGSEQPPRGVPIGSQPKVNPVPPVGPSNEQSNPKDREKSREEPTVVVINDRKVNLLDSESGSFYALCRSWVRNGVPHESQPSFGNGEPLLPRPLPASVVDSRISDKDDNDVAGEDSDEEPQKKYFPSSMFYIGYSCLHLHLLKSLLVRSKKQCIEGQTWCSGESYLTESNLSVFAGKNANGEYNTSDLLKQHVKRAKRIRAGLQKDRLRRIERYKQRLALLL

SEQ ID NO: 20377 - protein, 1171 aa, Zea mays
  VARIANT 676..1171: note = Derived polymorphism lacks residues 676 to 1171
MPGVASAAGSGIWSRRRDEITFDRLQKFWNDLLPQARQELLKLDKQTLIEQARKNFYCSRCNGLLLESFAQIVIYGKSLQQEASDIGHLRTAIELRITHGEQDGAQDPSIHPWGGLSTTKDGFLTLLDCFIKAKSLRVLQNVFDNARAREREREMLYPDACGAGGRGWISQGMANYRGHGIREMCALHTAHLSCTTLVDFWSALGEGTRSSLLRMKEEDFIEKLMYRFDSKRFCRECRRNVIREFKDLKELKRMQREPRCTSWFCVADTAFKCEVFEDAVVIDWHQCLSEPDESYDHFEWAIGTDEGESDIFGFENVGMNAQVHRNGIDLDQFEDYFITLRAWRLDGQCTELCVKAHALKGQSCAHHRLVVGDGFVTMTKGESIRNFFEHAEEAEEEDEDDAMDRDGNDFDGDDAHSQKHAKSPELAREFLLDAAAVIFKEQIEKAFREGTAQQNARSVFVTLALKLLEQRVHVACKEIITLEKQLNLLQNKLLEEEEKEKREEHERGMKRRTREREKKNRRKERLKEKDHSKGKRLVESKSPDNISSSAPSNSTASINDYSTNTLDSRDSGTEEEYSAEGVNLCTPDSCVNQSSCKKINGENSVHCNAVTEFSPMDNSDISTSDQPKSLRRSPRSRDYFPQDQSCWYDDCGDESGRIGELRWKSREKTRGTDRSCNTASTSNNKTRERHSYNFCSCGHPEDYGVMDSCFLPTVRSVREMKIARKSGVEKPKVQYNRCYTLDSFIVPKGNHAGCTQKNAIPKQVWEPMDARRKTNLHNTVHDSGSINDVDPLKHVVFDNSGSHKFSVRCESQPQASESSRDVCNSDQRCANGGRNQTTSCASTLMVNKQNCYSENDEGSRHDVELMTNSASSDSTSSCMSQGDRESSSSSTTSSSAQNPESSSESEESPERINSTVGTPSSRAASRSLLEACAGNGFREYQPKTTRPAHNDMFGYNVSPVQDQLLHYQITHPPQQPPITMGFHDRSWAAPTNGNFQYARPSHLYSSPLVFGVPGNHFIDYPYMAPAFSHIPPEPIHKAAGSFRAVPLSLPFQNGHRQVAEHTQRDMNLERHPSKLTMLTGKDPPEDKNKSGLKYLPEDKNKSWEADASFSLFQFNLPIASPVTPSSKDKSGKLAARTPLVEVQPQLCLREQADVKQYNLFSSKDNGIFSFM

SEQ ID NO: 20378 - protein, 478 aa, Zea mays
  VARIANT 236: note = Ancestral polymorphism is Y, Derived polymorphism is C
MACCFVRVAAAPRLLIYRAAAPRQLPSPLNVFRKGFSEQSVLPVTDSIECFQGPSVPNTPRIPLYDDSVSSSILDTLSNPTGGVPHADPSKSRIMLVDGTSMMYRSYYKILAQLQHGQLEHADGNGDWVLTIFKALSLLLDMLEFIPSHAAVVFDHDGVPYGHYTAMPSKECHMAKGMGYIGSNKHTSHQGHLRCSNLGGLRDTLLTHWKESIPTLIHLAVVSCYSHLLNPIKKHYHFFSPLGMTFRHMLYPAYKSNRTPTPDTVVQGMQYLKASIKAMSIKVIEVPGVEADDVIGTLAINSVSAGYKVRIVSPDKDFFQILSPSLRLLRIAPRGSGMVSFGVEDFVKRYGPLKPSQFVDVVALSGDKADNIPGVEGIGDINAVKLISKFACWKNRSGAVALISHSEQAILCKNLATLRSDLPHYMVPFKTADLVFKKPQDDGEKFIKLLRALEAYAEGSSVNPIIRRAAYLWNKLKS

SEQ ID NO: 20379 - protein, 298 aa, Zea mays
  VARIANT 112: note = Ancestral polymorphism is E, Derived polymorphism is G
MGDLPEPEAAMAVPEPSSSLALRVFYLRVSRCEVDESMLDTLALTHTPLTPDTILDVSGAEHQPGMGKGNGSVSFCLRRDRVDKRSGEATFVCTATVRVSGSVRFEVQSKDERIVVGILEACDVDSKGTKSWAMKCQAATQRGSGFLRCGGEKRDTKPPVVEVYVAGVFRGTPVVFTKATQLRFRRRRQVRAFMDPIPECREQVEETHHPEESGYRCYKPDPNWDDDDVDDDSLYMRSDGTDDGEEYSELSWFTAGVRVGVGISLGICLGVGIGAGLVVRSYQSTSRTLKRRLISNLL

SEQ ID NO: 20380 - protein, 229 aa, Zea mays
  VARIANT 16..229: note = Derived polymorphism lacks residues 16 to 229
  VARIANT 42: note = Ancestral polymorphism is D, Derived polymorphism is A
  VARIANT 77..229: note = Derived polymorphism lacks residues 77 to 229
  VARIANT 80: note = Ancestral polymorphism is G, Derived polymorphism is D
  VARIANT 95: note = Ancestral polymorphism is W, Derived polymorphism is S
  VARIANT 109: note = Ancestral polymorphism is A, Derived polymorphism is S
  VARIANT 117..229: note = Derived polymorphism lacks residues 117 to 229
  VARIANT 120: note = Ancestral polymorphism is I, Derived polymorphism is T
  VARIANT 140: note = Ancestral polymorphism is N, Derived polymorphism is K
  VARIANT 141: note = Ancestral polymorphism is C, Derived polymorphism is R
  VARIANT 145: note = Ancestral polymorphism is S, Derived polymorphism is R
  VARIANT 153: note = Ancestral polymorphism is E, Derived polymorphism is D
  VARIANT 162: note = Ancestral polymorphism is L, Derived polymorphism is V
  VARIANT 176: note = Ancestral polymorphism is V, Derived polymorphism is M
MGFRCPNRKGVADFLQEVTSRKDQYQYWCTRDEPYQYILVNDFVESFKAFHVGHALQSELELPFDRTKNHPAALTTSKFGISKMELLKACFCREWLLMKRNSWTKVSVAFNFLAYAQSLIPFISWSIQKENPLLRLTVENCELSSIGVITLLECLTNVKQLLDVLSIADNHLGSSMAAALARFLGSHVRALTATDIGLGIVGFQTLEETLPTEVALSHINISKNLVGSE

SEQ ID NO: 20381 - protein, 176 aa, Zea mays
  VARIANT 74: note = Ancestral polymorphism is Y, Derived polymorphism is C
  VARIANT 172..176: note = Derived polymorphism lacks residues 172 to 176
MIQAVMVISTQAKPRLLKFYSFQVPNPLLSSLQPPEKHQDLVRCVFQLLSARPESASNFVKVDSIFGPGTKMVYKHLATLYFVFVFDSSENELAMLDLVQVFVETLDRCFKNVCELDIVFNFNKLHTILDEMISGGQVIETSSEQIMKSVEEIERLEKQSSTTSFIPKSITERFTR

SEQ ID NO: 20382 - protein, 251 aa, Zea mays
  VARIANT 131..251: note = Derived polymorphism lacks residues 131 to 251
  VARIANT 56: note = Ancestral polymorphism is S, Derived polymorphism is Y
  VARIANT 50: note = Ancestral polymorphism is G, Derived polymorphism is R
  VARIANT 46: note = Ancestral polymorphism is G, Derived polymorphism is R
MMYSPPRTDPDREDEQCFAIGANLLSSLDHTMKFDEPIAFPMNNVGMQERVQLYNSTGDAQLSRNANTGKCSKGGKRKSSGGINSSLHSLVRKLEATVALFHRLHHTSLPLFHPTVHINVLLQDEARALLQREVSMECADENAAGAKREDYAHVRAKRGQATNSHSLAERFRREKINVRMKLLQDLVPGCNKITGKAMMLDEIINYVQSLQRQVERGVIWNEELRSIAPNAFASDTVAAVLDFCEISQDPS

SEQ ID NO: 20383 - protein, 95 aa, Zea mays
  VARIANT 81: note = Ancestral polymorphism is A, Derived polymorphism is V
  VARIANT 71: note = Ancestral polymorphism is A, Derived polymorphism is V
  VARIANT 69: note = Ancestral polymorphism is A, Derived polymorphism is V
  VARIANT 63: note = Ancestral polymorphism is G, Derived polymorphism is R
  VARIANT 47: note = Ancestral polymorphism is D, Derived polymorphism is H
MVGKDHPVPAISKSEFTVICDFPSQITLIANENENRLDILEAARKADRGSDRLQASPIVISNRRNIRLAAASIHVNGRFFANSSSLRLNTFYQFR

SEQ ID NO: 20384 - protein, 290 aa, Zea mays
  VARIANT 113: note = Ancestral polymorphism is R, Derived polymorphism is T
  VARIANT 126..290: note = Derived polymorphism lacks residues 126 to 290
MDPNYGEWNFSEIKIAKALIASHNAKSSYSSDMNNKQTDIIDMLQARFPTKEKHKVTKLYVDLMLEKMQMILSGNQHATMGKKLVNDKFGMSIEDPAIDFMGGDLVEKRTAKRKAREDMNTHLDSQKERRYRRFWTIDEHRNFLYGLRAYGRSDWKNISKHFVTTRTPMQISSHAQKYFHRMENIARRQRSSINDIVLHDDEPRVQSNDSSLQRFTFTSGTYNPNHYGSSSQFVAMSNIAKHMWFPSVCCIDQESTSNNQITTLDRGGSGGSCVALEVQGVGSKAKLISD

SEQ ID NO: 20385 - protein, 463 aa, Zea mays
  VARIANT 372: note = Ancestral polymorphism is R, Derived polymorphism is W
  VARIANT 335: note = Ancestral polymorphism is L, Derived polymorphism is Q
  VARIANT 230: note = Ancestral polymorphism is G, Derived polymorphism is W
  VARIANT 130..463: note = Derived polymorphism lacks residues 130 to 463
  VARIANT 90: note = Ancestral polymorphism is T, Derived polymorphism is M
  VARIANT 75: note = Ancestral polymorphism is C, Derived polymorphism is Y
MPQYQELPCGGQELDIDTALKDGILGGALEPVGAAAGDDGKQPVELRRMMDELDAAAGDGGGGGGDEAVPAVFICPISLEPMVDPVTLCTGQTYERANISRWLALGHRTCPTTMQELWDDALTPNATLRQLIAAWFSRRYTRFKKRSADFHGRAADLVGSLRGTAVPRRQPLKGQARVAALRELRTLAAAHQSVTKAIAEAGGVALLTSLLGPFTSHAVGAEAVAILVSGVLLDADTKAALMQPAKVSLVVDMLNEGAADTKINCVRLIRILMVERGFRPETVASLSLLVGVMRLIRDKRHPDGVAAGLELLNSICAVHRPARCMVVSIGAVPQLVELLPELATECVEPALDILDALSAVPEGRMALKDCPRTIPNAVRLLMRVSEACTRRALSMLWTVCRMAPEECAPAAVEAGLAAKLLLVIQSGCAPELKQKASELLKLCRLNYTDTLFISKCKLTRTIQ

SEQ ID NO: 20386 - protein, 176 aa, Zea mays
  VARIANT 98: note = Ancestral polymorphism is D, Derived polymorphism is V
  VARIANT 8..176: note = Derived polymorphism lacks residues 8 to 176
MTHKDRFQKLGIRPPKGVLLYGPPGTGKTLMARACAAQTNATFLKLAGPQLVQMFIGDGAKLVRDAFQLAKEKAPCIIFIDEIDAIGTKRFDRYAFYDIFSSCMIHSRKMNVNPDVNFEELARSTDDFNGAQLKAVCVEAGMLALRRDATEVTHEDFNEGIVQVQAKKKSSLNYYA

SEQ ID NO: 20387 - protein, 263 aa, Zea mays
  VARIANT 66: note = Ancestral polymorphism is G, Derived polymorphism is S
  VARIANT 19: note = Ancestral polymorphism is S, Derived polymorphism is P
  VARIANT 16: note = Ancestral polymorphism is I, Derived polymorphism is T
  VARIANT 12: note = Ancestral polymorphism is L, Derived polymorphism is V
MGAIRVASLLLLAGVIWLSRAMFGAEAAGTTVFTLHNNCTHTVWPATLSGNSAAAVGGGGFELSPGATVSFPAPAGWSGRLWARTGCVASSSSPAGRLSCATGDCSGAASCSLGGAPPVTLAEFTLGGADGKDFYDVSLVDGYNVGIGVAAAGARVNRATCGYAGCVGDVNALCPPELRTAAAAGGEGAPAVACRSACEAFGSPEYCCTGAHGGPNTCGPTKYSRLFKAACPAAYSYAYDDPTSTFTCGTGAQYLVTFCPGRQ

SEQ ID NO: 20388 - protein, 673 aa, Zea mays
  VARIANT 485..673: note = Derived polymorphism lacks residues 485 to 673
MDSAADSSSPRCHHGQYRQIFFFFVMLLGSCTISVERKDAGELEDQTSTSKMPSSASELPCSLKREVRVLEKRLDDQFVMRRALEKALGYKPCAVHASSVNCIPEPTEELIKEIAVLELEVICLEKHLLTLYRKAFEQQLSPVNSACDAENNKQPARSFSGILSEASVLSFSTPRKHQPVQSSRMVLARKSTPTASTSEASSEKINIGRSHSSLLHRSVRVSPSANNLARALKPCHTSPLSFVEEGKCMEPGVVSLADILGTRVADHVPQTPNKISEDMIRCIAAIYIRLRDVPSAAAQHAFFPSPCSSFSSASGLSSKYTADVWSWSPRCRRESFTEAWQVQDNELGLGGGEARDSGLQYDSVIEVSALCKGDQRSADVKDMLRKYMSLVQLLESVDLGGMKNEEKLAFWINVHNAMMMHVKLFSCPEVNIEAEMEFALNISSSSSFFQAHIEYGIPQSNSKRILLTKVSYIVSGQRVNAELIEYQILCCRAHSSGQWLRLLLHPKWKSGRDRDEELQGFAVDRPEPLVHFALSSGSYSDPVVRLYSPKSLFQQLEAAKEEHIRANVAVGVRGRGQRKIILPRALELYARDAGLGAQEVVAAVACHLPDGLRDAVRRSPPAGRARGGVEWKPHNLAFRYLLAKELVGGSPACGRQQLKKCGPPIGAPLRADR

SEQ ID NO: 20389 - protein, 170 aa, Zea mays
  VARIANT 106: note = Ancestral polymorphism is A, Derived polymorphism is T
  VARIANT 151..170: note = Derived polymorphism lacks residues 151 to 170
MALAEADDGAVVFGEEQEALVLKSWAVMKKDAANLGLRFFLKVFEIAPSAKQMFSFLRDSDVPLEKNPKLKTHAMSVFVMTCEAAAQLRKAGKVTVRETTLKRLGATHLRTKALRLKHALEYIQVTGFALLETIKEALPADMWSLEMKKAWAEAYSQLVAAIKREMKPDA

SEQ ID NO: 20390 - protein, 109 aa, Zea mays
  VARIANT 31: note = Ancestral polymorphism is N, Derived polymorphism is K
  VARIANT 30: note = Ancestral polymorphism is D, Derived polymorphism is N
  VARIANT 14: note = Ancestral polymorphism is R, Derived polymorphism is C
MGQEVATSYVNNLRSMIEVHIRALVDKEVDNILRKCGLSNKMPYIKEYGSKVDARRFLCLNLSNCRVPRLRSNACYGLARALAESYNNYPDPRSLVKHSPEQIRTILEI

SEQ ID NO: 20391 - protein, 243 aa, Zea mays
  VARIANT 1: note = Ancestral polymorphism is M, Derived polymorphism is I
  VARIANT 21: note = Ancestral polymorphism is P, Derived polymorphism is L
  VARIANT 38: note = Ancestral polymorphism is P, Derived polymorphism is L
  VARIANT 40..243: note = Derived polymorphism lacks residues 40 to 243
  VARIANT 62: note = Ancestral polymorphism is D, Derived polymorphism is G
  VARIANT 72: note = Ancestral polymorphism is P, Derived polymorphism is L
  VARIANT 98: note = Ancestral polymorphism is G, Derived polymorphism is S
  VARIANT 106: note = Ancestral polymorphism is Q, Derived polymorphism is K
  VARIANT 116: note = Ancestral polymorphism is S, Derived polymorphism is T
  VARIANT 121: note = Ancestral polymorphism is A, Derived polymorphism is V
  VARIANT 124: note = Ancestral polymorphism is W, Derived polymorphism is S
  VARIANT 127: note = Ancestral polymorphism is R, Derived polymorphism is H
  VARIANT 153: note = Ancestral polymorphism is C, Derived polymorphism is Y
  VARIANT 197..243: note = Derived polymorphism lacks residues 197 to 243
  VARIANT 218..243: note = Derived polymorphism lacks residues 218 to 243
MCLGFEASPLPSPPPPPSAMPGSATATVQPRPPSMTAPSWRKRWRHPQGATDGWDGFVLTTDDWDVHRGTFLAWMVSSQGNGSSLVLLNTRPGPAADSAGMAEHLKLHLGQVSLRTWSSSAGCWVARWTFPSDYRSSAFFCDRFGVCTSTGTCACVDEFEPSKPCEWQRGYFVDGCTTRSHPLSCTADDSGRRPTTEQDDSFLLLDNLRGLPYSSIPQRRATAGRASSRRPRRGEASAGSGGG

SEQ ID NO: 20392 - protein, 452 aa, Zea mays
  VARIANT 256: note = Ancestral polymorphism is P, Derived polymorphism is R
  VARIANT 277: note = Ancestral polymorphism is K, Derived polymorphism is E
  VARIANT 301: note = Ancestral polymorphism is G, Derived polymorphism is D
MPPTMLAPVPTRPRSNPFRRRRGAAPLLLDQTSAKRPAESSTSASSCFYSEVISNSSTSLAPYQRLEKRHRRQDTDAGEARPAGSECSEVIGGARVRPAEVEVSESSCPVSVLESDLACPKQLADDAEAIEKSSACDELTPSSEPDEEEVLSDPSHSGYSPSPLISSPLTEDDSDDAPSATFSLFLDFAKQFVPCLHPKPCTVTSSTLDLLTGRRFEDLDDEESYERFRRRERREAVARDFTEVCSSTSIPDSYRPLVVEQRVIMVNWIIQHSRLMKLQPVTMFMGIGLMDRFLTQGYMKGLRNLQLLGIACITLATRIEENQSYNCVLRKTFQVGINIYSQSEVVAMEWLVQEVLNFKCFVTTTHHFLWFYLKAANADDRVADLANYLAFISLRNHEQLSFWPSTVAAAVVVLACLATNKESSCHLVTEVNTQTHIRTQDDDLPECLMLSD

SEQ ID NO: 20393 - protein, 331 aa, Zea mays
  VARIANT 18: note = Ancestral polymorphism is D, Derived polymorphism is H
  VARIANT 73: note = Ancestral polymorphism is A, Derived polymorphism is V
MAVVRQRRQLPHLTLPLDHFVLRLPPQPQPTAAPSTSTSDARLSDYERLSVLGHGNGGTVYKARHRRSSQPLALKIFADGDASAAREAEILMLAADAPHVVRLHTVIPSAAAGEAPAALALELMPGGSLAGLLRRLGRPMGERPIAAVARQALLGLAALHALRVVHRDLKPSNLLVGADGEVKIADFGAGKVLRRRLDPCASYVGTAAYMSPERFDPEAYSGDYDPYAADVWSLGVVILELCLGHFPLLPEGQRPDWAALMCAICFGEAPEPPAAASDEFRDFVARCLEKKAWRRASVTELLEHPFLAEPDAAGAQHALAALVAEAEQRGQ

SEQ ID NO: 20394 - protein, 51 aa, Zea mays
  VARIANT 4: note = Ancestral polymorphism is P, Derived polymorphism is S
  VARIANT 31: note = Ancestral polymorphism is G, Derived polymorphism is E
MAQPFEELIGRLLSDLFDEGKEAIDEESKNESLTHFEESDELGHEIQVFFK

SEQ ID NO: 20395 - protein, 223 aa, Zea mays
  VARIANT 42: note = Ancestral polymorphism is G, Derived polymorphism is D
  VARIANT 47: note = Ancestral polymorphism is Y, Derived polymorphism is D
  VARIANT 73: note = Ancestral polymorphism is R, Derived polymorphism is W
MPVPLHGFFCEVLGHFGVAPSQIAPNGWRAIASFVFRSHFIGVAVNYASFSLGYTLELEDKLAAREREANALRRELSQAKAELAGAKKATAEEVRGAREAVVRDFWGSTEQVSNTSSDTDPRSGYCTSTRTFHSMHAPSFSPSSDVPFVFPAFTLFFLPNLLPPPTVAAASRPMLFDAGTGRVDLASGLSLCMPPRRTRWRLPHLGYLGDEESRSEILDNQGP

SEQ ID NO: 20396 - protein, 389 aa, Zea mays
  VARIANT 205..389: note = Derived polymorphism lacks residues 205 to 389
  VARIANT 198: note = Ancestral polymorphism is P, Derived polymorphism is S
  VARIANT 169..389: note = Derived polymorphism lacks residues 169 to 389
  VARIANT 148: note = Ancestral polymorphism is G, Derived polymorphism is E
MGHRKRKTGDRHGRVKPSVELEGSEDPDQIQMGDLEIVCGGDGDPLMQETEHLDPTRIVSDELYEGQMGVATSFPSRVKRKSLHRVTRLTTVAGGMTFTSLRSVHRAWIIRVGGDPGDTVIFDTKTKKVIHGPTLNSTKWCPVLTTMGDKVYALCKTLCWFTDPDFPPWFEVLDLSKAKVVIVDDRSHLEGCSWIELPHPPCFPWKITPFVYTMLPVVLITSYVVVDTYILVSFNQLWGTYAFDTNSVEWHKIDTKGLPFVGRATPHGSLFLGLSEGNGSINAYCISVTTTDNDRAPNLSITMLPVKYMDNEIDAGPCFFSLEDGCFCSFSFSLDKCSWTLHPKKLELFPKETHLNLRTYQTENLSSLEVPEETLLAVKPKIAVHSHWE

SEQ ID NO: 20397 - protein, 87 aa, Zea mays
  VARIANT 17: note = Ancestral polymorphism is L, Derived polymorphism is M
  VARIANT 20: note = Ancestral polymorphism is Y, Derived polymorphism is H
  VARIANT 27: note = Ancestral polymorphism is M, Derived polymorphism is I
  VARIANT 29: note = Ancestral polymorphism is G, Derived polymorphism is S
  VARIANT 37: note = Ancestral polymorphism is S, Derived polymorphism is N
  VARIANT 39: note = Ancestral polymorphism is R, Derived polymorphism is Q
  VARIANT 43: note = Ancestral polymorphism is S, Derived polymorphism is L
  VARIANT 51: note = Ancestral polymorphism is T, Derived polymorphism is I
  VARIANT 54: note = Ancestral polymorphism is V, Derived polymorphism is I
  VARIANT 57: note = Ancestral polymorphism is P, Derived polymorphism is L
  VARIANT 61: note = Ancestral polymorphism is P, Derived polymorphism is L
MRHHLHIEESQVADMCLDLYKEYGTTMAGLKIFFDDSTRNIASGKAAGFHTVIVGRPTLVPGADHALESIHNMKEALPEIWDSQDQY

SEQ ID NO: 20398 - protein, 137 aa, Zea mays
  VARIANT 133: note = Ancestral polymorphism is T, Derived polymorphism is I
  VARIANT 110: note = Ancestral polymorphism is V, Derived polymorphism is D
  VARIANT 83..137: note = Derived polymorphism lacks residues 83 to 137
MAAHKGESRVADRKVPVQRPEVESLAELFAGPGVSESVEWRMPQNHHVDSPFHLVRLPGDERLSAHVANRRDLRALGPWHHLRGAREVGQEYPNKRKLPFRALESSFKIVIDNFSKGRVNFKKPDHMFFFMETDDYG

SEQ ID NO: 20399 - protein, 215 aa, Zea mays
  VARIANT 12: note = Ancestral polymorphism is G, Derived polymorphism is R
  VARIANT 71: note = Ancestral polymorphism is R, Derived polymorphism is C
MVGGALADKYGGKKVMAGAAALWSLATILTPWAASHSTLMLLVVLLFGLAEGVAFPTMSTFLPKWFPTHERATVVAISMGGFHLGNVISFLATPIIMSHIGPSGTFTFFASLGYLWLSIWMVNVESDPIDSRTISKSELQLILDGRIGSKVQGSKFPSVRELFSKTQFLAVTLANVVNNWGYFVLLSWMPVYFKMVYNVNMKQAAWFSTMSRIRH

SEQ ID NO: 20400 - protein, 463 aa, Zea mays
  VARIANT 252..463: note = Derived polymorphism lacks residues 252 to 463
MGSTSSAAQRRRRQWTLALVTAAALLELADEALLPAVYREVGEALAASPTALGSLTLCRALVQAVCYPLATCAAARYDRARVVAAGAFLWAVATLLVGASGTFLQMALARGFNGVGLALVVPAIYSLVADYSDDGTRGSAFAWVLMAQCMGQVAGNSLGVLLAATSFLGVPGWRLAFYALALVSASIAALTWVLGADPRPVCVKSTVAATLAQLAGEAKDVVKVPTFQIIVAQGVAGTVPSSALSFAAMWLELVGFTHWQTTVITNLNSLANALGALFAGFVGDPLALRFPNTARIALAQVCTASTIPLAAVLLLALPVNPSAGAAPIFAEIVPEKARTTVYALDRCFESVFASFAPPLVGILAEHVFGYQPAAAGTSVEADRENAAALGKAVFAEIAVPIAVCCLTYTALYWTYPADRQRAQMASLQAAAGDHDCDCEATLVAHAAGVEGMNQTLLAGTRTE

SEQ ID NO: 20401 - protein, 1440 aa, Zea mays
  VARIANT 1223: note = Ancestral polymorphism is W, Derived polymorphism is C
  VARIANT 623: note = Ancestral polymorphism is R, Derived polymorphism is I
  VARIANT 607..1440: note = Derived polymorphism lacks residues 607 to 1440
  VARIANT 486..1440: note = Derived polymorphism lacks residues 486 to 1440
  VARIANT 307..1440: note = Derived polymorphism lacks residues 307 to 1440
  VARIANT 303: note = Ancestral polymorphism is A, Derived polymorphism is V
MHFYVLLIHILSWQWPPLVEVAEIRQLPPMLIERYNTAAGEGTALCGIFSDIHRAWATVDNSFFVWHFDKWDGQCQEHNVDEQAICAVGLARAKSGIFIEAIQYLLVLATPVELILVGACCSASADGTDPYAELSLQPLPEYMIATDGVTMTCITCTEKGQIFLAGRDGHIYELQYTTGSGWRKRCRKVCLTTGIGSLLSRWVVPNTFKFSTVDPIVDMVMDEERNTIYTRTEGMKMQLFDLGANGDGPLTKITEEKNIVDPLDAPYGGRRTNAPPPRTARSPKPSIVCISPLSAMESKWLHAVVVLSDGKRLFLTTSGGIGSSVGLNSGLRRPTCLKIVATRPSPPLGVGGGLTFGAVSAAGRVHPEDLALKVESAFYSAGALIMSDSSATAMSSLLAVQKGSAAQLSLPSTFGTASRASRALRETVSALPVEGRMLCASDVLPLPDAAYMLQSLYADVECFTGFRKPFEKACIKLWAKGDLPTQHILPRRRVVVFNTMGLMEVIFNRPVDILRKLFDGNTLRSQIEEFFNRFGAGEAAAMCLMIAAKLLYAEDSLISNSVSEKAAEAFEDPGLVGMPQIAGTTALSNTRTQAGGFSMGQVVQEAEPLFSGAYEGLCLCSSRLLYPIWEFPIMVIRRPAGTNKCEDGVIVCRLSAGAMEILESKIHSLETFLRSRRNKRRGLYGYVAGLGDSGSILYKTGPIIGPGGHSNGRSPYNSQIQDMDPADKSASNKKPRLLYTSAELAAMEVRAMECLRRLLRRSGEALFLLQLICQHNVARLAQTLGNDLHKKLVQLTFHQLVCSEDGDQLAMCLISALMEYYIGPEGRGTVEEISTKLKEGCPSYFNESDYKYYLAVECLERAASMANNPDERDILARDAFNLLTKIPESADLSAICKRFENLRFYEAVVRLPLQKAQALDSNADITNGQIDPRHHDTIMLQREQCYEIVMNALRTLKGVGHSRMQSADKSSGVATAVDPASRTKYIKQILQLSVQWPDTVFHEHLYKTLIELGLENELLEYGGSDLASFLQSAGRKHQEEVRAVSSVTSGAAKLHDLSAPILTSQTKYLELLARYYVRKGERIAAARMFLILAERQCSNSEEVPTLDKRYEYLRDAVLQAKSAGIEADSSRKPIDSSTVDLLEGKLTVLRFQMQIKQELELMTARVENISSSSESPSGLFPRDNILADAEAAKAAKDKAKELSLNLKSITQLYNDYAVPFELWEVCLEMLSFANYSGDADSKILREIWARLLDEALTKGGVAEACSVVKRVGSKLDPADGACLPLDIICLHLEKAALDRLSSGEELVGDDDVARALLGACKGLPEPVLAVYDQLLLNGAIIPSLNLKLRLLRSVLAILREWGISVIAHRLGTTSTGASIFLDGTFSLNQTGTANQGARDKIISLANRYMTEVRRLNLPQNQTENVYRGFRELEEKLLSPY

SEQ ID NO: 20402 - protein, 345 aa, Zea mays
  VARIANT 211: note = Ancestral polymorphism is L, Derived polymorphism is P
MASLTDLVNLDLSDCTDRIIAEYIWVGGSGIDLRSKARVMCDCYTPQGEPIPSNKRYKAATVFSHPDVAAEVPWYGIEQEYTLLQKDVSWPLGWPVGGYPGPQARDRSFPSSTFIDCMRGPYYCAAGADKAFGRDVVDAHYKACLYAGINISGINGEVMPGQWEFQVGPSVGISAGDEIWVARYILERITEMAGIVLSLDPKPIKVFLVILGSIYSDESSTESVLLAQGDWNGAGAHTNYSTKSMREAGGYEVIKEAIEKLGKRHREHIAAYGEGNERRLTGRHETADINTFKWGVANRGASIRVGRDTEKEGKGYFEDRRPASNMDPYVVTGMIADTTILWKGN

SEQ ID NO: 20403 - protein, 274 aa, Zea mays
  VARIANT 206..274: note = Derived polymorphism lacks residues 206 to 274
  VARIANT 189: note = Ancestral polymorphism is A, Derived polymorphism is V
  VARIANT 175: note = Ancestral polymorphism is H, Derived polymorphism is Y
  VARIANT 164..274: note = Derived polymorphism lacks residues 164 to 274
  VARIANT 156: note = Ancestral polymorphism is S, Derived polymorphism is G
  VARIANT 153: note = Ancestral polymorphism is T, Derived polymorphism is M
  VARIANT 135: note = Ancestral polymorphism is G, Derived polymorphism is R
  VARIANT 126: note = Ancestral polymorphism is P, Derived polymorphism is S
  VARIANT 122: note = Ancestral polymorphism is A, Derived polymorphism is V
  VARIANT 119: note = Ancestral polymorphism is W, Derived polymorphism is R
  VARIANT 112: note = Ancestral polymorphism is G, Derived polymorphism is S
  VARIANT 90..274: note = Derived polymorphism lacks residues 90 to 274
  VARIANT 52: note = Ancestral polymorphism is S, Derived polymorphism is N
  VARIANT 39..274: note = Derived polymorphism lacks residues 39 to 274
  VARIANT 36..274: note = Derived polymorphism lacks residues 36 to 274
MVDSMVMIIIDQTYSALLEIYGPEAPPSSDGHIQIQVSQPVDPADPESPMLSVNASPTHCCISLTDTFYGGGGGQDQTNATSAEQSSNLQYRLARSSITASRGTLHLARVDGGGRGDYWACADVRPDVANKGILGVLETINARLDAAIQLEVTLLSMAKESGYWSPKVKEIAEVHVALVKMRAATDIDAIMRHRRCLQNRRLLIQEYITCRPDADQVCDAEAALAKSLGTLHVGRKRACRVQETMGGRLPESDDAEVLTKRLKALHIAHGYSTS

SEQ ID NO: 20404 - protein, 235 aa, Zea mays
  VARIANT 32..235: note = Derived polymorphism lacks residues 32 to 235
  VARIANT 123..235: note = Derived polymorphism lacks residues 123 to 235
  VARIANT 131..235: note = Derived polymorphism lacks residues 131 to 235
  VARIANT 141: note = Ancestral polymorphism is P, Derived polymorphism is L
  VARIANT 155: note = Ancestral polymorphism is V, Derived polymorphism is D
  VARIANT 169: note = Ancestral polymorphism is P, Derived polymorphism is H
  VARIANT 172: note = Ancestral polymorphism is K, Derived polymorphism is M
MQIPRPRRRATSPLLGTLSTCGRMATAGSTPQRGGVLYCLLALLSLLFLASGEVVFEERFDDVSCRRSRGRTRSRSSRNCSRSKKTQRKNQKLLFEELLKVKEELMLLRFIFLLLTVFQGMTQRTCIPKGWTFSMLPCKTPDDEAGEAATKENFVAIGTTHTKLWLRLPLEKSKAVDDDLGKDFLKEGASRPTSTGDGQYQPKRNSKSDHFALLRFSSLREEVLNWTHVKYITVM

SEQ ID NO: 20405 - protein, 454 aa, Zea mays
  VARIANT 253: note = Ancestral polymorphism is S, Derived polymorphism is G
  VARIANT 187: note = Ancestral polymorphism is R, Derived polymorphism is C
MSIISTARDRGKKTQKPNSLVPATRIFSSTAPTPEPLSPAPAMSSSTAPAPAAAMAVDDAEDDQLASMSTEDDIRASRLLDNEIRVLKDELQRTNLELESFKEKIKENQDKIKLNKQLPYLVGNFVEILEMNPEDEAKEDGANIDLDSQRKGKCVVLKTSTRQDPKAENPNEMVTAGVLSSLQNFLRKCLIASLSYGPMPKHIAFIMDGNRRYAKFRSMQEGAGHRMGFSTLIASLMYCYEMGVKYITVYAFSIDNFKRDPSEVESLMQLMEEKINELLENQSVINKIKCKINFWGNLDLLYEPVRLAAEKLMASTAGNTGLVFSICMPYNSTSEIVNAVSEVCAERMEMFQSEHIGDCNGHAANNGVRSEISVAELDRHMYSAGCPDPDIVIRTSGETRLSNFLLWQTTFSHLQNPDPLWPEFSFRHLVWAILQYQRVYPALEHNRKLAKKQL

SEQ ID NO: 20406 - protein, 725 aa, Zea mays
  VARIANT 39..725: note = Derived polymorphism lacks residues 39 to 725
  VARIANT 68..725: note = Derived polymorphism lacks residues 68 to 725
  VARIANT 75..725: note = Derived polymorphism lacks residues 75 to 725
  VARIANT 90: note = Ancestral polymorphism is F, Derived polymorphism is S
  VARIANT 189..725: note = Derived polymorphism lacks residues 189 to 725
MLMSFAGSAPDPTILMFSESWPGLPRGVEFNPSDSDLLWHLAAEVGNALAERHPFINEFIKFVDDVREFICTHPQHIPGVRQDGRASYFFHRSFEPYINENDVNNCWKKIGSPRSIILDGTLTGCKEVFALYADMPSDKRSQETDWRLHQYHLQNTVKAESEIVASKIFLASRNSLCELAEETHIESEWDVSTHKDSSVECAKGFNPEICTETDELDHISLKERYRILLADKSLGLTTVSAGKSIMHVETSRASPKRNHEGKISKEDIFSMLQEISSAPSIIESNPMDDDSNRRILGEDLPENNNSATYIAKQANAGNSGFLNVFGMSSNSKPCLFELGYCHDPVEGSENQIGGTATCMGENSELVARKQGAHLADVKLEPALGGYEIGPSELPQENSTHAEGSVLSLGIKDELTDCELPGLCENVSFSSRQRRKRKTSYSTEKTLKEDAYTVDEGVAYRSRRKRKKTATYASLILLDRGIGVEEIKLYGAEEDNEMIADSTESNFEDLENVIANIFPKRGKCHLLSAARYERGEKSIYCLSCLISLIEQSRYLRFRDCPVEWGWCRDLQSFIFIFRSHNRIVLERPEYGYATYFFEVVQSRPIEWQIRRLVVAMKLSGCGRTALIENRPLLVGTDLTEGEAHVLEGYGWLRNTGLGTMVNYRDRVVHDRWTEKSVSDWRSKIGKLLMVGYAEGQSITTLGPKKILDMLEATGDAEFEVKLEDPY

SEQ ID NO: 20407 - protein, 494 aa, Zea mays
  VARIANT 288: note = Ancestral polymorphism is R, Derived polymorphism is P
  VARIANT 330: note = Ancestral polymorphism is L, Derived polymorphism is P
MPTGGVFSGSVNLKHVKLGYRYLLDHLLTLLLVPVMAATALELARLGPGELLSLWRSLELDLVHILCSAFVAVFAGTVYAMSRPRPVYLVDYACYKPPGSCRVPFATFMEHTRLISDDDRSVRFQTRILERSGLGEDTCLPPANHFIPPNPSMEASRAEAQLVVFSAIDDLLRRTGTKPKDVDILVVNCSLFSPTPSLSAMVVNRYKLRSNVRSFNLSGMGCSAGLISIDLARDMLQVHPNSNALVVSTEIITPNFYRGSRRDMLLPNCLFRMGAAAILLSNRRREAPRAKYRLVHVVRTHKGADDRAYRCVYQEEDQQGFSGISLSKELMAIAGDALKSNITTIGPLVLPMSEQLLFFFRLVGRKLLNGGWKPYIPDFKLAFDHFCIHAGGRAVIDELQKNLQLSPRHVEASRMTLHRFGNTSSSSLWYELAYIEAKGRMRRGDRVWQIGFGSGFKCNSAVWKCLRSVNTPTSGPWDDCIHRYPVDVPEVVSL

SEQ ID NO: 20408 - protein, 437 aa, Zea mays
  VARIANT 176: note = Ancestral polymorphism is R, Derived polymorphism is S
  VARIANT 138: note = Ancestral polymorphism is D, Derived polymorphism is H
MAVDKQADAKEREKIDAVRKLLRKQAPLSIKQAQYCDDACVERFLRWRGESVKKAAKHLRTVLSWRETVGADHIMADEFSAELADGVAFVSGHDDDGRPVVVFRIKQEYPKFRSPKSFVRLLVLTLEVAVACMSRSVDQLVLLFDASFFRSASAFLNLLMGTLKIVADYYPGRLHRAFVIDAPSLFSVLWKGVRPFVELAPATAVVCSLDFEDSLEDASFTAYPRTASLRFEPPPAAVTGKAGVGSASSRFSVTPTDNPVKPWYLCTIPASVGSRSVVPTSSSSPSLVGASPLSARSFSFASPAALRSTPFPRGGGAPPTPSSAVTGHKIPPPPQFPRTPRPSFLQSPSTLFAFRKDGQQTSRVERERGSFLPYLRFYRRPYDEISYRAMMRPPLGGLIPIVEKFKHKPVQQTLRRHAGLHQHQQQQHHHYQQQQRI

SEQ ID NO: 20409 - protein, 693 aa, Zea mays
  VARIANT 298..693: note = Derived polymorphism lacks residues 298 to 693
MSSRSSLLPLPLLLLCAAAAAASSRNAELDALMELKAALDPAGRALASWARGGDPCGRGDYFEGVACDARGRVATISLQGKGLAGAVPPALAMLPALTGLYLHYNALRGEIPRELGALPGLAELYLGVNNLSGPIPVELGRLGSLQVLQLGYNQLTGSIPTQLGHLNKLTVLALQSNQLSGAIPASLGDLPALARLDLSSNQLFGSIPSKLAEIPRLATLDLRNNTLSGSVPSGLKKLNEGFLYENNPELCGAQFDSLKACPNDGNDDGRTPRKPESTSVKPQQIQKTADLNRNCGDGGCSKPSTLSTGAVVAGTVVIVAGAAACGLSAFSWHRRQKQKVGSSSVEHLEGRPSLDRSKEAYQRSAVSSLMNVEYSSGGWDTSSEGSQSQHGVARLSSSTEGGSPSVRSFNLEEVECATQYFSDANLIGKSGFAATYKGVLRDGTAVAVKSISKNSCKSEEADFLRGLRTLTSLRHENLVGLRGFCRSRASGGCFLVYEFMANGSLSRYLDAKEGDAADAAAVLDWPTRVSIIKGVAKGIEYLHSSKLAHQSISADKVLLDHLYAPRLSGAGLHRLLADDVVFAALKDSAAMGYLAPEYATTGRSTDKQGDVYAFGVVVLQVLAGRRAVSPPHLQQGGGGGGRLDDLVDPRLRGRFSRAEAAKLAGVALLCTAEAPAQRPTMTAVLQQLGTSSQ

SEQ ID NO: 20410 - protein, 177 aa, Zea mays
  VARIANT 45: note = Ancestral polymorphism is L, Derived polymorphism is P
  VARIANT 47: note = Ancestral polymorphism is D, Derived polymorphism is H
  VARIANT 83: note = Ancestral polymorphism is S, Derived polymorphism is F
  VARIANT 144..177: note = Derived polymorphism lacks residues 144 to 177
  VARIANT 171..177: note = Derived polymorphism lacks residues 171 to 177
MPGQHVAVLSPPPLIACRLQLLIRSLLPEKINKPISSPQGHRLDLTDRPCMASLCMFTISSTPHVPQGCRRRCSDAVSSRPRSYLVCQSHLPSGPPASGGGGGGGGEEKTTPWWAATAERLRGDVVKAGMAARESLSPKQKGDWKDVTLMSFSFAVYVYISQKLVCTYCAWLSMINH

SEQ ID NO: 20411 - protein, 307 aa, Zea mays
  VARIANT 238..307: note = Derived polymorphism lacks residues 238 to 307
  VARIANT 218..307: note = Derived polymorphism lacks residues 218 to 307
  VARIANT 215..307: note = Derived polymorphism lacks residues 215 to 307
MYSYTHHNENLIVLVRHLLPKYCLPGESEGKIWMWTRCLRCERESGVPRSSRRVIMSAEAHYLSFGKFLELSFSSHSTARRLPICGHSLNTDCLHFFGLGSKVAMFQYSSVEIYNAYKPQPTLEIHNPDMHKDAPSYNASERRETGKGEKRRIEGHWCPLTHRPRPGAYGITAVIIGAIGYLFIRWKGWKLSDMMFVTKRGLSDACNVVGKQVDQVSESVNDAASLAVAIMKKGLRSRIFLGCDNKPLSRQEIMDAVNNSGKFDTKFGGFIGTDDPLGKIMENSKTRAEIGWEPKYPSFTEFLGIIS

SEQ ID NO: 20412 - protein, 102 aa, Zea mays
  VARIANT 93: note = Ancestral polymorphism is L, Derived polymorphism is V
  VARIANT 83: note = Ancestral polymorphism is T, Derived polymorphism is I
  VARIANT 82: note = Ancestral polymorphism is T, Derived polymorphism is I
  VARIANT 41: note = Ancestral polymorphism is I, Derived polymorphism is M
  VARIANT 26..102: note = Derived polymorphism lacks residues 26 to 102
  VARIANT 9: note = Ancestral polymorphism is C, Derived polymorphism is S
MNCAHLENCLHEAREEARTNKCSPDRRAVEYDALRSSALRIHGLFERLNNCITAPGVTGFAESLHSLAASLASYVKKDEADTTVQFQQCIKILADKVYLLTR

SEQ ID NO: 20413 - protein, 623 aa, Zea mays
  VARIANT 543..623: note = Derived polymorphism lacks residues 543 to 623
  VARIANT 534..623: note = Derived polymorphism lacks residues 534 to 623
  VARIANT 417..623: note = Derived polymorphism lacks residues 417 to 623
  VARIANT 358..623: note = Derived polymorphism lacks residues 358 to 623
MDAAKSVTPGAVSYILAHPSTGSDGAVSDLVVQVLDLKSIGMGSRFSFTATDGNDKIKAMLPTYFASEVHSGNLKNFGLIRILDYTCNSVKGNADKVLIVVKCETVCEALDAEINGEAKKEDPPIVLKPKDEGSVVAEETNSPPLVMKPKQEVKSASQIVTEQRGNAAPATRLSMTRRVHPLITLNPYQGNWVIKVRVTSKGNLRTYRNARGEGCVFNVELTDEDGTQIQATMFNEAAKKFYPIFELGKVYYVSKGSLRIANKQFKTVKNDYELSLNENAIVEEAEGETFLPPVQYNLVKIDQLGPYVGGRELVDIVGVVQSVSPTLSVRRKIDNETIPKRDIVVADDSGKTVTISLWNDLATTTGQELLDMVDSSPVVAIKSLKVSDFQGVSLSTIGRSTLEINPDLPEAKNLKSWYDSEGKDTSLAPISAEVGATRAGGFKSMYSDRVFLSHITSDPAMGQEKPVFFSLYAIISHIKPDQNMWYRACTTCNKKVTEAFGSGYWCEGCQKNYSECSLRYIMVIKLSDPTGEAWVSVFNEHAEKIIGCSADELDRIRKEEGDDSYVLKLKEATWVPHLFRVSVTQHEYMNEKRQRITVRGEAPVDFAAESKYLLEEIAKLTAC

SEQ ID NO: 20414 - protein, 365 aa, Zea mays
  VARIANT 3..365: note = Derived polymorphism lacks residues 3 to 365
  VARIANT 5: note = Ancestral polymorphism is T, Derived polymorphism is M
  VARIANT 55: note = Ancestral polymorphism is S, Derived polymorphism is F
  VARIANT 115: note = Ancestral polymorphism is T, Derived polymorphism is I
  VARIANT 121: note = Ancestral polymorphism is G, Derived polymorphism is W
  VARIANT 175: note = Ancestral polymorphism is T, Derived polymorphism is A
MACTTAASLQHDRANDDEACMYAQELLSCFVVPMTLKAVIELGLIDDLLAADGRFVTPEELAARWARPAEAAAAVDRMLRFLASHSVVRCTTEAAGPDGRARRSYAAAPVCKWLIARNGTGQGSWAPIGLMNLNKGFMETWYYMKDAVAEGATPTEKAYGMPLFEHLGSDEALNTLFNQAMAGHSEIVISKLLEVYRGFEGVDVLVDVGGGTGSTLRMVTAQYKHLRGVNYDLPHVIAQAPPVQGVEHAGGSMFEYIPSGNAILLKWILHLWRDEECIKILKNCHRALPANGKVIVVECVLPASPEPTQVAQGALLLDVVMLNRLRGAKERTEREFTELAAEAGFSGGCRATYVFTGAWALEFTK

SEQ ID NO: 20415 - protein, 458 aa, Zea mays
  VARIANT 244: note = Ancestral polymorphism is G, Derived polymorphism is V
  VARIANT 324: note = Ancestral polymorphism is G, Derived polymorphism is D
MRGTLLEIGMSYSRASSVQLLGKEESNGKRCRSTKRGGTKDNPRMVERSRGRTTQRSPPSCPRTTSMSGQGVASKAWRGDGLSQPRGEDLAMANQGIVTHRGFSKCYSSGSLLAKQLKNVNEHKCQIYGDTVGFLATGDIFVACNECAFPVCRSRYEYERKEGNQCCPQCKTRYKRHKALVALYLYPFLNTVYKTREYEFLRLTSLGVIDALVKPVVRKCTEMLSRAICISGGDFYVRRFHKDGPIVWRLLALSPFRRLSKMDEKAIILPYRDTSLNSEEPMAEISSQKIQIAVLDMIAAISSNKRNVVALESVLKKVCGLVVGIAYSSLTGLQEATIRALAGLACMDADLVWLLLADVYYSLNQRESLLPDQDLALVSDLLPPQVSSREYLFVQYGGEGVRCDVDPSSVYYVFRRMQANIRTHDDNEGCDEFVSVNHIRLHVKHAPDLPDEQQDFGT

SEQ ID NO: 20416 - protein, 633 aa, Zea mays
  VARIANT 508..633: note = Derived polymorphism lacks residues 508 to 633
  VARIANT 470..633: note = Derived polymorphism lacks residues 470 to 633
  VARIANT 459..633: note = Derived polymorphism lacks residues 459 to 633
  VARIANT 394..633: note = Derived polymorphism lacks residues 394 to 633
  VARIANT 205: note = Ancestral polymorphism is T, Derived polymorphism is I
  VARIANT 204: note = Ancestral polymorphism is M, Derived polymorphism is I
  VARIANT 27: note = Ancestral polymorphism is A, Derived polymorphism is P
MVYRKREKSVCWSQPSRMLSLPRTAAAVTVYALVALIAGAAAAGGGEQPLSRIAIHRATVAPQPGAFVDASPALLGREGEDREWVTVTYSNPRPSKDDWIGVFSPANFNDSICPPENEWVEPPLLCTAPIKFQFANYTNRDYGNTGKGSLRLQLINQREGFSFALFSGGLSNPKLIAHSKSVTFINPKTPVYPRLAQGKSWNEITVTWTSGYGTNEATPFVRWGIEGQIQTLSPAGTLTFSRDTMCGPPARTVGWRDPGFIHTSFLKDLWPNLLYTYQVGHRIFNGSIVWGHQYSFKAPPYPGEDSLQRVVILGDMGKAEVDGSNEFNDFEPGSLNTTNQLIKDLKNIDVVFHIGDITYANGYLSQWDQFTAQVEPIASTVPYMVGSGNHERDWPGSGSFYGNLDSGGECGVPAQNMFYVPAENREQFWYSTDYGMFRFCVANTELDWRPGTEQYRFIEHCLSSVDRQKQPWLIFLAHRVLGYSSATFYADEGTTEEPMGRESLQPLWQKYKVDIAMYGHVHGYERTCPVYENACVAKGSDLYAGAFTATTHVVVGGGGASLADYTAARARWSHVRDRDFGFVKLTAFNHTRLLLEYKKSRDGSVHDHFTISRDYRDVLACGVDNCPSTTLAS

SEQ ID NO: 20417 - protein, 330 aa, Zea mays
  VARIANT 14: note = Ancestral polymorphism is I, Derived polymorphism is M
MAMAALRREGRRLILSSTVPNPSLAAASSAVTRSSAVSQPEMAPLGARSISTQIVRNRMKSVRNIQKITKAMKMVAASKLRAVQTRTENSRGLWQPFTALLGDAPSVDVKKNVIVAITSDKGLCGGINSTSVKVSRALHKLTSGPEKETKYVILGEKGKVQLLRDSKDSIEMTATELQKNPINYTQVAVLADDILKNVEYDALRVIFNKFQSVISFKPTMVTILSPEVAEKESEAGGKMGDLDSYEIEGGETKSEILQNLAEFQFSCVLYNGALENACSELGARMSAMDSSSRNAGDMLDRLTLTYNRTRQASITTELTEIISGASALEG

SEQ ID NO: 20418 - protein, 810 aa, Zea mays
  VARIANT 105..810: note = Derived polymorphism lacks residues 105 to 810
MDASHPEGEATAGWLTVEEWSGSSASALSRTAVLTASASSLTAHRFGSRWERIGSRMLGAFVPEGFPGSVTPDYVPFQMWDTLQALLGAIGVGEQSATVIGATFQWFLRDLTGMLGGILFTFYQGEKDIYRMAKIRERKTKDVNQVKCIKDEANQLLVKNEDIKNRWKEYFNKLFNGGNESSTIELDEPFDDNNRGFVRRIQEYEVKEALKRMKVGKAMGPDGIPIEVWRCLGDIAIVWLTKLFNTIFRTNRMPDEWRRSTLVPIFKNKGDVQSCTNYRGIKLMSHTMKLWERVIEHRLRKLTSVTQNQFGFMPGRSTMEAIFLLRQLMERFREQKKDLHMVFIDLEKAYDKVPRSVMCAMGYEDGDVSLDGQVVPKKDTFRYLGSMLQKDGDIDEDVSHRIKAGWLKWRQAAGVLCDPRVPHKLKGKFYRTTIRPAMLYGAECWPTKRRHVQQLCVAEMRMLCWICGHTRRDRVRNDDIRERVEVAPIEEKLMQHRLRWFGHIQRRPEEAPVHIGIIRRPENVKRGMLMDLLSPLFPSSLIVIMCLGSLSRSFTGVASGATRAALTQHFALANNAADISAKEGSQETLATMLGMGLGMLLAQITRGHALSVWASFLSLTMFHMYANYKAVQSLSLTTLNYERASILLQYFKECGEVLVPRKVSQQEHILPSWSNWRKLNRIKLPHERVHLGAKASMLTHSDMLVIAKTRYHYENANYFLLDKQGIVYVFIHKEATPADVLRSFVHGLVLASSTQNSKPQHLEARRWMDEMYTSFISKLQTEGYSTERLLSHSILWRAHWLHGQLDEKLK

SEQ ID NO: 20419 - protein, 96 aa, Zea mays
  VARIANT 67: note = Ancestral polymorphism is P, Derived polymorphism is T
  VARIANT 61..96: note = Derived polymorphism lacks residues 61 to 96
  VARIANT 54..96: note = Derived polymorphism lacks residues 54 to 96
  VARIANT 50: note = Ancestral polymorphism is V, Derived polymorphism is D
  VARIANT 46..96: note = Derived polymorphism lacks residues 46 to 96
  VARIANT 10: note = Ancestral polymorphism is D, Derived polymorphism is H
  VARIANT 9: note = Ancestral polymorphism is R, Derived polymorphism is M
  VARIANT 8: note = Ancestral polymorphism is A, Derived polymorphism is V
  VARIANT 5: note = Ancestral polymorphism is D, Derived polymorphism is N
  VARIANT 4..96: note = Derived polymorphism lacks residues 4 to 96
MTLEDFLARDSCARAVVMEGNMALGFPDGDGDVAGSVACIVETDSQVMQVEEEQIEPLREQRGTQQPPGFGQCGKNGESLEHGNSKHLGRGHVCLT

SEQ ID NO: 20420 - protein, 164 aa, Zea mays
  VARIANT 16: note = Ancestral polymorphism is P, Derived polymorphism is R
  VARIANT 90: note = Ancestral polymorphism is I, Derived polymorphism is M
  VARIANT 91: note = Ancestral polymorphism is P, Derived polymorphism is H
  VARIANT 92: note = Ancestral polymorphism is G, Derived polymorphism is D
MNPILSITETFQHLPPYLFPVPGHRCELSVLDHELLPLHDGAVRGIQKGSLPASPHVAHSPHHAPCHISITIREPQRHVPLHHHRPSAGIPGKEILQRHLCGTVSVRAGSGDGGGRMGVESPPAVEISFHTPDIRWTATSKSTWEGSAGPGLTLAAAALTVSRS

SEQ ID NO: 20421 - protein, 1568 aa, Zea mays
  VARIANT 1364..1568: note = Derived polymorphism lacks residues 1364 to 1568
  VARIANT 1136..1568: note = Derived polymorphism lacks residues 1136 to 1568
MSHFHPTQHASDNDFQMWQQQMMFKHLQEFQRQQQLQQSDHGARMQLSFGQFHAPAKPLPGDQLSTMSNEMVNNETMNSGWPHNFTGGDLSLTSNSQMLNNGSTNWDQIVGSPVVGNFMNGSMFVNAHNQSMRPMGLATHQVDQTFYPMHATSSRGPGNQYSQFLGIPADPQSEAARVGPVQSEKTSRPFNSSMNELGLHMQGTTSLMHNFRGKGGFLNNSLMQSQGDNIRAGSPVTMNQLQHGFQTQDFHGRPNQVDLQAGMQEKSAMQVGQASRGASLDPTEEKILFGSDEDSNWGALLRGDNDNVNSLDNDNYGGGYSSLQSGSWSALMQEALQSTTSESPKEEWSGLSFHKTEQVMASNANLSGRNGSKFTGLSGANLENARPSPASSYADGTMNNPNLASFQHVIRPPSERRDHMSHESSNAPVNNHQSTSEVNKGYFQQGIKQIHSDARQGQAHLVNGTWPHQKTELLRSNLQSTGVHATPPGGHGFGMSQQIATDHNINRESSNNQNDWKANNALGQDMCNSQNIFNSNENSWKSTGGNANSVQRFQQRRSDVSATNESSDGKNISMMSSSMPMMTQDHYQMVTSQSGEQIGMNRNLTHRAPETSESPGKSAEQRPGDFNQEYLNAIPNERETHISNHGRHITSDSAPRRHSVSAGKESENLGQSSQQAMGSYILQNRAMGSSGMNIGLSPGNPMSNSLFPPQTRNSLQHHFGTNSHVSNSMPSASEMMAQEQLQSRHGLPNSSSASTLGGADTGLSQNRAVQNSQHMLQLLHKVDNSRNSNVVADIPNNSLGVVSAQQQLNHSSLQGFGLRLAPPSQLQSISGNLWSSQTNADGKQFYQDGDRTQLPSTPSQSLTPQHQNSLSSPFHSSETENTGQPIACFPQLGSGQQYPMADDRSGPAPMLQQQPQQSNSATVFKNVWTNISAQRLTGMQPNKITPNIIQSMMFPNNAAASNLWSSQKADDQGQRASTPSDIATSSANSQNQSPKQAADSDAKLASSQKGNLELTGTTVTGGNESLQKPSSDENSINAVSSFAQLRQQGILGAKHGENPGANFQAMNVSHNNANHSGGIVLHGSPAPTNIQQQNYSLLHQMQTSRHMDVDPGSLSGKTTKPDIGSDAAQIDWNSGQRFAHVTNNSTKSSADNIGSPGVPGSFTSDLKMLSFASRNEERNPNIPSRFPSGECPSPGMITTQDDNQNQVQHMGTGAMSNSDERSERPRINPQMAPSWFGHYGNYRNGQSVATLNAATLNAQKPMALPFNFPKASRNNENNSHAENRVEPSQSVRPGHHLPSARMEALVPSNVKVSSMMRRPKKRKTMDSTLVSWHKIIESPRKLRGISSYKHENLYFIHSTPEMDWAWAANRLIEKDEAETPDDAPLNYLPRKRLILTSQLIQQLLPAIPATILRAQAVSAYGSATYTLSMLTLRDACSMASSSYNSCSPVEDENNLSWTSPSEQPSAKKMEDRVSKVVEVFVGRIRKMENDFISLNKRASMLDVQLECQDLERISIVNRLGRFHGRSHAAAVESSSAPEMTPRRIFPERHVMSFAVPGNLPEGVCCLSL

SEQ ID NO: 20422 - protein, 186 aa, Zea mays
  VARIANT 171: note = Ancestral polymorphism is E, Derived polymorphism is D
  VARIANT 170..186: note = Derived polymorphism lacks residues 170 to 186
  VARIANT 165: note = Ancestral polymorphism is A, Derived polymorphism is V
  VARIANT 163: note = Ancestral polymorphism is D, Derived polymorphism is N
  VARIANT 154..186: note = Derived polymorphism lacks residues 154 to 186
  VARIANT 111: note = Ancestral polymorphism is I, Derived polymorphism is V
  VARIANT 104: note = Ancestral polymorphism is S, Derived polymorphism is R
  VARIANT 101: note = Ancestral polymorphism is G, Derived polymorphism is R
  VARIANT 100: note = Ancestral polymorphism is P, Derived polymorphism is L
  VARIANT 92: note = Ancestral polymorphism is R, Derived polymorphism is K
  VARIANT 64: note = Ancestral polymorphism is S, Derived polymorphism is C
  VARIANT 61: note = Ancestral polymorphism is A, Derived polymorphism is T
  VARIANT 15: note = Ancestral polymorphism is P, Derived polymorphism is L
  VARIANT 12: note = Ancestral polymorphism is Q, Derived polymorphism is H
  VARIANT 3: note = Ancestral polymorphism is R, Derived polymorphism is C
  VARIANT 2: note = Ancestral polymorphism is E, Derived polymorphism is K
MERSKSFIKALQVLPELRIPRSIHACTQKSFLFFPKRKHSSRSVSLGIRLDFCFRSSRTCAHSSTPPPSTATSPNSTVSRSKKAYIENDEARNHLHLHSPGMCSRITSLNIVRVGMKVQPTTRLHMFVITQFFGVWTTPEGTKSRRLFFALKSQECARKLRADLAIEEQWEQELRRMLKGIVTDTS

SEQ ID NO: 20423 - protein, 296 aa, Zea mays
  VARIANT 276: note = Ancestral polymorphism is N, Derived polymorphism is I
  VARIANT 179: note = Ancestral polymorphism is L, Derived polymorphism is R
  VARIANT 159..296: note = Derived polymorphism lacks residues 159 to 296
  VARIANT 123..296: note = Derived polymorphism lacks residues 123 to 296
  VARIANT 60: note = Ancestral polymorphism is R, Derived polymorphism is C
  VARIANT 36: note = Ancestral polymorphism is R, Derived polymorphism is C
METSAATPTRPPHPAAASPSPSPSSSLRLWRSAAQRNVRNQWSRLSAAKEQWLAAVADGRAHASALVNAHLCRRNMPATDLGVLKDMPGIRDKANSKLVLREEQYSGMLLSAYKEMVRQLSYLVEASHSMRCFSKAAPNCSITQFSDRQDNLNDSGDGGGAPVFKWFSILEFETLAQELVQMFVSEQKLKRLLLLEFLSIALKEGVELQTSLNWGDELYDGESNELQSIGLQSGDAYSPPENWCAERLGSQRPGNLPLHEVLQVYLTTWHANMNINRSRIGEIFELVEEEMKIKLS

SEQ ID NO: 20424 - protein, 539 aa, Zea mays
  VARIANT 20: note = Ancestral polymorphism is C, Derived polymorphism is S
MEPTRLLLLLLVLGVSLQGCIAQGGGGAGGLTRGSFPKGFVFGTASSAYQYEGAVKEDGRGKTIWDKFAHTFGKVADLSNADVAVDQYHRFEEDIQLMADMGMDAYRFSIAWSRILPNGTGQVNQAGVDHYNRFIDALLSKGIEPYVTLYHWDLPQALEDRYNGWLDRQIVYDFAEYAETCFEAFGDRVRHWVTLNEPHTVAVQGYDAGLQAPGRCSLLLHLYCRSGDSATEPYVVAHNFILAHAKVSDVYRKKYKLGGSERRAWDSVRRHVVRADDQHYRRHRGCQERAGVPARMVRGPLLLRRLPGVDEVAGRRQAAQVHGGRGRARQGGARLRRHKPLHHLLHQAQQHRPRGPTAAQHPGGHRNHQPPYVSLSLLRSSTPPSSFSQWTNDGCWFCITAFRNGKAIGDRANSIWLYIVPSGMRSLMNYVKERYNSPPIYVTENGMDDGNSPFTSIKDALKDSKRVKYHNDYLTNLAASIKDDACDVRGYFAWSLLDNWEWTAGYSSRFGLYFVDYKDNLKRYPKSSVQWFKNLLASS

SEQ ID NO: 20425 - protein, 296 aa, Zea mays
  VARIANT 147: note = Ancestral polymorphism is D, Derived polymorphism is V
  VARIANT 102..296: note = Derived polymorphism lacks residues 102 to 296
  VARIANT 70: note = Ancestral polymorphism is H, Derived polymorphism is Y
METSAATPTRPPHQAATSPSPSPSSSLRLWRPAAQRNMRNQWSHLSAAKEQWLAAVADGRAHASALVNVHLSCRNMPAMDLGVLKDMPGIRDKANSKLALREEQYSGMLLSAYKEMVCQLSYLVEASHSMRCFSKAAPNCSITQFSDRQDNLNDSGDGGGAPVFKWFSVLEFESLAQELVQMFVSEQKLKRLLLLEFLSIALKEGVELQTSLNWGDELYDGESNKLQSIGLQSGDAYSPPENWCAERLGSQRPGNLPLHEVLQVYLTTWHANMNINRSRIGEIFELVEEEMKIKLS

SEQ ID NO: 20426 - protein, 530 aa, Zea mays
  VARIANT 207: note = Ancestral polymorphism is Q, Derived polymorphism is H
MAFRRILSTAVRRRSAIAAAAAGNAREASTAVAAAPGVLAPDATPVRAPVMPYDRIAEAVNARLRRLEHPDPRFLRYASPVPSHADHTAILAAPETRVTTLPNGLRVATESSLAARTATVGVWIDAGSRYENEEAAGVAHFVEHMLFKGTGKRSAAQLEQEIEDMGGHLNAYTSREQTTYYAKVLDKDVPRAMEVLADILQNSNLDQARIEREREVILREMEEVEGQSEEVIFDHLHATAFQYTSLGRPILGSADNVKSITKEDLENYIATHYTASRMVITAAGNVKHEDIVEQAKKLFSKLSTDPTTTNMLVSKQPASFTGSEVRIIDDDMPLAQFAVAFNGASWVDPDSVALMVMQTMLGSWNKSAGGGKHMGSELVQRAAINDIAESVMGFNTNYKDTGLFGVYAVAKADCLDDLAFAIMHEMSKLSYRVTEEDVIRARNQLKSSIQLHLDGSTAVVEDIGRQLLTYGRRIPTPELFARIDAVDASTVKRVANRFIFDQDVAIAAMGPIQGLPDYNWFRRRTYMLRY

SEQ ID NO: 20427 - protein, 506 aa, Zea mays
  VARIANT 192: note = Ancestral polymorphism is R, Derived polymorphism is W
  VARIANT 36: note = Ancestral polymorphism is L, Derived polymorphism is V
MRPSPSSVASSGDTAAPRMYFIPFPTPGHALPMSDLARLFASRGADTTLVLTRGNAARLGGPVARAAATGLRIRIVALTLPAEAAGLAGGHESADDLPNRELAGPFAVAVDLLAPLFADLLRRQPADAIVFDGVLPWAATAAPELGIPRYAFTGTGCFALSVQRALLLHSPQNGVASDTEPFLVPGLPDAVRLTRSRLAEATLPGAHSREFLSRMFDAERVTAGWVVNSFADLEQRYIEHYEKDTGKPVFAVGPVCLVNGDGDDALERGRGGDSSTAAEAARVLRWLNTKPARSVVYVCFGSLTRFPREQVAELGMGLADSGANFVWVVGDKDAPQLPDIDGAAPGRGLVVRGWAPQVAVLRHAAVGAFVTHCGWGGVTEAAAAGVPVLAWPVFAEQFYNEALVVGLAGTGVSMGAERGYVWGGEALGGVVVGRAAVAERVRSAMADEELRGRAGRVGERARRAVEAGGSSYEAVGALLEDVLRPQRQVQDLDAVRETRRDAEIFN

SEQ ID NO: 20428 - protein, 47 aa, Zea mays
  VARIANT 12: note = Ancestral polymorphism is E, Derived polymorphism is D
  VARIANT 39: note = Ancestral polymorphism is P, Derived polymorphism is L
  VARIANT 43: note = Ancestral polymorphism is H, Derived polymorphism is D
MYLIDIHSCKKEALKFHVCCAMSLSFGVIICCKGKLNLPLIYHHFLT

SEQ ID NO: 20429 - protein, 187 aa, Zea mays
  VARIANT 115: note = Ancestral polymorphism is V, Derived polymorphism is L
  VARIANT 172: note = Ancestral polymorphism is D, Derived polymorphism is V
MQLRISPSMRSITISSSNGVVDSMKVRVAPQPPPPPPPPHGAARRGGGGGGGWYWRAVAFPLVVALGCLLPFAFILAAVPALEAGGSKCSSVDCLGRRIGPSFLGRQGGDSTRLVQDLYRFFDQVNKEEFPSDEKLPESFRDFLLEMKDNHYDARTFAVRLKATLRKKGLWDWADPWSQNNIRRLED

SEQ ID NO: 20430 - protein, 144 aa, Zea mays
  VARIANT 75..144: note = Derived polymorphism lacks residues 75 to 144
MDQQAKIDADFLEPTVLLDETHYQEGYRNGYNDGLASGKEEGRQVGLKMGFQVGEELGFFQGCLDVWTSAILIDQNAFTARVRKNIEQLAALVGSYPLSDPENEQIQDVMEKIRLKFRVITASLGVKLEYEGHPKSSKQDAEDL

SEQ ID NO: 20431 - protein, 777 aa, Zea mays
  VARIANT 231..777: note = Derived polymorphism lacks residues 231 to 777
MSKDLEKCSPSGTTPTTSVSPVESKKHEKTVPNYLRATRGSCHDFCKYGHKNPSEEEAGISGGRRKKIPAHLINLTLHRSAILDRSKDIKNRSVSLTKSSISLGEAERFAPKKASASRKGVLSSEHMVPRTATPSQHKSLNSDRRKMHSIVAQKAPTNLRCSNGVPKIDKKETTPAKGAIFPAKLKFPEKTLLEKSRNVDRVTMANQSLHKRPASSLTKLNMVKQGPVASQASSKHLLSKHKNTLEEPVAANITRMRAKAGQSPRRTSNPSNINGKEGSDMPRSPLSLQPKLTASMELQMDDSQITGNYNDSALAELSPAITEYRDFSQPALEETSKTISEDDGVGRTEKSKILGGEAFLESTIALQLQQSLDGKEFSVILAESDLEQKLSEHNIVHSQASKDYNSQTDYAALCQLPEQVTTVETADVFDFMSTQSNSKTEDDQVKVNASVESLIPEGKEEMRVHEDFEISPELLVLDKKHDKEPESCLDLASGNIAENDKDGKVFDSRMNNSASHCQSISETSSDGGLLEEPKSMLIEPSVFAGDELASISNENTSEHGGLKSRMFIPHQSPEELSDNEFYEEYGFELSESDESGTEDEETTIKKNRNESLKSGGQRSRRTSALELDDASLTPYKLKFKRGKIVELPLDSMGPRRLKFRRKSANEASNRESQPARRIYRRNNTSTAVPTDVESPGVKLRHQDAQEKKDAQGLFNNVIEETASKLVESRKSKVKALVGAFETVISLQDGKPTSSTAQAGNSQDLIPDDGGNAPEETG

SEQ ID NO: 20432 - protein, 512 aa, Zea mays
  VARIANT 27: note = Ancestral polymorphism is R, Derived polymorphism is C
  VARIANT 114..512: note = Derived polymorphism lacks residues 114 to 512
  VARIANT 169..512: note = Derived polymorphism lacks residues 169 to 512
  VARIANT 212..512: note = Derived polymorphism lacks residues 212 to 512
  VARIANT 387..512: note = Derived polymorphism lacks residues 387 to 512
  VARIANT 398..512: note = Derived polymorphism lacks residues 398 to 512
  VARIANT 461: note = Ancestral polymorphism is A, Derived polymorphism is V
MDPLRSAQEQRGARAMAVGGLQGAKKRKREHAEGKAKPRKQVKGGGDGAKRKSHSAAGGYTAHGGAGEVVARKKTPVTPKEKRLAAKTLYEFDDLESIIDRTLKRDFDTEEALWLLKIGLVCIPDSPKIKPSMSMVAKILQGPFGGPGCQNQEHEKHFEHFTPNMSKTRNESAFPQDEIDSHREHIYNELTSDSIASKKPKIRKRENNNSVSSSAPNIPNTQDFITTFCEVVEDFCGKTEIPEDGNCGDWLSIPLGDVKVLVNEITSVRSKRILHEVPMDTVTRLLDVIDRQIRYSQVSMNKVEALYRLFKKIGNTFIDDGLINKALSNGKPTVVEFYANWELDSENPVADVESIVAKGIRDGAINATIDQANGWMVWKETGRHVVWELGASSRATAGTRGGLTKHTKSHLGNEWKKPFAGSSHAKGIILEKIGIEAKQPNSAIHKCARVQLVKDGKKIAAFVPNDGCLNYIEENDEVLIVGRGDIPGVRFKVVKVSGVSLLALFKEKKPRS

SEQ ID NO: 20433 - protein, 1077 aa, Zea mays
  VARIANT 181: note = Ancestral polymorphism is P, Derived polymorphism is L
  VARIANT 90..1077: note = Derived polymorphism lacks residues 90 to 1077
  VARIANT 1: note = Ancestral polymorphism is M, Derived polymorphism is V
MEPPPMDRQVAEIASEPDRAAAYARLLLLQRGCADDASSAAELAAELPSTLLPLLLRDAAADDEAVAASALKCLGFALYHPVLVSTISAQMTQLVLDTLVHIIMSTRMKSACNLGVWCFSVQQLNPLIIEDRADPMLIAIVHALDNPFGSLSTTFEAAQAIMKLGGQSPKRMRDLSSLWVPPVYRRLLSADKAERDMVERCLIKVSCVILPPQPLLSKAVASDLEQKLLSCMVNMLDDPSKKVQTVKSWGWIVSLLGPDAVNNRPLLNKLIKVPEQMFTDLNPQVQVATMVSWKSLVDAFFPSQATEIVAQQTVISPLKPIEQASAQVKRIRLIMVPICRVLSRSRNIVLSSSCLSTWHYLLHRLGNLINYLPILEAAFGPILKIIFSFGINDQNKPLWSFCLNLFLDFVSSKNRVREDLCAPVNQNLLAQSCKHIKALLDIQHIKWLPWDISCFNFQLNILGIILKPELFQDIIPETMVIVMDSATEIFRFLLKGIQIELREQRAYEQVNECITNACKFAKRLLLDHVGKNSVIKCAALLEFGLRFMKVIAKELDHSLLASENIEVCLDIEHIKENQHAECSPKLSLPRIRSLSYMEMVSPAVYVTALSLSMISQYTGEFSHRDADELVSILDPSSDALENFHTAVSFMYMQIRRPTCNKERLKWLMVWNSFAKKMNSQIISYLETNSGLCYHDVLHQFFCYPILNFLYPKGISILLNAENSSESKFSVLQNLEMESTIEVYRSLSTNSCNSKFFSKVFFDGFYKYLVCTIDENMALFQANLEHLSEEFENASVLSALGEIVIGLLQNDQMLTYANQELKETPEDSSVCRQPELFLNCFKLANRFMKLSSFHFKANPAGQHQVTSRFFSSLSNFAGHLTLKEDVLLFEIIGDQLTEWLSLSIILYSEMQQGQIVVHLENLWLKMVECLKRSQLVSDVPLINQKHRLLQAALNRPHRPISVATASVCRVATHGNTTLHPGCLISEFAELLMHRRKALDSSRKTVITSNPTDLTAERYDGSVNVSVGLGRKRLKIMKYSTKPKELNKNRANMGISPGNTENRACRKPELILEMLQRKT

SEQ ID NO: 20434 - protein, 172 aa, Zea mays
  VARIANT 81: note = Ancestral polymorphism is S, Derived polymorphism is L
  VARIANT 79: note = Ancestral polymorphism is S, Derived polymorphism is L
  VARIANT 69: note = Ancestral polymorphism is R, Derived polymorphism is C
  VARIANT 65: note = Ancestral polymorphism is G, Derived polymorphism is V
  VARIANT 62: note = Ancestral polymorphism is L, Derived polymorphism is H
  VARIANT 61: note = Ancestral polymorphism is N, Derived polymorphism is S
  VARIANT 15: note = Ancestral polymorphism is R, Derived polymorphism is C
MEKALTKLGSFTISRKAKQELSAIGDDISRFSSTVEEKAKWVFEKLKGHKKSLSDLLREHNLPPGLFPRNIICYEYDESTSKLMVHLSKPCEVSFKDSSAIRYAPRVKATLSRGKLSGVEGMKTKVVVWVKVASVSIDSYKSDKICFLAGVKKLRQKDAYEVPREAVSVDEF

SEQ ID NO: 20435 - protein, 311 aa, Zea mays
  VARIANT 236..311: note = Derived polymorphism lacks residues 236 to 311
  VARIANT 228: note = Ancestral polymorphism is S, Derived polymorphism is I
  VARIANT 209: note = Ancestral polymorphism is A, Derived polymorphism is T
  VARIANT 183: note = Ancestral polymorphism is A, Derived polymorphism is T
  VARIANT 181: note = Ancestral polymorphism is S, Derived polymorphism is F
  VARIANT 150: note = Ancestral polymorphism is S, Derived polymorphism is L
  VARIANT 141: note = Ancestral polymorphism is E, Derived polymorphism is K
MPRVPLSAGRPTARRRSAHNPSCFTLAPRATPPTRFRAARRVRQHDRAPKLDPTSGELFALSYDMIKRPYLRYFYLRPDGGKSGGVEIPLEQPTMVHDFAVTERFVVVPDRQGNLQHEYSGNDCLQLKGHQTYTEVSSLLEHLKLCMFFSKKSFLAFLKFGGYKQEDILIHKAKARLMQSSFALVCDKRTKCLLLFIRGAISTKERLTAATSAEVPFHHIILSEGKISNVVLGKLQSEVLKDAISQIVQDANKNRKFTETVELQISLKNCNPQKDKRFSGSVKLPHIPRPKMKRAVAMTRAVAMEMPAASA

SEQ ID NO: 20436 - protein, 142 aa, Zea mays
  VARIANT 105..142: note = Derived polymorphism lacks residues 105 to 142
  VARIANT 66: note = Ancestral polymorphism is D, Derived polymorphism is N
  VARIANT 59: note = Ancestral polymorphism is Y, Derived polymorphism is H
  VARIANT 58: note = Ancestral polymorphism is R, Derived polymorphism is H
  VARIANT 35..142: note = Derived polymorphism lacks residues 35 to 142
MANEEPAPVTAPAAAAPAGGDHSPAFSFSIWPPTQRTRDAVVRRLVETLAGDTILCKRYGAVPAADAEPAARAIEAEAFDAVAAAGGAAASVEEGIEALQSYSKEVSRRLLDFVKSRSADAKADPPSAEALAPDAPEAQPAA

SEQ ID NO: 20437 - protein, 484 aa, Zea mays
  VARIANT 379: note = Ancestral polymorphism is P, Derived polymorphism is L
MAGSEQRVVAVIMVGGPTKGTRFRPLSLNVPKPLFPIAGQPMVHHPISACSRIPHLAQIYLIGFYEEREFALYVSSISHELRIPVRYLREDKPHGSAGGLYSFRDYIMEDSPSHIVLLNCDVCSSFPLPDMLEAHKKYGGMGTLLVNKVSAESANQFGELVADPETNELLHYTEKPETFVSAVLLFVSDLINCGVYIFTPDILSAIEDVLKQKKDRANLRRVSSIEALHSATKALPPDFVRLDQDILSPRAGKKELYTYQTLDFWEQIKTPGMSLRCSGLYLSQFRHTSPHLLASGDGKRTATIVGDVYIHPSAKVHPTSKIGPNVSISANARVGAGARLINCIILDDVEIMENAVVIHSIVGWKSSIGKWSRVQASFPLYHFIFIHFKINESSILIIVTMIILSAKIMLLKSEQFSAPSFLESMFDSSNRKANKFHGEGDHNAKLGITILGEAVDVEDEVVVVNSIVLPNKTLNVSVQEEIIL

SEQ ID NO: 20438 - protein, 479 aa, Zea mays
  VARIANT 421..479: note = Derived polymorphism lacks residues 421 to 479
  VARIANT 144..479: note = Derived polymorphism lacks residues 144 to 479
  VARIANT 3..479: note = Derived polymorphism lacks residues 3 to 479
MKRKENSAHSAPPLNRPRGKRKALAELPKSNGLNMNHDSAPRPSKPRTRSAARAEAEAEAAMKRRKAGDAARWPMDTRQPDAEAAVAPYVGDIDRYLRSLEVEPLRRPSHSYFQDIQKNICPKMRAILVDWLVEVAEEFKLHAETLHLAVSYVDRFLTMNVVARNKLQLLGVTALLVAAKYEEIESSKMKNLSLEQSTGYRVFDLQKSIYVIHELQLTIRCPNQVAIREKYKDPKVEPLRRPSPGYFQDIQKDICPKMRAVVVDWLVVLAEEFELHAETLHLAVSYVDRFLTMNVVARDKLQLLAVTALLVAAKYEEIESAEMKVVKMEADLLKSLNFQIGGPTVTTFLRQFIASCRGGNSTSREKLEFVCSYLADLSLLDYDCISYLPSVVAAACLFVARFTIHPKTRPWNLTLEQNTGYKVFDLQKSIYVIHELQLTIRCPDQEATRKKYKDPKFGCVSTMVSPREIPTSFPEDCHK

SEQ ID NO: 20439 - protein, 119 aa, Zea mays
  VARIANT 35: note = Ancestral polymorphism is P, Derived polymorphism is A
  VARIANT 36: note = Ancestral polymorphism is A, Derived polymorphism is V
MALRGVWQLQKLVVNYCDWGGSSRGIRAFMEAHLPAFKEKIPHLEVVTELVRGQHPNLKGIYKNHNERVVCVRNLPPEEILLQATRLRNSLGRKVVKLRTRHVTKRPSVQGTWTTELKM

SEQ ID NO: 20440 - protein, 531 aa, Zea mays
  VARIANT 299..531: note = Derived polymorphism lacks residues 299 to 531
  VARIANT 316..531: note = Derived polymorphism lacks residues 316 to 531
MAARQPPPSSASAPAPAAGLSMKDYLKRYVSGPGTDGDQKRAKKKTKKKPKPAGGVLIVDEDPVWQKPVQVDEEPASSGDDKPLVDEDIEVKRMRRLEAIRAARPYNAIAEDGSGWVTVAAPEEQGGGSTHQRRNDTPLPERGRAPTREDLSPVRRRQRRDTPSPVHGDAAAKDFSPPRRPSPVHGDAAAKDFSPPRRRQRRNTPSPVHGDAAAKDFSPPRRRQRRDTPSPVPDGAAAKDFSPPRRRQRRQDTPSPKDSGAADQDDMSPPRKSRQREDLSPPRKGARHITEEPRDISPRKKRDISPSRKSTKEGASKQVKKSGLMTAEEVKEDIRKIKEAEMIKFASQDPSLVGKGAKAVFRDKEGRRISEEEMCKAKEPEKPKEIHIEWGKGLVQKREAESRLKEIEAEKSKPFARTRDDPELDNMLKERIRWGDPMAHLVKRKDPEFILEDLGDDEKMKESGFIVPQSIPTHSWLKRGVDAPPNRYGIKPGRHWDGVDRSNGFEKDMFKLKNEKQAMEQEAYLWSVSDM

SEQ ID NO: 20441 - protein, 98 aa, Zea mays
  VARIANT 21: note = Ancestral polymorphism is S, Derived polymorphism is F
MGYWWDRVVLPVRRAWLGVASRFGVRQTGTARGRGSAFVGLWRLRQEVSTCEYEDVHVMWEMLSRTTAPAPAPAPRRHSRFRPQPRPWGGRFRLCRGF

SEQ ID NO: 20442 - protein, 83 aa, Zea mays
  VARIANT 21: note = Ancestral polymorphism is S, Derived polymorphism is F
  VARIANT 71: note = Ancestral polymorphism is R, Derived polymorphism is P
MGYWWDRVVLPVRRAWLGVASRFGVRQTGLWRLRQEVSTCEYEDVHVMWEMLSRTTAPAPRRPSRFGPQPRPWGSRFRLCRGF

SEQ ID NO: 20443 - protein, 624 aa, Zea mays
  VARIANT 400: note = Ancestral polymorphism is P, Derived polymorphism is L
MKFMKLGSNPDTFQGDGNEVSIAASELVSDITVRIGTTKFYLHKFPLLSKCARFQKLIPTTGDENIEIHIHDIPGGAKAFEICAKFCYGMIVTLNAYNVIAARCAAEYLEMNETVDKGNLIYKIDIFLSSSIHRSWKDSIIVLGTTKAHLPWAEDLKLVSHCIDSVASKASIDVSKVEWSYTYNRKKLTVENGHDSPWNGVKQQQFVPKDWWVEDLTDLDIDAYKQVITAVKTKGTVPKDVIGAAIKAYTYKKLPSLSKVSMIHGDAKVRAMLVTITCLLPSEKGSVSCSFLLKLLKATNLLKCGEMCRKELMKRIARQLEEASVSDLLIPTVDGDTTVYDIDLILSIVEEFVRQDSKNAQRHNGGEVNDHVSAPSASMVAVAKTVDGYLAEVARDPNIPVYKFFSLAETVSGGSRPVHDGLYRAIDMYLKEHPSLGKSDKKRLCALMDCKKLSPDACAHAVQNERLPLRIVVQVLYHEQTRACAAATAIRADSIGIGSYESSRSGATTNTEDEWDGVMAVEDLSLSKTTKLVDKCDTAASTVVVGKDKDHGGNKGATGRVAKGGAGAATPKKALGKTVSGKGQTGERSSSDSSDSAVAVAVLTSQEHPKRTTRARNAAKSAAA

SEQ ID NO: 20444 - protein, 83 aa, Zea mays
  VARIANT 70: note = Ancestral polymorphism is P, Derived polymorphism is A
  VARIANT 29: note = Ancestral polymorphism is K, Derived polymorphism is M
  VARIANT 28: note = Ancestral polymorphism is R, Derived polymorphism is S
  VARIANT 4: note = Ancestral polymorphism is G, Derived polymorphism is D
MARGARFLLVLALLVALLAVVFQLYRLRKPRLWTVEELSLYNGTDEGLPILLAILGSVFDVTKGRSHYGPGGGYHHFAGRLQS

SEQ ID NO: 20445 - protein, 353 aa, Zea mays
  VARIANT 48: note = Ancestral polymorphism is E, Derived polymorphism is K
  VARIANT 198: note = Ancestral polymorphism is C, Derived polymorphism is F
  VARIANT 202: note = Ancestral polymorphism is R, Derived polymorphism is L
MGDAAAAAASTSAPTTPTSILICLEDGSDLLADADDGAGTDLVVARDERLLVVDQDEEYVALLLSKESASGGGGGPVEEMEDWMKAARSGCVRWIIKTTAMFRFGGKTAYVAVNYLDRFLAQRRVNREHAWGLQLLMVACMSLATKLEEQHAPRLSELPLDACEFAFDRASVLRMELLVLGTLEWRMVAVTPFPYISCFAARFGQDERRAVLVRAVECVFAAIRAMSSVEYQPSTIAVASILVARGRETPADNLDALKAILGSSFPQLDTGHVYSCYSAMIREDDKSPTQSTSTSTGVASSGVSVAAHAGGSGSPSPPGASVSVGANNAAGTAPPATTDNRNKRRRLRSPQRQ

SEQ ID NO: 20446 - protein, 252 aa, Zea mays
  VARIANT 12: note = Ancestral polymorphism is R, Derived polymorphism is Q
  VARIANT 48: note = Ancestral polymorphism is T, Derived polymorphism is I
MSSAQDPFYIVREEIQESIDKLQSTFHRWEQTASNTGEYVHLTKELLISCESIEWQVDELEKTISVASRDPAYYGLDEVELSRRRNWTGSSHKQLTMYLNLLHGSSQFMHEHIQVGTVKRAIEKGKSNAATSKYQDTSRTNHYSAQDNDDFLSSESDRQLLLMRQQDEELDELSESVQRIGGVGLTIHEELSGQERILNDLSLEMETTSNRLDFVQKRVAMVIKKAGIKGQIMLIVFLIVLFIILFVLVFLT

SEQ ID NO: 20447 - protein, 177 aa, Zea mays
  VARIANT 4: note = Ancestral polymorphism is A, Derived polymorphism is V
  VARIANT 10: note = Ancestral polymorphism is E, Derived polymorphism is K
  VARIANT 16: note = Ancestral polymorphism is A, Derived polymorphism is V
  VARIANT 20: note = Ancestral polymorphism is H, Derived polymorphism is R
  VARIANT 22: note = Ancestral polymorphism is C, Derived polymorphism is Y
  VARIANT 24: note = Ancestral polymorphism is A, Derived polymorphism is V
  VARIANT 34: note = Ancestral polymorphism is G, Derived polymorphism is D
  VARIANT 35: note = Ancestral polymorphism is V, Derived polymorphism is M
  VARIANT 65: note = Ancestral polymorphism is P, Derived polymorphism is S
  VARIANT 101: note = Ancestral polymorphism is W, Derived polymorphism is C
  VARIANT 104: note = Ancestral polymorphism is S, Derived polymorphism is F
  VARIANT 106: note = Ancestral polymorphism is T, Derived polymorphism is I
  VARIANT 116: note = Ancestral polymorphism is A, Derived polymorphism is V
  VARIANT 133: note = Ancestral polymorphism is T, Derived polymorphism is I
  VARIANT 136: note = Ancestral polymorphism is T, Derived polymorphism is M
  VARIANT 161: note = Ancestral polymorphism is G, Derived polymorphism is E
MATVAPASVKGFNCTANRTRPCQAYALYRAGFAGMPLDLAAIGDLFAVSRFMIVHANNLSTMAAPANGQPLLVPLQCGCPSRSLSSYALMQYHIGLGGTYWIVSTTKLQNLTQYQAVERVNPTLVPTVLDVDIMVTFPVFCQCPAAADNATTLVTYVMQLGDTYVSVAAAFSIAYPQ

SEQ ID NO: 20448 - protein, 275 aa, Zea mays
  VARIANT 61: note = Ancestral polymorphism is Y, Derived polymorphism is N
  VARIANT 251: note = Ancestral polymorphism is T, Derived polymorphism is I
MKGPGLFSDIGKKAKDLLSKDYTYDQKLSIFTASASGVGLTSTAVKKGGLYSLDVSSVYKYKNTTVDVKLDTESNISTTLTVLDALPSTKLVTSVKLPDYNSGKVELQYFHENATFATVVGTKPTPVIDLSGTVGAQGVAFGAEAGYDTATGKFTKYTAAIGVTKPDYHAAFILADKGDTIKVSGVYHLDEKQKASAVAELTRRLSTNQNTLTVGGLYTVDPQTAVKARLNNTGTLAALLQHELKPKSLLTISGEFDTKALDRSPKFGLALALKP

SEQ ID NO: 20449 - protein, 295 aa, Zea mays
  VARIANT 191: note = Ancestral polymorphism is V, Derived polymorphism is A
MASLPVPHTLPRVSPAIVGAARGRAAVRVRTATAALGGGCGGGGGMEQRHGDAPHSPVKEKPVMSNIGKSTNILWHNCLIGQSDRQKLLGQKGCVVWITGLSGSGMFSVDCCLELLAGYSLFLFGFQILGKSTLACALSRELHCRGHLTYVLDGDNLRHGLNRDLSFKAEDRAENIRRVGEVAKLFADAGVICIASLISPYRRDRDACRALLPHSNFIEVFIDLPLKICEARDPKGLYKLARTGKIKGFTGIDDPYEPPINGEIVIKMKDGECPSPKAMAKQVLCYLEENGYLQA

SEQ ID NO: 20450 - protein, 581 aa, Zea mays
  VARIANT 116..581: note = Derived polymorphism lacks residues 116 to 581
MGRRALTILPLLWVAMLSGGAAAVMQSLPYDYSSSAECLPEPLEPQYGGGILRNANFSAGLQGWSAFGHGAVEEGASASGNSYGVARNRTRPYQSVSQKVYLQNDTHYTLSGQSTELLRLPVSNGSADIRAVVKTDGDFVHAGVVEARSGCWSILKGGLTAPASGAAELYFESNTTADIWVDSASLQPFSREEWAAHHSAAIKSARKKAVRLRARGSAGEPVPGAHVRIEHVRSGFPLGSAMGAEILRSPAYQRWFASRFTVATFENEMKWSSTERLRGREDYSVPDAMLRFARSHGIAVRGHNVFWDQPGQQPAWVRSLPYRQLLQATARRIRSVMSRYAGQVVAWDVVNENLHFRFFEDRFGRDASAELYRKAHQMDGQALVSMNEFNTLEWPGDPKAGPSKYLGKLFQIKEFPGNTNDARMAIGLQGHFSVPSIPYIRAALDTLSRANAPIWLTEIDVAPGPNQAYHLEQILREVYAHPAVHGIILWTARHRQGCYVMCLTDNNFQNLPTGDVVDRLIAEWKTHSHAGVADADGYYEAELFHGDYKVTVSHPAANSTVVQSLSVDRETDPDTEFTIHV

SEQ ID NO: 20451 - protein, 322 aa, Zea mays
  VARIANT 198: note = Ancestral polymorphism is R, Derived polymorphism is C
  VARIANT 18..322: note = Derived polymorphism lacks residues 18 to 322
MIEPGNPRIVYSSPLCLRSAFSRRAADNSLPSETPSTSAAAAAAATMAVGKNKRISKGKKGGKKKTVDPFSKKDWYDIKAPSVFSVRNIGKTLVSRTQGTRVCFFLTIDIFSYCPYIIASEGLKHRVFEVCLADLQGDEDQAYRKIRLRAEDVQGRNVLTNFWGMNFTTDKLRSLVKKWQTLIEAHVDVKTTDNYMLRLFCIGFTKRRPNQVKRTCYAQASQIRQIRRKMVEIMINQASTCDLKELVSKFIPEVIGKEIEKSTSSIFPLQNVFIRKVKILKAPKFDLGKLMEVHGDYKEDVGVKLERPVEGDEAGQEVAAAE

SEQ ID NO: 20452 - protein, 209 aa, Zea mays
  VARIANT 185: note = Ancestral polymorphism is H, Derived polymorphism is L
  VARIANT 84: note = Ancestral polymorphism is R, Derived polymorphism is S
  VARIANT 29: note = Ancestral polymorphism is W, Derived polymorphism is C
MGNCQAAEAEAATVLIQHPGGGGTERAYWALSAETVMAANPGHYVAAVITTAQPDAGDGAASSAAAPVKHLKLLRPDDTLLLGRVYRLVSFEEVLREFASNKRQVKLSRVTVRAKDEDEDVKPASKHRRASGDVGERKESERSLAKVLRQTEELEPEADPSSGPSAKHRQADTDTPADLEALLPHRALLGHRAARQWRPALQSIAEGGG

SEQ ID NO: 20453 - protein, 195 aa, Zea mays
  VARIANT 171: note = Ancestral polymorphism is R, Derived polymorphism is G
  VARIANT 170: note = Ancestral polymorphism is L, Derived polymorphism is P
  VARIANT 148: note = Ancestral polymorphism is A, Derived polymorphism is T
  VARIANT 136..195: note = Derived polymorphism lacks residues 136 to 195
  VARIANT 110: note = Ancestral polymorphism is R, Derived polymorphism is H
  VARIANT 84: note = Ancestral polymorphism is T, Derived polymorphism is I
  VARIANT 54: note = Ancestral polymorphism is T, Derived polymorphism is N
MLLGTKIGQRMMTISTVGVPNTIKMLASHKLQSTLAVSLHAPNQKLWETIVPSTKSYPLGALMDDCKSYFLEIGRKYYSATLLTWLEWISWPAGINDEKEHAEELAELLRMCGGGYHVNLIPYNPIEGSEYKRPYRKVVQAFVDALEARKITISVRRTCGLDANAACGQLRNEFQKNPLLEIELSPSTERTLVTA

SEQ ID NO: 20454 - protein, 62 aa, Zea mays
  VARIANT 38: note = Ancestral polymorphism is M, Derived polymorphism is I
  VARIANT 29: note = Ancestral polymorphism is K, Derived polymorphism is Q
MGKVHGSLARAGKVRGQTPKVAKQDKKKKPRGRAYKRMQYNRRFVTAVVGFGKKRGPNSSEK

SEQ ID NO: 20455 - protein, 426 aa, Zea mays
  VARIANT 52: note = Ancestral polymorphism is D, Derived polymorphism is G
MPVPPLLSPLRLPSPAPPLHRNGAPWRRPTQLRAALRVPPPLHLGLAAARGDGVRRFVGTLGSKRARAVGAIRVSAISGDGGGGAGGTGIAAAAAATVVFAVMNRVLYKLALVPMKNYPFFLAQFATFGYVLVYFSILFIRFRAGIVTREMLALPKPQFMLIGLLEALGAASGMAAAAMLPGPSIPVLSQSFLVWQLILSALILGRKYRANQILGCLLVTAGVILAVAGGASNGPILFEVKFFWPAVMMISAAFQAAASIIKEFVFIDGAKRLEGKKPDIFVVNSFGSGFQALFIFLLLPFLSNLKGIPFAELPAYLTRGAACFLNVGGNLKDCHGAPLLPLLYITLNMAFNISVLNLVKMSTAVVASLTSTLAVPLSIYILSLPLPYLPEGTNLSASFLIGVATLVLGLLLYNLPQESTNQVKED

SEQ ID NO: 20456 - protein, 234 aa, Zea mays
  VARIANT 15: note = Ancestral polymorphism is V, Derived polymorphism is A
  VARIANT 38: note = Ancestral polymorphism is Y, Derived polymorphism is N
  VARIANT 117: note = Ancestral polymorphism is R, Derived polymorphism is S
MGCEEEDRLLFPSFAFTESFTEAGATATTPGSGEYFTYTSSLTKARQLSEGQARKRRLSDGQARFLELSFGKERKLETPRKVQLAAELGLDAKQVAVWFQNRRARHKSKLMEEEFSRLRAAHDAAVLHNCHLETELLKVKDRLAEAEEEKTKLIAAAAGGAGSSSPSSSSSSFSTVTTTQQHHTAALVGQFGVEQEEEAADLTTYMSEYAYNSYMNMMDLAPGYFGGVVYDHFN

SEQ ID NO: 20457 - protein, 253 aa, Zea mays
  VARIANT 59: note = Ancestral polymorphism is G, Derived polymorphism is A
  VARIANT 40: note = Ancestral polymorphism is Q, Derived polymorphism is P
  VARIANT 37: note = Ancestral polymorphism is S, Derived polymorphism is L
  VARIANT 24: note = Ancestral polymorphism is K, Derived polymorphism is R
MKLRTKRPEWKSLMPLQLSRLSRKSAMRFFLFPKVQSAGQSPDDTPVYLNVYDLTPMNGYIYWAGLGIFHSGVEVHGVEYAFGAHDFPTSGVFEVEPRQCPGFRFRKSIFLGTTCLDPIQVRQFMELQSVNYNGDTYHLITKNCNHFCKDMCYKLTGNKIPKWVNRLARIGVICNCLLPESLKISPVGHGPNSQSEDSEKRRLRNPFSCFSSISSHRQLPSSSPFPPPSPVKEGLPRCRCSSRKPSTASLRCR

SEQ ID NO: 20458 - protein, 458 aa, Zea mays
  VARIANT 43: note = Ancestral polymorphism is R, Derived polymorphism is H
  VARIANT 28: note = Ancestral polymorphism is S, Derived polymorphism is F
MLDINLFRTDKGGNPDLIRESQRSRFASVELVDEVIALDKAWRERQFELDKIRQELNATSKKIGKLKASKQEEEAKKLMESTDEIKKRLAAKEVEVQEAKSTLDAKVTTIGNIVHESVPVSDDEANNKIVRTFGEKRVEDNLKNHVDLCRMLDIVALEKGADVAGGRGFYLKDEGVLLNLALINFGLAFLRKRGFKPMQTPFFMRKETMAKCAQLAQFDEELYKVTGDGEDKYLIATSEQPLCAYHLGDRIYPAELPIKYAGYSTCFRKEAGSHGRDTAGIFRVHQFEKIEQFCITSPNGNDSWEIHEEMLKNSEDFYKEIGLPYQVVSIVSGALNDAAAKKYDLEAWFPASKTFRELVSCSNCTDFQSRRLGIGYGQKKNDEQSKQFVHMLNSTLTATERTLCCILENFQKEDGVEVPKALQPYMGGIEFLPFKQPLDAKQAADSKSNKSKSKGNAA

SEQ ID NO: 20459 - protein, 596 aa, Zea mays
  VARIANT 317..596: note = Derived polymorphism lacks residues 317 to 596
MAGAPLRRSDLDFADVFGGPPRRVSGNEHRSQRGSQDTSSFESATRAGSGGPDTPVFGDRGSSDRRRQLGEEFYKDIFPGSEAASPRRSGAGDWGNVFGAQASPVSTARPRSSFSIRFNRGMDSSMPTSPSQQMSNRNDDGTSYAYSVPTSPNASMNNYLAQGAARQDSKKNPFSWHRYPFLSRFRSQSGEKKSTSNHVSSMDNEFEGTPVNLESIMANNKFHFSFYKWAGKGALLVLPATAQEKSVDIIGLRSFPQVVIQGIDLIDCEDSMSTATGTAKNQTDYEDSKSGKHSANSATKDGAIPLLFEDYMQGTKQSNDHTKNDVSSTTLSSKISRSPSGERSRSSRVKEKMKGFIKLFSPESSPKRKRAPETQRQTSVGKNGTKTELHDKFSMSSLEASEDVETVQMNSQNAFTAEPFPMTEVQERLDKPVLTANSKMDTATGSNEAASNEPIHDDTKDKAANTIEHEDIEDLDGCVVEHFSEDHVLHNDQEKELIKISEAKIREWSRGKEGNIRSLLSTLQYVLWPESGWKPVPLVDIIEGAAVKKAYQKALLCLHPDKLQQRGAAMHQKCIAEKVFDILQEAWKEFNSVTFG

SEQ ID NO: 20460 - protein, 83 aa, Zea mays
  VARIANT 65: note = Ancestral polymorphism is P, Derived polymorphism is H
  VARIANT 56: note = Ancestral polymorphism is T, Derived polymorphism is I
  VARIANT 42: note = Ancestral polymorphism is T, Derived polymorphism is A
  VARIANT 36: note = Ancestral polymorphism is S, Derived polymorphism is Y
MGNIICLNNTGFAVRVGYLNAIHEGREELFVGNMSSREFVDTITRDLLGSRVFVFTPKGKIKNLPKGATLVDYAYLNHTETGN

SEQ ID NO: 20461 - protein, 414 aa, Zea mays
  VARIANT 276: note = Ancestral polymorphism is T, Derived polymorphism is I
MLLPVTMAVHTTTSSSHPLLFLYRGTANPSPAVISLPSSLRGVSLRSRATAAPPAETLSDDGIPDAPPEGEGTGIPLPSSIGDDGEQLLYGIAGKEIVTRPCAQLVSSHSDSLDVSQEKIVIINRYGERLVGVLHETGSKELVVLCHGFRSSKEGRTIVSLADALTSENISIFRFDFSGNGESEGTFEYGNYYKEVDDLRDVILHFKKHKRDTHAIAGHSKGGNVVILYASIYHDISKVVNLSGRFKLERGIEDRFGNDYMEKIDQHGFIDVEDKTGRIIYRVTKQSLMDRLKTDMHSACLSIDPNCRVLTLAPKQKIRIKLRSYWVPLIEDSCKKIIEAAQTTNAKTMGPVPLPTKRRVYCVLNSPHVHKDSRFHFEIRTHQRLIDIMYPTAQTIDSLMQLQLPAGVDVEVKL

SEQ ID NO: 20462 - protein, 128 aa, Zea mays
  VARIANT 15: note = Ancestral polymorphism is G, Derived polymorphism is R
  VARIANT 35: note = Ancestral polymorphism is D, Derived polymorphism is E
  VARIANT 75: note = Ancestral polymorphism is R, Derived polymorphism is G
MADTNQNREQTLIAGAGLGLVAVHSGLTVYRAMGDKQAAVLFVAWSCLTLVLVFVCLLAYERAAPGSPARERASRAIWPPTTLLTLSFAWKVTADMPPDSAAAAALVWGLAIATTAGGFVALSVRAGP

SEQ ID NO: 20463 - protein, 180 aa, Zea mays
  VARIANT 19: note = Ancestral polymorphism is L, Derived polymorphism is S
MGGVGEAVEVTELELRIQLMDGGSYNINDNADLLAEILARLDGRSLAAAAGVCRLWAAVARRDAVWEALCLRHVGPAPSAAAAAAVAGPATRAVVAALGGYRRLYRLCLGPALDRLAQAQAQVQAARAHRLSLSLSLSLFSIDCYERLGSGGGPSAGASAPGRRQQPSSLLFLCKPVDVS

SEQ ID NO: 20464 - protein, 150 aa, Zea mays
  VARIANT 44: note = Ancestral polymorphism is L, Derived polymorphism is R
MTRHGGSDNAASPSIIIHASSIALLRERFRNLQKVKEMRQGRELQRRARTAHTTDRAAGPSPSPSALSLGLHAANSSTTQQPSRWFLHPDLVRPSRPLRGPAYHHHGLIIAASAVQPPPPPSSWGGTTTTQNYSGYRSDVVVDVDTSLHL

SEQ ID NO: 20465 - protein, 216 aa, Zea mays
  VARIANT 4: note = Ancestral polymorphism is R, Derived polymorphism is L
MARRNDHVLSLLGAMAALVLFAAAGAAAQGCAPGNLQPGRSFERCADLPELGASLYWTYHPANGTADLAFRAPQSSSGWVAWGINTERPSSMAGSSVFVASLGGDGGSVSVLATYLESTSPALANGTLKLDVPVAPLAEYAAGAYTVYVTVALPGNSTQQNTVWQAGPLSAGQIAPHPIAGPNVQSTMVLDFLSGGKSTALPNFDVHRRSLRSFRG

SEQ ID NO: 20466 - protein, 214 aa, Zea mays
  VARIANT 151: note = Ancestral polymorphism is A, Derived polymorphism is T
  VARIANT 136: note = Ancestral polymorphism is S, Derived polymorphism is R
  VARIANT 134: note = Ancestral polymorphism is H, Derived polymorphism is Y
  VARIANT 120: note = Ancestral polymorphism is D, Derived polymorphism is G
  VARIANT 54: note = Ancestral polymorphism is P, Derived polymorphism is T
  VARIANT 27..214: note = Derived polymorphism lacks residues 27 to 214
MEASEAAPAAADTVMEAEDVSGGKGEWYVLGERALMVPYTREHVPRYHDWMQDPALLEATASEPLSLSQEFEVHRSWTLDPLKHTFIVLDKELIEGEFVPGNPHIEAMVGDVNIYMNDSDDVQIAEIEIMIAEHKSRGKGIGQEAILLMMAIAVEKYGIHTFRAKISESNMASLKLFRKLGFKDASYSVVFKEVTLEAPADSLPLRFPLTIGDW

SEQ ID NO: 20467 - protein, 109 aa, Zea mays
  VARIANT 17: note = Ancestral polymorphism is A, Derived polymorphism is D
  VARIANT 33: note = Ancestral polymorphism is Q, Derived polymorphism is H
MRMSHLDQRSAEKKRTAAAASAQKVSKNIEEQQKKIQQLMQPAKRPRPENVGQVSSCFNPESAITQISQLVAGSHRPVGIQNQALAVPQYGSGSLARPYRFSTLAPESV

SEQ ID NO: 20468 - protein, 110 aa, Zea mays
  VARIANT 99: note = Ancestral polymorphism is Y, Derived polymorphism is C
  VARIANT 34: note = Ancestral polymorphism is D, Derived polymorphism is N
MGLLFLERLEGEGVFRCRRCRVDAASKDAIISRDFYGRSGRAYLFDHVVNICLGPNEDRYLVTGLHTVNDIYCSCCQQILGWRYEKAYEQSQKYKEGKYILERARMVKDG

SEQ ID NO: 20469 - protein, 520 aa, Zea mays
  VARIANT 169: note = Ancestral polymorphism is P, Derived polymorphism is R
  VARIANT 244: note = Ancestral polymorphism is E, Derived polymorphism is K
  VARIANT 294..520: note = Derived polymorphism lacks residues 294 to 520
  VARIANT 386: note = Ancestral polymorphism is P, Derived polymorphism is S
  VARIANT 390: note = Ancestral polymorphism is P, Derived polymorphism is L
  VARIANT 396: note = Ancestral polymorphism is I, Derived polymorphism is N
MFIESFRVESPHVRYGPTEIESEYRYDTTELVHEAKDGASRWVVRPKSVKYNFRTSTAVPKLGVMLVGWGGNNGSTLTAGVIANREGISWATKDKVQQANYYGSLTQASTIRVGSYNGEEIYAPFKSLLPMVNPDDLVFGGWDISSMNLADAMTRAKVLDIDLQKQLRPYMESMVPLPGVYDPDFIAANQGSRANNVIKGTKKEQVEQIIKDIRYSDMDANTHWEFKEKNKVDKVVVLWTANTERYSNVCAGLNDTMENLLASVDKNEAEISPSTLYAIACVTEGVPFINGSPQNTFVPGLIDLAIKNNCLIGGDDFKSGQTKMKSVLVDFLVGAGIKPTSIVSYNHLGNNDGMNLSAPQTFRSKEISKSNVVDDMVSSNAILYGPGEHPDHVVVIKYVPYVGDSKRAMDEYTSEIFMGGKSTIVLHNTCEDSLLAAPIILDLVLLAELSTRIQLKPEGTDKFHSFHPVATILSYLTKAPLVPPGTPVVNALAKQRAMLENIMRACVGLAPENNMILEYK

SEQ ID NO: 20470 - protein, 234 aa, Zea mays
  VARIANT 144: note = Ancestral polymorphism is P, Derived polymorphism is R
MANRPSRSRLLVLALAAAGLLAATRAEASTPASPAPAPGPSADCTDALLGLAGCLGYVQEGSTAAAPDPSCCSGLRDVVRGEVACLCQLFQGGQDFGLSLNMTRALQLPAACKVKTPPVSKCHVSVPGVPSASPGISGSLVRGPRLRAVADAVAVNPFGITGSNREPDQRSSAFPSAFRRCRPLGTTTGLHLHRCRDSVGVPGLVSWAHSPEFMRSARTLPQSDHKSCTERCIL

SEQ ID NO: 20471 - protein, 358 aa, Zea mays
  VARIANT 142..358: note = Derived polymorphism lacks residues 142 to 358
  VARIANT 129: note = Ancestral polymorphism is T, Derived polymorphism is I
MGGILCDERVERMETNSVEREASNGSTVSSEEGVDRMGTSLDDSEASDGSTTQDSDTDVETESSVSSIEEQEAGYGAHIPQPDPAVCKVAKENNTAGVKISDRMTSVSELTLVLASGASMLPHPSKVRTGGEDAYFIACDGWFGVADGVGQWSFEGINAGLYARELMDGCKKIVEETQGAPGMRTEEVLAKAADEARSPGSSTVLVAHFDGKVLHASNIGDSGFLVIRNGEVHKKSNPMTYGFNFPLQIEKGDDPLKLVQKYAICLQEGDVVVTASDGLFDNVYEEEVAGIVSKSLEADLKPTEIADLLVARAKEVGRCGFGRSPFSDSALAAGYLGYSGGKLDDVTVVVSIVRKSEV

SEQ ID NO: 20472 - protein, 143 aa, Zea mays
  VARIANT 26: note = Ancestral polymorphism is P, Derived polymorphism is L
  VARIANT 42..143: note = Derived polymorphism lacks residues 42 to 143
  VARIANT 104: note = Ancestral polymorphism is Y, Derived polymorphism is C
  VARIANT 133: note = Ancestral polymorphism is P, Derived polymorphism is S
MTESLVRNKPGMASIKEMPVVQDGPPPGGFAPVRFARRIPTSGPSATAIFLTTFGAFAYGMYQVGQGNKVRRALKEEKIAARSAILPMLQAEEDERFVKEWKKCLEEEARIMKDVPGWKVGESVYNSGKWMPPATGELRPEVW

SEQ ID NO: 20473 - protein, 597 aa, Zea mays
  VARIANT 45: note = Ancestral polymorphism is C, Derived polymorphism is Y
MEDFCAVCADTLEWVAYGSCGHRDVCSTCIVRLRFVMGDNKCCICKTVCPFVFVTKAMGKYTRVITDFSVLPAGVNEGKAGDFWYHEDTKAYFDDADHYRMIRTMCQLSCNVCDNAEDQVAQAKRKSKFRSIEQLKGHLYCVHRLHMCNLCLEGRKVFICEQKLYLKSQLAQHMKTGDSEVDGSEVERNGFAGHPMCEFCRSSFYGDSELYMHMSREHYSCHICKRQNPGRVEYFANYEDIELHFREDHFLCEDEACLEKKFVVFLSKAQLKASWNKLLKHNAMEHGGRMSRSQRNAALETPSSFIYRRNEQEQRRGRGRNAFHDGSDCHISSSANAFHDRSDCHISSSANAFHDKSDCHIPSTAQKDRAAADGHAGRLDNVSESFQSLSIGSSSREAEVGEGSRTGRVLEQLSFRPLSDPDIPDNSVETSFPSLSEQQSSLNQSARDAPRLGDESLFPPLTGSSNKMKQPVFTPKRPRTFPAAEDIHAAKMRYALGMNEDMYSAFKEIAGEYRRGTIDAFEYLSYVEQFGLSHLVPEMVRLLPDSRKQRELADAHYTNTRLKNLQENGNNRKGGFFLSKKKSLQENGGGTSEWRWN

SEQ ID NO: 20474 - protein, 578 aa, Zea mays
  VARIANT 278..578: note = Derived polymorphism lacks residues 278 to 578
MEDFCAVCADTMDWVAYGLCGHREVCSTCVARLRLVMDDKRCCICKTVCPSVFVTKAMGKYTRVVTDFSVFPNGANEGKAGDFWYHGDTQAYFDDADHYRMIRSMCQLSCNVCDNAEDQDALAAQAKRRSKFRNIDQLKGHLYHVHRLHMCNLCLEGRKVFICEQKLYLKSQLAQHMKTGDSEVDGSEVERNGFAGHPMCEFCRSSFYGDSELYMHTSREHYSCHICKRQNPGRVEYFANYEDIEKHNAMEHGGRMSRSQRNAALETPSSFIYRRNEQEQRRGRGGNAFHDRSNCHISSSANAFHDGFDCHISSSANAFHDRSDCHISSSANAFHDKSDCHIPSTAQKDRAAADGHAERLDNVSESFQSLSIGSSSREAEVGEGSRTGRVLEQLSFRPLSDPDIPDNSVETSSPSLSEQQSSLNQSARDAPRLGDESLFPPLTGSSNKMKQPVFTPKRPRTFPAAEDIHAAKMRYALGMNEDMYSAFKEIAGEYRRGTIDAFEYLSYVEQFGLSHLVPEMARLLPDSRKQRELADAHYTNTRLKNLQENGNNRKGGFFLSKKKSLQENGGGTSQWRWN

SEQ ID NO: 20475 - protein, 79 aa, Zea mays
  VARIANT 25: note = Ancestral polymorphism is Q, Derived polymorphism is L
  VARIANT 50: note = Ancestral polymorphism is V, Derived polymorphism is I
MFFPDDAKAVIIQELLMLSGSDFEQLLQDRFANYVFRTALDHTRGRLYDVLVEAILPYENAIRNSPYCNKRIIMHLTRR

SEQ ID NO: 20476 - protein, 232 aa, Zea mays
  VARIANT 92: note = Ancestral polymorphism is H, Derived polymorphism is Y
MVSLQPSSAAPLLPEAATANKLPPWLSLVGSVVASSTGTAATSKKRKRDGSGCGGDDDDRGEVVDGIELNFDAAPLPPEWQRCLDIKSGQIYYYNTRTQKRTCKDPRGHGLQSDYRAEEGQEEEEDSANCAPPGLDLELNLTFEPRRVLAAHRKTMKRANKQPAEEEEAEDDDSSSSSREMVAGVCVRCHMLVMMCRASPACPNCKFLHPPSRAAPPPPPLKLGLQLLCCRD

SEQ ID NO: 20477 - protein, 173 aa, Zea mays
  VARIANT 54: note = Ancestral polymorphism is I, Derived polymorphism is T
  VARIANT 4..173: note = Derived polymorphism lacks residues 4 to 173
MQVQPTLIGRKQVLSNSGIASISVVSIALVIGGIDRCLDSKESTLVTALIDGVIGHYACCNGDTWSSELDILCKVEPRIITTFKVLVRQATIGGVTIDGLLAAAAGFSIGLAFVLIGFFTTQSAPDFGIVGSTVFTKRKTVRHGVGALYKGLVPNSVKVVPSIAIAFVTYEVV

SEQ ID NO: 20478 - protein, 585 aa, Zea mays
  VARIANT 117..585: note = Derived polymorphism lacks residues 117 to 585
  VARIANT 121..585: note = Derived polymorphism lacks residues 121 to 585
  VARIANT 146: note = Ancestral polymorphism is P, Derived polymorphism is L
  VARIANT 172: note = Ancestral polymorphism is S, Derived polymorphism is L
MDLLDARHRHTPDSSSSPHAASDMGLPLAGAAYQPYVSELLSFSIERLHKEPELLRVDAERVRRQMQEVAVENYGAFIAASEALSFVRAQLESFDGHLEAMIEEIPNLTSGCTEFVESAQQILEERKLNQTLLANHTTLLDLLEIPPLMDTCIRNGNYDEALDLEAFVSKISKLHPDLPVVQGLAAEVKKTVQSLISQLLQKLRSNIQLPECLRIVAHLRRIGVFSESELRLQFLRCREAWLSGILEDLDQRNVYDYLKGMVTCHRVHLFDVVNQYRAIFNNDKSGNDENSEGGLLFSWAMQQVSNHLATLQVMLPSITEGGSLSNILEQCMYCAMGLGLVGLDFRGLLPPIFEDAVLNLFSKNMSMAVENFQVVLDSHRWVPMPSVGFVANGVVDDTSDDVTPPSVLMEHPPLAVFVNGVSAAMNELRPCTPLSLKVILAQEVVKGLHAVSDSLVRYKAMRMLRGNESALFLSLCQAFIEVVHPYCAACFGRCYPNGATLISECQGTLDAVRQLLTIPARSNSSSIERKQSGAIERKQSVESPGTAVTNNELSADGPGLEINDAATTTTPPVEDDVSTHPPASK

SEQ ID NO: 20479 - protein, 359 aa, Zea mays
  VARIANT 26: note = Ancestral polymorphism is S, Derived polymorphism is I
  VARIANT 42: note = Ancestral polymorphism is K, Derived polymorphism is M
  VARIANT 79: note = Ancestral polymorphism is T, Derived polymorphism is I
  VARIANT 106: note = Ancestral polymorphism is P, Derived polymorphism is S
  VARIANT 339: note = Ancestral polymorphism is M, Derived polymorphism is K
MAPVDLTPRQPRKAYGGDAGAYYEWSPADLPMLGVASIGAAKLSLAAGGLSLPSYSDSSKVAYVLEGTGTCGIVLPEATKEKVLAVKEGDALALPFGVVTWWHNGPAAPTQLTVLFLGDTSKGHRPGQFTNFQLTGASGIFTGFSTEFVSRAWDLPEANAAALVSSQPASGIVRASSPLPAPSAQDREGVALNCLEAPLDVDIPGGGRVVVLNTANLPLVREVGLGADLVRIDAHSMCSPGFSCDSAYQVTYIVRGSGRVQVVGPDGVRVLETRVEGGFLFIVPRFHVVSKIADASGMEWFSIITTPNPIFSHLAGKTSVWKAISAEVLQASFNTTPEMEKLFRSKRLDSEIFFAPPSN

SEQ ID NO: 20480 - protein, 710 aa, Zea mays
  VARIANT 412..710: note = Derived polymorphism lacks residues 412 to 710
MSYPGSSASRFPPFHVRHKVPATRADRRQRLYRSLWPTSPAGPSTTARSIKQLPFQSPLKHRRISSRERVRWRRGRVAGMGKMNCFSGLLSGKSKAFKGGNKGAYAKKAASGGNDCPKVKPVEFVDMAGTAVDDFVGRRGGGSVHASACSSSFVVHAATELPRHATAENGEDEAAVNKDSSSAGAGSPGYSIGRMSPTASPKLTRSCSNMETARSVPPPGSDSDLPARSRSHNDLLKNLPPGRPTTARSGLSPTASFRSSCSADRVLLKKRSSRQVLPSRSRKLWWQTFLWSHRNLHRPGASATTPTLPSAWKDGRPVHHGYTSDTLGTATADAKNKGVVAVEEDPVPNQWVAFSAEASPLDRVSAWVNSLGDASFHAVDEEDDATLHGARPRPRPRRSEIVELWTAGGKRQPQAKRRAADEAAPAQASGVVHTLNAFSSVAHIAGMGLRTVPMIAAFSTLRAVNLSGNMIVQITAGSLPKGLHSLDLSRNSIAVIEGLRELTRLRVLNLSYNRISRIGHGLSSCTAIRELYLAGNKISDVEGLHRLLKLAVLDVSFNKISTAKSLGQLVANYGSLRAISLLGNPVQANTGEDTLRKAVSGLLPRIDYLNKQAVKPQRAREVAKDSVAQAALGNNAGGSSRRRLARRLSQSPGSSSGKGRGRGGREGNGSRRGSRSRFVARPQSSSYQGDEAKHDNGVGLEEGEETSPCV

SEQ ID NO: 20481 - protein, 236 aa, Zea mays
  VARIANT 93: note = Ancestral polymorphism is V, Derived polymorphism is G
MVTDKSNLPQQQQPPPPSASSAPSSLKSLNKASYKISKQSSSASPAPVPASTMRAPSPPPPAPRPPPPLPPPPPPPPQASSIPADHPPPQPPVYNIDKSDFRDVVQKLTGSPSHLLPPQPAPTPATARARAPLMAPPPPIMAPPPPPPTAIPSRLHRIRPPPLAPPPILPPAPPALSPLPPLPAVCMTAESPISAYMRRLRGMPSPIRAPTSPLGFGCLPSPGVPMPATSPRVRDP

SEQ ID NO: 20482 - protein, 430 aa, Zea mays
  VARIANT 40: note = Ancestral polymorphism is A, Derived polymorphism is V
MQESRWDMDHQVARLRGELRKVRDERDRAQRALEVTDWKALASANDRAAIETLEAELNVSRECEKRMLDSLAMQTKQLELTKISLEEAKLEIASLQETVQRLEAARSPVATMPARNRRDRDMQRVHGELRVALAAEEKSKKAMEEFVIALKEVNAELHTTKQQLARAQHEAESARLDADRLHMSAKRKDEKLRALSDEVARLRAEAEESFTAWRGKEDGFTACMKSTEAELAEARHENARLLESQRSWRAEVAKLRDILKQAVKDTNVAKEALEEARSENALLKSVLGDKDTAVKCTKQELECLRISEAAARDSVKELQSMLVATSSSPTAAAAAAKLDAEESPTPRVRVGPPGLEKYPSDSKIRPPAGITRPRRMSETFEGSAYDIFGTMDEQKGDMGVFSSMPRLPARRRVVLRKVGSLFRWKSFSNK

SEQ ID NO: 20483 - protein, 235 aa, Zea mays
  VARIANT 139: note = Ancestral polymorphism is A, Derived polymorphism is T
MAEPEVGVAADTAMETEAPEAAGQKRERDEVGDPAAEGGEAAVEEAAAAKKPKLEEETKEVEEASEEKAEETAEGKTEEANEKTVEAERKPVKLGPKEFSSSVEMFDYFFGLLHYWTPQIEFNKYEQMVLEDLLKKGHAEPAKKIGAGVEAFEIRNHPVWQSRCFFIRRIDGSSDDFSFRKCVDNILPLPEDMKVGNGKKSGGHHKGGGGGGGGRGGGRGRGGWRGGRGRGRRGG

SEQ ID NO: 20484 - protein, 125 aa, Zea mays
  VARIANT 7: note = Ancestral polymorphism is P, Derived polymorphism is S
MVDAWWSLLGAAFPALVAGQFIRTKRRRDEEQRLKAARGREKSSDEVFVCERVCTSKRMLNKVGAFSKDPIPETCVTVCGVSELDACADACARTVCVNQHQVPNWNDVCLKRCQSECLKLSSTLM

SEQ ID NO: 20485 - protein, 476 aa, Zea mays
  VARIANT 140..476: note = Derived polymorphism lacks residues 140 to 476
  VARIANT 168: note = Ancestral polymorphism is S, Derived polymorphism is L
MYEHLPAFPIAPAAVGDCRGIPFDPSFLPRLLLSATSCTSPFLAERAVSALHATGLKLGALPSSLPASNALISAYSQADLLPSALRVFSLLSHPSTASYTTVLSALSRHGRPHEAISLFATSASAVAPDAELLSCLVSCCRRASALLPARAAHAYGIKNVAALAFYASAGPALVALYASRGKVGAARRVFGYMDGLDVVSWNAMIGGFASAGMDEESWACFREMHSRGVRGNARTAVVVLGSCDMESGRQVHGTIVSSHGGSSNAILWNALMSMYSRAGCVTDAERVFLEIVKKDVVSWNVMIGAFAKNGYGERALEFVDMVLQCGMKPDSVTFTAVLMACCHCGLVDEGLVLFQRFVSVVGLVPTMEQCACIVDLLARAGRFLEALEFIGQMSVRPNTVVWGALLSASKMHHNVEFAKIAFEQLVQVEPENAGNFVTMSNIYAKAGMVEDAKRVRMMIDSVELAKPSGKSCVEIL

SEQ ID NO: 20486 - protein, 239 aa, Zea mays
  VARIANT 150..239: note = Derived polymorphism lacks residues 150 to 239
  VARIANT 181..239: note = Derived polymorphism lacks residues 181 to 239
  VARIANT 188: note = Ancestral polymorphism is A, Derived polymorphism is S
MVAAAAETQWMSPYEVARERNVEENKRKMEALNLRHLSAVIKEAPKTPSPMKPKRRRPIEDAVVVPSPPRRSRRLANLPELKYAEIAPHTADRMTRSPRKPACRIYFANRGSISMKARLEATRKAEELESELDHEIPSFVKAMLHSHVVRGFWLQLPSHFCDTYMPKQDSIITLVDEKDEEFDTKYLAYKKGLSGGWAGFALCHGMQDGDSAVFQLIKPTTFKVYIIRAASDDVSEVDE

SEQ ID NO: 20487 - protein, 192 aa, Zea mays
  VARIANT 63: note = Ancestral polymorphism is N, Derived polymorphism is Y
MGDVSLNGPIKAAEPGAGGIAKGNQVLDTMSAGWTDERHRLYISSMEASFVDQLYNHGSRPRNANGTAFKALRREYVEYEKTDAPVRRGAKCCGVPANPWMQHFRPRSDGGNNARGDGLGDSVGDLESGTEANRKSLSASHGRERDACEGEPQLLHESREVSDQNFADDEAEAETESMKAYKKRRLSRTMIN

SEQ ID NO: 20488 - protein, 694 aa, Zea mays
  VARIANT 274..694: note = Derived polymorphism lacks residues 274 to 694
  VARIANT 112..694: note = Derived polymorphism lacks residues 112 to 694
  VARIANT 18..694: note = Derived polymorphism lacks residues 18 to 694
MHVNVLNTLFTSLNSPGQLRAWQANGGDPCGQSWQGITCSGSGVTKILLPNLSLTGNLAYNMNNLGSLVELDLSQNNLGGGGQIQYNLPNVKLEKLNLAGNQFGGNLPYSISTMPNLKYLNLNHNQLQGNITDVFSNLYSLSELDLSFNSLTGDLPQSFTGLSSLKRMYLQNNQFTGYINVLANLPLETLTISHNLLVSRNVGNNHFTGWIPSQLKKINNLQTDGNSWSTGPAPPPPPYTAPPPPNHWNGAGQNDDGSSSSGGRPGIGGGGVAGIIISLLIVGSVVAFFLIKRRKHKAIMEEQFEQHQPFTSFPSNEVNDMKPIYESTTVDIESLASPASINLKPPPKIEQNKSFDDDDDFSNKTAANRSNITPMKATVYSVADLQMATDSFSFDNLVGEGTFGRVYRAQFNGGKVLAIKKLDITVMPFQSSDDFAELVSNISKLHHPNLNELVGYCMEHGQHLLVYDFHRNGSLHDLLHLSDEYSKALSWNSRIKIALGSARALEYLHEICSPSIIHKNFKASNILLDSEFNPHLSDTGLASFIPDAEFQAAEQSAGYTAPEVDMTGQYTLKSDVYSFGVVMLELLTGRRPFDSSRPRSEQSLVRWAAPQLHDIDALDRMVDPALKGLYPAKSLSRFADVLALCVQPEPEFRPPMSEVVQALVRLVQRANMTKRMLDGGDTSRGPDDQDQYFI

SEQ ID NO: 20489 - protein, 143 aa, Zea mays
  VARIANT 27: note = Ancestral polymorphism is L, Derived polymorphism is P
  VARIANT 28: note = Ancestral polymorphism is P, Derived polymorphism is S
  VARIANT 30: note = Ancestral polymorphism is A, Derived polymorphism is V
  VARIANT 32: note = Ancestral polymorphism is P, Derived polymorphism is L
  VARIANT 37: note = Ancestral polymorphism is G, Derived polymorphism is S
  VARIANT 60: note = Ancestral polymorphism is D, Derived polymorphism is N
  VARIANT 112: note = Ancestral polymorphism is C, Derived polymorphism is R
  VARIANT 113: note = Ancestral polymorphism is M, Derived polymorphism is K
MAGLAATAVGLVTPGAPAHDAVMEYLLPAAVPLLLLGADLRHVVRTTGDLLKTFLLGSADNLISALYFMALFSLASNIPAEPKTATASPQKDGERLSVLNGGAAIALSFIICKAARLGLQGGTLPCITALAVFLALRPTDQPF

SEQ ID NO: 20490 - protein, 77 aa, Zea mays
  VARIANT 65: note = Ancestral polymorphism is A, Derived polymorphism is V
  VARIANT 55..77: note = Derived polymorphism lacks residues 55 to 77
  VARIANT 54: note = Ancestral polymorphism is A, Derived polymorphism is T
  VARIANT 51: note = Ancestral polymorphism is I, Derived polymorphism is T
  VARIANT 49: note = Ancestral polymorphism is S, Derived polymorphism is R
  VARIANT 46: note = Ancestral polymorphism is E, Derived polymorphism is K
  VARIANT 42: note = Ancestral polymorphism is T, Derived polymorphism is M
  VARIANT 38: note = Ancestral polymorphism is A, Derived polymorphism is V
  VARIANT 36..77: note = Derived polymorphism lacks residues 36 to 77
  VARIANT 28: note = Ancestral polymorphism is A, Derived polymorphism is V
  VARIANT 9: note = Ancestral polymorphism is S, Derived polymorphism is F
  VARIANT 5..77: note = Derived polymorphism lacks residues 5 to 77
  VARIANT 1: note = Ancestral polymorphism is M, Derived polymorphism is I
MLSEEFHVSASLFERCFTYLMCEFHVYAGPAPDQLQKALRKTFSAEKKSKIRKAWDGTKVIYNVASWGATAVGVYNN

SEQ ID NO: 20491 - protein, 1086 aa, Zea mays
  VARIANT 382..1086: note = Derived polymorphism lacks residues 382 to 1086
  VARIANT 696..1086: note = Derived polymorphism lacks residues 696 to 1086
MLTGRESLVRLIGRRRRSPLPASLVAALSLPSPSPSTSLAQVEVKPAAPDPRNAPPINISSFSSRQTMGVAREKRPGVRLVRRREEAASLAWARSGWSAPSAAIRSEGRTTASTLTSSAYYLCRPCLSRNACSTRSALTEKCAMPQITGGRSRTKYDYIFYIYMCLTRGTKRKLTQSTLLNFQFSKKVSAEPTINNLNNESETENMKQIDEGLSSDQAFFAFDSEIGSSKAGTTISSPTCMNDSLGTSETITSYAPSNTVLSDAKDAVNDGAGELPTVATSCSFDECAVMDSSTVVVVDTVIVGRRFHENIELREDADITFMRDPQNAKDPDAIKVLHAGSECEEMLGYLPRDLAKVLAPLVDKHHVECEISSDPTVVKDKEICKLDYIKDYGRKAVIFPVFLRRLGEQVHQTTALAPRRGSVVGLHEQQFGNVPIQITIQKCKSDNQRNNDPNCCQSLWENFVSIVKRENFRRPHSARYQTNFNLMIADVMVNHAHVFSDIEKSFLASFKSLSDDGQRLFIRIYTRKGPWFRKGSISYQEISDLEHAVMELELAGYIDMLSCTIDPFEYDMKEILDVLSVPEMKEILKELPKDNTICTRRHELVSTLLSSYRNGTCASLPKRILKWTGTCIRISKMADELLWRIQRLFFLNGDQDLSSFLLVEFGIVKFPDYVCSISHRIFQERNDLLEYEDAIRVAQVMDESLDNNKMDLVTRCIDLSENRLCIMPKRENTITPERLRSFFSRFSASWVYSKILTLGVSVYERDRRYEDAVRILKTLLSTVACDRRRGYWALRLSIDLEHMGRPNESLSTAEGGATDPWVRAGSKFALQRRVLRLSKPPRRWKVPSYADYVKRNIREVSIEGRPLNCETGAKNVFYGYDGELCGVEQLALQYYADEGGGWQGTHSEGSIWMTIFGLLMWDVMFSDIQDVFQSKFQTAPLDLGTDDFYKSRENIAESQLKRIRDGMAEEMLISSWELHQGTSCQGVNWARYSLTDLRAVVACVGGHRLASLLRHLAVDYRSWSSGMPDLLLWRFLDERGGGEAKLVEVKGPRDQLSEQQRAWILVLMDFGFDVEVCKVSPVTKRR

SEQ ID NO: 20492 - protein, 202 aa, Zea mays
  VARIANT 68..202: note = Derived polymorphism lacks residues 68 to 202
  VARIANT 12..202: note = Derived polymorphism lacks residues 12 to 202
  VARIANT 7: note = Ancestral polymorphism is G, Derived polymorphism is S
MVMVSGGGGNAWAKEMTLRRRIASIFNKTQEHFPTLKDYNDYLEEVEDMSEFEFSFQAFNLIEGIDVEEIEAKIARYQQENAEQIYLSRAKRAEDLAAALKASRMNPVKAEANDTAAGSSQGISGGAGVQGQYAPAAVLGGVAQPRPTGMAPQLIGSGSDPLQGDDEETRRLRAERAARAGGWTAELSKRRALEEAFSAIFI

SEQ ID NO: 20493 - protein, 281 aa, Zea mays
  VARIANT 51: note = Ancestral polymorphism is A, Derived polymorphism is S
MATEQAAENYTVEDLVALNPYNPDILNDLEKFVNEQVNPDHRDALFPAGFACGSLGWVGGGGGGYSGSLATSFLQVLWLHSYVFLVTGFLLQFEPERMSIQIVAHILIKALMAMPAPDFSLCLFLIPEHVVLKITSCPFICLSVSLFQQMEEQFKVLIVLSHYLETARFSQFWDEAAKNRHISEAVPGFEQAIQSYAIHVLSLTYQKVPRPILVEAINIEGLALDKFLEYHAANSGWVIEKGGQSQVIVLPRNEFNHPELKKNTADILPFEHVTRIFPVLG

SEQ ID NO: 20494 - protein, 308 aa, Zea mays
  VARIANT 54: note = Ancestral polymorphism is I, Derived polymorphism is F
MAASAGGGAVRALSQKEQDIQMMLAADVHLGTKNCDFQMERYVFKRRTDGIYIINLGKTWDKLQLAARVIVAIENPQDIIVQSARPYGQRAVLKFAQYTGAHAIAGRHTPGTFTNQLQTSFSEPRLLILTDPRTDHQPIKESALGNIPTIAFCDTDSPMRYVDIGIPANNKGRNSIGCLFWLLARMVLQMRGTILPGHKWEVMVDLFFYRDPEEAKEQEEEAAAAPEFAAVTDYQGADQWGGDQWTSDVAAPPVAPTGADWGAAPAPVPTGDGWDQTVAPVPVDGTVPPVVAPTGWESAAQPTAQGWE

SEQ ID NO: 20495 - protein, 184 aa, Zea mays
  VARIANT 35: note = Ancestral polymorphism is R, Derived polymorphism is L
MSIQIVAHILIKALMAMPAPDFSLCLFLIPEHVVLKITSCPFICLSVSLFQQMGEQFKALIVLSHYLETARFSQFWDEAANNRHILEAVPGFEQAIQSYAIHVLSLTYQKVPRPILAEAINIEGLALDKFLEYHAANSGWVIEKGGQSQVIVLPRNEFNHPELKKNTADILPFEHVTCIFPVLG

SEQ ID NO: 20496 - protein, 308 aa, Zea mays
  VARIANT 178..308: note = Derived polymorphism lacks residues 178 to 308
  VARIANT 160..308: note = Derived polymorphism lacks residues 160 to 308
  VARIANT 103: note = Ancestral polymorphism is A, Derived polymorphism is V
MAASAGGGAVRALSQKEQDIQMMLAADVHLGTKNCDFQMERYVFKRRTDGIYIINLGKTWDKLQLAARVIVAIENPQDIIVQSARPYGQRAVLKFAQYTGAHAIAGRHTPGTFTNQLQTSFSEPRLLILTDPRTDHQPIKESALGNIPTIAFCDTDSPMRYVDIGIPANNKGRNSIGCLFWLLARMVLQMRGTILPGHKWEVMVDLFFYRDPEEAKEQEEEAAAAPEFAAVTDYQGADQWGGDQWTSDVAAPPVAPTGADWGAAPASVPTGDGWDQTVAPVPVDGTVPPVVAPTGWESAAQPTAQGWE

SEQ ID NO: 20497 - protein, 605 aa, Zea mays
  VARIANT 472: note = Ancestral polymorphism is S, Derived polymorphism is Y
MHVTNAMALAVRLIGRRRFLPPPLAAAVAHLSAASQSPCHHHHPLPTPALPLPPRELHPFALHWRSFSWYSRSGSGSDSSPGTAAADARGEDVYIEKESVHLDGVTIVDDGGGVVSEAGAAADAVGDAAGATADGVGGVPELAVSTVLDLMDGIHSLTGLPWWMTISFSTVAMRLWILPVLIVQLQKTAEIGEVFRKVSTSLPPPQPGSNFREQYTLFQKKKKELGCPSFIWNFAYFLVQFPCFILWMTSIRSMCLNNHPGFDNGGILWFHNLTEFPHGTLAPIFPILVAGLHYLNVQISFQGSQIKDHPGIFGLLAKYYRIYLNVLTIPLFLVAHVVPQGCLVYWTTNGLFSVAQQLSLRNDAVRKLLGLPDTRAQVGYRAQKSPLEVPEMMQWSQLEDANLQTKSMPSDKGTASESTTPNFAMGSMDGNISASSSPEELLEQALQYLGTGCRDQAIPLIRTAVERNPDLYTALIGMGQTLFSNRLFPEAAVCFEHAIPKIQEDDPLLVLAYFGAGLSNKRQGDNETAIKLLERLAELKEPEKPINKSRYFQGMLALASILYREGRNSEAAKYLRMAIAYDPSVERLLKECEEGMDDQPKPEEK

SEQ ID NO: 20498 - protein, 127 aa, Zea mays
  VARIANT 22: note = Ancestral polymorphism is A, Derived polymorphism is G
  VARIANT 38: note = Ancestral polymorphism is G, Derived polymorphism is R
  VARIANT 46: note = Ancestral polymorphism is S, Derived polymorphism is L
  VARIANT 82: note = Ancestral polymorphism is F, Derived polymorphism is L
  VARIANT 102: note = Ancestral polymorphism is A, Derived polymorphism is D
  VARIANT 111: note = Ancestral polymorphism is E, Derived polymorphism is K
  VARIANT 114: note = Ancestral polymorphism is R, Derived polymorphism is L
MAVAKVKSVAVSVSHKCRNILATGWEAHLNTVKADNKGSKNEIYTSRVHYMIHKGTPYLIVPENDMHNINIIIDERGSLAVFSLIRDRVASLLKPSKDEIEAARMAAINKEIKRVLTEVLSKVLFLT

SEQ ID NO: 20499 - protein, 519 aa, Zea mays
  VARIANT 268: note = Ancestral polymorphism is L, Derived polymorphism is P
  VARIANT 216: note = Ancestral polymorphism is A, Derived polymorphism is D
  VARIANT 72: note = Ancestral polymorphism is P, Derived polymorphism is R
MAAASRQDAHRSTRQAVPASSRVAIIGGGISGLAAAKQLAAHDPVVFEATASVGGVWKHCVYRSTRLQTPRRDYEFSDYSWRNRDDPTFPTHAEIVEYLEGYADAFGLWRYIVLSARVVDIKFLGGGGLTELWSGGAAGQPPLLRGKPLWEFEFVVMCAGKYGDVPRMPAFPPGRGPEVFRGQVMHSLDYCKLGEEETVELMRGKKVVVVGYKKSAIDLALECAQANQGEGGEACTMLVRTLHWVVPSYSIWGLPFFLFYSTRLAQFLYERPNQGLLRSMLCTLMAPLRAGVSKFIESYLAWKLPLDKYGLRPDHPFVEDYASCQMAILPDGFFDMADRDMIRFKRAGPGGWCFSRNGVLLDDGTEVEADLVFLATGFEGKDKVRAVLPEPFRGLVVDRSGMMPLYRGTIHPLIPNMAFVGYVESVSNLHTSELRCRWLAGLLGGRFALPSVEDMVRHVDGEAEAMRRTTRFYKRHCISTYSIHDSDAMCADLGSRVLRKGNCLAELFAPYNNKDYKED

SEQ ID NO: 20500 - protein, 222 aa, Zea mays
  VARIANT 207: note = Ancestral polymorphism is D, Derived polymorphism is Y
  VARIANT 148: note = Ancestral polymorphism is R, Derived polymorphism is G
  VARIANT 143: note = Ancestral polymorphism is A, Derived polymorphism is P
  VARIANT 62: note = Ancestral polymorphism is R, Derived polymorphism is H
  VARIANT 34: note = Ancestral polymorphism is D, Derived polymorphism is N
MIVNHYEMRGNILSYNLGGMGCSAGVIAVDLPRDMLQASGAGLAVVVSTEAVSFTWYPGRRRSMLILNAFFRAGCDCAAVLLSNSRRDFHRAKSWNINNIPFSKKKSAATCWRWVGTGHALKTNITTRGPLVLPFSEQLLFFAGVLFRHLFPSKASTPAPTTAPGDASAAAPYIPDFKRAFENFCMHAASGDVLEHLQSNLSLRNADLKALHKFSLEKEKKI

SEQ ID NO: 20501 - protein, 172 aa, Zea mays
  VARIANT 126: note = Ancestral polymorphism is R, Derived polymorphism is C
  VARIANT 121: note = Ancestral polymorphism is R, Derived polymorphism is W
  VARIANT 104: note = Ancestral polymorphism is R, Derived polymorphism is C
  VARIANT 103: note = Ancestral polymorphism is M, Derived polymorphism is I
  VARIANT 87: note = Ancestral polymorphism is R, Derived polymorphism is M
  VARIANT 54: note = Ancestral polymorphism is G, Derived polymorphism is R
  VARIANT 38: note = Ancestral polymorphism is G, Derived polymorphism is R
MAMAAADGKSRRFALACGVLSQYVKAEQQQQQQMAAPRAPATTTLSLMPGADVGADEQQEAAAAGAEEMPGPAPAAAPPLTIFYGGRVVVFEDFPAEKAAEVMRLAAGDDLPIARKASLQRFLAKRKDRLVERAPYARPSSPAEAVKPASGSASASWLGLRSTEADRLTIAL

SEQ ID NO: 20502 - protein, 484 aa, Zea mays
  VARIANT 191..484: note = Derived polymorphism lacks residues 191 to 484
  VARIANT 127: note = Ancestral polymorphism is C, Derived polymorphism is R
MGGRREAIERELKKLRAEREELDGRIRLLESQLEAGPAGFNGAAAGKGVGDDACGGSGACQSRVGNEFAPDGSLPADMIYRYSRHLLLPDFGVEGQRKLSQSSILVVGAGGLGSPLALYLAACGVGRLGIVDGDDVELNNLHRQIIHKEAYVGQSKVKSAADACREINSSIKVVEYHHTLKPCNALEVARKYDIVVDATDNLPTRYMISDCCVLLNKPLVSGAALGLEGQLTVYHHNGSPCYRCLFPTPPPVAACQRCSDSGVLGVVPGVIGCLQALEAIKVATGVGEPLCGRMLLFDALSARIRVWPMAFETMFEDSSYLQVKLRGSSPDCTHCGENSVFTEEDFQKFDYESFTQSPMSDKAAPSVNVLPESARITCREYKKLADDGEPHLLLDVRPAHHFQIASISPSHNIPLSMLEEKLPALEASLKEAGEGSALVVLCRRGNDSQRAVQLLREKGFASAKDIIGGLQAWGRDVDPDFPVY

SEQ ID NO: 20503 - protein, 524 aa, Zea mays
  VARIANT 458..524: note = Derived polymorphism lacks residues 458 to 524
  VARIANT 469..524: note = Derived polymorphism lacks residues 469 to 524
MCIPMSFTDPIPDHRLKAMATERRRASVVVLGDIGRSPRMQYHSLSLANQASMEVDIVANGGSDPHLSLRENPSIHIHEMKTVQLTGISKISGALSLLLKAAVQFILLVWFLCFKIPRPDVFFVQNPPSVPTLAAVKLASWLRGAKFIVDWHNFGYTLLGLSHGRSHIIVKIYFWFEKYFGQMADGAFCVTKAMQHELAQNWGIRATVLYDQSPDFFHPASLMEKHGLFSRLGNSMCSAMGNADCISVEEVGEDMNTTAFTSKIDGQVFLKPNRPALVVSSTSWTPDEDFSILLEAALMYDRRVAAALGEDDSMDEGQLWIDIKNGKQFVYPRLLFIITGKGPDRKKYEDQIKRLKLRRVALRTMWLASEDYPLLLGSADLGVSLHTSSSGLDLPMKVVDMFGCGLPVCAASFSCIEELVKVNKNGLLFSTSSELADELMMLFKGFPEECNALKSLKEGAMKSASSSKWSTEWETNALPLVDQANDQTLLARIVVTLISLGLTFFYFMSKFAGHWMRCVLTYIR

SEQ ID NO: 20504 - protein, 130 aa, Zea mays
  VARIANT 41..130: note = Derived polymorphism lacks residues 41 to 130
  VARIANT 67: note = Ancestral polymorphism is A, Derived polymorphism is E
  VARIANT 96: note = Ancestral polymorphism is P, Derived polymorphism is R
MSAAATAGGQEVAPATVAVAEAEEWEVCACCGLREECTPAYAAGVRARYGGRWLCGLCGDAVGDEVAAGAGSALEVEAAIAGHAAFCRALGGRRTPDAAERLIAAVRRLLRNAGGREDKSLVLVEFQEAS

SEQ ID NO: 20505 - protein, 264 aa, Zea mays
  VARIANT 13: note = Ancestral polymorphism is R, Derived polymorphism is C
  VARIANT 35: note = Ancestral polymorphism is G, Derived polymorphism is V
MSTSLSSSHKRGRDVDAAPSALWVRMDKEFLAAQGLLKRARLLPRLRSAGPSAADKKKCAPAPASRRSGAPEVVPSTAPKRTTSSQPKALKAATEAADRTRIAAPAANSTQQQRAGAAAKNPIPPAVRPSKNLPPAEAPAAANSKQQQRAGAAAKNPIHPAVRPSKNLPPAEAPAAAKQQQHPAVQRAVAAETEKSALPDEIEKSRKEFRRMLEEMEKLALPDQTIYPEDLEELGLTPVEHVVTRTRKQARLEDHAKRFRSLRS

SEQ ID NO: 20506 - protein, 259 aa, Zea mays
  VARIANT 35: note = Ancestral polymorphism is G, Derived polymorphism is V
  VARIANT 41: note = Ancestral polymorphism is K, Derived polymorphism is R
MSTSLSSSHKRGRDVDAAPLALWVRMDKEFLTAQGLLKRARLLPRLRSAGPSAADKKKCAPAPASRRSGAPEVVPSTAPKRTTSSQPKAATEAADRTRIAAPAANSKQQQRAGAAAKNPIPPAVRPSKNLPPAEAPAAANSKQQQRAGATAKNPIPPAVRPNKNLPPAEAPAAAKQQHPAVQRTAVAAETEKSALPDEMEKSRKEFRRMLEEMEKSAQPDQTLYPEDLEELGLTPVEHVVTRTRKQAWLEDHAKRFRSS

SEQ ID NO: 20507 - protein, 237 aa, Zea mays
  VARIANT 24: note = Ancestral polymorphism is R, Derived polymorphism is C
MAASSADPAQHHASSRPPLLLAVRHLPFPGVPRTRTFPVPGPDVLAPLARRLEELASAAAAHPLLKPLFAAHSHLSSFSQRSRREPTPLWFDGASHEQGRRRLVAARRATVLSSGELCFAAVLGDSVAGTVVASGINNFLNLYNTVLVVRLVLTWFPNTPPAIVAPLSTILAFLVLNAFTSTAAALPAELPSCSATAQHHQRTAVSPCSAPHEATLSQRKWMRRMRSQKPQGDDGDH

SEQ ID NO: 20508 - protein, 371 aa, Zea mays
  VARIANT 206: note = Ancestral polymorphism is P, Derived polymorphism is L
  VARIANT 110..371: note = Derived polymorphism lacks residues 110 to 371
  VARIANT 90: note = Ancestral polymorphism is P, Derived polymorphism is L
MSARDRETAEALVRLAASLDGAVLGLGTAAVAVASWVKYLAVSGQLRLVASAATASIADARSLLSGDGAEPRIAAVRGYVRAHDKFFRAPFSGEAGVVTKHTQMCLFTEWRGIFGWTFDLHALLFRSWKEQIVTSFRSVPFVLVSTELGNPTGVVHINVDKADQPLPLTTVFHKLIPLETTPYTLFQTIIGNGYPIALLDEEKILPIGKKITAIGLCQAKDAESVEITSCPEIPFFLSELTKDEMQAQLASRARILFWGSIVLGTLSVCLVGHAIYRGWTRIKLRREARHARQMFEEAEDAIHRDDSSDDDEIGDGQLCVVCLRKRRRAAFIPCGHLVCCSECALTIERTPHPLCPMCRQDIRYMMRVYDS

SEQ ID NO: 20509 - protein, 304 aa, Zea mays
  VARIANT 275..304: note = Derived polymorphism lacks residues 275 to 304
  VARIANT 223..304: note = Derived polymorphism lacks residues 223 to 304
  VARIANT 216..304: note = Derived polymorphism lacks residues 216 to 304
  VARIANT 206: note = Ancestral polymorphism is P, Derived polymorphism is S
  VARIANT 198: note = Ancestral polymorphism is H, Derived polymorphism is L
  VARIANT 180: note = Ancestral polymorphism is I, Derived polymorphism is N
  VARIANT 16..304: note = Derived polymorphism lacks residues 16 to 304
MATGAVTPPPLAGARRFPRGRSFLHRRLATSPMKDESVISTDGGNEETDTDSLHVARGLSHPGLSSSLSNKASVVPTPLLPSGQSDLRFNRLRPSIDESDCKYKRLFGCYVAREAVIDEEYWIAAWLRAEDQYENESGNRYVESFKRKFASKEFHALKKRCNTQHREKYICLVAVKNDDIRRTVLNSVVGTLDVCVRHPLYGEKFPEEPGKPSLHCRIYQPDQPKFGYVTNVCVAKYARRQGIASNMLLLAIDAAKLNGAENIYIHVHKDNLPAWRLYDQIGFKIVDQDDDCRSSDLCLLSFSS

SEQ ID NO: 20510 - protein, 330 aa, Zea mays
  VARIANT 171..330: note = Derived polymorphism lacks residues 171 to 330
MSFGTVGMEEESGAAAAAAAAEEIRRLPAEVNWEMLDKSRFFVLGAALFSGVSAALYPAVVVKTHLQVAPPPQAARATAAAILRRDGLRGFYRGFGASLGGTVPARALYMAALEATKSSVGPAAVRLGVSEPAASAAASAAAGVSAAVAAQVVWTPVDVISQRLMVQTPACCRYRGGVDACRKILLADGVRGLYRGFGLSILTYAPSNAVWWSTYAVAQRCLWRAVGPERSESCASLMAVQGASAAVAGGAAALVTMPLDTVKTRLQVMEADAARPTLASTVRGLLREGGWAACYRGLVPRWGSMSLSAATMVTTYEFLKRLSAKDGSLG

SEQ ID NO: 20511 - protein, 322 aa, Zea mays
  VARIANT 104: note = Ancestral polymorphism is S, Derived polymorphism is F
  VARIANT 44..322: note = Derived polymorphism lacks residues 44 to 322
  VARIANT 36..322: note = Derived polymorphism lacks residues 36 to 322
  VARIANT 20: note = Ancestral polymorphism is G, Derived polymorphism is S
  VARIANT 13: note = Ancestral polymorphism is G, Derived polymorphism is D
  VARIANT 8: note = Ancestral polymorphism is R, Derived polymorphism is H
MQSYGRKRAWKKGPTRGKGGPQNAACEYRGVRQRTWGKWVAEIREPNKRTRLWLGSFATAEEAALAYDEAARRLYGPDAFLNLPHLRASAVSSAAAHQRLRWLSASARGAAAVPAYGLLNLNAQHNVRVIHQRLQELKNNGSPAKPPPSPSLRVSPSAPHKQLAPADHLPAVATTSPCSIVVVTHVHAAPAMSCFHALEQTVATVAMRTVDDAEPCEGGACPPAADKPQIDLREFLQQIGVLNTDDDGITATAKAAFHAAGDAAVSCFVSGNGDFDWDVLAADLNDIAGAHGGANGGVQMDDLHEHAVDQFGTCLPIPVWDV

SEQ ID NO: 20512 - protein, 124 aa, Zea mays
  VARIANT 9: note = Ancestral polymorphism is V, Derived polymorphism is M
  VARIANT 42: note = Ancestral polymorphism is G, Derived polymorphism is D
  VARIANT 48: note = Ancestral polymorphism is V, Derived polymorphism is I
  VARIANT 58: note = Ancestral polymorphism is L, Derived polymorphism is R
  VARIANT 63: note = Ancestral polymorphism is V, Derived polymorphism is E
MRSLLPLLMAALVAVTAFPDGADAVWTPIANPPGTLLVKQVGNFTVIVYSNAAPRRHRPLQLVTVVRGETQPVGNGVTDYRLVLAVNNTDTGSTAMYQCVVRGKPGSRATTWVLRSFALYTQAA

SEQ ID NO: 20513 - protein, 525 aa, Zea mays
  VARIANT 259: note = Ancestral polymorphism is R, Derived polymorphism is W
MELSLTSSAALQFVLLLPLFSVLCILYLRQDPKKQPRAHGLKVYPLVGTLPHFVKNQRRFLHWSTDVLKRDPSHTLSFKALGLTGGVITANPANVEHILKTNFANYPKGELTVSMIEDFLGHGIFNSDGEQWLWQRKAASYEFSKRSLRSFVVDAVRFEVVERLLPLLDRAQRDGRTLDVQDVLERFALDNICRVAFGDDPACLAEEEGMGMAMAAQQRQSAEFMRAFNDAQSAIMARFMSPVKSLWRLKRLLNVEPERRMREAVRTVHGYADRIIRERRARGEAAGPARDDDFLSRFAASGEHSDESLRDVVTNFLLAGRDTTSSALTWFFWLVSTRPDVEEKIVREVRAVRRLGSAGAAAPAFSFDELRDMQYLHAAITESMRLYPPVAMDTHSCKEDDFLPDGTFVGKGWLTTYSAFVMGRVEDIWGADCEEFRPERWVGEDGAFRPESPFKYPVFHAGPRMCLGKEMAYIQMKSIAACVLERFSFQFVGGGERPGLVLSLTLRMQGGLPMKVVTRTNSALG

SEQ ID NO: 20514 - protein, 147 aa, Zea mays
  VARIANT 109: note = Ancestral polymorphism is D, Derived polymorphism is N
  VARIANT 115..147: note = Derived polymorphism lacks residues 115 to 147
  VARIANT 131: note = Ancestral polymorphism is M, Derived polymorphism is I
MIILKKNSNEICKYLFKEGVLYAKKDYNLAKHPQIDVPNLQVIKLMQSFKSKEYVRETFSWQYYYWYLTNDGIEHLRNYLNLRSEIVPATLKKSAKPPGRPFGSGPPGNRPRYHWLFFRHNMYQLRQERDIKHETFAILSLGRSYSQ

SEQ ID NO: 20515 - protein, 184 aa, Zea mays
  VARIANT 1: note = Ancestral polymorphism is M, Derived polymorphism is V
  VARIANT 64..184: note = Derived polymorphism lacks residues 64 to 184
  VARIANT 116: note = Ancestral polymorphism is A, Derived polymorphism is V
  VARIANT 168: note = Ancestral polymorphism is G, Derived polymorphism is D
MVRPWVLVVLPLMLATLLIATTNAQNYIEPAPSPLPDSPSPPPPPPPEPSTAPPPASTPTPAGSSPPPPAPPASSPPPPPSPASFPSPPPPPARASNWTPVANANDPKIQQVAQFAVRIYAISKKELKMQFQNVVSGETQPCDGGYNYRLVITVRGGKKAQYDAFVWGIQRTTSWKLLSFTPKY

SEQ ID NO: 20516 - protein, 84 aa, Zea mays
  VARIANT 69: note = Ancestral polymorphism is P, Derived polymorphism is S
  VARIANT 66..84: note = Derived polymorphism lacks residues 66 to 84
  VARIANT 32: note = Ancestral polymorphism is G, Derived polymorphism is A
  VARIANT 15: note = Ancestral polymorphism is K, Derived polymorphism is T
  VARIANT 13: note = Ancestral polymorphism is E, Derived polymorphism is D
MADIALLVAEQFEKTARRGAPGGDSGSSSGSGGETRNFGAVAKVWSSWVESASAAASGVRFTVAVQLEPKTGLALAAADGLFSA

SEQ ID NO: 20517 - protein, 1006 aa, Zea mays
  VARIANT 686: note = Ancestral polymorphism is G, Derived polymorphism is S
  VARIANT 653: note = Ancestral polymorphism is R, Derived polymorphism is C
  VARIANT 608..1006: note = Derived polymorphism lacks residues 608 to 1006
  VARIANT 594..1006: note = Derived polymorphism lacks residues 594 to 1006
MAGSTVFPVLRSSEYFTSPSIDELVEREVADPGYCSRVPNFIIGRAGYGQVRFLGNTDVRGIDLNEIVRFEKHYVVVYEDETCKPPVGHGLNKAAEVSLLLNPKDHPEPSILVEVLRCRARKQGSRFLSFNPVNGRWKFEVDHFSRFGLVDEDEEDAVMDEAAVRQPITEVRERDPPSNSYEIELSHSLPAHLGLDPAKVQEMRMVMFSNEEEDEYMEDGFPSDKRYLSRERMNVDSPTSSSKGSRLRSLSPLHMSSQKAGRRSGMPVRKERQALLEYNLNSSELGSSNQGILMSGQNRGFPVSMTKVEGFKLPPEQETPVAGNTYTVCVVDAALFMGRSFRVGWGPNGLLVHSGSLVNSPGTGLSSVIHIEKVASDKVVRDDKDKIKDDLTELCFSAPMDLHKSLDHDFLETESDSFRLKLQKVMTNRLVLPDICRSYIDIIERQLEVNDLSMSSRVLLMHQVTVWELIRVLFSERATGSQLDSVGDDDQEGMVLDKKEGSVDIDPEALPLFRRADFSNWLQDSVCHRVQGEVGSLNDARYLENILVLLTGRQLDTATEIAASRGDVRLAILLSQAGGSMSNRSDLAQTLDQWKMNGLDFDYIEEDWLKVYMLLAGNVQAAFLDLPIDWKRYLGLIMWYQLSPDTPLDIIIRSYDQLLGEGKVPYPVPVYIDEGPLDEAPQWSPGDHFDISFYLMLLHANKDEKFGLLKTMFSAFSSSFDPLDYHFIWHQRSILEAVGAFSSKDLHLLDLSFVYQLLCLGRCHWAIYVILHMPYLDDAPYIHEKLIREVLSQYCESWSRDDAQRQYIVELGIPEEWMHEALALYHEYYGDKQGALENLIQCGNWKKAHTIFVTSVAHSMFLSSNHQEVWRITSALENHKYEIADWDLGAGIYIDFYVLKNSMQERNAMDDSDSLEEMSESCRSFFGRLNESLLVWGSKLPVESRACYSKMAEELCALLVDTPSETLNLPMGCLLTMLNAPVPDESRSSYLQDALSVFTEILCSDP

SEQ ID NO: 20518 - protein, 184 aa, Zea mays
  VARIANT 81: note = Ancestral polymorphism is L, Derived polymorphism is V
  VARIANT 97: note = Ancestral polymorphism is S, Derived polymorphism is P
  VARIANT 120: note = Ancestral polymorphism is A, Derived polymorphism is D
  VARIANT 131: note = Ancestral polymorphism is T, Derived polymorphism is R
  VARIANT 132: note = Ancestral polymorphism is S, Derived polymorphism is Y
  VARIANT 141: note = Ancestral polymorphism is G, Derived polymorphism is D
  VARIANT 173: note = Ancestral polymorphism is S, Derived polymorphism is Y
MPPPSTAAAVSSIIRPTPPPAVSFHPVPLPQIRRRSSAGAAAASRLAVARAAASGARGGGDAETVFFDGGAHYGDLAANLLLGLTLLWLPLTLAAVSRAFILRYRFTSRRVTVVSGLSGADRTDFPYSSVTSVVVVPRFVGEWGDIVITLRDGTKVDLRSVPRFREVADYCRSMAAAEGSLVVS

SEQ ID NO: 20519 - protein, 456 aa, Zea mays
  VARIANT 160: note = Ancestral polymorphism is L, Derived polymorphism is P
  VARIANT 162..456: note = Derived polymorphism lacks residues 162 to 456
MGNCIDTTARVDHSMNNAAFLLMHIFSWLLVERSDPSKVTSKTSLSSVPSTIKSNSSRSTLTLPSMRDRNELPTPRTEGEILSSSNLKAFTFNDLKNATKNFRPDSLLGEGGFGHVYKGWIDEHTLAPSRPGSGMVVAVKKLKPEGFQGHKEWLTEVDYLGQLHHKNLVKLIGYCSDGDNRLLVYEFMPKGSLENHLFRRGADPLSWAIRLKVAIGAARGLSFLHDAENQVIYRDFKASNILLDSEFNAKLSDFGLAKAGPTGDKTHVSTQVMGTHGYAAPEYIATGRLSAKADVYSFGVVLLELLTGRRALDKSKPGFEQNLVDWARPHLGDKRRLYRIMDTKLGGQYPKKGANAIASIASQCICGDAKLRPPMSQVLEELEQLQDAKYGAPSPLVDIRKASHAAPKSPMTSTPKSPLSSTPKSPMRAQPAARPSPRRSLGAAAPLAGYRTAQVH

SEQ ID NO: 20520 - protein, 423 aa, Zea mays
  VARIANT 330: note = Ancestral polymorphism is V, Derived polymorphism is I
  VARIANT 251: note = Ancestral polymorphism is G, Derived polymorphism is D
MASSSSLASAKALARSHASLLAPQTQRTGFSRPVPQSGPCLAAPCDRAGQFKLLPFDDPSSAVTLPMASALQRLGRASAVALAPRLRQDARLCCRAGGAEEDRLGVDREPAATARINALFIDGPGIFDEENQKVAVISQVSSPGELDLVQPDNAEAENIVIDFRGGWQVIRAENIVAAFQGCKGNVLAVSTNTTEAQVFLEALEQGLDGVVLKVDDMDDIIKLKDYFDRRNEAKSQLPLTKATVTKVEVVGMGDRVCVDLCSIMRPGEGLLVGSYARGMFLVHSECLETNYIASRPFRVNAGPVHAYVTVPGGKTSYLSELGSGKEVIVINQSGLWRTAIVGRVKIESRPLILVEAKDNSGDETYSIFLQNAETVALITPNTGSSGRTAIPVTSLKVGDEVLVRKQGAARHTGIEIQEFIVER

SEQ ID NO: 20521 - protein, 123 aa, Zea mays
  VARIANT 24: note = Ancestral polymorphism is V, Derived polymorphism is L
  VARIANT 25: note = Ancestral polymorphism is D, Derived polymorphism is H
  VARIANT 26: note = Ancestral polymorphism is A, Derived polymorphism is T
  VARIANT 30: note = Ancestral polymorphism is D, Derived polymorphism is A
  VARIANT 42: note = Ancestral polymorphism is G, Derived polymorphism is E
  VARIANT 55: note = Ancestral polymorphism is L, Derived polymorphism is F
  VARIANT 56: note = Ancestral polymorphism is D, Derived polymorphism is A
  VARIANT 59: note = Ancestral polymorphism is P, Derived polymorphism is S
  VARIANT 70: note = Ancestral polymorphism is R, Derived polymorphism is G
  VARIANT 75: note = Ancestral polymorphism is A, Derived polymorphism is T
  VARIANT 96: note = Ancestral polymorphism is W, Derived polymorphism is S
  VARIANT 116: note = Ancestral polymorphism is I, Derived polymorphism is F
MAGCCVFLRWPSASPSRIGYRSLVDAAADAAAPPSTVTVVVGKERRAFAVDRLVLDSYPLRLLLETAARREERRAGGGAGAIFVDVDAILFEHILWLACDARSVSQILHLDLKEIIDFYAQDA

SEQ ID NO: 20522 - protein, 424 aa, Zea mays
  VARIANT 17: note = Ancestral polymorphism is S, Derived polymorphism is L
MWRGGSTAASAARALRSRLLLDPIHHPATSLAPIASARTSSSSTPSTAAANTIVEEAAAAVSVSQHTGSISDSLRHYGKCYWELSKARLSALVVATSGAGYVLGSGNIVDIAGLCCTCAGTMMVAASANTLNQVFEIKNDAKMKRTMRRPLPSGRISPAHAAMWATSVGVAGTALLAWKANGLAAGLAASNLVLYAFVYTPLKQIHPVNTWVGAVVGAIPPLLGWAAASTELSLNAMILPAALYFWQIPHFMALAYLCRNDYLAGGYRMFSFADPTGRRTAWVSLRNCLYMLPLGLFAYNWGLTSEWFSFEASLLTLGLTIGALSFVLEPSPKTARRMFYGSLLYLPAFMSGLLLHRLPSEQKAHNLAENNELDGVLYGADLQDEERARQKRQDTKPSRVQSLPPVSYASVAPFPFLPVPIYES

SEQ ID NO: 20523 - protein, 555 aa, Zea mays
  VARIANT 304..555: note = Derived polymorphism lacks residues 304 to 555
MELEGPWARVLHLHDACEWGRAVRARAVAPALEAAAWACLAMSVMLVLEVCYMSVSSFVAVNLLRRTPQRRYSWEPMPSGTARGDDEEAAVGDGGGEAYPMVLVQIPMYNEREVYKISIGAACALTWPPDRIIIQVLDDSTDPFIKELVEFECKDWASKKINIKYEIRESRKGYKAGALKKGMEHSYAQECDFVAIFDADFQPDPDFLLRTIPFLVHNPKIALVQTRWEFVRTFVHSDYRMFLTWPLPGNFAVNYNICLLTRIQKMSLDYHFKVEQESGSSVHAFFGFNGTAGVWRVSAIGEAGGWKDRTTVEDMDLAVRASLKGWQFLYVGDIRVKSELPSTFKAYRHQQHRWTCGAANLFRKMAGDIVISKASILEPIFFFVRRVIAPILTFLFYCVVIPLSVMVPEVSIPAWGMFYIPTAITIMTAIRNPWSIHLVPIWILFENVMSMHRMRAALTGLLETTYVDEWVVTEKVGDHVKDKLEVPLLTPVKPTECVERIYLPELLVAFYLLLCASYDVVLGAGHYYPYIFLQAFAFLVLGFGFAGTVTPCSCS

SEQ ID NO: 20524 - protein, 761 aa, Zea mays
  VARIANT 645: note = Ancestral polymorphism is S, Derived polymorphism is P
  VARIANT 341: note = Ancestral polymorphism is T, Derived polymorphism is M
  VARIANT 337: note = Ancestral polymorphism is I, Derived polymorphism is M
  VARIANT 315: note = Ancestral polymorphism is S, Derived polymorphism is L
  VARIANT 222: note = Ancestral polymorphism is R, Derived polymorphism is L
MAVTFPSPTPRSPRRPDAIVAPDPSSADMSPSLDFGDPTSFTALRVLTDGGAATRLLHECVAYQRALDARLDALLARRADLDRAAASLLRSAPPLLSLAASDAAALKESSSSTAALADALSSRVRHLDAAHSRADAALARAEAALDRSRALEATRRALAADDLAAAATAAHEFLAIDARFPTDDDLRRDLIDIKRRLEGLARRRLAAVVDAQDHPAVLRLVRLFPLLGLADEGLQVYVAYLKKVVALRARADFEHLAELTSATQPTSDRPDFVGCLTRLFKDIVLAVEENDGVLRELRGDDVAYAIIELQEECDSRGTQILRRYADYRKLARLASDINSYTKNLLSVMGSMASAAGGNEGPDPREIELYLEEILALTQLGEDYTEFMVNKIRVLRDVKPELGPRAMKAFRNGNFNKMEQDLTGFYVIFEEFFMVENVRKAIRIDEPISDGLTTSMVDDVFFVLQSCCRRATSTASINSVIAVLGGATSLLSNEYQEALQWRMREPNLGAKLFLGGVGVQKTGEEIATALNNIDISSEYVLKLRHEIEELCVEIFHTPADREKIKSCLSELGEISASFKKILHSALEHLVASVAPRIRPILDTVATVSYGLDDAEYGENEVNDPWVQKLILAVNTNVAWLQPVMTSNNYDSFVHLIIDFIVKRLEVIMMQKRFSQLGGLQLDKEVRSLINHFSEMSQRPVRDKFSRLSQMSTILNFERVSEILDFWGDNAGHLTWLLTPAEVRRVLGLRTDFRPEAIAALRL

SEQ ID NO: 20525 - protein, 183 aa, Zea mays
  VARIANT 95..183: note = Derived polymorphism lacks residues 95 to 183
MALLPAAPRAPGPSPYDLADRLRDQPRLLASATSRRRRRARARVPHDRGDGETRRSHGERQGQEPSAAEEVQRHGDEAQALGVLLQPAALRRSRRRPQQGDPLLRQHAAEVHLRRPALRHGDKEAARRLGEELVRVCNELGISEISYDRNGFARGDKKMTAFEVPDFRSHSMGSCQDRLCSLH

SEQ ID NO: 20526 - protein, 329 aa, Zea mays
  VARIANT 284: note = Ancestral polymorphism is V, Derived polymorphism is E
  VARIANT 230: note = Ancestral polymorphism is R, Derived polymorphism is W
  VARIANT 161..329: note = Derived polymorphism lacks residues 161 to 329
  VARIANT 134: note = Ancestral polymorphism is R, Derived polymorphism is C
  VARIANT 118: note = Ancestral polymorphism is V, Derived polymorphism is D
MGDRRVLLVASPEVAVFGYDGVVSLASVQDAVDTVPLNNQTRTVIRIGPGVHQQQVRIPRTKNFITLCGSSIKDTVICWDNRTTTCIKHTQPSGAIGTGTLSSATVIVEGDDFIAENVIFKNSAPQSGQAAAVRVTADRCAFYDCRFLGWQETLHLHGGKQLLKNCYVEGSYDFIFGDSAALLEHCHIHCKSAGYITAHGRKSSSEPTGFVFFKCVITGNGEAAYMYLGRPWEPFGRVVFAETFMDRCIEPAGWHNWDKPDNEQTACFYEYRCSGPGSSSSGRERWCKELFGDEAMPFLAQTFIDPDIENPWLVHRLGTPVPVSASSLE

SEQ ID NO: 20527 - protein, 458 aa, Zea mays
  VARIANT 340: note = Ancestral polymorphism is R, Derived polymorphism is H
  VARIANT 395: note = Ancestral polymorphism is L, Derived polymorphism is S
MVRSRPRVWLVAGCAAVLLWASVAQLVAVGRLLLLFGLAGDAVSSPPPTALPPPRIYKSNGYLKISCNGGLNQMRSEICDMVAVARLLNLTMVVPELDKRSFWADQSNFGDIFDVKHFIDSLRDEVHIIEQLPEKLGPRDSDIIILEMSPVSWSDEKYYLHQILPLFSKYSVIHFNKTDARLANNGISTEIQLLRCRVNFHALKFTPQIEGLGNELVHKLRAKGSFVALHLRYEMDMLAFSGCNHGLSPEEAEELKKMRYAYPWWRDKEIDSQAKRLQGLCPLTPEEASLVLKALGFQKDALIYIAAGEIYGGDRRLEPLRAAFPNLVRKVMLLNSEVLRQFQNHSSQMAALDFIVSTASDVFIPTFDGNMAKLVEGHRRFLGFRRSVVLDRRKLVELLDLYTNKTMSWDNFASSVQEAHKNCVAQPSCRRELKNRPKEEDYFYANPHECLANSTLCS

SEQ ID NO: 20528 - protein, 149 aa, Zea mays
  VARIANT 10: note = Ancestral polymorphism is I, Derived polymorphism is F
  VARIANT 14: note = Ancestral polymorphism is V, Derived polymorphism is D
  VARIANT 15: note = Ancestral polymorphism is R, Derived polymorphism is M
  VARIANT 36: note = Ancestral polymorphism is R, Derived polymorphism is M
  VARIANT 49..149: note = Derived polymorphism lacks residues 49 to 149
  VARIANT 89: note = Ancestral polymorphism is Y, Derived polymorphism is C
MASGSSRPQIDQFVRLKKGHEQRGHLLSFSIFTIGRILVALLTVLERFGDFTISWLPFYLEVKLLFFVYLWYPKTKGTTYVYGTFFKPCISQHENEIDRNLLELRARATDMVVLYFHKAASVGQNTFFDVLKYVAAQSPSWKSRQHPHQ

SEQ ID NO: 20529 - protein, 1519 aa, Zea mays
  VARIANT 1232..1519: note = Derived polymorphism lacks residues 1232 to 1519
MAATPAWDWEESLVFFLQPFFLHGVSAAAHLILALAVAGRLLFRRLSASRTKDGEVGGGDASRGVGRFRYWYGVSVCTTWAMGAFEVLLAVYSWYANGGAGWSRDAVVEQVDAAARAVSWLLLAAYLQFDFWWRRQRQERFPVALRLWLALFMLLSVVTVGVHAAMILDGSLVPGRSWALDAVSVTAAAVLLSVSAGFFGRKEGEGGGHASEAHEPLLNGAHEGSGDDDENSSSAADASLFTGAGFLSVLTFSWMTPLLGVGHRKTLVPEDVPGLEPGDSVAGVLPPFKANLEALTGDGGRSSRKAVTAFKLTKALLRTLRWHVAVTAFYTLVYCVAVYVGPYLIDSLVQYLYLNGDERYASKGQLLVLAFVVAKVLECLSQRHLFFRLQQAGIRARSALVAVLYQKSLALSSQSRRSHTSGEMINIVSVDADRVGIFSWYLHEVWQVPLQVVMAMFILYSTLGVASLAALGATVATGLATVPLGRMQERFQEKLMDSKDGRMKATSEILHSMRILKLQGWEMRFLSKIIELRKTEANWLKRYLYTSATMTFIFWGTPTFVAVVTFGACMLMGIPLETGKMLSALATFRVLEEPIYELPGTIAMVIKTKVSLDRIASFLCLDELPSDAVQRLPRGSSADFAVSVGNGCFSWEASPDAPTLKDLNFQARPGMRVAVCGTVGSGKSSLLSCILGEIPKLSGEVRTCGTTAYVSQSAWIQSGKIQENILFGMEMDRDKYDRVLESCALKKDLENLPFGDQTVIGERGINLSGGQKQRIQIARALYQDADVYLFDDPFSAVDAHTGSHIFKECLLADLASKTVVYVTHQIEFLPAADLILVMKDGRIAQAGRYDEILGSGEEFMELVGAHEESLTALDVVDAMNENEANVSSSPSSRIETPNLSRSLSLAEKKHGATNEAEGDDDDARSGQLVQEEEREKGRVGFWVYWEYLTQAYKGALVPLVLLAQTLFQIMQIASNYWMAWATPASKDAEPPVSAPTLLFVYVVLALGSSLCILVRSLLLATAAYKTATLLFNKMHLSIFRAPMSFFDSTPSGRILNRASTDQSEVDTNIADQMGTVAFSIIQLVGITAVMSQVAWQVFVVFVPVFAACVWYQRYYIDTARELQRLVGVCRAPIIQHFAESIAGSSTIRSFGKEDQFVSTNSRLTDAYSRPKFYNAGAREWLCFRLDVLSSLAFAFSLIFLINLPAGLIDPGIAGLAITYGLTLNTLQAQVVWSMCTLENKIISVERILQYMGVPAEPPLVMPENKLAQSWPSNGEIQLQNLHVKYAPQLPFVLKGLTVAFPGGVKTGIVGRTGSGKSTLIQSLFRIVDPAVGQIVIDGIDIRTVGLHDLRSRLSIIPQEPTMFEGTVRSNLDPLGEYSDDQIWEALDCCQLGDEVRKQELKLDSPVVENGENWSVGQRQLVCLGRVILKRSKVLVLDEATASVDTATDGLIQRTLRRQFKETTVITIAHRITSVLDSHMVLLLDNGVAVEHDRPDKLLEDKSSLFSKLVAEYTMRSVLT

SEQ ID NO: 20530 - protein, 493 aa, Zea mays
  VARIANT 84: note = Ancestral polymorphism is G, Derived polymorphism is S
MSMADAKDDAAMAEAQPLGRWPVLSYGVGHMLNDITSACWFTYLLLFLQQIGLAPRAAAVVMLSGQVADGLMTILAGEMIDRFGRFKLWHIGGSVLVGFSFSSVFGGCLLCTILGTDSYLVRTVGYSFFAAVFNVGWAATQVSHMSMVNCMTLNPTSRVALASCRNASTMVANLGLYGIALGVFGAIKAKEYSDIVTQYRWIAYLSIFIGCCFLVVFHAGTKEPTLKSEPSCKKAARISWGYWFKKTLYYQVALLYMLARLITNVSQSLIAFYVTRDLRMNEYSKAIIPAIIFCCSFFVSIVLQVQTQHLTNVILYCTAKLSISLRSPIYATACCCATTQEIKWTSRRLKSLLTVGATLWVISGVAVFVLPSQMNSLMYPLAMVIGAANALVMVTTIGLEGALVGEDLNGCAFVYGSLSFLDKISCGIALFALESYEDTMVSYGETRGLNTVSRYGTGLIPSCFAVLSLVVTSTLRLQDDTPRAAALDAPLLV

SEQ ID NO: 20531 - protein, 339 aa, Zea mays
  VARIANT 123: note = Ancestral polymorphism is E, Derived polymorphism is K
MEPMNVDNGGSGGLDAQIEQLMQCRPLAEQEVKALCEKAKEILMEESNVQPVKSPVTICGDIHGQFHDLVELFRIGGKCPDTNYLFMGDYVDRGYYSVETVTMLVALKVRYPHRITILRGNHESRQITQVYGFYDECLRKYGNANVWKTFTDLFDYFPLTALLVFSQHHGIVCASMYSTDTAFIFFFKVESEIFCLHGGLSPSIENLDSVRSLDRVQEVPHEGPMCDLLWSDPDDRCGWGISPRGAGYTFGQDISEQFNHTNNLKLVARAHQLVMEGYNWAHEQKVVTIFSAPNYCYRCGNMASILEVDDCNSHTFIQFEPAPRRGEPDVTRRTPDYFL
